United States Patent Application Publication US 2008/0034453 A1 - sequence listing, part 7

SEQ ID NO: 55147 - DNA, 277 bp, Zea mays
ggtgagttgaagcttccaagtcgctaccttgtttccccaccagagatagatagaacatctggggagtacttggtgaagaatggcatccgcacctttgcttgcagtgagacagtgaaatttggccatgtcacatttttctggaacggcaaccgctcgggatactttgatgaaactaaggaagagtatgtagaagttcctagtgacagtggtattacattcaatgttgcacccaagatgaaggcgcttcaaattgctgagaaagctagggacgctctcc

SEQ ID NO: 55148 - DNA, 278 bp, Zea mays
agcgcatccagtccaaacacacaccggtcgaatcgagcaatggccgcggggctgcaggtgttcggacagccggcttccaccgacgtcgccagggtgctgacctgcctcttcgagaagaacctcgagttcgagctcgtccgcaccgacaccttcaagaagtcgcacaagctccccgagttcatcaagctgagggatcctaccgggcaggtgactttcaagcacggtgacaagacaatcgttgattccaggactatctgccggtacctgtgcacgcagtt

SEQ ID NO: 55149 - DNA, 274 bp, Zea mays
ttcccatctgtgaattggctcatttcctattcgaaatactccaaggcccttgagtctttttacgagaaatttgatccagatttcattgatattaggacaaaagcacgtgaggtgttgcagagggaggacgatctgaatgaaattgtgcagcttgttggtaaagatgcgctggcagaatctgacacaattacgctggagacagcaaagcttttgagagaagattatttggcacaaaatgcattcaccccatatgataagttctgcccattctaca

SEQ ID NO: 55150 - DNA, 281 bp, Zea mays
ggagggtgcaagggctgctctgaatctgtcaggaactgtgctcggatattatcctgtcagggttctgccatcgaaaactgccattgcaccagtcaatccaacattcctacccaggtctgatgatgaacgggaaatgtgtgcgaggactatttactgcacaaacattgacaagaaggtcactcaggcagatctgaaattgttctttgagtctatatgtggagaggtctttcggctgaggttgcttggtgactaccatcattctactcgcatcgcttttgtgg

SEQ ID NO: 55151 - DNA, 278 bp, Zea mays
tcgcgcgctggtggacctggtgcgcaggtacgtgatcaccatcgcgcccttcgtgccgcccatcgtggtggagatcgccaagagcccccgcgtgaccgccggcgacctcacgtccatccgcatggtcatgtccggcgccgcgcccatgggcaaggagctccaggacgccttcatggccaagatccccaatgccgtgctcgggcaggggtacgggatgacggaggcaggcaccgtgctggcgatgtgcctggccttcgccaaggagccgtacccggtca

SEQ ID NO: 55152 - DNA, 279 bp, Zea mays
cggcctgctcgttctatctgtccagcagacttgaggttccgagcggccggaaaccagcggcaaccgtcggcatggcgctcgtattgcattctggggctggaaacaaaaatgccttcaaggcacttattgctgcagaatacagtggggtcaaggttgagttgaccaaggattttgagatgggtgtctcgaacaagacccctgagtttctaaagatgaacccccttgggaaggttcctgttctggagactcctgatggccctgtttttgagagtaatgcta

SEQ ID NO: 55153 - DNA, 275 bp, Zea mays
cactggctggtagcctgagtgtgagtgagtgatcgagctagctgagctccgatcctcgctagctaggataccgccataccacaagtcttcttaccaagtttaggagtgacagcaacaagagatcgatggcctctgccaccgtgctcaagtcctccttccttcccaagaagtccgaatggggcgccaccaggcaggccgccgcgcccaggccgcccaccgtctccatggtcgtccgcgcctccgcctacgccgatgagctcgtgaagaccgcgaaa

SEQ ID NO: 55154 - DNA, 271 bp, Zea mays
catcgaacctcacccccgatctgatcgaatcgaaggctgcggcggcgatgggcggtgaccatggcggtgggcacgccggcggcgacttccgccagaaggtatggagcatgacgggcggcccctactgccgccccgtccactggcgccgtaacaccgccatcgccatgttcggcgtcttcctcatctgcatccccatcgctatgaagtccgcagagctcgagcaacgcccgcatcacccagtccggccaatcccatctcaactgtggtgcaa

SEQ ID NO: 55155 - DNA, 279 bp, Zea mays
aatcgatggccgccgagggcgagaagaagatgataaccctcaaaagctccgatggcgaggagttcgaggtggaagaggcggtggcgatggagtcgcagaccatccgccacatgatcgaggatgactgcgccgacaacggtatccctcttcctaacgtcaactccaagatcctatccaaggtaatcgagtactgcaacaagcacgtacatgccgccgccgccgccgccgccgcctcgaaggccggttccgacgacgtgggtgccgcctccgccaacagca

SEQ ID NO: 55156 - DNA, 278 bp, Zea mays
atgggtcatctcaggtggggagttggggtccccgaaggccttggctccttgaacttttggccgccatgtgcttcccgaaggtcctctctgatgacatgaagaagctgaaggcccgaatggcgatctcgagcctggcagagctggaggacgacttcaaagagggctacctggagacagtggcggcttattatgaggagcagcacccagagctcactcctctacttgaaaaagaaagagatggattacggtgccgaggcaacagatcccctgtcccggat

SEQ ID NO: 55157 - DNA, 274 bp, Zea mays
  unsure (1)..(274): unsure at all n locations
acccttgccaaggctttggcaggccaaaaggatgaggtctactttgcagccaatgctgctgctcaggcctcaaggagatcatcgcccagggtgacaaacgaggaggtccagaaggctgcagctgctttgaggggatctgaccaccgccgttctaccactgtttctgctagattggatgctcagcaganaaagctcaaccttcctgtccttcccacaaccacaattggttcattccctcagactgtggaactcaggagggttcgccgtgaataca

SEQ ID NO: 55158 - DNA, 272 bp, Zea mays
accatgaatccactcctgatccttacctttgtggcagctgctcttgctgcgccctttgatgatgatgacaagatcgttgggggctacaactgtgaggagaattctgtcccctagcaggtgtccctgaattctgggtaccacttctgtggtggctccctcatcaacgaacagtgggtggtatcagcaggccactgctacaagtcgcgcatccaggtgagactgggagagcactacatcgtaatcctggaggggaatgagcagttcatcaatgc

SEQ ID NO: 55159 - DNA, 274 bp, Zea mays
caattttgaatgttgttgctgttcattcaactctccatcttccttttgaccacaatatgtatggccagaaccttactgttcagaatttcttcaattcatcagttcctgtttctgtgcaagcaaccttcccctacaagttcgttgtgagcaagttcttgcagcctggagcatatgatctggttggttacatagtgtatgagatcgaccagcacccttaccagaatgtattctacaatggcactatcgaggttgttgaggctggaggcttactcag

SEQ ID NO: 55160 - DNA, 267 bp, Zea mays
gctgtatgcccagatcgaggctcaaacagtttacggagcccttcatgctttggagacatttagtcaactgtgcagccttgacttcaatgcaaacctgatcgaacttcattcagctccatggactatcctggacgctcccagattcccttaccgagggctcctcatcgatccttcaaggcactatcttcctgtcccagtgataaaaggtgtgatcgactcaatgaccttcagcaagctgaacgttcttcattggcatatcgtggacga

SEQ ID NO: 55161 - DNA, 249 bp, Zea mays
  unsure (1)..(249): unsure at all n locations
ggaacgtctgaggttatcaataagctcctagtccagacgccatgggtcatttcacagaggaggacaaggctactatcacaagcctgtggggcaaggtgaatgtggaagatgctggaggagaaaccctgggaaggctcctggttgtctacccatggacccagaggttctttgacagctttggcaacctgtcctctgcctctgccatcatgggcaancccaaagtcaaggcacatggcaaagaagtgctga

SEQ ID NO: 55162 - DNA, 285 bp, Zea mays
  unsure (1)..(285): unsure at all n locations
tgctgagagaggcatgaggggctccaggtttgggatgttcggcgatgatatatttgggtcncaccctcagtttcctggtgaggcatcaatgcatgttccacaacggtctcagaatgttcctccaattgagaatcggttgccatgcaaccttgctgatttgtacaaaggtaccaccaagaaaatgaagatttcacgagaggttttagatgccagcgggagaactttggttgttgaggagatcttaacgatagatataaaacctggatcgaagaaagggacaaaaat

SEQ ID NO: 55163 - DNA, 210 bp, Zea mays
ctggaagatctttacaatggcacctcaaagatgctctctctttcgcgcaatgtcatctgctccaagtgcaagggcaagggctcgaagtctggtgcctcaatgaggtgccctggttgccagggctcaggcatgaaagtcactattcgtcagctgggcccttccatgatacagcagatgcagcagccttgcaatgagtgcagggggactgga

SEQ ID NO: 55164 - DNA, 293 bp, Zea mays
ggagtctggagacgacgtgcagaaatggcacctcgaaaggggaaggaaaagaaggaagaacaggtcatcagcctcggacctcaggtggctgaaggagagaatgtatttggtgtctgccatatctttgcatccttcaatgacacttttgtccatgtcactgatctttctggcaaggaaaccatctgccgtgtgactggtgggatgtcggtaaaggcagaccgagatgaatcctcaccatatgctgctatgttggctgcccaggatgtggcccagaggtgcaaggctgggtatca

SEQ ID NO: 55165 - DNA, 294 bp, Zea mays
agttattcctatggagcatgatatatcaaacacttacgaaaatccatctcctatgattgttgatgaggctatgctagaaaaagtacttgggcctcctagatttgatgacagagaaactgcagatcgtgtagcaagcccaggagtctcagttggccttgtctggacttcggttggtggggaagttcagtttgtggaggctacagccatggtgggtaagggtgacttgcatttgactgggcagcttggtgatgttattaaggagtcagcgcactagctttgacatgtgagagcaag

SEQ ID NO: 55166 - DNA, 289 bp, Zea mays
tattaccccaaaccaaaatcttattttatgtgggattgatcaagcatggagagaacccataactacagctcttgcacaagctggcctgctggaaccgaaggatgtcgaccccttgaatttaactgccatggcatgccctgccttgccactgtgccctttggcacaaacagaagctgaacgggggatcttacccattcttaaacgaattagagcagtcttcaataaggttggtatcaaggattcggagtctgtggttgtgaggataactggatgccctaatggatgctag

SEQ ID NO: 55167 - DNA, 298 bp, Zea mays
cgagcagtacgtgtgggagtcccaagcgggcgggtcgttcactgttactcgtgacacgtcaggggagcagcttggcaggggcactaagatcacactgttccttaaggacgatcagctggagtacactgaggagcctcgcctcaaggatctggtcaagaagcactctgagttcatcagctaccccatctccctgtggactgaaaagacaacagagaaggaaatttctgacgtacgagacgaggcagagaagatagatgctcaggaaggaaaggttgacgatgttgatgaaggaagagaa

SEQ ID NO: 55168 - DNA, 293 bp, Zea mays
cgacgattacggtaacgccgtcgccgccctacggctcagatcttcgtcgtcatcttctccggcaacgagcacccaaagatggtggtccttcaaccagatcggttcctgagcgagctgacgagcatgtacgagcggagcacggagaagggctccgtctgggtcaccatgaagcgatcaactctcaagggcaaggcacagttgcggaagatggagaataaggggcaggaggtagagcacaggtgcctcgtccgcgcctccaatggcaagaagaacatctccacctctttctctaa

SEQ ID NO: 55169 - DNA, 293 bp, Zea mays
ccggacatcgatccccacagagccagggcctgcaggcgggcgggcgggcgagcgagcgagaggaaaagccaaggcggcagcagtaggcagccaccatcaataaagaaggtccaagcatgtcgggggtgtgggtgttccgggacgccgtggtgaggctggtggagaacccgacgtcggggaacgcgagcggcggcgccggcctgctgcagtaccacaagcgcacctccgtcgacctcatctcgctgcccaaggattcgcccacttcggctccgtccacatgtacgatcgtcatc

SEQ ID NO: 55170 - DNA, 291 bp, Zea mays
cggtgttcagtgtgcgcaacatcgggaagactctcgtatccaggacacagggtaccaggattgcttctgagggtctgaagcacagagtctttgaggtttgcctagctgatcttcagggcgacgaggatcaagcttacaggaaaatcaggctccgtgctgaagatgtgcagggcaggaatgtgctcacaaacttttggggtatgaattttaccactgataaactgagatccctagtgaagaagtggcagacattaatcgaagcccatgttgatgtcaagacaaccgaactac

SEQ ID NO: 55171 - DNA, 118 bp, Zea mays
gctcaggccatcaagggtatgcatatacgaaaagccacgagatatctgagcgatgtcactttacagagacagtgtgtaccattccgacgttacaatggtggagttggcaggtgtgcgc

SEQ ID NO: 55172 - DNA, 300 bp, Zea mays
gttggtgcagtcgggataaattgcacacctccaagatttattcatggactgatactctccattcgaaaggtcacagacaagtctattctgatatatcccaacagtggtgaaagatatgatggtgaaaaaaaggagtgggtggaatccactggtgtgtcagatggtgattttgtttcgtacgtaaatgaatggtgcaaagatggggctgcgcttatcgggggctgctgcaggacaactccaaacactatcagggccatacacagaactcttaaccaaggctgccacaagccagttactgta

SEQ ID NO: 55173 - DNA, 292 bp, Zea mays
  unsure (1)..(292): unsure at all n locations
ccagcattaagaaggtcgttgattntcttcgccatttccttgatctccttctcgaccttcttaatgctggtcgaatacggccccagtccataggttacgaggagatcaaggaaatggccaagaaaatcaacgacctatgtgggataaaggagtctgatacagggctggctccacctagccagtgggatttggtttcagataagcagatgatgtctgaagaacaaccgttacaagtagcaagatgtacaaagattataagccctaatacggatgatgccaaatgttataaatg

SEQ ID NO: 55174 - DNA, 204 bp, Zea mays
gccgccgccgcagccaaaaaaaaaacccctaaacccccaatccatggcgtcgagcagcactgaccttgccgacgacggcttcgcggcgccgcgacttttctcgcagggtgtatcctacacatacgacgacgttatcttcctcccgggctacatcggcttccccgccgacgccgtcgccctctccacccgcttctcccgccgaat

SEQ ID NO: 55175 - DNA, 243 bp, Zea mays
ggtaaactttccctttacactgccctgggaggagttcgtccatctgcttgcttgccgatcacattggatgttggtacaaataacgaggagctgcttaatgacgaattttacattggcttgagacaaagaagagccactggccagtagtacactgattttctgcaagaatttatgagtgctgtgaaacaaaactatggggagacagtgcttattcagtttgaggattttgccaaccataacgct

SEQ ID NO: 55176 - DNA, 276 bp, Zea mays
tcattaaagagatggccaagaacaggccaattgatgccaaaggcaggagagcatttaaagtccttgtgttaaatgaagttgacaagctctcaagagaagcccagcattccctccgtaggactatggagaagtatagctcatcatgcagactgatcctatgctgtaacagctcctcaaaagtgacagaggctgtaagatcccgttgcttaaatgtgcgcgtacacgcacccagtgaagatcagattgtccaagttctagcattcattgggcagaaag

SEQ ID NO: 55177 - DNA, 276 bp, Zea mays
tcgcaacgctgccgtcaaggaccattcaaattaccaaaactgggatgtacaatatgtactttatacattgtgatccttcacttgctagtttggaaatcgaggggaaaaccatatggaaaaatcctactgggtatcttccaggtcggatggcgcctcttaagaacttttttggactgatgtcttttgcatttgttgtgcttgggatctactggttttatcagtacatgaactcttggaaagaggtcttccacttcagaactgtaatactcttgtgat

SEQ ID NO: 55178 - DNA, 288 bp, Zea mays
tgaggagtcctacccttaccaaggtgtcaacggaatctgccagttcaaggctgagaatgttggagtcaaggttttggactcggttaacatcaccctgggtgctgaggatgaactgaaggatgctgttggtctggttcgcccggttagtgttgccttcgaggtgataagtggtttcaggctgtacaagagcggagtctacactagtgatcactgcggaactacaccgatggatgtgaaccacgctgttctggctgttggctatggtgtcgagaatggtcccctactggc

SEQ ID NO: 55179 - DNA, 286 bp, Zea mays
tcgacattcagatcccaactgccttcgatcccttcgctgaggccaatgctggggactctggtgcggcacagggtcaaaggactacgttcacgtgcgcatccagcagcgtaatggtcgcaagagcctgactaccgtccagggattgaagaaggagttcagctacagcaagatcctcaaagatctcaagaaagagttctgctgcaatggtacagtggtccaggacccagaacttggacaggtcattcagctccagggtgatcagaggaagaacgtctcgaatcctcgt

SEQ ID NO: 55180 - DNA, 287 bp, Zea mays
cgcccgcgtcgacttcctagggttcgaggaacgtccgtccgtccgtccggggaaggagcaggagggaggcggagatgatcgaggtggtgctcaacgaccgcctggggaagaaggtgcgggtcaagtgcaacgaggacgacaccatcggcgacctcaagaagctggtggcggcgcagacggggacgcgccccgagaagatccgcatccagaagtggtacaacatctacaaggaccacatcaccctcaaggactacgaggtccacgacggcatgggccgagctctacta

SEQ ID NO: 55181 - DNA, 210 bp, Zea mays
caccagttcaccacccacctcccactcccagttcaccccgtcgtcctcggcgccaccactcctcgtcccccggcgctactcccccgctccacggtccaaggaaagatggcgtcccatattgttggataccctcgcatgggccccaagagggagctcaagtttgccttggagtctttctgggaggggaagagcagcgccgaggatttggag

SEQ ID NO: 55182 - DNA, 286 bp, Zea mays
cctaccacgagcagctgtccgtggccgaaatcaccaacagcgccttcgagccatcctccatgatggccaagtgcgacccccgccatggcaagtacatggcatgctgcctcatgtaccgtggtgatgtggttcccaaggacgtgaacgctgctgtggccacaatcaagaccaagcgcaccatccagttcgtggactggtgcccgactggcttcaagtgcggaatcaactaccagcctcccagcgtcgtccccggcggtgacctggccaaggtgcagtgccgtgtgca

SEQ ID NO: 55183 - DNA, 290 bp, Zea mays
cagcaccagattgtctaccaacaagctcaacagttccaccaacagctccagcagcagcaacagcagcagcttcagcagttctgggtcgaacgcatgactgaaatcgaggcaacagctgatttcaggaaccacaacttgccacttgcgaggataaagaagatcatgaaggccgacgaagatgtccgcatgatctcagccgaagctcccgtggtcttcgcaaaagcttgcgagatattcatactggagctgacgctgaggtcgtggatgcacaccgaggaacaagcgccgca

SEQ ID NO: 55184 - DNA, 292 bp, Zea mays
ctcgagccgcgacaagagccgccgccgccgccgccgccgccgccgacgcgcaaagccgcttcacacgacgtcactcctcggggcgcaaccatggtggccgcaaagaagacgaagaagtccacggacaacatcaacaacaagcttcagcttgtgatgaagagcggcaagtacacgctcggctacaagactgtcctcaggaccctcaggaattctaagtcaaagctagtgatcattgctaactaatgtcctccgcttcggaagtctgaaattgagtactatgatgctggctaag

SEQ ID NO: 55185 - DNA, 287 bp, Zea mays
gtctgatggaggacccggacaagcgcgaccaggttcggcgggagcatgtctacaagatgaaggagcggtgcgagcgcactaaggcggcgtggagcctccctctgcgcccctacggcttctggaccttcgaccgcttcaactcgcagctctcctgggatccccagatcagccaggccgccggccgtcgggacccctacgacgacctcatcgcacgccactctggctcgccgccgtcttcctgaacacccgttccgatctttgcccgagaggtctataggcatcaataa

SEQ ID NO: 55186 - DNA, 98 bp, Zea mays
ctgcggagtccaggacaccacccagatccacacccacatgtgctacaccaacttcaacgacatcatcgactccatcatcgacatggatggcgctgtga

SEQ ID NO: 55187 - DNA, 282 bp, Zea mays
caactccatcctcaccacccacaccaccctggagcactctgattgtgccttcatggtagacaatgaggccatctatgacatctgtcgtagaaacctcgatattgagcgtccaacctatactaacctgaataggttaataggtcaaattgtgtcctccatcactgcttccctgagatttgatggagccctgaatgttgacctgacagaattccagaccaacctggtgccctatccccgcatccacttccctctggccacatatgcccctgttctctgctgaga

SEQ ID NO: 55188 - DNA, 284 bp, Zea mays
gcacaagcgcactctagcaatggcttctgaggttgtccgccctagcgacgccgagctactaaaggcacaagccgacatatggcggctcagcctctcctacctcacgcccctgtcactgaggtgcgccgtggagcttggcatccccacggcgatctaccgccatggcggggctgcctcagccgctgagctggtcacggcgctgtctctcccctccactaagctgccgttcctccgccgcctgctgcggctcctcgccgcgtcgggcgtgttcagtcgacaagcag

SEQ ID NO: 55189 - DNA, 284 bp, Zea mays
ctgggcttcactgtgtacccatctccccaggtgtcaacctctgttgtggagccttacaacagcgtgctctccactcactcactcctggagcacactgatgtctccatcctgctcgacaacgaggccatctatgacatctgcaggcgctccctcgacattgagaggcccaactactccaacttgaatcgccttgtgtctcaggtgatctcatcgctgactgcttctctgaggttcgatggtgacctcaatgtggatgtgaacgagttccagaccaacggttcctt

SEQ ID NO: 55190 - DNA, 267 bp, Zea mays
aagcgatgccaacaggtacaagatccaggaatcattggcaaagggagctacggggtcatctgttcggctattgaccaacatacggacgagaaggtagccatcaagaagcatcagaacatcttcgagcacctgtcagacgctgcgaggattctccgtgagatcaagcttctccggctgctgaggcaccccgatatccatctgatcaaacacgttatgctgcctccgtcgaggagggactacagagccatgtacgttgtgtttgagctg

SEQ ID NO: 55191 - DNA, 263 bp, Zea mays
tggaaacaaggtcgaaaagctatgtgatcttgccacatcacattgaacaagaatgctgtcttcggtgacagcagtgcattgtctccgggtggtgtccgcattggcgcgccagcactgacctcgaggggtctactggagaaggatttcgagcagattggggagttcctccaccaggcagagaccatctgcctgaacatccagaaggagtacggcaagctcctcaaggacttcaaaagggcctggtgaactacaaggacatcgag

SEQ ID NO: 55192 - DNA, 264 bp, Zea mays
accagccggagctgttcatccacatcgtcctgacaaggccaacaatactctgacaatcattgacagtggcattggtatgaccaagtcggaccttgtgaacaaccttggtaccattgcacgatctggcacaaaagagttcatggaggcactggctgctggtgccgatgtgtccatgattggtcagtttggtgtcggtttctactcggcataccttgttgctgagagggttgtgtgaccaccaagcacaacgatgatgagcagtat

SEQ ID NO: 55193 - DNA, 161 bp, Zea mays
tgcagatcttcgtcaagaccctcactggatagactatcaccctcgaggtggagtcttcggacaccatcgacaacgtcaaggccaagatccaggacaaggagggcatccctccacaccagcagcggctcatttttgccggcatgcagctcgaggacgggcgc

SEQ ID NO: 55194 - DNA, 264 bp, Zea mays
aagagattctccggctccacctctgggacgttgccactttgagtatttgtggggcccatgtggaggatgaaggtgactattattgttatgtactgggcgcttttgatgagcatggagtcttcggcggggggaccaaggagaccgtcttaggtcagcccaaggctgccccctcggtcactctgttcccgccctcctctgaggagcttcaagccaacaaggccacactggtgtgtctcataagtgacttctacccgggagccgtga

SEQ ID NO: 55195 - DNA, 264 bp, Zea mays
cgcaaccactccgaggccaagtctaggtttgggaatctgtaggaggggagaggggagcgcgctcagggtcagggaggcgaagatgatcgaggtggtgctgaacgaccgcctggggaagaaggtgcgggtgaagtgcaacgaggacgacaccatcggcgacctcaagaagctggtggcggcgcagacggggacgcgccccgagaagatccgcatccagaagtggtacaacattacaaggaccacatcacgctcaaggactacgag

SEQ ID NO: 55196 - DNA, 264 bp, Zea mays
aaagcccatctgcttgagcgatcaggacttgttgccctctctggtggccacaccttgggaaggtgccacaaagagcggtctggtttcgagggggcctggactacaaaccctttggtctttgacaactcttacttcaaggaacttctgagtggtgataaggagggccttcttcagctcccaagtgacaaagccctgctgagcgaccctgttttccgccctcttgtcgagaaaatgctgtggatgagaaggctttctttgatgact

SEQ ID NO: 55197 - DNA, 259 bp, Zea mays
aaggattcggagtctgtggttgtgaggtaactggatgccctaatggatgcgctagaccatatatggcagagcttggtttcgttggtgatggcccaaaaagttaccagatctggctgggtggaacaccaaaccagagtacgctagcagaatcatttatggacaaggtgaagcttgatgacatcgagaaggttttggagcctctctttacctattggaatggcacacgccaggaaggcgaatcttttggaagcttcacaaa

SEQ ID NO: 55198 - DNA, 264 bp, Zea mays
tcgccgtctgccttctgcgcctccatctcggcctctgtcccttgcaaggtcaatctcacctccaaccatgggtaaagagaagtcccacatcaacattgtggttattggccatgtcgactctggcaagtcgaccaccacaggacaccttatctacaagcttggaggcattgacaagcgtgtgatcgagaggtttgagaaggaggctgctgaaatgaacaagcggtccttcaagacgcgtgggtgctcgagaagctcaaggctgag

SEQ ID NO: 55199 - DNA, 260 bp, Zea mays
agcgaagatcttgtagaatctgtcaggaaaacttcagcacaactgttaatgcactcactgagcctattgatatatatagtgaatggattgatgagtgtgagcgtgtcaacactgttgaaggcgacgatgatgcgtgagcttgccccatgtgatgaaactgttacctacaatcgtaatgtaatgtgctggtattctcgaatgccatagcccatagtcagccatggcttggaataacgtagtgactgactgatatgccagta

SEQ ID NO: 55200 - DNA, 259 bp, Zea mays
agcgaccctccctccttcgctccttccgcgccgcctcccggccgtcgccgccatggtgaagtactcgcaggagccgggcaaccctaccaagtcggctaaggccatgggcagggatctgagggtccacttcaagaacacaagggagacagcctttgcgcttcgcaagttgtctttgaccaaggctaagcgacaccttgaggatgttattgctcacaagcaggcaattccctccggagatactgtgggggtgttggtcgca

SEQ ID NO: 55201 - DNA, 264 bp, Zea mays
caaagcttgtgattgaagacatctgccgcgacgtccaccgctccgacccggactggaagatcatagctgctcaggtacttcaaccccgttggcgctcatccaagcgggtacatcggcgaagacccctgcggtgtcccgaacaacctgatgccctacgtgcagcaagtcgctgttgggaggttacgtcacctcacggtctacgggacggactacagcaccaaggatgggactgggtgcgtggatagatcgacgttgtcgacctgg

SEQ ID NO: 55202 - DNA, 263 bp, Zea mays
taaggagtcctacccttaccaaggtgtcaacggaatctgccagttcaaggctgagaatgttggagtcaaggttttggactcggttaacatcaccctgggtgctgaggatgaactgaaggatgctgttggtctggttcgcccggttagtgttgccttcgaggtgataagtggtttcaggctgtacaagagcggagtctacactagtgatcactgcggaactacaccgatggatgtgaaccacgctgttctggctgttggctatg

SEQ ID NO: 55203 - DNA, 258 bp, Zea mays
atcatgctcactgacgaccagaaggacccgttccgggtgcccaccaaggacaacatccggatggcgatgcagtggctggtgcaggggtgcagcagcggcgactccctggtgttccacttctctgggctgggcgcgcaggtcgccgacgcggactgcgacgagcaggacgggtacgacgaggccatctgcccggtggactcgttccagaagggccccatcctggacgacgagatcaacgagaccatcgtccggccgctg

SEQ ID NO: 55204 - DNA, 256 bp, Zea mays
acagatcagaagaggaacagctcaatgtcttccggttcgctcctcttgtggcgcctatcaagtgcaccgtgtttccccttgttaagaatcaagagtttgacgatgctgccaaagtaatcgccaaggcattaacaactgctggtatctcccacattattgacactactgcaatttctattgggaggaggtacgccaggacggatgatatcggtgtgccatttggtgtacagatgattcggcaacgaacgtaacgatc

SEQ ID NO: 55205 - DNA, 259 bp, Zea mays
agcccgcgtcgacttcctagggctcgaggaacgtccgtacgtccgtccggggaaggagcacgagggaagcggagatgatcgaggtggtgctcaacgaccgcatgcggaagaaggtgcgggtcaagtgcaacgaggacgacaccatcggcgacctcaagaagctggtggcggcgcagacggggacgcgacccgacaacatccgcatccagaagtggtacaacatctacaaggaccacatcaccctcaacgactacgaggt

SEQ ID NO: 55206 - DNA, 231 bp, Zea mays
atcaagtttgcagagcaccgttaggaggctgtgacgtacatcgaacaggggcatgtgcgtatcggtccagatgcagtcacggacccagcctttcttgtgaccagaaacatggaggacttcatcacctgggtggattcctcaaagatcaagaggaaggtcatggagtacaatgatgcattagatgattatgatgccatgttctgagaaaatcattctgcaggaatttatggc

SEQ ID NO: 55207 - DNA, 256 bp, Zea mays
cagcaccagattgtctacaacaagctcaacagttccaccaacagctccagcagcagcaacagcagcagctacagcagttctgggtcgaacgcatgactgaaatcgaggcaacagctgatttcaggaaccacaacttgccacttgcgaggataaagaagatcatgaaggtcgacgaagatgtgcgcatgatctcagccgaagctcccgtggtcttcgcaaaagcttcgagatattcatactggagctgacgctgagg

SEQ ID NO: 55208 - DNA, 191 bp, Zea mays
tgtttttaaaaagattttagggaaatctactggctatttgaatgatcaagagagccaaaaggcactggttttctgctgtgaattcattaagctatgtgtgcctgcaacagttatgcatgctgtgcttcagctcagtgctcgcttgacaaaaacacacgcgcttgctgctctattctttgaaagtggtgggt

SEQ ID NO: 55209 - DNA, 206 bp, Zea mays
cttctacgacgtgccagcgggcggcgggacggccgcgtgtccaacgagacggaggccaacgacaacctgctggggccggacagcacggcggagatcctcatcgacggcttcaggaagaagaacctgagcatcgaggacatggtggtcctgtccggctcccacaccatcggccgctcccactgcttctccttcctgtccacaaaccg

SEQ ID NO: 55210 - DNA, 283 bp, Zea mays
tgcagatctttgtgaagaccctgactggaaaaaccataaccctggaggttgagagctcggacaccatcgacaatgtgaaggcgaagatccaggacaaggagggcatccccccggaccagcagcgtctgatcttcgccggcaaacagctggaggatggccgcaccctagcagactacaacatccaaaaggagagcaccctccaccttgtgctccgtctccgtggtggtcagtaagtcatgggtcgtttaagctgccgatgtgcctgcgtcgtctggtgccctct

SEQ ID NO: 55211 - DNA, 277 bp, Zea mays
agaaggtatccttgaagtcaaggccacagctggcgacacccatcttggtggtgaggactttgacaacaggatggttaaccactttgtccaggagttcaagagaaagaacaagaaggatatcactggcaacccgagggctctccggaggctgaggacctcttgtgagagggccaagagaactctgtcttccactgcccagaccaccattgagattgactcgctgtacgagggcattgacttctactccaccatcacgcgtgccaggtttgaggagctc

SEQ ID NO: 55212 - DNA, 293 bp, Zea mays
accgggttcgcggtatggacatcacgctggtgaccaccgcgaagaccgacgacgaaggccgggcgttcctgaagctgctcggcttcccgttcaaggagaacgactaatggcgaagaaagccctcatcgcgaaggccaagcggaagccgaagttcgccgtgcgcgcctacacccgctgccagaagtgcggccggccgaagctacgtaccgcaagttcggcctgtgccgcgtctgcgtgcgcgacatggcccacgcgggtgaactcccgggcgtccacaaggcctcctggtaatc

SEQ ID NO: 55213 - DNA, 280 bp, Zea mays
caaatcgaaaggagccgtccggctcagggtttctcgacggctccttgccctctccgccatggacgcacagcgagccctccttgacgagctcatgggcacagctcgcaacctaacggaggaggagaagaaggggcacaaagagctgaagtgggacgatccggacgtgtgcggcccttacatggttcggttctgtcctcacgaccttttcgtcaacaccaagagcaatatcgggccgtgctcgaggatccacgatccgaagctcaaggaaagctttgagaag

SEQ ID NO: 55214 - DNA, 280 bp, Zea mays
ctggaagtgagattagaagtgtggtgttggctgggaggagattatatgagaaggaatggctccctgctttccctatgggaaaaattgatcaaacacgtatgtggaaggtgggtgaaagggtccgttcaaccaggccacaaggtgatcttggcccactgcatcccttcactgctggagtgtatgtcgcactaatgatggctcagattgaggtccttaggaagaagggccactcttactcagagataattcatgagaccctgatcgagtccgtggactcgtt

SEQ ID NO: 55215 - DNA, 272 bp, Zea mays
agcatggatgataatgttccgggtccagcaagtgatgatgatgttgatgctggaggtggaagaccctaccctggggatgactctaatgatgatgatgacttggactcaaaacgcaggaaaatggaatctgctggtatcgatgctgctttgatgggtaaaccaaatcgcgagccccgtgtcgttgtacaaactgttagtgaagttgatatcttggatgatgggtatcgctggcgcaaatatgggcagaaagtagtgaaaggaaaccctaaccc

SEQ ID NO: 55216 - DNA, 130 bp, Zea mays
tagtgaatcatcccttgtgggtcatgaacatggtccctactgtggggaactcaacaacccttggggcaatatacgagcggggcctcattggaagctaccaggactggtgtgacggcatgtccacttatcc

SEQ ID NO: 55217 - DNA, 152 bp, Zea mays
gtcattgtgctcatctggaccttggtcacatttcctttgcttgttttgggtggtaatgctggtaaaaacagcaaaagtgagttccaagctccttgccgtagcacaaaataccccagggagattcctccacttccctggtacaggagaaccat

SEQ ID NO: 55218 - DNA, 277 bp, Zea mays
ctcgagccgctttttgttcctcgcgccgccgccgccgccgccgtgacggaaggaagaggaacgagcaaggagcacgacgcgatgggccactccaacgtgtggaactcgcaccctaagaactacggccctggctcccgcgtctgccgggtctgcgcgaaccctcacggtctgatcaggaagtacgggctcatgtgctgcaggcagtgcttccgcagcaacgccaaggacattggtttcatcaagtaccgttgaagaggccactgtgctgctgtggaga

SEQ ID NO: 55219 - DNA, 282 bp, Zea mays
agattatgtggcaacaaggtggtaccgggcacctgaactatgtggttcctttttctccaaatacactcctgcaattgatatttggagcattggctgcatatttgctgaacttctcactggaaggccactatttcctgggaagaatgttgtacaccaattagatattataacagatcttcttgggactccatcatctgagaccttatcccggattcgaaatgagaaggccaggagatatttgagctgcatgcggaaaaaatatcccgtgcgctttactcataa

SEQ ID NO: 55220 - DNA, 282 bp, Zea mays
ccttaaccctcgttcctctagccgtctcgcgcaccacagcctccatttctcctccgacggcggtgcggctagctcaaccatggcggactccaaggccacctcggcggtcaccctccgcactcgcaagttcatgaccaaccgcctgctggcccgcaaacaatttgtgcttgaggttatccaccccggccgcgccaacgtctccaaggcggagttgaaggagaggcttgccaagatgtacgaggtgaaggaccccaacaccatcttcgtcttcaagttccgcac

SEQ ID NO: 55221 - DNA, 315 bp, Zea mays
cccagattcactcgtatgtagaatcggatctcgctcgagaaggctttggtttcatcacatatgactcagaagacgcagtggacaaggcactgcacaagaacttccatgagctgaatggtaaaatggtcgacgttaagacggctgtgccaaatgagcagtctcctggacctattgcacgttcacctgcgggagggcagaactatgctatgagcagggttcataacttccaaaatggcttcaaccagggttacaacccgaaccccctgggtggttatggcatgatggtggatggaaggtatggtctccttacgggtg

SEQ ID NO: 55222 - DNA, 268 bp, Zea mays
cggcggtcggcgcgagcgtggtggtggcggctacggcggcgtcggcggcggctggacgtgactgtgtgtgagcccatcctggcttcggccgagttatcttatctatctatagtatcgtgttaccgttcgcttctgtcaccgtgttagtgtccgttctacctttggattaggtgttggtgaacctgttgttccctttgtttgctcccgctatgaaacgagacgatagaagaatgagcaaggtttttgttcgcagctatttttgtccaat

SEQ ID NO: 55223 - DNA, 276 bp, Zea mays
ctggtggaagactggcatgtggtgttgttggcctgactccattgtaggttgctcgccgggtgcccgggttgcagttgcagctacgctgttacatccttgccttggtggacttttgtcttcaatcgtgttattgggacagtgacctttttgtattacttggattcattccatgcatgtggtatggtgcgtaatagcctttgcaggtcgtatgtataaaaagcaatatttagttgaggaaataagtgttgctacatatccagatcgatctatgaagca

SEQ ID NO: 55224 - DNA, 275 bp, Zea mays
  unsure (1)..(275): unsure at all n locations
tagcgtcnccgttccccaacctctcgtctgctgcctgcctgcctgcctgcctgcaaaaaggagtttgtcatggcgtctaagcgcatcctcaaggagctgaaggaactgcagaaggacccccccacatcatgcagtgcaggtcctgctggtgaggacatgtttcattggcaagcaacaattatgggaccacctgacagtccctatgctggtggtgtttttttagtgaacattcatttcgcgccagattacaccttcagacctccaaaggtttcttt

SEQ ID NO: 55225 - DNA, 272 bp, Zea mays
cttccaaagtcttcgatttgttcctggtgttgctgctgctgtcccaagaaaaaggttgaaagaagtgagagggaaatcaacagagactctcggcgagaagacctcgagtctgccatttttaaccttcgcgaaattgacaactacgatgagtacgagaggtccatgctcatctctcagatgagcttcgagaagtcttttgggctgtcctcggtctttattgaatcgacccttatggagaatgggggcgtccctgaatctgcaagccatctacc

SEQ ID NO: 55226 - DNA, 269 bp, Zea mays
cagaagtggaaggaagcaggcggccaccatggtgaagggacgcacgggacagcgcgtcaggctctacgtccggggcaccatcctcggatacaagaggtccaagtcgaaccagtacgagaccacgtcgctcattcagatcgagggggtgaacaccaaggaggacgtcgcgtggtacgctggcaagcgcatggcgtacatctacaaggctaagaccaagagcagcgagacccgctacaggtgcatctggggcaaggtcacccgcccgcacg

SEQ ID NO: 55227 - DNA, 271 bp, Zea mays
gcgccgcagacccctccccttcgcttccttccctagcgccgacgcccaccagacgagatggccccgaagaaggacaaggccccgctgccgtcgtcgaagccggccaagtccggtggtggcaagcaaaagaagaagaagtggagcaagggaaagctagaggagaaggtaaacaacgcggtgctgttcgaccaggctacctacgacaagctgctctcggaggtgcccaagtacaagcaaatcaccccttccatcctctccgagcgtctgagga

SEQ ID NO: 55228 - DNA, 270 bp, Zea mays
cggctcgagggatgagaagctttccttttatcaaggttttgatcctgctaatgccaacattgcaaacatgctgctttggccaggcccaaagggtgcagtcaatcaaagagatgctgatcttctcttcatgtggaagaggtacgagcagttaaatggggggaccgaagagaagctgagggctctcatagagattaaagaaactgttcagcacaggaagcatcttgacagcagtatcgatttcgttgggaggctcgtcttcggatttgagaa

SEQ ID NO: 55229 - DNA, 281 bp, Zea mays
gatggctacatgatctcatctggtcagccagtgaacgagtacattgactcggctgtgagacacgttcttctcagacagggtgttctcggtatcaaggtgaagatcatgcttgactgggacccgaaggcaaggttggcccgatcactcctcttccggacctggtgaccatccacaacccgaaggacgaggacgagccgcgccctccggtcttggcacctcctgaggtgtaaggtcccaactgtgtccttgaaatggcagtttgatcgggtcctagataggtt

SEQ ID NO: 55230 - DNA, 238 bp, Zea mays
gggcggacaaggagcaggcggaggaggagctgtgccaagccacaatgggtatctcgcgtgactcgatgcacaagcgccgggccaccggtggaaagcagaaggcctggaggaagaagcgaaagtatgagcttggtcgccagccagccaacaccaagttgtcaagcaatgagacagtgaggagggtccgtgttgcgtggaggtaagatgaaatggagggctcttcgccttgatagtggtg

SEQ ID NO: 55231 - DNA, 278 bp, Zea mays
ctcttcgactcctttctggagcagctagggttccgtcctcgatccgatccgccgagtgcacaccacctttccccactccgatcgaatcgatggccgccgagggcgagaagaagatgataaccctcaaaagctccgatggcgaggagttcgaggtggaagaggcggtggcgatggagtcgcagaccatccgccacatgatcgaggatgactgcgccgacaacggcatccctcttcctaacgtcaactccaagatcctatccaaggtaatcgagtactgc

SEQ ID NO: 55232 - DNA, 267 bp, Zea mays
  unsure (1)..(267): unsure at all n locations
ctcctcgcctccactccctagcctccacgacgcaagggagagtgacggaaagcgacgcggcgcgagcgaangagggccaaggggaagaggggaagcaccgcaccaggacccttattcgccgccgccgcctctgatctccgcgaggttgtcaggattcaatatgtcgaccagcacattcgctacttcctgcacgctgttgggcaatgttagaacaacgcaggcctcccagacagcggtgaagagcccttcgtctctaagcttcttcag

SEQ ID NO: 55233 - DNA, 277 bp, Zea mays
gagcaggaggcggacaaggtaagcagcaatcgcaggaaccctagcgacgccgcacccgcaggaatgggtatcgacctcgtcgccggtgggaggaataagaagaccaagcgcactgcgcccaagtctgacgatgtctacctcaagctcctcgtcaagctctaccgtttcttggtcaggaggaccaagagcaatttcaacgctgtcattctcaagaggcttttcatgagtacaaccaacggaccacaatcttcaaggggcggcttgtcaagtttatggg

SEQ ID NO: 55234 - DNA, 274 bp, Zea mays
cccagatccatcgactcgctcgggccgcccctcccgtcgtccccgttcgaaggtgcggcagccggcaggcgagcgcttagattcgacatgaatcccgagtacgactaccttttcaaacttctgcttattggtgattctggtgttgggaaatcatgcttgcttctcagatttgcagacgattcttatttagacagctatatcagcacaattggggttgatttcaaaattcgcacagtggagcaagatgggaagaccataaaacttcaaatttggg

SEQ ID NO: 55235 - DNA, 267 bp, Zea mays
ccgggttcccaccgtggatgtgtcagttgttgacctcactgtcagaatcgagaagggggcctcttacgaggaaatcaagaaagctattaaggctgcttctgagggcccactcaagggtattatgggctacgtggaggaggatctggtttccaccgacttcaccggtgacagcaggtcgagcatcttcgacgccaaggccgggattgccctgaacgaccacttcatcaagctcgtctcttggtacgacaacgagtggggctacagcaa

SEQ ID NO: 55236 - DNA, 264 bp, Zea mays
caagacgcaggcgcaacccacggctgctgcggggatccttgtggcccttccggtcgatggaacctaagaactatggctcatacagcactcaggcctcagctgcagcagccacagctgagctgctgaagaaacaggaggagctcaaccggaaggcagaggagttggaccgaagggagcgagagctgcagcatgctgccctgggaggcacagctactcgacagaacaattggccccctctaccttctttttgtccagttcagccct

SEQ ID NO: 55237 - DNA, 265 bp, Zea mays
gaaatactgacaatcattgcaatgattcaaactgggaacatattctatcgaccaagggagaagcaagcacaagcagatcggaaaagatccaactttttccagccagaaggtgatcatctcaccctactcactgtgtatgaggcatggaaggcaaaggggttttcaggaccatggtgtgttgagaatttcattcaggtaaactcactaaggagggcacaggacgtgcggaaacagcttcttgagattatggacaagttcaagctca

SEQ ID NO: 55238 - DNA, 253 bp, Zea mays
cacggttccaatctatgaaggatacacacttcctcatgctattctccgattggatcttgcggggcgtgacctcaccgaccacctaatgaagatcctcacagagagagggtactccctcactacgagcgctgagcgggagattgtcagggactaaaaggagaagcttgcctacgttgcccttgattatgaacaggagctggagactgccaggagcagctcctctgtcgagaagagctacgagatgcctgatggt

SEQ ID NO: 55239 - DNA, 271 bp, Zea mays
ccttaaccctcgttcctctagccgtctcgcgcaccacagcctccatttctcctctgacggcggtgcggctagctcaaccatggcggactccaaggccacctcggcggtcaccctccgcactcgcaagttcatgaccaaccgcctgctggcccgcaaacaatttgtgcttgaggttatccaccccggccgcgccaacgtctccaaggcggagtttaaggagaggcttgccaagatgtacgaggtgaaggaccccaacaccatcttcgtcttc

SEQ ID NO: 55240 - DNA, 274 bp, Zea mays
agggaatttgattaaaaccttcaaaggttctttcttgccgttttttgaagagctctctatgtacattacaccaatgttgggaaaagataaaacacctgaagagagaaggatagctatctgtatttttgatgatgttgcagagcaatgccgtgaatcagctctgaagtattatgacacataccttcctttccttttggaggcatcaaacgatgaaaattcagatgttcggcaggctgctgtctatggtgtgggtgtatgtgccgagtttggtggt

SEQ ID NO: 55241 - DNA, 270 bp, Zea mays
ggaactgtggaagcgtcgagcttttttcttctttgtcttgctgcgcaagaagaagggaaacgagaggagggcagcgatggcgaagaggctgctcccgtcgctgaaccgggtgctggtggagaagctggtgcagacccaagaagaccgccggcggcatcctcctcccggaaacatccaagcagctgaatgctagctaaagtggtggctgttggccctggtgagcgcgacaaggcaggcaatctgatcccagttgctctgaaggaaggcgac

SEQ ID NO: 55242 - DNA, 272 bp, Zea mays
ttctgcggttctgccgtttactcctccactttagcctcctcacttgcaagtttaatcttcgcctccagccatgcgtaaggagcagtctcacatcaacattgtggttattggccacatcgactctggcaagtcgttaaccaccggccacttgatttacaagcttgtgaggcattgacaatcgtgtgatcgagacgtttgataatgacgccgctgtaatggacaatcggtcctttaagtatgcttcggtgattgacaagctcaaggctgagcgt

SEQ ID NO: 55243 - DNA, 270 bp, Zea mays
gatgtatgaagctccccttggctacagcattgaggacgttcgacctgacggaggcgtgaagaagttccagtctggtgcttactccaactggcgcgaatgaagccatcctggatatcccttttggcttcctcattctagtagtttaggatttcttttctgacactttgattctgaccaatctctctggcctggtgcttcctgataatcgaccagttccccagtcttgctccttgcactcctcgctcctccatctacagcattgtgttctga

SEQ ID NO: 55244 - DNA, 271 bp, Zea mays
gatgtcgtcggcctcctcctccgccgccgccaacgccggtgaaggaagcgggggtgcggaggagggcgtggagctcacttacgtgagctatggcggggagcagcatctgccgctggtgatgtcgctggtggacgaggagctcagcgagccctattccatcttcacctaccgctacttcgtctacctctggccgcagctcaccttcctggcgttcgatgccagggatggcaagtgcgtggggacagtcgtgtgcaagatgggggagcatagg

SEQ ID NO: 55245 - DNA, 273 bp, Zea mays
cccacatgtgctactccaacttcaacgacatcatccactcgatcatcgacatggacgcggacgtgatcaccatcgagaactcgcggtccgacgagaagctgctctccgtgttccgtgagggtgtcaagtacggcgcgggcatcggccccggtgtctacgacatccactcccccaggatcccgtcggccgaggagatcgccgaccgcatcgacaagatgctggccgtgctggacaccaacatcctctgggtgaaccccgactgcggcctcaaga

SEQ ID NO: 55246 - DNA, 274 bp, Zea mays
gcgaacaagcaatccgaattctctgcgatttctctagatctcgaccacccctactagttttggttcctcctatgcgtcgagagagcgtttctagtggcaatggcggagagcgagggtccggcgatcgggatcgacctcggcaccacctactcgtgcgtcggcgtgtggcagcacgaccgggtggagatcatcgccaacgaccaggggaaccgcaccacgccgtcctatgtcggcttcaccgacaccgcgcggctcatcggcgacgctgccaaga

SEQ ID NO: 55247 - DNA, 287 bp, Zea mays
cgggccgattgcgtgtttaatccgtcacttcgcccgagtgttacacttggggtcatgagtggccaaccctgactgaggaagaggacgctcccgggagacgaatgaggaaccacctcctcctactgttcaagtacagggcgctggtccgcaaaggggagcaaagcaaaagacgaaaatggctaaattcgtgatccgcccagccactgccgccgactgcagtgacatactgcggctgatcaaggagctggctaaatatgaatacatggaagaacaagtaatcttaactg

SEQ ID NO: 55248 - DNA, 247 bp, Zea mays
taatcggatttcggctcgaatggacctgcaacagttggaggaattcaagctggtgctttcaagattggtgatactgctggaaccattgacaacataattcagtgcaagctttacaggcctggatctgttggttttgtgtctaaatcgggtggcatgtcaaatgagatgtacagcaccattgccagagtgacagatggtatttatgaaggaattgcaattggaggggatgttttccctggatcaactc

SEQ ID NO: 55249 - DNA, 243 bp, Zea mays
atgttaccttgcaaaacacatctacgaaggaaaatgaaaccctgatggccattggaactgcttatgttcaaggggaggatgttgctgctagaggacgggtgcttctgttctctttcagtaaaagtgaaaattctcaaaatctggttaccgaagtctactcaaaagagagcaaaggtgctgtatctgctgttgccgctcttcaaggtcatctactgatagcttctggtcctaagatcacactga

SEQ ID NO: 55250 - DNA, 241 bp, Zea mays
ctccccccgagcggcgctcctgctgcaccgcgctcgctccgagtttcatgctcgtgctaagctagcgccgtcgtcgtctgccttcagtcgccatcatgattatctaccgggacctcatcagccacgatgagatgttctccgacatctacaagatccgggagatcgcggactggttgtgcctggaggtgtaggggaagatggtcagtaggacagaaggtaacattgatgactctctcatttg

SEQ ID NO: 55251 - DNA, 285 bp, Zea mays
atcggtcaatcagtaatcaccccaaatcctagggttctagtcgcttctcgtcgtttcgttcgtagatcacagcgacaatggtgaaggcagttgctgtcctcgccggcactgatgtcaagggcaccatcttcttttcacaggagggggatggtccgaccaccgtgactggaagtatctctggcctcaagccagggcagaatgggttccatgtgcacgcgcttggcgacaccaccaacggctgcatgtcgactgggccacacttcaatcctgttggcaaggagcatg

SEQ ID NO: 55252 - DNA, 277 bp, Zea mays
acggctcgaggtccgatactgttactgatgatgagttgaaggagatgtttggaaaatatggaaccataacaagtgctgttgttatgcgggatagtgatggaaattctaggtgttttggatttgtcaattttgaaaatgcagatgctgctgctcaggctgttcaagagttgaatggcaagatattcaatgataaggaactgtatgttggaagagcacaaaagaagtctgaaagagagatggagttgaaggtgaaatttgaaaagaattccagggggta

SEQ ID NO: 55253 - DNA, 292 bp, Zea mays
caacccagtcgctcaaaaccctagagctctcgcctgctcgcctccgccgccggagcgagctccccatcttcatccgtcaaccatggcgacccagatcagcaagaagaagaagttcgtcagcgacggtgttttctacgccgagaccaatgagatgctgacgcgggagctggcggaggatggctactctggcgtggaggtgcgcgtcacgccgatgcgcacggagatcatcatccgcgccacgcgcacgcagaacgtgctcggcgagaagggccgcaggatcagggagctacct

SEQ ID NO: 55254 - DNA, 190 bp, Zea mays
gtgatgcttcagccaaactctgggatgtgcgagaaggcatgtgccggcagaccttcactggccacgagtctgacatcaatgccatttgcttctttccaaatggcaatgcatttgccactggctcagacgacgccacctgcaggctgtttgaccttcgtgctgaccaggagctcatgacttactcccatga

SEQ ID NO: 55255 - DNA, 262 bp, Zea mays
cgagctccgaagtccgcagcatcaggcgcggccccctcgcgtgtgcccgagatggcactgccgaatcaggggaccgttgattaccccagcttcaagctcgtcatcgtcggcgatggtggaactggtaaaactacatttgtgaagaggcatctcactggagagtttgagaagaaatatgaaccaaccattggtgtggaagttcatccgttggatttcaccatgaactgtggtaagatcaggttctactgctgggataccgcag

SEQ ID NO: 55256 - DNA, 222 bp, Zea mays
tggagctccaaaagacctggatgatttttgtgaaaaggcacagctggtgaactatgttcagtacagagcacttttggaaggatggacttccttcatgtggacaaagtttacaggtgtcctaatttggaaaacgcagaatccttgtactgtactaaggggccaattctatgatcacctccaagaccaaacggctgggttttatggttgccgttgtgctgctca

SEQ ID NO: 55257 - DNA, 281 bp, Zea mays
ctcaaaccctagccgcctcctgcaagtttcagagctcaggaatctgcgccatggcgagtgagacggagaccttcgcatttcaggctgagatcaaccagctgctctcactcatcatcaacaccttctactccaacaaggagatcttcctccgcgagcttatctccaactcttccgatgcgctggacaagatcaggttcgagagtctcactgacaagagcaagctcgatgcgcacctgagcttttcatccaccttgtcccagacaaggccacgtactcggctc

SEQ ID NO: 55258 - DNA, 276 bp, Zea mays
gtcttctcatacggtgaatggagtggctgaattgcatagcaacattttgaagcaagaactatttgcagattatgtctctatatggcctaccaaattccaaaataaaactaatggaatcacgcctcgaagatggctccggttttgtaaccctgagttgagtgaaatagtcacaaaatggctaaagtcagatcagtggacaagtaatcttgatctgctcactggacttcgcaaatttgcagatgatgaaaagcttcatgctgagtgggcagcagcaag

SEQ ID NO: 55259 - DNA, 205 bp, Zea mays
accttgccctcaacatcgcggagaaagggttccccatctcggtctacaacaggacgacctccaaggttgatgagaccgtgcagcgtgccaaggtcgaaggaaacctccccgtgtttggtttccacgaccccgcgtccttcgtgagctcccatccagaagccccgtgtcgtcatcatgctcgtcaaggctggggcgccggtggacc

SEQ ID NO: 55260 - DNA, 271 bp, Zea mays
gccttcgcctactcaagctcgaacgcgtcaaggactaccttctcatggaagacggattcgttgccagccaggagcgcctgctccccagcgaggataagacggaggatgaccgatccaaggtcgacgacctccgcggcactcccatgaacgtcggatcgctggaggagatcatcgacgagagccacgccatcgtctcctcgtccgtcggtcccgagtactacgtcgggatactttccttcgttgataaggaccagctccgagctggatgtgc

SEQ ID NO: 55261 - DNA, 266 bp, Zea mays
ggaggaacttaacctcagacaaaaacaaatagtgctatttgaatatgtcatgctttctggagtgaacgacagtatggatgatgccaagaggcttatagagctagtccaagggatcccatgcaagataaacctcatctctttcaatccccacgggggttcccaattcaagcccacaccagacgctaagataattgagttccgcaacgttttagttcagggtgggccaactttttttgttcggctcaacagaggggatgatcagatgg

SEQ ID NO: 55262 - DNA, 161 bp, Zea mays
ctaaaactcgattgattgggccaaattgcccgggtatcattaagcctggtgagtgtaaaattggaatcatgccaggttacattccacaagcctgggcgtattggggattgtatctcgttctgggtaccttgacatatgaaacggtgtttcagacaacagtg

SEQ ID NO: 55263 - DNA, 262 bp, Zea mays
cggctcgaggtccgatactgttactgatgatgagttgaaggagatgtttggaaaatatggaaccataacaagtgctgttgttatgcgggatagtgatggaaattctaggtgttttggatttgtcaattttgaaaatgcagatgctgctgctcaggctgttcaagagttgaatggcaagatattcaatgataaggaactgtatgttggaagagcacaaaagaagtctgaaagatggatggagttgaaggagaattttgaaaga

SEQ ID NO: 55264 - DNA, 277 bp, Zea mays
cgttctggcaaggagcttgagaaagagcccaagttcttgaagaacggtgatgctggtatggtgaagatgattcccaccaagcccatggtggtggagacattctcgcagtatcctcccctgggtaggtttgctgtccgtgacatgagacagacggttgctgttggagtcatcaagagtgtggagaagaaggacccgaccggtgccaaggtgaccaaggctgctgccaagaagaaatgatgcgacctgtcgttgatgcagcgtctgcttttccaatacg

SEQ ID NO: 55265 - DNA, 288 bp, Zea mays
gtggtgcgctatggatacaatgataaagtggaagacccaagagaatttgagggcttagttattgaacatctgaaacaatttatccatcaagaatcattttacagccaaggagataattcaacagaagaagtagaagatgcaaatgagccttccgtcagagttcaaggggcaacattgtccgatagttcttcagatagaagcactgctgctccatcaaatgggtgcatctatgagatccaaacaatacaaagagagatggaggatggtgttgtccatatgctaggagaa

SEQ ID NO: 55266 - DNA, 149 bp, Zea mays
cagcagcttgcaaccttgagtggacaccagggcccagtatggcaagtcgcatgggctcatcccaagtttggttccatgcttgcatcctgcagctacgacggccgggtgatcatctggaaggaaggaaccaagcctgataaatgggcact

SEQ ID NO: 55267 - DNA, 245 bp, Zea mays
ctgatcttcgccggcaaacagctggaggatggccgcaccctagcagactacaacatccaaaaggagagcaccctccaccttgtgctccgtctccgtggtggtcagtaagtcatgggtcgtttaagctgccgatgtgcctgcgtcgtctggtgccctctccatatggaggttgtcgaagtatctgctgttcgtgtcagtgttggtttaataatggaccggttgtgttgtgtgtgcgtactacccag

SEQ ID NO: 55268 - DNA, 155 bp, Zea mays
ctctccttcccggtctcctccgcccgttgccttcgtcccctccatctccggctgcgtcgccggcgagcccgacaccgcgaatcggatccgccgacaaggcgagagggaaaatatagggcttacgttcacaaacctgttcagccggtttttcgcca

SEQ ID NO: 55269 - DNA, 272 bp, Zea mays
agtcatcttgacaggatgttgcaagggtgaaggctacaacattggttttggaacctgcaccgggaaggttctgccggcacttccctgagccaacacgtcttggcatcagttctccggagtctcaacgatctcagctatcagagagttgtctcaacggtctcaactatcaaagagttcatgccgctatctagcaaggctgctatataactaaaaaatatgaggatgggttgttttcctgggctgttgaagatgaggagactgatgctctgttg

SEQ ID NO: 55270 - DNA, 265 bp, Zea mays
ctccgacattcacgtgcagctgtcgggagcaggcaatggcgccggatctaagcgaactcgccgccgccgctccagcccgtggcgcctacctcgccggcgtcggtgtcgcggtcctcctcgctgcctccttcctcccagtagccgagtcgtcctgcgtgcgagataactcattggtgagagacataagccaaatgccgcaaagcagctatgggattgaaggattgtcacatataacagttgctggtgcgctcaatcatgggatgaa

SEQ ID NO: 55271 - DNA, 281 bp, Zea mays
cgtgatttcatcaaaaggataagagattatcgatcggagtggaagattgtagtgcaccagcctattgctggaaactattatcctgttaatcttggcatctatgtggaggatggcagcaaagagctgtctgtactggtagacaggtcaattggaggttccagtataaaggatggacaaatagagctaatgctacacaggaggctactccatgatgatgggaaaggcgtcgccgaggcgctaaatgaaacagtctgtctcgataagcaatgtgaaggactcat

SEQ ID NO: 55272 - DNA, 335 bp, Zea mays
gatatgaagtagactcatgcacaagtacggaagtacggtagacggctcgagcatttactcgctcctcacaggctcatctcgctttggatcgattggtttcgtaactggtgagggactgagggtctcggagtggattgatttgggattctgttcgaagatttgcggaggggggcaatggcgaccgcggggaaggtgatcaattgcaaagctgcggtggcatgggaggccggcaagccactgtcgatcgaggaggtggaggtagcgcctccgcaggcaatggaggtgcgcgtcaagatcctcttcacctcgctctgcaaaaccgacgtctactctgg

SEQ ID NO: 55273 - DNA, 216 bp, Zea mays
gcgaaatccaatctagaagcacacctctccctctctctctcttcgccgtccgaagctccgcaccccaatctaatcgacacctcaccgagatgggccgcaagttcttcgtcggtggcaactggaaatgcaatggaaccacagatcaggtcgataagattgtcaaaaccctgaatgaaggacaggttcccccttcagatgttgtggaggtcgttgtca

SEQ ID NO: 55274 - DNA, 197 bp, Zea mays
gtgcaggcaagtaccatgacgtgcctgctgtgatcttttccctgacaggctacactggaaatctgttccacgacttcactgacgtgatggtccctcttttcacgacagcaagcgagttcaacggagaagtccagttccttataacggacatggcgctctggtggacaatcaagtaccataccgttcttgagaaactg

SEQ ID NO: 55275 - DNA, 270 bp, Zea mays
aacaagatggatgcaaccactccaaaatactccaaggcacgttatgatgagattgtgaaggaagtctcatcctacctcaagaaagttgggtacaaccctgataagattgccttcgttcccatttctggttttgagggcgacaacatgattgagaggtccaccaaccttgactggtacaaaggcccaaccctgcttgaggctcttgaccagatcaccgagcccaagaggccttcggacaaacccctgcgtctgcccctcaagatgtgtaca

SEQ ID NO: 55276 - DNA, 133 bp, Zea mays
tctcgagccgaatctggctcgaggaggaacatcccgcccaaggccgacctgggcgacctccgacgcctcgcggcggggctgcacggccataacggctctgccatgatcgacggctccgagagcttcgacggcg

SEQ ID NO: 55277 - DNA, 243 bp, Zea mays
ggatccaaccccaacaaacttccaggcgacggactgaggatgagtgaagaggataaggctgctgcttctgctgagcagcctaagagggcccctaagctcaatgaaaggatcctctcctctctgtccaggaggtccgtagctgctcatccatggcatgatctcgagatcggtcctggtgctcctgctgtattcaatgttgttgttgagatcacaaaaggaaagcaagtcaaatacgagcttgac

SEQ ID NO: 55278 - DNA, 273 bp, Zea mays
cgaaggaccaatcatacaaaagagcactgctttttgttgataactcaggtgctgatgtggtccttggaatgcttcctttagctagggagcttttacgccatggaacagaggtagttcttgttgcaaattcgttgccggctttgaatgatgttaccgctaatgaacttccagaagttatagctgaagcctcaaagcactgtggtatccttcggaaagctgcagaagctggtggattgatagtcgatgcaatggctggcatccaagatgattcaa

SEQ ID NO: 55279 - DNA, 264 bp, Zea mays
caagtggctgaagcctgggggcaaggtccttatcagtgactactgcaggagtcctgggaaaccatcagaggaatttgcagcgtacattaagcagagaggttatgacctatatgctgtggaggcttatggacagatgttgaagagtgctggttttcgtgatgtcattgctgaggatcgaactgatcagttccttggtgttttagataaggagttagctgaatttgaaaagaacaaggacgatttcctgtctgacttcacccaggg

SEQ ID NO: 55280 - DNA, 271 bp, Zea mays
tgaagccgccgccgctgcagtgtccatagccaccgcaggagactgagatggggggttttgtcaagacccacaagaccaatgcgtacttcaagcgtttccaggtgaagttcaagagaaggcgcgctggcaagacagactacagggccaggataaggctgattaaccaagacaaaaacaagtacaatacacccaaatacagatttgttgtgcgatttaccaacaaggacatcacagcacaaatcatctctgctagtatagcaggtgatatggt

SEQ ID NO: 55281 - DNA, 175 bp, Zea mays
ggaggctcttcctggtgacaatgttggcttcaacgtgaagaacgttgctgtcaaggatctcaagcgtgggtttgtggcctccaactccaaggatgaccctgccaaggaggctgccagcttcacctcccaggtcatcatcatgaaccaccctgggcagattggaaacggctatgcc

SEQ ID NO: 55282 - DNA, 183 bp, Zea mays
actgcggcaagtacgcggatgagctcatcaagaatgctgcctacatcggcacccctggcaagggtatccttgctgctgatgagtcaactggcaccattggcaagcgcctttccagcatcaatgtcgagaacgtggaggagaaccggcgggctctccgtgagctccctgttctgctgccctggt

SEQ ID NO: 55283 - DNA, 185 bp, Zea mays
aacgcatcgcgacggctccccaaccccaacaagtctctcggccaggtctccctctccccggctctccgccttcctcttccagtccccgcgcgcgagatcgccgccccgtgtgggccctagatcccgatggcctcgcgccgccgcaccctgctcaaggtcatcatcctcggcgatagtggggttgg

SEQ ID NO: 55284 - DNA, 218 bp, Zea mays
cgaaaccctcgccagtccccaactcgaacctcagtcaggcagcgtgaggagggagagttcaaggaccgaggcggcgtcgggcgagatgaagcttaacgtcaagaccctcaagggcaccaacttcgagatcgaggcgagccccgatgcatcggttgctgatgtgaagaggatcattgagaccactcaaggtcagagtactacgcgggggaccaacaatt

SEQ ID NO: 55285 - DNA, 204 bp, Zea mays
gtccgactcccagccgtcgtctgctgcgtactccgcctccagtttggtctgtttcttgcaagttgctcttgcggtagttcccccaactgtcaccatgcagaacgaggagggtaagactgtggacctctatgttcccaggaagtgctcggccacaaacaggatcatcactgccaaggaccatgcctctgtccagatcaacattgg

SEQ ID NO: 55286 - DNA, 168 bp, Zea mays
cccagacccagcagctattgtggtcgtccctcagccgcgtcgcaccgcatcgcattctacgattcgaagctctctctgctcgcagccatggcgaagaattacccaaccgtgagcgccgagtacagcgaggccggtcgagaaggccaggcgcaagtgccgcgccctcat

SEQ ID NO: 55287 - DNA, 187 bp, Zea mays
caaatccccctgtcccgctaggattcccccgaaaccctcccccaaaaccccagagctgagaagagcgcaagatgttcggcttcgggcaccacggccaccacggctagaacccgccggcgcacggcgccgtgcaccagcccaccttcaagatcttctgcaaggccgacgagggttactgcctcaccgt

SEQ ID NO: 55288 - DNA, 234 bp, Zea mays
agaaaatccactcaaggtcccgggcaaggagggcccatgaggccaagcagaaggggaggcactctggttacggtaagcgcaggggtaccagggaggctaggctccccaccaagatcctttggatgcgcaggatgcgtgtcctcaggcgtctgctgcgcaagtatcgtgaagcaaagaaaatcgacaaacacctgtaccacgatatgtatatgaaagtaaaagggaccttgttaa

SEQ ID NO: 55289 - DNA, 150 bp, Zea mays
gtcggcagctcgccgcgcttcagggtctacgacgtcgacttcggcttcggacggcccgagcgcgtccgcagcggcgggaacaacaagttcgacggcatagtgtacctgtaccccggccgcggcggtgacggcggcatcgatgtcgagctg

SEQ ID NO: 55290 - DNA, 180 bp, Zea mays
agaagattcctctttaccagcacatcgaaaatcttgatgggaacaaaactctggtgctccctgtacctgcctttaatgtgattaatggagggtcacatgctggaaacaagcttgccatgcaggagttcatgatcctcccaactggtgcctcctcgttcaaggaggccatgaagatgggag

SEQ ID NO: 55291 - DNA, 225 bp, Zea mays
attcctcctccggatttcgcagtcagcggtggtgaaggtagcgggcgcggaggaagatggggctcgcgttcgggaagctcttcagccggctcttcgccaagaaggagatgcggattcttatggtcggtctcgacgccgccggtaaaaccaccatcctctacaagctcaagctcggcgagatcgtcacaaccatccccaccatcggtttcaatgtggaaactgttg

SEQ ID NO: 55292 - DNA, 186 bp, Zea mays
caaaaccagaccaccaaacaagtgccagcgccctctcgcagtcgccgcaatggagagcaccttcatcatgatcaagcctgatggcgtccagaggggcctcattggtgagatcatcagccgttttgagaagaagggcttctacctcaaggccttgaagcttgtcaacgtggagaggtcgtttgccga

SEQ ID NO: 55293 - DNA, 181 bp, Zea mays
gcttctccctcctcctcgctcgctcgatcgctcccacgtcctcgcctccctccacaaaccaccaccaccatccaggatcgcagcgcggcgcgcgagagacgggtgagcaggtcgggcaagatgagggagatcctgcacatccagggcggccattggggaaaccagatcggcgcaaggttct

SEQ ID NO: 55294 - DNA, 180 bp, Zea mays
gcccgcagtcgcttgcgcgcagagcacttcgcaccgacgccccatcccatcgccgccagtgtctgctcgatccgatggctcccacgaagaagtcgaagaagagcacagagagcatcaacaacaagctgcagctggtgatgaagagcggcaagtacaccctgggctacaagaccgtcctca

SEQ ID NO: 55295 - DNA, 245 bp, Zea mays
gctccgtccagcgcgtccacctcccaaacccctactcccccaggaagcaatggcttcccccacccagggccaggtcatcacctgcaaagcggcggtggcgtacgagccgaacaagccactcgtgatcgaggacgtgcaggtggcgccgccgcagcgcggcgagagtccgcgtcaagatcctcttcaccgcgctctgccacaccgaccactacacctggaacggcagggatctgaaggtctttttc

SEQ ID NO: 55296 - DNA, 174 bp, Zea mays
ctcgagccctcgcccctctcaaacctccgcgctcccgcccagctagggtttccccgatctcccctcctcctcaaccgccgccgtctccgagagcgccgccacgatgttggagctgcggcttgtgcaggggagcctcctcaagaaggtcctggaggcgatccgcgagctggtcaa

SEQ ID NO: 55297 - DNA, 161 bp, Zea mays
aaaaggggaaaaaaggagagataacacacacacacacaaaccccaatcccctgcggcggcgatggacccgtcatcggcgggctccggcggcaactccctcccgtccgtcggccccgacgggcagaagcggcgcgtgtgctacttctacgacccggatgtgg

SEQ ID NO: 55298 - DNA, 175 bp, Zea mays
gttcattctttttgcttcatgcatgtgctcataatcccaccggtgtagatcctacggaggaacaatggagagaaatatcccatcagttcaaggtgaaaaaacattttccattctttgacatggcataccaagggtttgccagtggtgatccagagagagatgccaaggcaatccg

SEQ ID NO: 55299 - DNA, 177 bp, Zea mays
ctcgagccctcgcccctctcaaacctccgcgctcccgcccagctagggtttccccgatctcccctcctcctcaaccgccgccgtctccgagagcgccgccacgatgttggagctgcggcttgtgcaggggagcctcctcaagaaggtcctggaggcgatccgcgagctggtcaacga

SEQ ID NO: 55300 - DNA, 173 bp, Zea mays
ctgagctgcagtggcaattagaccagaagatccccgctcctgtctctaaagatgggaaagggcaaggatggtggaggctttctgtgctacctggaatctggccaacagtcagaactttgatgagtacatgaaggctctaggcgtgggctttcccactaggcaggtgggaattg

SEQ ID NO: 55301 - DNA, 174 bp, Zea mays
gtgaagccgccgccgctgcagtgtccatagccaccgcaggagactgagatggggggttttgtcaagacccacaagaccaatgcgtacttcaagcgtttccaggtgaagttcaagagaaggcgcgctggcaagacagactacagggccaggataaggctgattaaccaagacaaa

SEQ ID NO: 55302 - DNA, 161 bp, Zea mays
gctcctcacgccgccgccgccgccgccgtcgccgccaccacatccgtagcgcccagccgccggagaagaggagggagccagcaccagccaccatgggtcgcgtccgcaccaagaccgtgaagaagacctccaggcaggtgatcgagaagtactactcccgc

SEQ ID NO: 55303 - DNA, 220 bp, Zea mays
caacaaacttgttcaagatgcttcttaagtaccgccccgaggacaaagctgccaagaaggagaggctcttgaagagggcccaggctgaaaacgaggggaaaactgttgagtcaaagaaaccaattgttgtgaagtacggccttaaccatgtgacttacctcatcgagcagagcaaggcccagctggttgtcatagctcatgatgttgatccgatcgaact

SEQ ID NO: 55304 - DNA, 301 bp, Zea mays
ctgatactgatgcttcctcccactataaggttccgttctcaagaactgtctacattgagaaaactgattttcgcctaaaggactcaaaagactactatgggctagcccctggtaaatctgtcatgctaaggtatgcgttccccataaaatgcacagatgttatctctggtgatagtcctgatgatattgttgaaattcgagctgaatatgatcctttgaagacttctaaactgaagggtgttcttcactggattgctgagccagcacctggtgtagagccattgaaggtggaagtaagatt

SEQ ID NO: 55305 - DNA, 287 bp, Zea mays
gggaagcgttccagaaacaaccgcactcttggaacagagatgggataagatcttctacacaggtaatggaactgtaggacgtatagtgatggcagcagccgcaaagcatctgaccccggtagctctggagcttggtgggaaatcccctgttatcgtggattcaaatgttgatctccatgttgctgctaagaggattgttgttggcaaatggggatgcaacaacggccaagcatgcattgctccagattacatcataacgacaaaatcatttgcaccggagctggtgg

SEQ ID NO: 55306 - DNA, 286 bp, Zea mays
agaagagtcattagccaaagtaaagctcagccaagtaactaatgctcgagcaggcagctacagctgaggaatgaagcgccggctaagtgttgcgatcgcactgattggtgacccagaattggtttttctcgatgaacctgtgatgaaatagaaaaattttcattgtgttgttccttagactcccttgtggccctgtcacatgtcaatctaactaaatgtatatgctttgtagactactggcatggatccaataacaaggaggcatgtctgggacatcatagaggag

SEQ ID NO: 55307 - DNA, 158 bp, Zea mays
aattaatcatgtagaaggctatggagggctccctatgaaggctcagatgttcctttcgactgctcttacaatgtgggacgctgatttctatgtaaaagccgacgataatgtccatgtcaacattggtatcaccagatcgattttggcgcgacacatga

SEQ ID NO: 55308 - DNA, 98 bp, Zea mays
gtgttatgcaaaataatgctgctgtattccgtacacaagaaacacttgaagaaggttgtgagctgattagcaaaacatgggaaagtttccatgatgtg

SEQ ID NO: 55309 - DNA, 259 bp, Zea mays
ctgggattacattcgggtgaatgtaagtgagctggctgtggaggagctgagtgtttctgagtacttggcattcaaggaacagctggtggatggacaatccaacagcaactttgtgcttgagcttgattttgagcccttcaatgcctcctttcctcgtccttccatgtcgaagtcaatcggaaatggagtgcaattccttaaccgacacctgtcgtccaagttgttccgggacaaggagagtttgtaccccttgctgaat

SEQ ID NO: 55310 - DNA, 112 bp, Zea mays
cttctcgtgatgttgtttcaagatcaatgacaatggaaattacgagaaggacgtggtgtagggccattgaaggatcacatttatttgcatctgaaccatctgccacctgagg

SEQ ID NO: 55311 - DNA, 294 bp, Zea mays
ggcgcttcgggagccgcggcttatggtgcagacatggccaagtccaagaaccacaccacacacaaccagtcacgaaaatggcacagaaatggtatcaagaaaccccgatcacaaagatacgaatctcttaagggggtggaccccaagttcctgaggaacatgcgctttgccaagaagcacaacaaaaagggcctaaagaagatgcaggccaacaatgccaaggccatgagtgcacgtgccgaggctatcaaggccctcgtaaagcccaaggaggttaagcccaagatcccaaag

SEQ ID NO: 55312 - DNA, 158 bp, Zea mays
cgtttagaacctctaaaatttcccccactcgccagtcgcagcatcacctgtagcagccatggacgccagctggagcggtagcaaggggaagaagggggcggccgggcgcaatgcaggcggccccaggaagaattcggtgacgcggtccgtcaaggccg

SEQ ID NO: 55313 - DNA, 91 bp, Zea mays
gccattcttcgtttggatcttgctggtcgggacctcacagactccctcatgagaattctcactgagaggggttactccttcacaacctcag

SEQ ID NO: 55314 - DNA, 291 bp, Zea mays
ccgaagctcaatcaattcactcaaacctcttccccaaatcttcgattagattctcgttgacaagaagactagaaccgaacctgaccatagtcgctgatccgccgcagcaacgtgttcgatcccttctccctcgacctctgggacccctttgagggcttccccttcggctccggcagcagcagctgtctcttcccctcgttcccgcggaccagctcggagaccgcggccttcgctggcgcgcggatcgactggaaggagactccagaggcgcacgtgttcaaggcagacgta

SEQ ID NO: 55315 - DNA, 282 bp, Zea mays
gtgacgcgagcacgagcatccatcgtttccccttcttccccatcgcgtgccctcgccgcagccatcttccatggcggaccagctcacggacgagcagatcgcggagttcaaggaggccttcagcctcttcgataaggatggcgacggctgcatcactaccaaggagcttggaactgtgatgcgctcccttggccagaaccccactgaagcagagctgcaggacatgatccacgaggttgatgctgatggcaatgggacattgacttcccagagttcctgaac

SEQ ID NO: 55316 - DNA, 280 bp, Zea mays
ctagccgccgccgccgaagctcgtctcccttgagaggtgccgggatcgaggaactggccgagtactaggtagagaatcggtttttcttgtctcagcccggggtctgctgcgtctggtggtggtgaacgggagatattcgtgagatctgttccggatcaggcgtgcgagctcgggaatcaggggtttcacacatagcttcgtcgatttgaatttgatgtactaatggagtctaagggtggcaaaaagtctagcagtagtcgttctatgatgtatgaagctc

SEQ ID NO: 55317 - DNA, 149 bp, Zea mays
gccattcttcgtttggatcttgctggtcgggacctcacagactccctcatgaaaattctcactgagaggggttactccttcacaacctcagccgagcgagaaattgtaagggacatcaaggagaagctagcatatatagcccttgatta

SEQ ID NO: 55318 - DNA, 301 bp, Zea mays
ccgcagttccacgaccacaccgttcctccgagcccaggagcagccccgcgccaggaggaagtttgttcttttaacaatatgtcgagggaggagaatgtttacatggccaagttggctgagcaggctgaaaggtatgaggagatggttgagtatatggagaaggtggctaagactgtagatgtggaagagctcactgttgaggagcgtaaccttctgtctgttgcatacaagaatgtgattggggctcgccgcgcttcatggcgcattgtttcttccattgaacaaaagaggagcccgtaag

SEQ ID NO: 55319 - DNA, 305 bp, Zea mays
agcagctgccggcaaaatggccccgaagagatgcggtagggcgccggtccccgccaagaagaaggcggtggtgacgaacccgctcttcgagaagaggccgaagcagtttgggatcggcggcgcccttccgcccaagaaggacctccaccgcttcgtcaagtggcccaaggtcgtgcgcatccagcgccagcgccgcatcctcaagcagcgcctcaaggtgcccccggcgctcaaccagttcacacgtaccctcgacaagaaccttgcaacaaacttgttcaagatgctcttaagtaccgccccga

SEQ ID NO: 55320 - DNA, 294 bp, Zea mays
cgtttctgagtacaaggaggcaaaagcgctcggtattgatactgtcccagtgcttgttggaccagtgtcatacttgctcctctctaagcctgccaagggtgtggagaaatctttctctcttctttcgcttcttggcagcattcttcccatctacaaggaggttgtttctgaactgaaggcagctggtgcttcatggattcagtttgatgagcctacccttgttaaagaccttgatgttcacgaattggcagcattctcttcagcatatgctgaactagagtcggcatctctgga

SEQ ID NO: 55321 - DNA, 289 bp, Zea mays
ctcccagccgtcgaaagtcgaaaccctagccccgcctcaacgccggcggtggtggcagcctcagcaccggcacacagcccgccgtacctctcctcgtacgctcccttccggtgtgccgtcgccccctcgaccggtccatcgttcgtcggctcggtagccgccggatcggatcgggatcggccggcgccatgtccaaggccagggtctacaccgacgtcaacgtgctgcgccccaaggagtactgggactacgaggcgctcaccgttcaatggggtgacaggataatatg

SEQ ID NO: 55322 - DNA, 287 bp, Zea mays
gtatatctgcaaaggttactgccttggcaggcaatacaaatttctgggctgttggctgtgaagatggttacctgcaggtttacacaaaatgtggaagacgagccatgccggcaatgatgatgggatctgcagctgtttttatagactgtgatgactgctggaaattgcttcttgtcacaagaagaggtttaatgtatatatgggacctccataacaggacctgcattttgcaggactcattggctgctttgggtgcatctccagatgagtcatcagcaaacatgcag

SEQ ID NO: 55323 - DNA, 298 bp, Zea mays
caagttcaaggagatcgttgtggaccaggtcggggatcgcgctaccagctacgaggacttcacaaacagcctccccgagaatgactgccgatacgcgatctatgatttcgactttgtcactgcagaagatgtccagaagagcaggatcttctatatcctatggtccccatcctccgccaaggtgaagagcaagatgctttatgcaagctcagaccaaaaattcaagagtgggctcaatggcattcaggtggaactgcaggctactgatgcaagtgaaatcagcttgatgagatcaagg

SEQ ID NO: 55324 - DNA, 297 bp, Zea mays
caacgcatcgcgacggctccccaaccccaacaagtctctcggccaggtctccctctccccggctctccgccttcctcttccagtccccgcgcgcgagatcgccgccccgtgtgggccctagatcccgatggcctcgcgccgccgcaccctgctcaaggtcatcgtcctcggcgatagtggggttgggaatacttccttgatgaaccaatatgtgaacaagaagttcagcaatcagtacaaggctacgatcggcgcggatttcctcaccaaggaggtgcagttcgagacaggctcttc

SEQ ID NO: 55325 - DNA, 298 bp, Zea mays
agtctgctgccgcagactggtagtagccggcgcgccgtcaccgtatcctcagatcagcggcgagcagaaaccacaccactctactgacgcccgacgagcagtgtaacattttccttcagccatgggtaaggagaagactcacatcaacattgtggtcattggccatgtcgactctggcaagtcgaccaccactggccacctgatctacaagcttggaggtattgacaagcgagtgattgagaggttcgatgtagaggctgccgagatgaacaagcggtcattcaatatgcgtgggtgc

SEQ ID NO: 55326 - DNA, 281 bp, Zea mays
caaaagactgagacctattatatagtaaacgctccatacatattttctgcatgttggaaggtcgtgaagcctctgttgcaagagagaacaagggagaaagttcatgtgttgcgtggctgcgggagagacgagcttctacagatcatggactactcctccctcccccatttctgcagacaggagggctcgggctcatccagacattcgtcaggcgactccgataactgcttctctctcgaccacccgttccaccaggagctctacagcttcatccaggagca

SEQ ID NO: 55327 - DNA, 282 bp, Zea mays
ctgtttccgcgcgcgagatcgccgccccgggtgggctctagatcccgatggcctcgcgccgccgcaccatgctcaaggtcatcatcctcggcgacagcggggttgggaagacgtctttgatgaaccaatatgtgaacaagaagttcagcaaccagtacaaggctacgattggggcggatttcctcaccaaggaggtgcagttcgaggacaggctcttcactctgcaaatatgggacactgctggtcaggaaaggtttcagagtcttggcttgcattctaccg

SEQ ID NO: 55328 - DNA, 294 bp, Zea mays
gttcatccggctgttcgccaagaaggagatgcggatcctgatggtgggactcgacgccgccggaaagaccaccatcctctacaagctgaagctaggcgagatcgtcaccaccatccccaccatcggattcaatgttgaaactgtggagtacaagaacatcagcttcactgtctgggatgtcgggggccaggacaagatcaggccactgtggaggcattacttccagaacacccagggtctcatctttgttgtggacagcaatgatagggaccgtgttgttaagcaagggatgag

SEQ ID NO: 55329 - DNA, 283 bp, Zea mays
gcagctcgacttctcgcccagcggcatctgctccatggtgcaggtcaccgacctcaagaactcgccgcccatgctcggcaagcaccgcgccgtcacgcgccaggctctcgccctgctacaggacaactacccggagttcgtggccaagaaggtgttcatcaacgtgccgtggtggtacctggcggcaaacaaggtgatgagcccattcctgactcagcgcaccaggagcaagatcgtcttctgcagccccggcaagtcggcggagaccctcttcaggtacacg

SEQ ID NO: 55330 - DNA, 289 bp, Zea mays
tggaagaagcttgaagatattgttccttcatcacacaactgtgatattccgcatgtgaaccgtactgagtaccagctgattgatatatcagaggatggatttgtgagccttctgacttcagatgataacactaaggatgatcttagactcccaactgatgatactcttgtggcccagatcaaggaagggtatgaaagcggcaaggatcttgttgtgactgtccagtctgctatgggggaggagcagatctgcgcgctgaaggatgttggccccaagtacttacctgcct

SEQ ID NO: 55331 - DNA, 288 bp, Zea mays
gttcatccggctgttcgccaagaaggagatgcggatcctgatggtgggactcgacgccgccggaaagaccaccatcctctacaagctgaagctaggcgagatcgtcaccaccatccccaccatcggattcaatgttgaaactgtggagtacaagaacatcagcatcactgtctgggatgtcgggggccaggacaagatcaggccactgtggaggcattacttccagaacacccagggtctcatctttgttgtggacagcaatgatagggaccgtgtgttgaagcaagg

SEQ ID NO: 55332 - DNA, 289 bp, Zea mays
aaaagactgagacctattatatagtaaacgctccatacatattttctgcatgttggaaggtcgtgaagcctctgttgcaagagagaacaaggaagaaagttcatgtgttgcgtggctgcgggagagacgagcttctacagatcatggactactcctccctcccccatttctgcagacaggagggctcgggctcatccaaacattcgtcaggcgactccgataactgcttctctctcgaccacccgttccaccaggagctctacagcttcatccagagcaggcgctgaac

SEQ ID NO: 55333 - DNA, 289 bp, Zea mays
gccttcttgaagttatggccgcattcccttcagctaagccaccactgggagtgttttttgcagcaatagctcctcgtctgcaaccacgatactactcaatttcatcatctccaaagatggctccctccagaattcatgtaacatgtgcgttagtttatgggccttcaccaacaggaaggatccaccaaggagtttgctcaacatggatgaagaatacaattcctctggaatatagcgaagaatgcagctgggtcccgatcttgtgaggcagtcaattcaagtacctgct

SEQ ID NO: 55334 - DNA, 280 bp, Zea mays
cggagctggacgcgtgtgctctgggagtcgtgcaagggcgacaaccagagctggaagatcctgccgtggggtcccgaggccaactcctccgcggcccacgcgggaggcccgcacgccgtgcgcgtcttctgcaaggccggcggcgaggactacagcctcacggtgcgcaacggcactgcgtgcctggcgcacaccaacccgcgggacgagtaccagcactggttcaaggacatgcgccacagcacccgggtgccggacgaggagggctaccggcttcgcg

SEQ ID NO: 55335 - DNA, 199 bp, Zea mays
aaaagaaatggtggccataaagatcatcaggggcattaagaagtacagggatgctgcaatgatcgaaattggcatgcttgagaagcttggtaaatatggtgaaagcagatccagttgtgttcaaattcggaactggtttgactagcgtaaccatatctggattgtctttgagaggcttggaccaagcttatatgatttt

SEQ ID NO: 55336 - DNA, 289 bp, Zea mays
cctcaaccaaattcaaggtcacagcggcgaacctctcggctatcatgtctggccgcggcaagggcgggaagggtctgggcaagggcggcgccaagcgccaccgcaaggtgctgcgcgacaacatccagggcatcaccaagccggcgattcgcaggttggcgaggaggggcggcgtcaagcgcatctccgggctcatctacgaggagactcgcggcgtgctcaagatcttcctcgagaacgtcatccgcgacgccgtcacctacaccgagcacgccgccgcaagactgtc

SEQ ID NO: 55337 - DNA, 279 bp, Zea mays
gctcaccagcagctgccccttgctgtcgccgcctctctccgcgcgaccgatctaccgccgccgccaccatgtcgctgatcgccggcgaggacttccaacatattctgcgtctgctgaacaccaacgtggatgggaagcagaagatcatgttcgccatgacctccataaagggtgttgggcgcggcttctcgaacatcgtctgcaagaaggccgacatcgacatgaacaagagggcccgtgagctgacgcctgaagagctggagcgcctgattacgtcgt

SEQ ID NO: 55338 - DNA, 253 bp, Zea mays
ggcaggtcaatacttcgtcattaatttgtacccgatttcttgtcattcatttcataaaaacatgtagttttgatgtatttggtcataactaacaattatctatccttctgaactaaactagtatcacagggtcaaatgtacagaattgttaatataatagtattatcttatttagtgtatgtgaaagggaaatgtgcccttgggccatttttaagtattttggtgattaagtgtcaaacacaaatggttgtgt

SEQ ID NO: 55339 - DNA, 266 bp, Zea mays
caagttcaaggagatcgttgtggaccaggtcggggatcgcgctaccagctacgaggacttcacaaacagcctccccgagaatgactgccgatacgcgatctatgatttcgactttgtcactgcagaagatgtccagaagagcaggatcttctatatcctatggtccccatcctccgccaaggtgaagagcaagatgctttatgcaagctcaaaccaaaaattcaagagtgggctcaatggcattcaggtggaactgcaggctactg

SEQ ID NO: 55340 - DNA, 267 bp, Zea mays
gccgccgctgcagtgtccatagccaccgcaggagactgagatggggggttttgtcaagacccacaagaccaatgcgtacttcaagcgtttccaggtgaagttcaagagaaggcgcgctggcaagacagactacagggccaggataaggctgattaaccaagacaaaaacaagtacaatacacccaaatacagatttgttgtgcgatttaccaacaaggacatcacagcacaaatcatctctgctagtatagcaggtgatatggttct

SEQ ID NO: 55341 - DNA, 261 bp, Zea mays
ggaagcgcgccccttggaggagggtctcgctgaggccatcgatgacggccgtattggcccacgtgatgatccgaaggtgcgctcccagatcctctctcaggagtttgggtgggacaaggacctggccaagaagatttggtgttttggacctgagaccactggcccgaacatggttgtagatatgtgcaagggagtgcagtatctcagtgaaatcaaggattctgttgtggctggtttccagtggccatcaaaggagggtgc

SEQ ID NO: 55342 - DNA, 261 bp, Zea mays
aaacacaagcctcagatctcagtcacctgcgccgccgcttcgttcgtgtggaggggagaatagtggaaatggcggcgaccgagggcgtgctcctggggatgggcaccccctcctcgacatctccgctgtcgtcgatgacgccttcctgacaaagtatgacatcaagctgcacaatgctattctcgctgaggagacgcacttgcctatgtatgacgagttggctagcaagagcaatgttgattatattgccggagcagccac

SEQ ID NO: 55343 - DNA, 266 bp, Zea mays
caggcgtgcgagctcgggaatcaggggtttcacacatagcttcgtcgatttgaatttgatgtactaatggagtctaagggtggcaaaaagtctagcagtagtcgttccatgatgtatgaagctccccttggctacagcattgaggacgttcgacctgccggaggcgtgaagaagttccagtctgctgcttactccaactgcgcaaagaagccatcctgatatcccttgtggcttcctcattctagtagtgtaggatttcttttctg

SEQ ID NO: 55344 - DNA, 249 bp, Zea mays
ggagaggagaggaacagagccaagaaacaagcccggaagatggcaggcggcggagtggtgaagcacatcctgctggcaagcttcaaggaggaggtgacgcagagcgcctggacgagctcatccgaggatacgccgcgctcgtcggcgtggtcccctccatgaaggcgttccactggggaactgatgtgagcatagaaaacatgcatcaagggttcacgcacgtcttcgagtccacgtttgataacacgg

SEQ ID NO: 55345 - DNA, 121 bp, Zea mays
cgcacacacacacaaccagatctcccccaaatccacccgtcggtacctccgcttcaagatgcagatctttgtgaaaaccctgactggcaagactagcactccgaggtggtgtcgtctgaca

SEQ ID NO: 55346 - DNA, 258 bp, Zea mays
gccgtctacgcctccaatttggcctctctcccttgcaagtttaagcttcaccttcaaccatgggtaaggagaagtcccacatcaacattgtggtcattggcccgtcgactctggcaagtcgaccaccaccggccacctgatctacaagcttggaggcattgacaagcgtgtaatagagaggtttgagaaggaggctgctgagatgaacaagcggtccttcaagtatgcttgggtgctcgacaagctcaaggctgagcg

SEQ ID NO: 55347 - DNA, 266 bp, Zea mays
gtgccatatacatcgagctgtactacatctttgctagtgtttggggccacaggatttacacaatctacagcattctgtttattgtctttatcatcctccttatcgtcactgcattcatcacagttgcactgacatacttccagcttgctgctgaggaccatgagtggtggtggaggtcattcctatgcggaggatcaactggatttttcgtatacggctactgcctgtactactactatgcgcgatcggatatgtctggcttcatg

SEQ ID NO: 55348 - DNA, 293 bp, Zea mays
gagcgcagtagctcggaatacggccgactcgagcgcttcggagcaacgtacaaagctgaggtagcaccaggaaaattggtggcaataaagagacttgctattggacaggttccaaggcattcagcaattccaagcagaggtcaaaacacttgggaggtgtcgccattccaatcttgtaacactcataggataccatctcagcgattcagagatgtttctactatataattttctgcctggtggcaatttagaaagattcatacaagaaaggactaagagaccattgattggag

SEQ ID NO: 55349 - DNA, 169 bp, Zea mays
gcaaaaggaacataaggatagaggagagaaataaacaatggggaagggagatgtggctaccaggtcaaaatctcaaaaatcaccagcaatacagaatgagcaagtacacctgctaacccgcccacagcatatcctgattggtctcagttccaggcatactataatgctg

SEQ ID NO: 55350 - DNA, 220 bp, Zea mays
gtgctgcaaattctatatagctctgtcgcagcatggcctcggtgggcgtggcacgctcttctttgggatttcagaatggcacaagttctagcagtgaaccagatcgtcttcccaacgagttgggcagtatgagcataagggtcgataaggacgttgaagatattgtagtcaatggcaatggggcggacttggtcatatcatagtgaccaccattgatggg

SEQ ID NO: 55351 - DNA, 256 bp, Zea mays
atggcccgcacgaagcagacggcgaggacgtccactggcggcaaggcgccaaggaagcagctggccaccaaggcggcgcgcaagtctgccccggcgaccggcggagtgaagaagccccaccgtttccgccccggcaccgtcgcgctccgggagatccgcaagtaccagaagagcacggagctgctgatccgcaagctgccgttccagcgcctggtgcgtaatatcgcccaggacttcaagaccgaccttcgtttcc

SEQ ID NO: 55352 - DNA, 128 bp, Zea mays
cagatgagttaccacgtcttgtctatgtctctcgtgaaaagagaccaggctgtcagcatcacaagagggctggtgcaacgaatgcgctgattcgtgtatactgtgtgctgacaaatggtgcctatctt

SEQ ID NO: 55353 - DNA, 248 bp, Zea mays
ggaggccatgtgctgcgcgaaggtgagtggctgtcgctgaatgggtcgactggtgaggtgatccttggaaagcagccgctttccccaccagcccttagtggcgatctgggaactttcatggcctgggtggatgatgttagaaagctcaaggtcctggctaacgccgatatccctgatgatgcattgactgcgcgaaacaatggggcacaaggacttggattatgccggacagagcacatgttctttgc

SEQ ID NO: 55354 - DNA, 96 bp, Zea mays
ggaggtccgtagctgctcatccgtggcatgatcttgagatcggtcctgatgctcctgctgtttccgaatgttgttgttcagatcacaaagggaagc

SEQ ID NO: 55355 - DNA, 263 bp, Zea mays
tgcgaagcaacgttgcgtattcgtgagagaccctatgagaatgatctttatggagcttcagaggcaagggtatctgatgcacagattgcatctgcgtagtggaaggatgtatgttaccatggaccgttatgagaatgactgggatctagttaaacgtggctgggatgctcaggtgctcggagatggaccctacaaattcaaaagtgcacttgaggctgtgatcacagtgacagtataccccaaggctaatgatgactattgcc

SEQ ID NO: 55356 - DNA, 261 bp, Zea mays
ccgtcatgtcgaagcgaggtaggggaggttcggctgggaacaagttccgcatgtcactgggtctaccggtggcggccacggtgaactgcgcggacaacacgggcgccaagaacctctacatcatctccgtcaagggcatcaagggccgcctcaaccgcctcccgtccgcctgtgtcggcgacatcgtcatggccaccgtaaagaagggaaagcccgacctcaggaagaaagtgatgcccgccgtcatcgtccgccagcgca

SEQ ID NO: 55357 - DNA, 260 bp, Zea mays
tgaggccccaaaacatcagatcccagtaaatacatacgctatatatacaatagggtgatacttgaaaatgctacagttcgagctagtgcagtcagcacattggcaaaatttggtgccttggttgactcactcaagcctcgcatatgtgtgctcctgagacgctgcctgtttgatggagttgacgacgtgcgctatagagcgaccctttacctcaaattgttaggtggggaagctcacgtgggtgagacagagaaggatgt

SEQ ID NO: 55358 - DNA, 162 bp, Zea mays
gttccgccctcaccctgcccgcgatcgcgacctctgccgcttccacgccgacgattacgtctccttcctccggtccgtcacccccgaaacgcagcaggaccagatccgcgcgctcaagcgcttcaacgtcggcgaggaatgccccgtcttcgacggtctcta

SEQ ID NO: 55359 - DNA, 255 bp, Zea mays
ttgcatatacacctccagaatatttaagaaatggaagagtaacatcagaaagtgtcatattcagctttggcactatactgctggacctcctaagtggaaagcgtatacctccttcccgtgctcttgatatgataaaaggcaacaatatccaagtactgatggattcacatttggagggaaactactcaacagatgaggcaaccacattggttgacctggcttcccagtgcctacagtatgagcctagggatcggg

SEQ ID NO: 55360 - DNA, 288 bp, Zea mays
cagtcgctgcacgcgtagtagctcggcatcggtcgactcgaccgtggagatgcatttaatgtctatttggattttaaggagtctggtctaaaggcagatgttgttctgttcagctcttttattgatactttggccaagaatggcttggttgagtgtgctttgtctttgcttgatgagatgatgaagatgggtatcaagccaaatgttgttacctacaacacaatcattgatgcatttggcaagtcgaagatttttactgaggaggattctgatattggtgccatggga

SEQ ID NO: 55361 - DNA, 244 bp, Zea mays
ggccgctcgcgatctagaactagatgacacagctgctttcaaaaacttcaataagtggggcaatattgtgtttcccctaccatttggaagagttccagtccctccgaaagttttatccatgaactggatgagaagacaagtgcttctctgaaattcacggtactgaacccaaaaggacgcatctggacaatggttgcaggtggtggtgctagtgtcatatacgcagacactgttggtgatttgg

SEQ ID NO: 55362 - DNA, 164 bp, Zea mays
gtggccttgacactgaggaatcttacccttaccaaggtgtcaatggaatctgcaagtttaagaatgagaatgttggagtcaaggttttggactcggttaacatcaccctgggtgctgaggatgaactgaaggatgctgttggtctggttcgcccagttagtgtt

SEQ ID NO: 55363 - DNA, 251 bp, Zea mays
gaagaaagggtttttgttgaaaggcttaaaacttttccagtgccccaaggacttggcgcaggagcattacaaggatttgaaggataaacctttctttcctaagctgatcgattacataacttctggccctgttgtctgcatggcctgggagggtgctggtgttgttgcatcagctcgcaaattaataggagctactaacccccttcaagctgaaccagggactatacggggtgatcttgcagttcaaactg

SEQ ID NO: 55364 - DNA, 264 bp, Zea mays
cagctcttcagttgaaaagagctatgagctacctgatggacaagtaatcaccattggtgcagagagattcaggtgccctgaggtcctcttccagccgtcgatgattggtatggaggctgctggaatccatgagacaacatacaattcaatcatgaagtgtgacgtggatatcaggaaggacctctatggtaacattgtgctcagtggtggttcgactatgttcccgggtatcgctgatcgtatgagcaaggagatcacttccct

SEQ ID NO: 55365 - DNA, 123 bp, Zea mays
cggtcggccggaacgtctgctacgttcagttcccgcagaggttcgacggcatcgacgtgcacgaccgatacgctaacaggaacaccgtcttcttcgacatcaacatgaaggggctggacggca

SEQ ID NO: 55366 - DNA, 251 bp, Zea mays
attggcagagctgttgttgttcacgctgatcctgatgatcttggaaagggtgggcacgagctgagcaagagcactggaaacgccggtggccgtgttgcttgtgggatcattggactccagggctgaaaacgatcgccggacttgggggtgcctgataggtccgtctcctgccgtcgccagcagacgagcctgaacattgggagacatcgtgaaataagagcgtcgctgatctgtgatcatcgtatttgtca

SEQ ID NO: 55367 - DNA, 249 bp, Zea mays
cgtcatcctcctagctcctctactcgccagtcgccatgggcaagattaagatcggaatcaacggcttcggaaggatcggcaggctcgtggccagggtcgccctccagagcgaggatgtcgagctcgtcgccgtcaacgaccccttcatcaccacggactacatgacctacatgttcaagtacgacaccgtccacggccactggaagctcagcgacatcacactcaaggactccaagacccttctcttcg

SEQ ID NO: 55368 - DNA, 286 bp, Zea mays
tgctgctctccgaccccgagctccgaaggccgcagcatcaggcgcggcccccctcgcgtgtgaccgagatggcgctgccgaatcaggggaccgttgattaccccagcttcaagctcgtcatcgtcggcgatggtggaactggtaaaactacatttgtgaagaggcatctcactggagagtttgagaagaaatatgaaccaaccattggtgtggaagttcatccgttggatttcaccactaactgtggtaagatcaggttctactgctgggatacgcagggcaagag

SEQ ID NO: 55369 - DNA, 287 bp, Zea mays
tgatgatattgttgaaattcgagctgaatatgatcctttgaagacttctaaactgaagggtgttcttcactggattgctgagccagcacctggtgtagagccattgaaggtggaagtaagattattcgagaaattgttcatgtcagagaatcctgctgaattggaagattggcttggcgatcttaacccacacacgaaagaggtgataaaggatgcttatgctgtaccatcacttgccactgcggttctgggtgacaagttccagtttgagcggcttggttacttcg

SEQ ID NO: 55370 - DNA, 289 bp, Zea mays
ctcctcctccagagctcgtcgccaccggccaccgccaccctcgatcacgccgtccgtcgaggtaaggtcagcatggtgagggtcagtgtgctcaacgatgcgctcaagtccatgtacaacgctgagaagatcggcaagaggcaggtcatgatcaggccgtcgtccaaggtcatcatcaagttcctgacggtcatgcagcgccacggctacattggagagttcgagtacgttgatgaccaccgatcgggcaagatcgtggtcgaactcaacgggaggctgaacaagtgcg

SEQ ID NO: 55371 - DNA, 287 bp, Zea mays
ctgatggacatcggcatgatgaccatgacaaaaggacggcagagagatgaaaaagaatggagcgagctcttcaccaaagcagggttcagcgaatacaagatcctgaaggaatttggagctcgtgttgccttcgaagtctatccgtgagatatatatatatatttacatacatatatgtatgtgtgtgggtgccttgcgtggcttggcgtgatgatgtcataaataaagagggtgggtgtgcttgcggtattcatggatggccatggatctgagcacatgacgttgga

SEQ ID NO: 55372 - DNA, 286 bp, Zea mays
gcgtcgcgcgcctcggctacgtctggcagttcatcacgctcgccgggttccacgccgacgcgctacgtcaccgacacgttcgcgcgggacttcgcgcgccgcggcatgctggcctacgtggagaggatccagagggatgagaggatcaacggcgtggagacgctggagcatcagaagtggtcgggcgccaatttctacgacagggtgctcaaggctgtgcagggtggcatctcctcgactgcagccatgggcaaaggagttactgaagagcagttcaaggatccac

SEQ ID NO: 55373 - DNA, 292 bp, Zea mays
tggacaggtaagcagcagcaggaaccctagcaccgccgcatccgcagccatgggtatcgacctcgttgccggtgggaggaacaagaagaccaagcgcacagcgccgaagtccgacgatgtttatctcaagctccttgtcaagctctaccgtttcttggtcaggaggaccaagagcaacttcaatgctgtcattctcaagaggctcttcatgagcaaaaccaatcgcccaccaatctccatgcgccgccttgtcaagttcatggaaggaaaggagaagaacattgctgtgatt

SEQ ID NO: 55374 - DNA, 276 bp, Zea mays
ctcccagccgtcgaaagtcgaaaccctagccccgcctcaccgccggcggtggtggcagcctcagcaccggcacacagcccgccgtacctctcctcgtacgctcccttccggtgtgccgtcgccccctcgaccggtccatcgttcgtcggctcggtagccgccggatcggatcgggatcggccggcgccatgtccaaggccagggtctacaccgacgtcaacgtgctgcgccccaaggagtactgggactacgaggcgctcaccgttcaatggggtg

SEQ ID NO: 55375 - DNA, 277 bp, Zea mays
ggagaagggctacttcgtgctcaacgacatgttccgcttcgtcggggaaatccctgcccctaccgctgtagaggcgcagcagaggcggatgctgtagtcctgtctgtggctgccaacggcacatctactcttgctgtggagcctgccacccctgatgaccgtaatgccgtgccacagcaggaacatcatgttgtggaccgatcaccacctcaacctgaggaggaggaggaggctgaggtttacgatccgccgccagaggaagtagtggatgaggaac

SEQ ID NO: 55376 - DNA, 293 bp, Zea mays
attggagatggcggcgaatctagaggacgtgacgtctctggatctgatgcacgaactgctccgtcggatgaagtgcagctctaagcccgacaagcacctcatcctcatcggtccacctggctctggaaagggtactcagtctcgccttattaaggatgaatattgcctgtgtcatttagccactggtgatatgttgaggtgtgctgtggcagccatgacaactctaggtatcaaagctagagaagctatggataagggagagcttgtttcagataacttggttgtggggatat

SEQ ID NO: 55377 - DNA, 277 bp, Zea mays
aatcttcttttgaatgcaaactgtgacctcaagatatgtgattttgggcttgctcgcaccacctcagaaactgattttatgactgaatatgttgtcacaagatggtatagagcaccagagcttttattgaactcctctgaatatactgctgccattgatgtgtggtctgtgggctgtatatttatggaactgatggaccgaaaacccttgtttcctggaagagaccatgtccatcagctacgtctactaatggagctcattggaacaccgaatgagg

SEQ ID NO: 55378 - DNA, 286 bp, Zea mays
caagcaggggaagatgtcagacgcgctgatcaacggcctcgccggcgccggcggcgggatcatcgcccagctccttacctacccgctccagaccgtgaacgcgcggcaacagacggagcgcgacccctccaagccggcgttcaaggacggcgccgctcgccagttgtatctggttgtgaagaacgaggggtgggagcgcctgtatggcgggcttatgccctctctcgtcggcaccgctgcctcccagggtgtctactactacttctaccaaatattccggaacagg

SEQ ID NO: 55379 - DNA, 280 bp, Zea mays
gtttgcttcaagcatggaccagggaatgaattagatacctattcttgaccccttcccgcccaaggaggagcaggcaggaactccggtatatggtggtaattggtggcacctttatgtacttctttaggggcagcctaccatggcaggggctgaaagcaggatcaagaagcagaaatatgactcaaattagtgcgaaatggatactcccatggaggataccagttttgactggaccattttgaagtatcctcagataggctgcaacctgcggatgaaggca

SEQ ID NO: 55380 - DNA, 279 bp, Zea mays
cggaaatgcgacgcggcgcgctctccctccgtcccgcccgcgctatccccacgttgaggctcggcggccaccgcgacgcccgtggcgctgtcgtcgtccgcgccactgcggcagagggagccgtggagctgcaggccaaggtgacgagcaagtgcttcttcgacgtggaggtcggcggggagcctgcgtgccgtatcgtcatcgggctcttcggagaggtcgtacctaagaccgtcgacaacttccgtgcgctctgcactggtgagaaagggtacggct

SEQ ID NO: 55381 - DNA, 284 bp, Zea mays
ccaccaccgccggccgggaagcaagctcaaaccctaatcgccgtccgccggcgacgccagcacgatggcccgctacgaccgcgccatcaccgttttctcccccgacggccacctcttccacgtggagtacgctctcgaggccgtccgcaagggcaacgccgccgtgggcgtccgcggcacggacaccgtcgtcctcggcgtcgagaagaagtccacacccaagctccaggactccaggtccgtgcgcaatatcgcgtgcctagacactcacatagctctggcgt

SEQ ID NO: 55382 - DNA, 288 bp, Zea mays
attggagatggcggcgaatctagaggacgtgccgtctctggatctgatgcacgaactgctccgtcggatgaagtgcagctccaagcccgacaagcacctcatcctcatcggcccacctggctctggaaagggtactcagtctccccttattaaggatgaatattgcctgtgccatttagccactggtgatatgttgagggctgctgtggcagccaagacaactctaggtatcaaagctaaagaagctatggataagggagagctgtttcagataacttggttgtgggg

SEQ ID NO: 55383 - DNA, 286 bp, Zea mays
ctcgagccgtcaagttttagggaccttgatgaacacagcaaaaatgtcctcagaagattgtattatgactattattttgttcgccaagaaaatctctggcgccaaaatgcactgaagactttgcctgtactgctgaactcgtcagatatgttagcatgtggagaggaccttggccttatccctgcttgtgttcaccctgttatgcaagaactggggttgattggattgcgtatccaaagaatgcctagtgaaccaaacttggaatttggtattccttctcagtata

SEQ ID NO: 55384 - DNA, 282 bp, Zea mays
agcaaatcggctctaccagaagaaattctctggcccaaggtgggaggcgttggccaagaaaggtgccaagaaacaaaggttgttgtgggcatccaccggtgtcaagaacccagcttatcctgacactctttatgtggacagtctcatcggacctgacacggtcaacacgatgcccgaccaagctttgcaagcattcatagaccacggcaccgtttcaaggacagttgatgcgaacgtgtctgaggcggaaggtgtatacagtgccttggagaagcttggcat

SEQ ID NO: 55385 - DNA, 277 bp, Zea mays
  unsure (1)..(277): unsure at all n locations
tggcagagcaggcggacggtacgaggagatggtcgagttcatggagcgcgtcgcgcgctccgccggcgggccgcgaggggaggagctatccgtggaggagcgcaacctgctgtccgtcgcctacaagaacgtcatcggcgcccgcaggcctcgtaggcggatcatctcctccatcgagcagaaggagtagggccgcgggaacgaggcgcacgcggnctccatccgggcctaccgctccaagatcgagaccgagctcgcacgcatctgcgatggcatc

SEQ ID NO: 55386 - DNA, 284 bp, Zea mays
ccctcttgccggtcccgaataaagagcagcagcgcaagaggtcgatagagcgagaagaaggcaatggcggccgagagcttccttttcacctcggagtccgtgaacgaggggcaccccgacaagctgtgcgaccaggtgtcggacgccgtgcttgacgcatgcctcgcgcaggaccccgacagcaaggtggcctgcgagacctgcaccaagaccaacatggtgatggtgttcggcgagatcacgaccaaggcgaccgtggactacgagaagatcgtgcgcgacac

SEQ ID NO: 55387 - DNA, 281 bp, Zea mays
ggaagttcgtcggcagttcaacaacatccctgggctcatggaaggcaccacaaagcctgactacgcaacttgtgtcaagatctcaacggatgcatccatcaaggagatgatccccccaggtgctcttgttatgctcacaccactgatcgttgggattctatttggggttgagaccctctctggagtccttgctggtgcccttgtctctggtgttcagattgccatttctgcatccaacactggtggtgcctgggacaacgccaagaagtacattgaggctg

SEQ ID NO: 55388 - DNA, 282 bp, Zea mays
gccggggtggcatcgaggacatcaagtacgtcggcagggccccgtcggctgctaccgcgacgggcttctactcggtgcacgtgcaggagcagacggagctggtgcagaaggcgctgcagcgcgaccccctcaactaccctttctgaaagaaacgaggaccctgtagattcttggaattggggaccttttgaatttgatataataccaatatagagagaacatgccttaaattttatctgtgcagccatttggtgaaataattgtttcgactctgcagtaccg

SEQ ID NO: 55389 - DNA, 291 bp, Zea mays
gaagcgaaggagaaaagcagttcttcagctaggcaggagggcacaggaaggaggagatggcgtcaaagaggattcagaaggagctcaaggatctgcagaaggaccctcccacctcgtgcagtgcaggtcctgttggtgaagacatgttccactggcaggcaacaataatgggtccatctgatagcccatattctggtggagttttcctagtcacaatccattttcctcctgattatcctttcaaaccaccaaaggtggcatttcgtactaaggtgttccatccaaacatca

SEQ ID NO: 55390 - DNA, 277 bp, Zea mays
ctcccatatccgctcccctacctctccagcatctcccgtctccgtcgtctcgtctctgctcctcacctcgccgccagccatgggcaagatcaagatcggaatcaacggtttcggaaggatcggcaggctcgtggccagggtcgccctgcagagcgaggatgtcgagctcgtcgccgtcaacgtaaccttcatcaccacggattacatgacctacatgttcaagtacgacaccgtgcacggccaatggaagcacagcgacatcaccctcaaggactcc

SEQ ID NO: 55391 - DNA, 275 bp, Zea mays
ctcatggagagcacagacgaaattaagaaaaggttggcagccaaagaagttgaggtgcaggagtcgaagagcaccctcgacgccaagctcacgacgattgggaacatcgtgcatgagtccgtgccagtcagcgacgacgaggcaaacaataaaattgtacggacatttggagaaaagagagtaaaggaaaatttgaagaatcacgtggacctttgcaggatgcttgacattgtcgcattggagaagggtgctgatgtggctggtggtaggggttt

SEQ ID NO: 55392 - DNA, 277 bp, Zea mays
gcgtgtttgagactagcggagcgaccttgaagttgaagttgaaaatgccggcctgcgcggagatggatgtcaagtgccggcgtctggaggggaatgtggccatcgtgacggcgtccacgatggggatcggcctcgccatcgacgagcgcctcggtctggatggcgccgccgtcgtcatctcctcccgcaagcagaagaacgtgaacgaggcggtggaggggctcagggccaagggtatcaccgcggttggtgccgtctgccacgtcaccgacgcaca

SEQ ID NO: 55393 - DNA, 282 bp, Zea mays
atacggcaagaatccaaggaggtgcgtgatccgcggctcccacccgcgctgctgagcccggcagaacatcaggaacgtgtttgcatagtacgagttgaggcccataagcacgtgccaccacgcgtgcccctgcgggatgacgtaccaatgcgaaagcttcttgcagaagacgcgatcaaccagccagcagagggtcccaagggtcagtgtaaggacccacagttttgcgagccgcttcgcacccagtctttcgtctgtaagtagtacttgtacatcggggga

SEQ ID NO: 55394 - DNA, 280 bp, Zea mays
tgcgaaccaagcagaccccagcagaagaagcgaagtcgtcgccggagcaggaggaagagcgagcagcaagatgtcgtggcaggcgtacgtcgatgaccacctgctgtgcgacatcgaaggccagcacctcagcgccgccgccatcgtcggccacgacggcagcgtctgggcacagtccgagaacttccccgagttaaagcctgaggaggttgctgggatgataaaggactttgatgaacctggaactcttgcaccaactggtctttttgttggaggtacg

SEQ ID NO: 55395 - DNA, 250 bp, Zea mays
cctcgcgccaccgtcgccgccgctgcagcgagccaccgccctgccgtcgcctgaggtagacaccaagccaccgccatggggcgtatgcacagccgcgggaagggtatctcttcatcggcgctgccgtacaagaggacttctccgatctggctcaagacagctaccaccgaggtggaggagatgattaccaaggctgcgaagaagggccagatgccgtcgcagattggtgttctgctccgtgaccagcacg

SEQ ID NO: 55396 - DNA, 274 bp, Zea mays
ggccaggtctccctctccccggctctccgccttcctcttccagtccccgcgcgcgagatcgccgccccgtgtgggccctagatcccgatggcctcgcgccgccgcaccctgctcaaggtcatcatcctcggcgatagtggggttgggaagacttccttgatgaaccaatatgtgaacaagaagttcagcaatcagtacaaggctacgatcggcgcggatttcctcaccaaggaggtgcagttcgaggacaggctcttcactctgcaaatatggg

SEQ ID NO: 55397 - DNA, 278 bp, Zea mays
gaaggccccaaaacatcagatcccagtaaatacatacgctatatatacaatagggtgatacttgaaaatgctacagttcgagctagtgcagtcagcacattggcaaaatttggtgccttggttgactcactcaagcctcgcatatttgtgctcctgagacgctgcctgtttgatggagatgacgaggtgcgcgatagagcgaccctttacctcaaattgttaggtggggaagctacagtgggtgagacagagaaggatgtgaatgagtttctcttcgg

SEQ ID NO: 55398 - DNA, 275 bp, Zea mays
caggaatgaaggttttagatgtgggctgtggaataggtggaccgctgagagaaattgcaagatttagctcaacttcagttacgggattgaataacaacgaataccagataaccaggggaaaggttatttgaatccacatttgttaatcgacacctttcactgttataatacttatcatgttgctcatatgctaacatgatgtttcaacattcaggagctcaaccgtttagcaggaattagtggaacatgtgattttgtcaaggcagacttcatga

SEQ ID NO: 55399 - DNA, 274 bp, Zea mays
cagagacctttgactcaattgtccttgatgaaaccaaagatgtccttgttgagttctatgccccatggtgtggtcactgcaagagtcttgcaccgacgtatgagaaggtggcttctgttttcaagttggatgaaggagttgttattgctaaccttgacgctgacaaacacagggatttggctgagaagtatggagttaatggatttcctaccttgaagtttttcccaaagggaaacaaagctggtgaagattatgatggcgatagggacttggt

SEQ ID NO: 55400 - DNA, 274 bp, Zea mays
aggaacccagggttcagaagaagctgcaagaggagctcgaccgtgtggttggccgtgaccgcgtcatgctggagaccgacttccagaacctcccctacctacaggccgttgtcaaggaatcactccggctgcacccgccgacgccgctcatgctcccgcacaaggccagctcgaacgtcaagataggaggttacaacatccccaagggcgccaacgtgatggtgaacgtgtgggcagtggcgcgtgatcccaaggtctggagcaacccgctgga

SEQ ID NO: 55401 - DNA, 272 bp, Zea mays
agccgtctacgcctccaatttggcctctctcccttgcaagtttaagcttcaccttcaaccatgggtaaggagaagtcccacatcaacattgtggtcattggccacgtcgactctggcaagtcgaccaccaccggccacctgatctacaagcttggaggcattgacaagcgtgtaatagagaggtttgagaaggaggctgctgagatgaacaagcggtccttcaagtatgcttgggtgctcgacaagctcaaggctgagcgtgagaggggtat

SEQ ID NO: 55402 - DNA, 271 bp, Zea mays
cactcccagggtatactccatagagacctgaaatcagagaacatacttctgggagaagatatgtcagtcaaagtcgcagatttcgggatttcatgcttggaatcacagtgtggaagtggcaaggggtttacaggaacctacaggtggatggctccggagatgatcaaagaggaacatcatactaggaaagtggacgtgtacagctttggaatcgtcatgtgggagatcttgactgctttggtcccgttcagcgacatgactccagagcagg

SEQ ID NO: 55403 - DNA, 267 bp, Zea mays
gaggacaatagggcaggtgaagccacccaaaaaggattttacaagtatgagggcaagaggaaagcgactcctgatcctgaaattatgaaatatattgaaaaatctaggagcatggcaggagttacaccagatcctgagctgatgaagctaagtgagaaagacatagtcgagatggtgtttttcccggtgataaatgaagcctgccgagtccttgatgagggtatcgccgtcaaggcttctgacctagacatcgcttcgatcttcggc

SEQ ID NO: 55404 - DNA, 273 bp, Zea mays
gccactccaaacacttgcgccgccactgcctcacaggtaaggccgccatggtctccggttcgggcgtgtgcgcgaagcatacgtggtggacgagcgccaccacatgatgggccgtctctcctcgatcatagccaaggaggctgctcaatgggcagaaggtggtcgtcgtccgctgcgaggagatctgcatgtcgggcggcctcgtccgtcagaagatgaagtacctcagcttaaaacgcaagcggatgaacaccaagccgtcccacgggccca

SEQ ID NO: 55405 - DNA, 270 bp, Zea mays
gaaatgaactgctccactgctgctgttaggcaccttgcttcaagtggtgtggatgtatttactgctctttctggtggtgttggagctctatatggtcctctgcatggcggcgcaaacgaggcagtacttaaaatgttaaatgagattggaagcatggaaaatattccagatttcattgtaggagtgaagaacaggaagaggaagatgtccggttttgggcacgtgtgtataaaaactatgaccctcgtgctaaagtcataaggaaattgg

SEQ ID NO: 55406 - DNA, 267 bp, Zea mays
cagaaccctaaacccgcatcccgaacatagacgccggcgatctccgccgccaccgccatgttcgggaccccatccatcactcccgctttcgggaacccctccagcaccccggtttttggcacgccatccgccacacccgcatttggcgcgacgtcgtccaccccggccttcggcaccctctcgtcgacgcctgccttcggcaccccttcgtcgactcccgctttcggtaccccgtcgtctacgccagcgttcgggacccttccacga

SEQ ID NO: 55407 - DNA, 267 bp, Zea mays
cacggttccactccaactctccgatctccaggaatccgcggctgaagcgccggagatggcggctcccatggtcgacgccgaatacctgcgccaggtcgacagggcgcgccgccacctccgcgccctcatctccaacaagggatgcgccccgatcatgctccgcctcgcatggcatgatgctggaacttatgacctgaagacaaaactggtggtgcaaatggttcgcttagatatgaggagagtacacccatggttcaacatgctggt

SEQ ID NO: 55408 - DNA, 266 bp, Zea mays
gccagaacgacatcttctacatcactggtgagagcaagaaggctgtggagaactccccgttccttgagaagctgaagaagaggggctatgaggtgctgttcatggtggatgccattgacgagtattctattggacagctgaaggagtttgagggcaagaagctcgtctctgccaccaaggagggcctgaagctggacgagagtgaggatgagaagaagcgcaaggaggagctcaaggagaagtttgagggcctctgcaaggtcatc

SEQ ID NO: 55409 - DNA, 266 bp, Zea mays
gcccgttgcccgtgagcccgtcggtctctcttgcagtctcgccgctccccttcctcccccgcaggaatccgaatcagtaagtccggcgacctaggtctctcggcttgtccgcagcccgccggtcagtaatggcgcaggatgatccggttgtttctgctcagtggctgcacgagcacctagggatgcctgatgttaaggttttggatgcttcctggtacatgccggtagagaacagggatccatggaaagaatatcaggtggcacac

SEQ ID NO: 55410 - DNA, 254 bp, Zea mays
gcgctatgatattagcgggaggcttctgaatgtaaacagggcatcttctaggggcactcgcatggaaagacctcagagacaatttgcaccagctttcagagcttatgttggcaacttgccatggcaagttgatgactctaggctggtgcagttgttcagcgagcatggagaagttgttgatgctaaggttgtctacgacagagaaactgggcgctcacgaggattcggttttgtatcaatggtgtcaaaggagg

SEQ ID NO: 55411 - DNA, 272 bp, Zea mays
tggccagcaagggcatcaccaagctgttccctatccagagggctgtccttgagccagtaatgcaaggaagggacatggttggtcgtgccaaaacggggactggtaaaactttggcatttgtcatccccataatggatgcaattattcgtcacaacgagaagtacaagcctggtaagtttccattggctatagtcttggcgccaacaagagaacttgcaaaacaggttgagagggagttccttgattcctcccctttggaaacgctgtgtgta

SEQ ID NO: 55412 - DNA, 268 bp, Zea mays
cacacaccccacctaccccggccggaccggcaggcagcacagcatggacctcgacctcctagagaaggccctgctgggcctgttcgccgcggctgtggtggccatcgccgtggccaagctgaccggcaagcggtaccgcctcccaccggggcccccgggcgcccccgtggtgggaaactggctgcaggtgggcgacgacctgaaccaccgcaacctgatggccatggcgaacggttcggcgacatcttcctgctgcgcatgggcgtgc

SEQ ID NO: 55413 - DNA, 271 bp, Zea mays
agccatcctaagatggactcatggctaggcaaccggaaaaggatcatagtcttgaatcgcaaggacatgatctcaactgaggatatgaatgcatgggctacttactttggtaatcagggcatcagagttgttttctccaatggccagctgggtatgggtacaatgaaattaggtaggatggcgaaatcagtagcatctgttgcgaacacaaagaggaaggagaagggattgcttcctcgtccggttcgagctggaatagttggatatccaa

SEQ ID NO: 55414 - DNA, 218 bp, Zea mays
tgcgccgacttcctgcgcgcgcccggggtgcagacgcccgtcatcgtccgcttctccacggtgatccacgagcgcggtagccccgagacgctgcgcgacccgcggggttcgccgtcaagttctacacccgggagggcaactgggacctggtgagcaacaacttccacgtcttcttcatccgtgacggcatcaagttcccggacatggtgcacgcgctc

SEQ ID NO: 55415 - DNA, 267 bp, Zea mays
cgaactcggtgaactctttctcctcgcgcagaccggagcacaatcaaggattccagtccagtcctgccaatggagtgcgttttgggcttggttggccgcgacttcgcggtggtggcggccgacacctccgccgtgcagagtatcctcgtccacaagactgacgaggacaaagtaatggtcctcgactcgcacaagctgttgggcgcttcaggggagcctggtgaccgggtgcagtttacggagttcatacagaagaacctccacctg

SEQ ID NO: 55416 - DNA, 266 bp, Zea mays
caacgctctctaccgtccgagaccccaagcaccagcgcggcggcgggggcggcggcgaccatggctgtcggaaagaacaagaggatctccaagggaaagaagggtggcaagaaaaagaccgtcgaccctttctctaagaaggattggtatgacatcaaggcaccgtcggtgttcagtgtgcgcaacatcgggaagactctcgtatccaggacacagggtaccaggattgcttctgagggtctgaagcacagagtctttgaggtttg

SEQ ID NO: 55417 - DNA, 265 bp, Zea mays
ggagtacgacggggacaacaagcccgagtacgaccaggacccgcaccggcaggcgctggtggactgggtggacagggtgggcggggcggcttcgcagcaaccgtcttcgacttcaccaccaagggcatcgtaaacgccgccagtcgaaggcaagctgtggcggctcatcgacccgcagggaaaagcggcgggagtcatcggctggtggcctgccaaggcagtcacctttgtccgcaaccacgacaccggctccacgcaggccatg

SEQ ID NO: 55418 - DNA, 267 bp, Zea mays
ggcgcacagaatctggtgtctcttgctccgaccccgttggcgactgagacgcgatccccttctcctgcactgccgtcctccgtcgctgcgatgcctcggtattactgtgactactgcgacacctacctgacccatgactcgccatctgtccggaaacaacataatgctggatacaaacacaaggcgaatgttcgaacctactatcagcaatttgaggagcagcaaactcaaagtttaattgatcaaagaatcaaggagcatcttgga

SEQ ID NO: 55419 - DNA, 260 bp, Zea mays
gcagcagcagcacgaaaccctgtagtagcctgccatgactacgcgctgctgcctggtcgtcgccactctcctcgcggcgctgctctcggtcagtgccagcctcgagttcggtttctacaacaagacgtgccccagcgccgagaccatcgtgcagcagaccgtggccgcagcgttcaccaacaactccggcatagatccggagctcctccgcatgcacttccatgactgcttcgtcagaggctgagacggctcggtgctga

SEQ ID NO: 55420 - DNA, 266 bp, Zea mays
gctgcactgagagaagggctgccgctccgcaaggctgagcatgcattctacttggactgggctgtccactccttcagaattaccaactgcgagatccaggacaccacccagatccacacccacatgtgctactccaacttcaacgacatcatccactcgatcatcgacatggacgcggacgtgatcaccattgagaactcgcggtccgacgagaagctgctctccgtgttccgcgagggcgtcaagtacggcgcgggcatcggccc

SEQ ID NO: 55421 - DNA, 262 bp, Zea mays
cccggttctccctcgctccagatctcccttcgcagccggccagggaccccttcacagcgcgggagatggctgatcaggaggccccagttgcagttgatgcaccaaccccagttcttggagaaccaatgaacttgatgactgcgctgcagctggtgatgaagaagtcaagtgctcatgatggacttgtgaaaggtcttcgcgaggctgccaaggccattgagaagcatgctgctcagctttgcgatcttgctgaggactgtga

SEQ ID NO: 55422 - DNA, 265 bp, Zea mays
cccaaatcgaccgagcgaattcaccacagcttctcaccaccgctaccttcgatggcacccaaggcggacaagaagccggcggcgaagaagcctgcagaggaggagcccgcgacagagaaggcggagaaggctccggcggggaagaagcccaaggccgagaagcgcctcccggcgggcaagtacgccggtaaggaggtcggcgaggggaagaaggggaaaaagaaagcgaagaagtccgtggatgactacaagatctacatcttca

SEQ ID NO: 55423 - DNA, 265 bp, Zea mays
gatcaatgcaggagctcaagcctttgtaaattgttggagtgtgaccttggggagagcaagtgccactccccgagcacaatcatgaagatgttccagagttctatgttctgtttgcagccccagggtgactcctacacaagaagatctgcctttgactcgatgttggctggctgcgtgcctgttttcttccatcccggttcagcgtacgtccagtatacatggcatctcccaaagaactatacaacgtactctgtattcatccctg

SEQ ID NO: 55424 - DNA, 265 bp, Zea mays
cgatttttctcactagtcgcaactcgcaatcaaatcgaacgaacccagccgaagcgcgagctgagcaaggcggaagcggcgatggagcggctgcagcggatctttggcgcctccggcatggggcagccgccgacggactcgccgctgctcgactcttccgagcaggtctacatctcctccctcgcgcttctcaagatgctcaagcacgggagggccggcgtgcccatggaggtcatgggtctcatgctcggcgagttcgtcgatg

SEQ ID NO: 55425 - DNA, 266 bp, Zea mays
tcccgtcgcatcccatcccactaccacccatctcgtcgtccgccgattcgatccggttcttccaacccaggggcagtgatggcgacgaagaggagcgtgggcaccctcggcgaggcggatctgaaggggaagaaggtgttcgtgcgcgccgacctcaacgtcccgctcgacgatgcccagaagatcaccgacgacacccgcatccgcgcctccgtccccaccatcaagttcctcctcgagaagggcgcaaaggtcatcctcgccag

SEQ ID NO: 55426 - DNA, 178 bp, Zea mays
tgaaaaacctttgtttgtgtcctggcccccctgggtaatgtttgggtgtttccttccatcatcacttgctgaactgctctagtatttgcatttgtaattgaagtctgtcgctttaagcactcttggttctaaagatctctgtgcttttggggggtgtttttgcattgccccagattcc

SEQ ID NO: 55427 - DNA, 257 bp, Zea mays
atccctcgtctggtatcgtctcccacacccctctgccccaactcagaaaaaccctcgaaaagcggcggcggcgcgacatggcggaggtcgaggctccagctgctgcggttgcggcggcgacccctgaggtggcgacggtgaccgagggcggagcgctacggaggcgaagggtccgcacaagctgaacagccagtggaccttctggtacgacatccagtcccaagccaaacccggcgctgcgtggggcactccctcaa

SEQ ID NO: 55428 - DNA, 264 bp, Zea mays
gagagacgaaggaagagagcctaggactgactcactgacccgaacccgttcccggcgggacttcctctcgaatcgtcccagtcgagaccctagttgccccacgaaccgaggatccaagatgagtttcctgttcgggaagaggaagacgcccgccgagctgttaagagaaaacaagagaatgctagatcgatccatcagggaaattgagcgagagagacaaggattgcaggcccaggagaaaaagctcatcactgagatcaagaa

SEQ ID NO: 55429 - DNA, 260 bp, Zea mays
attcaagccattggattattggatgatcttgacaaggagcttaacacttatgccatgagagttcgtgaatggtatggctggcactttccagagctcaccaaaatagttacagatagtatacagtatgccaaagttgtgaagatgatgggcaacagagttaatgcagtcaaccttgacttctctgagatattgtcagatgaagagctagaaacacagctaaaggaggcagcagtaatatccatgggaacagaagttagtga

SEQ ID NO: 55430 - DNA, 288 bp, Zea mays
cgccccgtacgtgtccatctctccactcctttcctttccttgttggtaagagcaaggcgagacgtaacgtaatccggccatggcgttcttccggggcctcaccgcggtctcgagactgcgatcccgcatggcgcaggaggccaccacgctgggtggtgtgagatggctgcagatgcacagcgcgtccgatctcgatcttaagtcccagctgcgggaactgattccggaacagcaggaccgcttaaagaagcttaaatcagagcatgggaaggttcagcttggacacat

SEQ ID NO: 55431 - DNA, 288 bp, Zea mays
gacaacttcaatttacaatctcatattgggcaagctatattgcgatcactatggtactatgcacatacaaggtaatcgtgagtattcatgtaagcttaagttcaaggagcagtcaattatcgatcgcaaccctcaccaggtgcaaggtgttgttcaagatagaaatggtcgaactgttgctacactatttggaaaatgggatgaaagcatgcactatgtaatgggtgattgctttgggaaaggcaagggaactgaacagttatcagaggcccatttgttgtggaaaag

SEQ ID NO: 55432 - DNA, 280 bp, Zea mays
ggcaggtcaatacttcgtcattaatttgtacccgatttcttgtcattcatttcataaaaacatgtagttttgatgtatttggtcataactaacaattatctatccttctgaactaaactagtatcacagggtcaaatgtacagaattgttaatataatagtattatcttatttagtgtatgtgaaagggaaatgtgcccttgggccatttttaagtattttggtgattaagtgtccaacacaaatggttgtgtgttaaactatgacaaatggtggacaaa

SEQ ID NO: 55433 - DNA, 285 bp, Zea mays
cccagcaatccctagcagaagccttccatcctcactcgctcgatggcccgcacgaagcagacggcgaggaagtccaccggcggcaaggcgccgaggaagcagctggcgactaaggcggcccgcaagtctgcccctgcgaccggcggagttaagaagccccaccgcttccgccccggcaccgtcgcgctccgggagatccgcaagtaccagaagagcacggagctgctgatccgcaagctgccgttccagcgcctggtgcgggagatcgcgcaggacttcaagacc

SEQ ID NO: 55434 - DNA, 283 bp, Zea mays
  unsure (1)..(283): unsure at all n locations
ccaccaccgccggccgggaagcaagctcaaaccctaatcgccgtccgccggcgacgccagcacgatggcccgctacgaccgcgccatcaccgttttctcccccgacggccacctcttccaggtggagtacgctctcgaggccgtccgcataggcaactccgccgtgggcgtccgctgcnacgacaccgtcgtcctcggcgtcgagaagaagtccacacccaagctccaggactccaggtccgtgcgcaagatcgcgtgcctagacactcacatagctctggcg

SEQ ID NO: 55435 - DNA, 283 bp, Zea mays
ctcaagaacagcatcctcccatactacccggacaccatgatcacctacatcaccgtcggcgccgaggtcaccgagagccccgccaacgtctccgccctcgtcgtgccagccatgcgcaatgtgcacaccgcgctcaagaaggccggcctgcacaagaagatcaccatctccagcacccactcgctcgggatactgtcccggtcgttcccgccgtctgctggggcgttcaacagcagctacgcctacttcttgaagcctatgctccagttccttgtggagaatc

SEQ ID NO: 55436 - DNA, 277 bp, Zea mays
gcggcggcgaggaggctctaggggcgccagcgaggtggtggtccgtggggactgggaggggagggcggcgatggaggagaaggcgtcgtcgccgctggttccgccgccgtcggagatcgacctcgaggcgggcggcggcggggagcagctccagtgccggatctgcctcgagaccgacgggagggacttcatcgcgccctgcaagtgcaaggggacgtccaagtacgtgcaccgcgactgcctcgaccactggagggcggtgaaggagggttttgca

SEQ ID NO: 55437 - DNA, 284 bp, Zea mays
ctcccacaacgccagtaaccaaatgctacaaaaggcttttcaacacagtggagagactatccatcgaaaaatatctgaagtttttgagatagttcccatactaactcaacgatttgtgaagcttcctagctcagttcaaactcatgctaggattgcaacagattctaggttcatgcccttttttcagaattgccttggtgccattgacggcacacatgtatccatcactatcgcagaagatagggcccctccatatagaaatagaaaaggaactctttcacaca

SEQ ID NO: 55438 - DNA, 274 bp, Zea mays
tgggtggcccgggacagagctagcaccgccacccttgagcagatctctgctggtggcaagggcttggtggtgccgtagtgtgaccaactgaaggtcctgtgccacccctccgtcggtggcttcctgagccattgtgggtggaactcgaccctggaggccgtgttcgctggagtgccgatgcttgcctttcccgttgcttgggatcagctggtgattggccatctcgtggctgatgagtggaagatcggcgtcgacttgagggaacggagaaagg

SEQ ID NO: 55439 - DNA, 280 bp, Zea mays
gccggggtggcatcgaggacatcaagtacgtcggcagggccccgtcggctgctaccgcgacgggcttctactcggtgcacgtgcaggagcagacggagctggtgcagaaggcgctgcagcgcgaccccctcaactaccctttctgaaaaaacgaggcccctgtagattcttggaattggggaccttttgaatttgatataataccaatatagagagaacatgccttaaattttatctgtgcagccatttggtgaaataattgtttcgactctgcagtacc

SEQ ID NO: 55440 - DNA, 281 bp, Zea mays
catgaatgggtgaaggttgagggcgattcagcaaccgtggggattactgaccatgcccaggatcatttgggtgatgttgtctacgtggaactgccagaagttggcgtcagtgtatcccaggggaagaacttcggtgctgtcgagagcgtgaaggcgaccagcgatatcaattcgccagtgtccggagaggtggtggaggtgaaccggaagctaagcgaggagcctggattggtgaacgcaagcccgtacgagaaggggtggattatcaaggtcaagctcag

SEQ ID NO: 55441 - DNA, 277 bp, Zea mays
gcagttccccgaccacgccgttcctccgagcccaggagcagccccgcgccaggaggaagtttgttcttttaacaatatgtcgagggaggagaatgtttacatggccaagttggctgagcaggctgaaaggtatgaggagatggttgagtatatggagaaggtggctaagactgtagatgtggaagagctcactgttgaggagcgtaaccttctgtctgttgcatacaagaatgtgattggggctcgccgcgcttcatggcgcattgtttcttccatt

SEQ ID NO: 55442 - DNA, 284 bp, Zea mays
catgaatgggtgaaggttgagggcgattcagcaaccgtggggattactgaccatgcccaggatcatttgggtgatgttgtctacgtggaactgccagaagttggcgtcagtgtatcccaggggaagaacttcggtgctgtcgagagcgtgaaggcgaccagcgatatcaattcgccagtgtccggagaggtggtggaggtgaaccggaagctaagcgaggagcctggattggtgaacgcaagcccgtacgagaaggggtggattatcaaggtcaagctcagcga

SEQ ID NO: 55443 - DNA, 281 bp, Zea mays
cctcagaatgggcttattgtactgaggacacaaaggtccttgtggttggatgtttccatgagaactacagacatctggctgggaccaatctcttctgtgtcattggtgaccagtgtgttgatgcaaatattgttcaaactggcgtttacgtttcattgctagaccacatgctcctggacgagtcaatctttacttgactttggatgggaaaacaccaatcagtgaggttttgagttttcactatcgtatggtgcctgacagtcaaaacttggctgaggatg

SEQ ID NO: 55444 - DNA, 274 bp, Zea mays
ctcgagcgaatcggctcgagatcacgggggagttacccactgcctgggttgatgctcaccctaaatacactccagagagcccaggagatgccaccaggaacctctcccagcagtgcctgaacgcccttgctaatgttgtgcctggtcttatcggaggcagtgctgatcttgcatcctccaacatgactctgctgaagatgtttggtgacttccagaaggatacagctgaagagcgcaatgtccgcttcggagtcagagagcacggaatgggcgc

SEQ ID NO: 55445 - DNA, 276 bp, Zea mays
gttatccaatcgaagaattggctgaaagcagctcgtttgttgaggtggcctaccttttaatgtatgggaacttgcctactcagagtcaattggcaggctgggaatttgctatttctcagcattctgctgttccccaaggactgttggatatcatacaatcaatgcccatgatgctcaccccatgggtgttcttgccagtgcaatgagcaccctttctgtctttcatccagatgcaaaccctgctctacaaggtcaagatctttataaatcgaagca

SEQ ID NO: 55446 - DNA, 281 bp, Zea mays
tagcggtaagcggacatggcggcggcgaagatagcgccgtcgatgctctcgtcggactttgccaacctcgcttcggaggctgagcgcatggtccgcctaggcgccgactggctacatcatggacatcatggatgggcacttcgttcctaacctgactattggggctccggtgatccagagcttgaggaaacataccaaagcatatttggactgccatcttatggtcacaaagccttcagattacgtagaaccatttggaaaggctggcgcttctggattca

SEQ ID NO: 55447 - DNA, 278 bp, Zea mays
gtgaggtaagcatccgaaaaaagctgtgatctgatcgacatggccgccgccaccatggctctcacctcccgcgcgctcgtcggcaagccggcgaccagcaccagggacgtcttcggcgaggggcgcatcaccatgcgcaagactgctggcaagcccaagccagcggcgtccggcagcccctggtacggggccgaccgcgtcctgtacctgggcccgctgtccggccagcccccaagctacctgaccggcgagttccccggcgactacggctgggacac

SEQ ID NO: 55448 - DNA, 278 bp, Zea mays
gtgagtcctccctttccgtttaaggcagcaagcaggagcagacaggaggcgccgagagcccagcgtcggagatctccgccgccatggagacgctggccagcgccatgcggcgcgatgaaccgccggtccaaggccccgccctcctcctctgcttcctccgccctcgcctcgggcagggtccctctcgtcatggccttcctctcctgcctcgcctggctctacgtcgccggccgtttgtggcaggacgcgcagacccgggcgatcctgtccggcctcct

SEQ ID NO: 55449 - DNA, 272 bp, Zea mays
ggacacaaacccttgtgaagagtgccattgtgcaagttgatgctgccccattcaagcagtggtacctcactcactatggagttgacattggtaggaagaagaaaacccctgctgcaaagaaggataatgctgagggacaagaggttgaggcagcagctgaggaaacgaaaaagagcaaccatgtcacgaggaagcttgagaagcgcaaggagggacgtacccttgacccacacattgaggagcaatttggcagtggacggttgctggcatgc

SEQ ID NO: 55450 - DNA, 275 bp, Zea mays
atcgcaccaaacatgccacaaaaccaggcctgcctggatgtgatggaggaaggcatattatgtggaggccaagctggtgttttgaaggaggccatggttttcaaggagctggtgatagcaccaacatcaaaggctcttgtccatgttttctttgcacaacgttccacgacaaaggtgccaggtgtaactgatgttcaactgaaaccaaggccaattagaaaagttgctgttattggtggtggtctgatgggatctggaattgccacatcacttct

SEQ ID NO: 55451 - DNA, 279 bp, Zea mays
caacaaggggaggaacagcattggatgcctgttctggcttttggccaggatggttctgcagatgaggggcactatcctccctgggcacaagtgggaggtcatgctggatttgttcttctacagggacccagaggaagcaaaggagcggaggaggaagctgctgttgcccctgagtttgccgcaatcactgattaccaaggagctgatcagtggggtggtgaccagtggacctctgatgtgactgcgccgcctgttgctcctactggtgctgattggggt

SEQ ID NO: 55452 - DNA, 281 bp, Zea mays
caaagtatgacatcaagctgaacaatgccattctcgctgaggagaagcacttgcctatgtatgatgagttggctagcaacagcaatgttgaatatattgctggaggagccacccagaactctatcagggttgcccaatggatgcttcaaactcctggtgcaacaagttacatgggatgcattgggaaggacaagtttggtgaggagatgaagaaaaatgctcaagctgcacgagttactgctcattactatgaggatgagactgctcctactggcacatgt

SEQ ID NO: 55453 - DNA, 276 bp, Zea mays
cacatctacaggtgaggaaggctcaaggaaggtcaccacgtcaaatgggtaccaaggccatgacttaaggacggtcagcacatcagatgcatctcaagatggggacaactcatggaaggccaccatgtcatatgggttccaaagtggtgagggctcgaggaaggtcaccacatcatatccgtaccgaggccaggacttaaggatggtcagcacatcatatgtatcttaagatgaggacaactcagggaaggtctcgatgccatctaggttccaagt

SEQ ID NO: 55454 - DNA, 267 bp, Zea mays
  unsure (1)..(267): unsure at all n locations
cgcagccgncgaccgctcgctcgcctccgctccggcagcgagctctatctcccgcgacgagcagcagctggcaccgacgcacgcagaccgggcaataaatattagtattggtagtgtgatatctataagaagtcaagatggtgaagttcacagctgaagagctccgcgctatcatggacaacaagaacaacattcgtaacatgtctgtcattgctcatgtggaccatggcaagtctacgcttacagattcccttgtggcagctgctg

SEQ ID NO: 55455 - DNA, 275 bp, Zea mays
gaggacaatagggcaggtgaagccacccaaaaaggattttacaagtatgagggcaagaggaaagcgactcctgatcctgaaattatgaaatatattgaaaaatctaggagcatggcaggagttacaccagatcctgagctgatgaagctaagtgagaaagacatagtcgagatggtgtttttcccggtgataaatgaagcctgccgagtccttgatgagggtatcgccgtcaaggcttctgacctagacatcgcttcgatcttcggcatggggtt

SEQ ID NO: 55456 - DNA, 273 bp, Zea mays
cccctccccgaccagatcgctacgagacgccgcgcgatccgacccaggccgacgccgacgacccctctcgccgccggcgccatggcgtacggcgaccgcgtcaccaccttcgaggactccgagaaggagagcgagtacggctatgtccgcaaggtctctggacctgtggttgtggctgatgatatgggtggtgctgtcatgtatgaagttgttcgtgtcggacatgataacctcattggggaaattatccgtcttgagggcgattcagctaca

SEQ ID NO: 55457 - DNA, 278 bp, Zea mays
gtcttgggaacagaggttcaacgtcgcacttggagcggcccgtgcacttgcttaccttcaccatgattgccggccacagatcctgcacctcaacatcaagtcatccaacattatgttagatgggaaatacgaagctaagctatctgactatggattggggaagctgttgccgattctaggaagcattgaattgagtagaattcacaccgcaattgggtacattgctccggagctgtcatctccaactttgagatataacgacaagagtgatgtattta

SEQ ID NO: 55458 - DNA, 276 bp, Zea mays
aggaatttgggtttctgataccaagtgacaaagtttcaactggaagcagcattatgccccagaagaaaaatccagacccaatggagcttgttcgtgggaaatctgctagggttgttggagacctcatgactgttctaaccctctgtaaaggccttccacaggcctacaaccgtgaccttcaggaagacaaggaacccttgtttgatagtgtgaaagctgtattaggaatgcttgaagtatgcacagagtttgctcaaaatatctcttttaattcaa

SEQ ID NO: 55459 - DNA, 275 bp, Zea mays
agctcgagcgaatcggctcgagatcgaccgagcgaattcaccacagcttctcaccaccgctaccttcgatggcacccaaggcggacaagaagccggcggcgaagaagcctgcagaggaggagcccgcgacagagaaggcggagaaggctccggcggggaagaagcccaaggccgagaagcgcctcccggcgggcaagtccgccggtaaggagggcggcgagggcaagaaggggaaaaagaaagcgaagaagtccgtggagacctacaagatctac

SEQ ID NO: 55460 - DNA, 272 bp, Zea mays
cattttgaaccctactccagagaagatacaacaatttccttaggacagacaaacaagtttaacattcgtgaggtctctccagaatgggcattttcctatgagatcaccaaggtcatcattacgggagattttctgtgtgatccatcgaatttgtgttgggctgtgatgtttggtgacaatgaggtacccgttgaaatagttcagccaggtgttctccgctgtcacacaccactgcacagcaatgggaatctcagaatctgcattacttcggg

SEQ ID NO: 55461 - DNA, 269 bp, Zea mays
gcagcagcagaggattatagctttcattggaagtcctgtgaagtacgacaagaaagttttggagaccattgggaagaagctgaaaaagaacaatgttgctcttgacattgttgactttggtgaatccgatgatgaaaaacctgagaaactggaagcattgattgctgctgttaacagcagtgatagcagtcacattgttcatatccctcctggtgaaaatgccctctctgatgtcctcctaagcactcctatatttactggtgaagaag

SEQ ID NO: 55462 - DNA, 271 bp, Zea mays
ggcgatcacacgtttgtcccagtcactcggaagggatactggcagttcaacatgggtgatgtcctggttgatggaaagtccactgggttttgtgccggtggctgtgcagccatcgcagattctggaacttccttgcttgctggccccacagccataattactgaaatcaatgaaaagattggtgctgctggtgtagtcagccaggagtgcaagactgttgtttctcaatctggacagcagatcctagatcttttgctagctgagacacaac

SEQ ID NO: 55463 - DNA, 274 bp, Zea mays
atagcaaagcttgagaggcttttctcaaaaacgcgccgtcgccgtttcttccccctttttctttgagaaaattcgcccgcgagatctttagtttcagaccccgtgtggattagtcgctgtcacgatcgaggcggggcgccaattgcggtggccaccacctccaatccactccccgcggtggcctcgccgagctgttcttgctccgtcctccctccaactccaagatttgtttcgcacccgattcctgagcttccgcggcgcttcttgctgaaaa

SEQ ID NO: 55464 - DNA, 271 bp, Zea mays
gcagccgagcgactaagcgaagactcccttttccccgagcacaagagaaccatggcggcggcggcagtttacggcggcttcaaagggaagcttggcgtcgaggatgcccccgagctgcagctcaaccgcatccgcatcacactctcatccaagaacgtcaagaacttggagaaagtttgtgcggatttggtaaagggagccaaggacaagcatttgagggttaagggacctgtccggatccctactaaggttctccacatcaccactcgca

SEQ ID NO: 55465 - DNA, 270 bp, Zea mays
gaaaataataagaaatcacaagctcagagagagagggcaagggcaacatcagacatatgctcttggaattaaggaggtttgggagattgaagaaggaaagcacaatccaggttctgttattcatactgttggatggccttggatactaaaacatatggaggatcattcctgtaccaccttgatgatagacagttggcaattggtctggttgttgcgttgaattatcgaaatccgtttctgagtccctatgatgaattccagaaatttaag

SEQ ID NO: 55466 - DNA, 273 bp, Zea mays
gagacatttggaatacccatacctggttgggcgaaaaacccaaagaaactagctgaagctgtggacaaggtcattgttccggatttccatccaaaagagggtgttaagatagagacagatgagaaggctactagcctatcctctgcgtccgttgatgatgctgccgtcattgaagagcttattgcaaagctgcaagcaatttctaaaacattgtcaccaggattccgtatgaaccctatacagtttgagaaggatgatgataccaatttccat

SEQ ID NO: 55467 - DNA, 265 bp, Zea mays
gcttctatggccactgcttatgaaaagaaatggccattgtatcttagcaccaaaaacactattttgaagaaatatgatggcaggttcaaggacattttccaggaggtgtatgaagctggttggaaaaccaaatttgaagctgccggcatatggtatgagcaccgccttatcgatgacatggtagcatacgcacttaagagtgaaggagggtatgtctgggcttgcaagaattatgatggagatgtgcagagcgatttcttagctc

SEQ ID NO: 55468 - DNA, 271 bp, Zea mays
gaagaagctggcgagcaccaaggccacggacagcaacggcctcaagtgcgccattgatcacatactgtaggcacagcagaagggtgagatcaacgaggacaacgtgctcttcatcgtcgagaacattaacgttgcagcgatcgagaccacgctgtggtcgatcgagtgggcggtcgctgagctggtgaaccacccggagatccagcagaagctgcggcaggagctggacacggtgctcgggccgggccaccagatcacggagccggacacg

SEQ ID NO: 55469 - DNA, 268 bp, Zea mays
ctcaacatcatgggtgttaagtccggatccccgatgcaagggcctgcggtgcgctacctaacgataaggtcccttggtgcccccgctgtgctgctgtctctggccatgcaaggggttttccgggggttcaaggacaccaagacaccgttatacgctactgtggttggcgacgcggcgaacatcatactggacccgattttgatgtttgtttgccatatgggcgtcactggtgcggctattgctcatgttgtttctcagtacatgataa

SEQ ID NO: 55470 - DNA, 187 bp, Zea mays
acagctggcaacagctcagaaacgggcgcacacttgccgactacaacatccagaaggagagcacccaccacctagttactaccgcctacaggggaggcatgcagatcttcgtcaagaccctcactggaaagactatcaccctcgaggtggagtcttctgacaccatcgacaacgtcaaggccaagat

SEQ ID NO: 55471 - DNA, 190 bp, Zea mays
catgtacaacctttagcaattgacctagtggaaaagatgctaacttttgatcctagacagagaataactgttgaaggcgcacttgcacacccttacttggcatcacttcatgacataagtgatgagccagtctgctcaatgcccttcagcttcgacttcgagcagcatgcattatctgaagaacagtgag

SEQ ID NO: 55472 - DNA, 223 bp, Zea mays
cgacacctacacacgaacgtaagctcagaatacgacacaatcgcgtcgagcctcacccgctcagtcacaaagcctcagatctcagacgcctacgacgccgcttcgttcgtgtggaggggcgaagacaggcaatggcggcgactgagggcgtgctcttggggatgggcaaccccctactcaacatctccgcggtcgtcgataacgccttcctgacaaagtatga

SEQ ID NO: 55473 - DNA, 191 bp, Zea mays
cattattgccgtctcccttttgcgtgagcaagacagagagcgagaagccgtcgccatgtctggcatcatccacaagatcgaggagaagctccacatggggggcgaccacaagaataaggaggcggagcaccacaagaaggccgaggagcaccacaagaaggaggagggggagcaccacaagacggacgcgg

SEQ ID NO: 55474 - DNA, 185 bp, Zea mays
gcgacagatcccaagttcaccggagagggggaagagggcgacggaagcggacgatgggtttcatcatggacttcgcggagaatctgatcctccgtctgatggaggacccggacaagcgcgaccaggttcggcgggagcatgtctacaagatgaaggagcggtgcgagcgcactaaggcggcgtgg

SEQ ID NO: 55475 - DNA, 132 bp, Zea mays
aggcgaaagagtagcagcagcaggcgacgccgagtagcgctaccccacctcgagcttgccaccatggctagaggattgaagaagcatttgaagaggctcaatgcgcccaggcattggatgctggaacagctt

SEQ ID NO: 55476 - DNA, 125 bp, Zea mays
gtccatccgtgttctagcagatcaacaggttcgaggaggagctgcgcaggcgtacccagggagatggaggccgcccgcgtggccttcgagaccgacgcgagcgaaacgccaacaggatcaaggag

SEQ ID NO: 55477 - DNA, 199 bp, Zea mays
tagcgagtaatcggatcgtcaggagtccgtagtgtcatccgggatgatcttgagatcggtctgatgctctgctgttatcaatgttgttgttgagatcacaaagggaagcaacataaaatatgagctcgacaagaaaactggactgattaaggttgatcgagtcctgcactcatcagttgtatacccacacaattatggt

SEQ ID NO: 55478 - DNA, 185 bp, Zea mays
cttggcacctgaaggatgaacatatatttggatctgttggggatgactgtcgttgatgatgtgggccttgcgtacaaacaaaccagaacaatctattcttgcacatcaaaaggaggtcaactctttgtcattcaatccattcaatgaatggatattggctacagcttctggagacacaacttcat

SEQ ID NO: 55479 - DNA, 198 bp, Zea mays
ggaaaagcaagttactattgattttgcgccattcaagcctatcaatgtgtacatcaacctattgtgacaacaagttaccacactagaggctttaatgagagctcttggacatctgatgcacaagtttggagttcattgttcatggatggtcaatggtactctattttggcacactaaagtggcaataacccgtgagtg

SEQ ID NO: 55480 - DNA, 175 bp, Zea mays
attacctcctccggatttcgcagtcagcggtggtgcaggtagcgggcgcgaggaagctggggctcgcgttcgggaagctcttcagccggctcttcgccaagaaggagatgcggattcttatggtcggtctcgagccgccggtaaaaccaccatcctctacaagctcaagctcggc

SEQ ID NO: 55481 - DNA, 181 bp, Zea mays
ccacgccgccagccatgggcaagatcaagatcggaatcaacggtttcggaaggatcggcaggctcgtggccaaggtcgccctgcagagcgaggatgtcgagctcgtcgccgtcaacgaccccttcatcaccacggattccatgacctacatgttcaagtacgacaccgagcacggccatgg

SEQ ID NO: 55482 - DNA, 181 bp, Zea mays
gttcattctttttgcttcatgcatgtgctcataatcccaccggtgtagatcctacggaggaacaatggagagaaatatcccatcagttcaaggtgaaaaaacattttccattctttgacatggcataccaagggtttgccagtggtgatccagagagagctgccaaggccatctgattttc

SEQ ID NO: 55483 - DNA, 164 bp, Zea mays
ctctcattgaagattgtcagcaagattgaggctggggagcggttccactgtttatgttgtggtgccaatgtggcctgagggtgttccagaaagtgcttccgttcaggcaatccttgactggcaaaggagaccaatggatatgatgtacactgacatcacacaag

SEQ ID NO: 55484 - DNA, 170 bp, Zea mays
ctggacttgggtcacttttattggagcgcctttcagttgattatggcaagacatccaagcttggtttcaccatttatccttccccacaggtgtcaacagctgttgtagagccatacaatcagtgtcctctccacccactccttgcttaagcacactgatgttgcagtcct

SEQ ID NO: 55485 - DNA, 181 bp, Zea mays
gttcattctttttgcttcatgcatgtgctcataatcccaccggtgtagatcctacggaggaacaatggagagaaatatcccatcagttcaaggtgaaaaaacattttccattctttgacatggcataccaagggtttgccagtggtgatccagagagagatgccaaggcaatccgaatttc

SEQ ID NO: 55486 - DNA, 177 bp, Zea mays
gttcatactttttgcttcatgcatgtgctcataatcccaccggtgtaaaactacggagaacaatggagagaaatatcacatcagttcaaggtgaaaaaacattttccatactttgacatggcataccaagggtttgccagtggtgatccagagagagatgccaaggcgatccgaatt

SEQ ID NO: 55487 - DNA, 180 bp, Zea mays
acaagcgcctttccagcatcaatgtcgagaacgttgaggagaaccgccgtgccctccgtgagctactattctgctgccctggtgctctccagtacatcagcggtgtgatcctcttcgagaaaaccctgtaccagaagcccaaggatggaccgccttttgttgatgtcctcaggagggagc

SEQ ID NO: 55488 - DNA, 181 bp, Zea mays
tgttggtgacccaagctgtgcaaagtctcagttcctaaaatatactgctggtattgttccaagatctgtttacacgtcagggaagtcatcatcagctgctggtctgcacagcactgttgctaaagaaccagagactggtgaattctgtattgtaacggtgacctgatgctagtgataatgg

SEQ ID NO: 55489 - DNA, 196 bp, Zea mays
acgagctcgaatgggcaaagcagaagttgcggttggcctcgacctacctcatctaccgtcgaggctcagatctctgcgtgcgtcgatggcgtcgtactcggaggctccccccgggaaaccgaaagccggcgagaagatctttaagaccaagtgcgcgcgtgccacacggtcgacaagggcgaccggcccaagcaag

SEQ ID NO: 55490 - DNA, 185 bp, Zea mays
atccgcaattcccccgcgcccgagacgaaaccccgcgccaggagtacgtttgttcttttatcgatcttatcgatctggcgagggaggagaatgtctcacatggccagctggctgagcaggccgaaaggtcatgaagagatggttgagtatatggagaaggtggctaagactgtagcagtggaaga

SEQ ID NO: 55491 - DNA, 225 bp, Zea mays
cgaatagtcaaacgcgtacgtgcgcacagcatacggctcgaggcgtcccacattgttggatacccacgcatgggccccaagagggagctcaagtttgcacttgaagtacaactgggatgggaagagcaccgctgaggatctggagaaggttgctaccgacctcagggccagtatctggacgcagatggctgatgactgggatcaagtacatccccagcaacactt

SEQ ID NO: 55492 - DNA, 184 bp, Zea mays
gttcattctttttgcttcatgcatgtgctcataatacccactgtgaagatcctaataagacccactggagagaacatatacccatacagttcaaggtgaaaaaacattttccattactttgacatggcataccaagggtttgccagtggtgatccagagagagatgccaaggcaatccgaattt

SEQ ID NO: 55493 - DNA, 249 bp, Zea mays
  unsure (1)..(249): unsure at all n locations
tcgcctgcaccgcgctacgtncagactcaggacattacggactacgacgctttgctgcctatggtcgcacgtcacctacaactacgtttaccggactttactatggacatgacagatacgaccacttcatgcgaatgcccggacaactttagaggccagaacgggtgtcggaacggcatttattactgccttccgagctggtgcagtaatgggcttcctgcttgctgccagcggtcttttggtatttac

SEQ ID NO: 55494 - DNA, 179 bp, Zea mays
aagctcgacatcgtgatcccgacgctccgcaacctcgacttcctcgagatgtggaggcccttacttccagccctaccacctcatcatcgtgcaggacggcgacccgaccaagaccatcaaggtgcccgagggcttcgactacgcgctctacaaccgcaacgacatcaaccgctcctcgg

SEQ ID NO: 55495 - DNA, 176 bp, Zea mays
acatgtacaacctttagcaattgacctagtggaaaagatgctaacttttgatcctagacagagaataactgttgaaggcgcacttgcacacccttacttggcatcacttcatgacataagtgctgagccagtctgctcaatgcccttcagcttcgacttcgagcagcagcattatc

SEQ ID NO: 55496 - DNA, 190 bp, Zea mays
gcgagcgagcggacccgagggcggacgatcgagcagagacagacgtctactactcctactcggacgtaccccgaatccccaacctctcgtctgctgcctgcctgcctgcctgcctgcaaaaaggagtttgtactggcgtctacgcgcatcctcaaggagctgaaggacctgcagaaggaccccccacatc

SEQ ID NO: 55497 - DNA, 170 bp, Zea mays
acgacagattatgtttgaaaccttcgaatgcccagcaatgtatgttgctcatccaagctgatctttcgttgtacgctcatgggcgaacaactggtattgtgatggattccggtgatggtgtgagccacacggttccaatactatgaaggatacacacttcctcatgctat

SEQ ID NO: 55498 - DNA, 176 bp, Zea mays
ggttggctatgtttggtatgtggtgcatctgatactcaagagctccctactaaatttacattaagcttgcacaaggatgcctacacacctgatttgatggcggcatctgaactgcatgcttgggaaaatcggatctggcactgtgagtgaggctttggcttacaatctccatttgt

SEQ ID NO: 55499 - DNA, 175 bp, Zea mays
gagcgcttgcgacggcggcagtaagaggcgatggggcactccaacgtgtggaactcacaccccaagaactaacgggcccggatcccgcgtctgccgggtctgtgcgaaccctcatggactgatcaggaagtacgggctgatgtgctgcaggcagtgcttccgcagcacgccaagg

SEQ ID NO: 55500 - DNA, 172 bp, Zea mays
attctctgtatgcatggtggtctatctccggagttgaacaagcttgagcaaatactcaacctgaatcgccccacagacgtgcctgatactggattgctctgtgatcttctttggtctgatccttaccatgaagacacaggctaggccatcaatgatcgtggtgtttcattca

SEQ ID NO: 55501 - DNA, 228 bp, Zea mays
cccgtcacagcagcacgcgtaacgtacagcatcgagaattacaggctacgaaggatgaaccctacccatcagaccgcgtacagaacgcatacctacgaatccaaagctctctctgctcacgccatggcgaagaactacccgaccgtgagcgccgagtacaagaggctgtggagaaggccggcgcaagtccgagccctcatcgccgagaagagctcgccccgtcatgct

SEQ ID NO: 55502 - DNA, 171 bp, Zea mays
cagggacataaaggagaagcttgcctacgttgcccatgattatgaacaggagctggagactgccaggtgcagctccactgtcgagaagagctacgagatgcctgatggtcaggtcatcaccattgggtcagaaaggtttaggtgccccgaggtgctgttccaaccatccct

SEQ ID NO: 55503 - DNA, 140 bp, Zea mays
gcggctgcggcggacacggaggcgaaggaggaggagcagcagcagcaggcggcgccgaggagcggcatcccactcagtgcttgcaaccatggctaggggattgaagaagcacttgaagaggctcaatgcgcccaagcatt

SEQ ID NO: 55504 - DNA, 285 bp, Zea mays
cttagccaaactcagatctttgccaaaattgagaatgttgagggcttgaaccattttgctgaaatactggcagaggcagatggtatcattctgtcaagaggaaaccttggaattgaccttccacctgagaaggtctttttgtttcaaaagtctgcgcttcacaagtgcaacatggctggaaagcctgctgttgttactcgtgtcgtggacagcatgactgacaacctcagacctactcgtgcagaggcaatgaatgtgcaaatgcagttcttgtggggagtgacg

SEQ ID NO: 55505 - DNA, 279 bp, Zea mays
gttggaagaggctcttgagatagccacggatgctgactacaagtttgacctagctgtgcagcttggaaaattagatgttgcaaaggctatcgtcatagaagcacagagtgaatctaaatggaagcagttgggtgaactcgccatgtccacaggcaagctagagatggcggaggaatgccttcttcaagcgaaggatttaagtgacttgttgctgtagtactccatctcttggagatgctgaagggattgaaaagcttgcttcttgggcaaaggacatgg

SEQ ID NO: 55506 - DNA, 140 bp, Zea mays
gatagttgatgacagcggcaaagctgttggacctgctatagatggtgatgcagttgtcactatcaacttccgggctgatcgcatggttatgcttgcggaagcactagagtatgcagattttaacaactttgaccgtgtgc

SEQ ID NO: 55507 - DNA, 281 bp, Zea mays
caaggacataaaggagaagcttgcctacgttgcccttgattatgaacaggagctggagactgccaggagcagctcctctgtcgagaagagctacgagatgcctgatggtcaggtcatcaccattgggtcagaaaggtttaggtgccccgaggtgctgttccaaccatcccttgttggcatggaatcgcctggcgtccatgagggcaacgtgacaactccatcatgaagtgtgatagtggatatcaggaaggatttgtatggtaacgttgtcctcagtgggg

SEQ ID NO: 55508 - DNA, 280 bp, Zea mays
gggatccatggggtgttcccgatgactacgaatgtgaggtgattgaagacgacaccccaattcctaagcatgttcctcagcaccggcctgttgctcttcctgaggagttcttcaaggcactagatgctgtcaaatctgatcctgctcttcaaggcgatgctcctcctcaagtgaaggcgtaaggatggctgttcctgtgtaacgtcatttcacattttgccgcggtgggtaaggactagtttctggtgccatttgccacaatgcgcttgctctgagcaga

SEQ ID NO: 55509 - DNA, 250 bp, Zea mays
acacatgctcacaaggcatcgtgctagcatgaacttcacttgtgctgagatgagggacagtgaacagagttcagaggcgaaaagtgcacctgaggaactggttcaacaggtgctgagtgctggatggagagatggcctaaatttggcatgtgaaaatgcactgcaccgatatgatgcaacagcttacaacaccatcctcaggaatggcagacctcaaggcatcaacaagaatggccctccagaacacaag

SEQ ID NO: 55510 - DNA, 280 bp, Zea mays
ggagagtgtacaggggagtgctcccgagatccaagcgggaggttgccgtcaagaaggtgtctcacgaatcgaggcagggcataaaggagttcgtcgctgaggtggtcagcatcggccgtctccgacaccggaacatcgtccagttgctcggctactgccggcggaaaggcgagcttctcctggtgtacgactacatgcccaacggcagccttgacaagtacctctacggcaaggacgacaaggccacggcgacgctggattgggcgccaaggttccggat

SEQ ID NO: 55511 - DNA, 284 bp, Zea mays
ctcaacctcgccgacctcgtctggctctcaggggctcacacgatcggcatctcccaatgcaactcattcagcgagcgcctgtacaacttcacggggcgcggcgggcccgacgacgcggacccgtcgctggacccgctgtacgccgcgaagttgcggctcaagtgcaagacgctgacggacaacacgacgatcgtggagatggaccccggcagcttccgcaccttcgacctgagctactaccgcggcgtgctcaagcggcggggcctgttccagtccgacgccgc

SEQ ID NO: 55512 - DNA, 243 bp, Zea mays
aacgccgccagcgtgcttctccgcgaactcaccccccagcaggtcaaggatctcaaggagcaaccaggtgttctccaggttgtgccgagccagacttaccagctacatggtcctgggtctggcactcaccagggcacgacacacaccttgggccttatgtgaaggcgtatgagaatcaagaagactgtgtttagtatggctgtatggcacaggtctgacgaatgtgtatagtacggtactatg

SEQ ID NO: 55513 - DNA, 139 bp, Zea mays
tgggatccatggggtgttcccgatgactacgaatgtgaggtgattgaagacgacaccccaattcctaagcatgttcctcagcaccggcctgttgctcttcctgaggagttcttcaaggcactagatgctgtcaaatctg

SEQ ID NO: 55514 - DNA, 286 bp, Zea mays
cggctcgaggggtgatgaaggccttcgtgctgtggctgatgcatgctctgatctccgtgagctgagagtttttcctttggatgcctctgaagattccgagggttcggtctcagacgttggtcttcaggcaatctcagaaggctgccggaagctggaatcaatcctctacttttgccagaggatgacaaatgcagcagtaattgatatgtcgaagaactgtcctgagctcgtagtgttccgcctctgcattatgggccgccaccgacccgatcgtgacactggggag

SEQ ID NO: 55515 - DNA, 293 bp, Zea mays
gtggccggatctttatttggagaaagggagatgggaagtttctacgagccatggagggtgatgagtgcattgtgaattgcattgagcctcatcctcatgctatggcaatcgcgagctgtggaattgataatgatgtaaaagtttggactccctctgcgattgagcgggcacctatgatacatgttgatgagctccagttgagaactcgcaagagaagagccaagctctggcgctttggcatacgagacctgttgatccaacagatactggtatcggaaaataaggcacagtca

SEQ ID NO: 55516 - DNA, 263 bp, Zea mays
gcgaggtggtcagcagcttactgtgaatcgcagatgagcgtggtggggttcgacctcggcaatgagagctgtatcgtggcggttgcgcggcagcgtggcatcgacgtggttctcaacgaggagtccaagcgcgatatacccgccatcgtttgcttcggggacaaacagcggtgcatcggcaccgcaggcgtcgctcagtcaccatgaaccccagaaactccatctctcaaataaagcgcctgctcggccgcaagttctcagat

SEQ ID NO: 55517 - DNA, 246 bp, Zea mays
tgatcttccggcggccggcgagatgagccgtggcacaggcgcgggctatgacagccacatcaccatcttctccccggaggaccgcctgtaccaagtcgagtacgcgttcaaggcggtgaattcggcgggtgtcacgtcgatcggcgtccgcggcgcgaactccgtctgcgttgttacgcagaagaaagtcccggataagttgctggatcggacgagcgtgacacaccggttcccgatcaccaagta

SEQ ID NO: 55518 - DNA, 249 bp, Zea mays
agaacctgaaaccttcgtggattctgatgacttgctgttatccagctattcctctagatgggcgttttatacgaagatgcaaacaaggttgcttgcagtttgtgattctcaagcctattttggttgttatcactttcatactttacgcgaaaggaaaatacaaagatggcaacttcagtgtcaaccaatcctatctctacataactatcatatatacagtctcatactcaatggctttgtatgcccttg

SEQ ID NO: 55519 - DNA, 136 bp, Zea mays
gtaggtgatgaagctcaggccaaggagaggcatcctggcactgaagtacccgattgaagcataggcattgtgcagacaactagggagtgacatggacgaaacatctggcatcacacctatctacaacgagcctccg

SEQ ID NO: 55520 - DNA, 229 bp, Zea mays
aacaagatggatgcaaccactccataatactccaaggcacgttatgatgagattgtgaaggaagtctcatcctacctcaagaaagttgggtacaaccctgataagattgccttcgttcccatttctagttttgagggcgacaacatgattgaaaggtccaccaaccttgagcgggttcaaaggcccaaccctgcttaaggctcttgaccagatcaacgagcccaagagg

SEQ ID NO: 55521 - DNA, 288 bp, Zea mays
ctcgagccgattcggctcgagcgcacgcggagatccggcgtactgcaaattttgaaaactgaactgtaagatggcatcagatgagctttcccgtgaggaaaatgtgtacatggcgaactcgctgagcaggcggagaggtacgaggagatggttgagttcatggagaaggtagccaagactgttgactcggaggagctcactgtggaggagcgaaacctcttgtctgttgcatacaagaacgtcattggagcccgccgcgcctcatggcgcatcatctcctccatcgag

SEQ ID NO: 55522 - DNA, 128 bp, Zea mays
acaggctaatcctcagattttgcagccattgcttcaagaattgggtaaacaaaatccccaggttatgcagctaatccaggaaaaccaagcagagttcatgcggatgatcaatgaaccacttgagggag

SEQ ID NO: 55523 - DNA, 272 bp, Zea mays
aagagacaatcaaccagcaacactcttctcgtataacataatgcagcgaaggtaactcacatggcaacttccatgggttgtctcgtcttgctctgccttgtatcttctctccttcccagtgccgtccttggccacccatggggtagcttgttcccacagttctatgaccattcgtgccccaaggcgaaggagattgtgcagtccattgtggcccaggctgtggccaaggagaccaggatagcggcatctttggtcagactgcatgtccatga

SEQ ID NO: 55524 - DNA, 182 bp, Zea mays
tggcagtggttgttggaggaggttatatcggcctcgaactgagtgcagccctgaagatcaatgactttgatgtcactatggtgtttcctgaaccttggtgcatgcctcgcctcttcactggcgatattgctgctttctatgaggcttacgatactaacaagagtgtaaagatcctgaagggc

SEQ ID NO: 55525 - DNA, 282 bp, Zea mays
caccaatgatgtgtacaagagcgccgaggcggttgatctggcgaccaaagaactaggtggcaagattttgcggcagccagggcctctacctgggatcaacactaagatcgcctcttttgttgatccagatggctggaaagtggttctggttgacaacaccgacttcctcaaggaactccactgaaggctcgggatacccaggtgctgtgctaggatgtagtaatgcttgtctgtggtgtaataagatgtgggtggtttgtttctgccctgatgaacttataa

SEQ ID NO: 55526 - DNA, 284 bp, Zea mays
tcggcctctgtcccttgcaagttcaatctcacctccaaccatgggtaaagagaagtgccacatcaacattgtggttattggccatgtcgactctggcaagtcgaccaccacaggacaccttatctacaagcttggaggcattgacaagcgtgtgatcgagaggtttgagaaggaggctgctgaaatgaacaagcggtccttcaagtacgcgtgggtgctcgacaagctcaaggctgagcgtgagatcagtatcaccattgatattgctctgtggaagtttgaga

SEQ ID NO: 55527 - DNA, 126 bp, Zea mays
gcagcccccaactacccccagcctcggaaggaaccttccagaagcgcaagactctaaaggccgtcgccttcccattcttcctcgccgcgggggtcgcctgagatcacataaacaatggtgaaggct

SEQ ID NO: 55528 - DNA, 268 bp, Zea mays
ttctcgagccgattcggctctagcgcacgcggagatccggcgtactgcagattttgaaaactgaactgtaagatggcatcagcagagctttcccgtgaggaaaatgtgtacatggcgaactcgctgagcaggcggagaggtacgaggagatggttgagttcatggagaaggtagccaagactgttgactcggaggagctcactgtgagaggagcgaaacctcttgtctgttgcatacaagaacgtcattggagcccgccgcgcctcat

SEQ ID NO: 55529 - DNA, 264 bp, Zea mays
gtggatctcaaaggctgagtacgatgagtcaggaccagcgattgttcaccggaagtgcttctaagctcaagggcccccttcgtccccattctatgtattcctttccttgagtgcttttcttataagctactatgtttgagattgccggcctttgagcaggcaatgttgttggatctgtatcttgtggatcactacaatgcatgcgttgctccatcttctttcaagacaagtttgctgtcaatacttgctagtgggggaaacaac

SEQ ID NO: 55530 - DNA, 273 bp, Zea mays
attccctcccctagccgccgccgccgctcgtctccctgagaggtgccgggaccgaggaactggccgagttctaggtagagaatcggttttgcttgtctcagcacggggtctgctgcgtctggtggtggtgaaggggagaaattcgtgagatctgttccggatcaggcgtgcgagctcgggaatcaggggtttcacacatagcttcgtcgatttgaatttgatgtactaatggagtctaagggtggcaagaagtctagcagtagtcgttccatg

SEQ ID NO: 55531 - DNA, 244 bp, Zea mays
agagttgggcgcagagaatccccaagcaaacaaacagggtagaggtagagggagaggagaggagaggagaggagaggagaggttgggtctgggacaccatggctccgatgaagctgtacggggcggtgatgtcgtggaacgtgacgaggtgcgcaacggcgctggaggaggctggctccgactaacgagatcgtgcccatcaacttcgccaccgccgagcacaagagccccgagcacttcgtcc

SEQ ID NO: 55532 - DNA, 262 bp, Zea mays
tctgatactgatgcttcctcccactataaggttccgttctcaagaactgtctacattgagaaaactgattttcgcctaaaggactcaaaagactactatgggctagcccctggtacatctgtcatgctaaggtatgcggtccccataaaatgcacagatgttatctctggtgatagtcctgatgataatgttgaaattcgagctgaatatgatcctttgaagacttctaaactgaggggtgttcttcactggatttctgagc

SEQ ID NO: 55533 - DNA, 266 bp, Zea mays
agcagatacatagcggttctgtgtgcaggaagccgggaagccgtgcaatccccttgtgagcctgctgcttgaggttgcggctgggttcatgtacccaaaggcacttgctgagggatggagggggaatgatccatgtatgtttccgggtgttacttgcatccaaggaacattactgggctgacttttgccaacagggtctcagtggtagtatctcaccgggcattggggagattagctcacttaaggtgctagatcttgctaacaat

SEQ ID NO: 55534 - DNA, 248 bp, Zea mays
attctctgtatgcatggtggtctatctccggagttgaacaagcttgagcaaatactcaacctgaatcgccccacagacgtgcctgatactggattgctctgtgatcttctttggtctgatccttccaatgaagcaacaggctgggccatcaatgatcgtggtgtttcattcacatttggtcctgataaagtttctgaatttcttgagaagcaggatttggactttatcggccgagcacatcaggttgt

SEQ ID NO: 55535 - DNA, 264 bp, Zea mays
cttcccgaagctggcggacgtggacctgttcctccggatcatctgagccaaggccaagggcgtcacaagcggtgggacagcctcttcaacgagctgctgtccgagtacgcgctctccggcggcaagcagggcgaccacaactctgaagacttcgtgcacctcttgctgtcgctgcagaaagactacggtctcaccacggataacatcaagggcatacttgtgaacaagttcggagcagccatcgagacatcattcctgggtgtg

SEQ ID NO: 55536 - DNA, 262 bp, Zea mays
acggatacgcccctctcgtatcagatgatggtgaggttgttgatctaatcaccgccaaggacgtggagcgcatccggagctatcccaagctgggcaagccgtctcttggagccaacgggaagtttgtagttgcggcttccattgggactcgtgaagatgacaagggaagactggagcaactagttaaggcgggggcaaatgctatcgtgattgatagttcacagggggaactcaatataccagctcgatatgataaagtttg

SEQ ID NO: 55537 - DNA, 267 bp, Zea mays
tacagatgtgactcttgggtggtctgcatacagcacacttgcttctatctatgtaaatgctggacaatttggaaaagcagaatctgctctgaagaaacttgagggccttatcagtgctcatgatgacagacagcctttggatttccttctgagcctatacgcttcactaggaaatttgagcgaggtcaatagggtaaggaatgtgataaagtccaaattctcgaaggtaattaacacaagctaccttgggcatgcttcacgctcttt

SEQ ID NO: 55538 - DNA, 252 bp, Zea mays
aaggacaagatcatggaggtcgcctcgctcgagaagttcctgcaggagcgcatcaaggtcgccggcggcaaggctggcaacctcgacgactccgtcaccatctctcgcgagaagaccaaggtcaccgtcacctctgacggacccttctccaagaggtacctgaagtacttgaccaagaagtacttgaagaagcacaacgtgcgagattggctacgcgtggtttctgccaacaaggagcgaaacgtctatgag

SEQ ID NO: 55539 - DNA, 232 bp, Zea mays
ctcgagccgcttgtgaccctccctcagccgcgtcgcgtcgcatcctacgatccaaagctctacctgctcgcagccatggcgaagaactacccgaccgtgagcgccgagtacagcgaggctgtggagaaggccaggcgcaagctccgagccctcatcgccgagaagagctgcgccccgctcatgctccggctcgggtggcactccgcggggacgttcgacgtgtcgtcgagga

SEQ ID NO: 55540 - DNA, 255 bp, Zea mays
cttgtgcttggtgcagtcacctcactagtttccggctttcttggaatgaagatcgcaacttatgcgaatgcccggacaactttagaggccagaaagggtgtcggaaaggcatttattactgccttccgagctggtgcagtaatgggcttcctgcttgctgccagcggtcttttggttctttacattgctatcaatttgtttggacattattacggtgatgactgggaaggtctttttgaagctattactggttat

SEQ ID NO: 55541 - DNA, 273 bp, Zea mays
ctctaaaggccgtcgccttcccattcttcctcgccgcgggggtcgcctgagatcacataaacaatggtgaaggctgttgctgtgcttggtagcagcgatggtgtcaagggcaccatctttttcacccaagagggagatggccctaccgctgtcaccggaagtgtctctggcctcaaacctggcctcaatgggttccatgtacatgcacttggtgacaccaccaatggatgcatgtcaattggaccacactacaaatctgcgagcaaggagcat

SEQ ID NO: 55542 - DNA, 263 bp, Zea mays
gccagggccgaacgcaaagctggttgcccgtgcacagggcttgcatatccaagccggcaactgggtcaactccttcagcctagttttcgtggatcaaaggttcagtgggtccacgcttgaagtgaccgggatagtagttgaatccggggagtgggctattgttgggggcaacggtcagtttgccatggcaaacggtgtcatcttcaagaagttccatgagcagagaagcgaagggaacatcatacaactcaccatccatgctt

SEQ ID NO: 55543 - DNA, 211 bp, Zea mays
cgtaatttcacctgatggcttgtttccttcactctaccgagaagttatacggagagccccacatgaattcaagattgcttgcctggaggacattaaggcactctttccttctgattacaatccattttatgctgggtttggtaacagagatactgatgagctcagttacaatgaagatgggaatacctaaaggcaagtttttttacatcaa

SEQ ID NO: 55544 - DNA, 207 bp, Zea mays
tatcgaccgctccgggctctacaaccccacagagcactcgcacgagccgtcgtcggaatccgagctcgtcaagcacatcaagagcatcataaagtttcggagtgggccaatcagcatagctgaatacatggaggaggtgctgacgaacccacagtcaggattctacatcaaccgtgacgtgtttggggaatcaggggattcatcacc

SEQ ID NO: 55545 - DNA, 232 bp, Zea mays
tctgaaaagctcagtgatgaagccattgaagatgcccttgagaaggttgtgagattgctggcatacatcagttataaagacctgtttgccgagttctataggaagaaacttgccagaagattacttttccgcaaaagtgccaatgatgagcattgaggccgtattctgacagagccccaaggcacagtgcgggggggcagtttacttcccaaaatggagggcattggttacg

SEQ ID NO: 55546 - DNA, 263 bp, Zea mays
gcagagtccagagtccagacgccagacgccctctacttctcttctctctagttatacatttcaaactcttggccgccgcagcggtctctgttcgccgcgccccgccgcagaaatggcgctgccgaatcagcaggttgtggattaccccagcttcaagctcgtcatcgttggcgacggtggaactggcaaaaccacatttgtgaagaggatcttactggcgagtttgagaagaaatatgagcccaccattggggttgaagttca

SEQ ID NO: 55547 - DNA, 261 bp, Zea mays
gcaaactgaagcacgaggagctctgcaggttcaggccgtacagctgcccgtacgcaggttccgagtgcctgatcgcaggcgacgtcccgttcctggtgtcccatctcatcaacgaccataatggtgacttgcacgagggctgcacgttcaaccaccggtacgtgaaaccccaaccgtacgaggtggagattgccacgtggatgctcactgttttcaaagtgttcgggggcacattctgcctgcatttcgaggcgttcgtgc

SEQ ID NO: 55548 - DNA, 268 bp, Zea mays
ctcagttcagcatcatagttcttgatgatatcgaaaggttactggagtatgtagccattggaccacgtttttcaaacttgatctctcaaactcttctggtcctcctcaagagggttcctcctaagggaaaaaacctgcttgtgattggaacaacaagcgaggttggcttcctagaatctgttggaatgtgtgacgtgttctctgtgacataccatgtccccaagctgaaaaaggaggatgcgaaataggtattgcatcatcttgatgt

SEQ ID NO: 55549 - DNA, 247 bp, Zea mays
ccgctgtcatcaagcacatgtcaccggacatagagaagatccgtcgccttgtccgccagtccaagtgcctccaggacaagatgactgccaaggagatctcaacctggctggcggtcgtcaagcaggaagaggagctgtaccagaagctgaacccgggcgcaagctcaccggcgtctactggtgggatcgcaagtgccatatccttcaacaccagctcgagcgagtatgatgtggacatcatcgatga

SEQ ID NO: 55550 - DNA, 275 bp, Zea mays
cagacaaccagctgtttgttgcaacatgcggcccagctcgagataccagtgcaggatatgttgcttggggacactccactcttgttggaccttttggagaggtgattgcaacaactgagcatgaggaggcaactataatagcagaaattgactactcactgattgagcagaggaggcaatttcttcctctgcaacaccaacgccgtggcgatctctatcagctggttgatgtccagaggctgggttctcattagcacagggacgaagcaggagag

SEQ ID NO: 55551 - DNA, 272 bp, Zea mays
gccagaacgacatcttctacatcactggtgagagcaagaaggctgtggagaactccccgttccttgagaagctgaagaagaggggctatgaggtgctgttcatggtggatgccattgacgagtattctattggacagctgaaggagtttgagggcaagaagctcgtctctgccaccaaggagggcctgaagctggacgagagtgaggatgagaagaagcgcaaggaggagctcaaggagaagtttgagggctctgcaaggtcatcaaggagg

SEQ ID NO: 55552 - DNA, 272 bp, Zea mays
gtaggttacggtctgagacatcaccgccaagctgggcatcggggagatggccgagactgaccccaagaccgtgcaggacctcacctcggtggtgcagacactcctgcagcagatgcaagataaatttcagaccatgtctgaccagatcattgggagaattgatgatatgagtagtcgcattgatgatctggaaaagaatatcgcggacctcatgacacaggctggggtggaagaactggaaagtgaaaacaagatacctgccacgcaaaaga

SEQ ID NO: 55553 - DNA, 277 bp, Zea mays
tgcaccctcccgcccaccgccgtcgccgcccagccgcagtaaggaggaaggagcaggaagatgccggcggggcacgggctgcggtcgcggacccgcgacctgttcgcgcggcccttccgcaagaaggggtacatcccgctcaccacgtacctgcgcacctacaagatcggcgactacgtcgacgtcaaggttaacggcgccgtgcacaagggcatgccgcacaagttctaccacggccgcaccgggagcgtctggaacgtcaccaagcgcgccattg

SEQ ID NO: 55554 - DNA, 254 bp, Zea mays
ctcaaatcggctgattctgcatctggaaactgccttcatcttgaaagaaaagctctaggtcccttctccagccacccagccccaagatggtgatgctgctgctgctgctttccgcactggctggcctcttcggtgcggcagagggacaagcatttcatcttgggaagtgccccaatcctccggtgcaggagaattttgacgtgaataagtatctcggaagatggtacgagattgagaagatcccaacaaccttt

SEQ ID NO: 55555 - DNA, 229 bp, Zea mays
gtgggactggcttcacacccagagatgtcacaccggatgcataacaaatgtgagaccaggcgcttctttctgtatcacatttgttatgcttcaagaaagtttgaagattacaccattcgcaatgctatcccgggccacagctggaatcagaggatcaacacttatcatcaacatgcctggcaacccaaatgctgtggcagaatgccggtagcactcctcccagcgctca

SEQ ID NO: 55556 - DNA, 166 bp, Zea mays
ccgtcactcaacacagcacaggcagctcgagagagagagagagagacagatgtcgtggttcgggcaccatcaccacaaccaggcggctcccacggcgtcgggctacaaccaggtgttcaagatcttctgccgcgacaacgagaactactgcctggccgtccgcgac

SEQ ID NO: 55557 - DNA, 266 bp, Zea mays
tgtgaaggaagcagggcgcggtggaaagggaaatcttcctctgaacgttgcgccgacagtagtcacttccgagccgtgggacggcaaagacggagaggtcatcgaagaggatgaattctcccttgacgagctcatgggcgacagctcctcagtaaacgatgagttgtagttctgacgattctgtaactgatctgcgtgccgattagcctgactgtaaatctgaggaactctgatgttttaaaaactcgttaaattttcagattttg

SEQ ID NO: 55558 - DNA, 269 bp, Zea mays
gttgaaggagaaatttgaaaagaatgttcaagaggtagctgagaagttccaaaacacaaacttgtatttgaagaacttagaggagaacattgatgatgagaaattgcgtgaactctttgctgagtatggcaatattacttcctgcaaggttatgcgggattcgaatggtgtcagcagaggttctggatttgttgctttcaaatctgctgaagatgctaaccgagctcttacggagatgaatggcaaaatggttggaagcaaccccttta

SEQ ID NO: 55559 - DNA, 268 bp, Zea mays
ctcgagccgctgatgtttttcttctggctttctcactgatcagtaaagccagctatgagacatgttcgaagaagtggatacctgaactgaagcattatgcacctggtgtgccaataattctcgtagggacaaagcttgatcttcgagatgacaagcagttctttgtggaccatcctggtgctgttcctatcactactgctcagggagaggagctaagaaagcagataggcgcgccatactacatcgagtgcagctcaaagacccaact

SEQ ID NO: 55560 - DNA, 265 bp, Zea mays
  unsure (1)..(265): unsure at all n locations
aaataataatgcgacaaagcatgttttgcctggtggaattgaggatctttcagggaaggttccacaaaagttctccttgtccagtttttgccacggtatcatgactgaaattggtcgcttcagcaaagatatgaaagaactactacaagagaaggtttttgtcatcgttgttttaggttatatatcctacaatttcgtcattggtgcttattcctactgatgcncaaaggcaggtcaagagatctacaatatggggagtgcagat

SEQ ID NO: 55561 - DNA, 272 bp, Zea mays
cccacacagaagcggcggcggcggagcaaacgcaggcgaaggcgagggtgtgagggaaggagcaccagccatggtgcacgtcaacttctaccgcaactatggtaagacgttcaagaaaccaaggcgtccttatgagaaggagcgtcttgatgctgaactgaagctggttggtgagtatgggctgaggtgcaagcgtgagctttggagggtccagtatgcactgagcaggatccgtaatgctgcaaggcacttgctcacccttgacgagaaga

SEQ ID NO: 55562 - DNA, 270 bp, Zea mays
cacgcctccgctccgcccacggttccactccaactctccgatctccaggaatccgcggctgatgcgccggcgatggcggctcccatggtcgacgccgaatacctgcgccaggtcgacagggcgcgccgccacctccgcgccctcatctccaacaagggatgcgccccgatcatgctccgcctcgcatggcatgatgctggaacttatgacctgaagacaaaaactggtggtgcaaatggttcgattagatatgaagaagagtacacccat

SEQ ID NO: 55563 - DNA, 266 bp, Zea mays
cagcagcccggagaacgccctggtccaacaagatgcagatcttcgtgaagacgctgacagggaagaccatcaccctcgaggtcgagagcagcgacaccatcgacaatgtcaaggccaagatccaggacaaggaagggatcccgccggaccagcagcggctgatctttgccgggaagcagctggaggatggccgcacccttgcggactataacatccaaaaggagtctacgctccacctcgtgcttaggctccgcggtggaatcatt

SEQ ID NO: 55564 - DNA, 264 bp, Zea mays
atcaactttttgagaacacaattggttgtaagtcgtgaaaataaattacgcttgctgatgatttatgcagcacttaacccagagaagtttgaaagcgacaagggtgcaaaattaatgcagttggcaggattatctgctgatgacatgattgctgtaaataatatgcgttaccaatatgggcctgataccaaaaagtcttcagtagggggttttacactgaaatttgatgttcacaagaagaaacacacagatcgaaaagagcga

SEQ ID NO: 55565 - DNA, 267 bp, Zea mays
attctgacagggcagcgtgtactggatgcactattcccctcagtatctgggaggcacttgtgctattccaggggcatttggttgtggtaaaactgtcattagtcaggcactttccaagtactccaattcttaagctgtggtttatgtgggctgtggtgaacgaggaaatgagatggctgaggttctcatggacttcccccagttgacgatgacattgcctgatggccgtgaggagtcagtcatgaagagaacaaccttggtggctaa

SEQ ID NO: 55566 - DNA, 259 bp, Zea mays
agacgtcctcctccttcggggacgatgtcgtcgtcgtcgctgcctacaggacgccgatatgcaaggccaagcgaggaggcttcaaggacacctacccagaggacctcctcactgttgttctcaaggctgttctggacaacactagaatcaatccagctgacatcggtgacatcgtcgttgggacggtgctcggccctggttcccagcgtgcaaacgagtgcaggatggctgcgttgtttgctggattccctgaaaccgt

SEQ ID NO: 55567 - DNA, 269 bp, Zea mays
ccaagacctacccgcagcaggctggcaccgtccgtaagaacggcttcatcgtcatcaagaaccgtccctgcaaggttgtggaggtttctacctccaagactggtaagcatggccacgccaaatgccactttgtcgccatagacatattcaatgggaaaaagcttgaagatattgttccttcatcacacaactgtgacattccgcatgtgaaccgtactgagtatcagctgattgatatttctgaggatggatttgtgagccttcttact

SEQ ID NO: 55568 - DNA, 270 bp, Zea mays
attgtgttgaagatgaccaaaggttgctggtctatgaattcatgcctcgtggcagtttggataaccatctttttagaaggtctcttcctctcccatgggcaatcagaatgaaggttgcactcggagcagcaaagggtctggctttccttcatgaagaagcagaaagaccagtcatttatcgcgattttaaaacatctaacatactgctggatgcggagtataacgcaaagctctctgattttgggcttgcgaaagacggacctgtaggtg

SEQ ID NO: 55569 - DNA, 262 bp, Zea mays
aaacgcaaacttcgtactttctatgagaagcgtatggccacagaagttgctgctgacgctctgggtgaagtatggaagggttatgtggtccgaatcagtggtgggaacgacaaacaaggtttccccatgaagcagggtgtcttgacccatggccgtgtccgcctgctactgagtaaggggcattcctgttacagaccaaggagaactggagaaagaaagagataatcagttcgtggttgcattgtggatggaaatctgagcg

SEQ ID NO: 55570 - DNA, 267 bp, Zea mays
ctcccccttccttgagaagctgaagaagaggggctatgaggttctgtacatggttgatgccattgacgagtatgctgttggtcagctcaaggagtttgagggcaagaagcttgtctctgccaccaaggagggtctgaagcttgatgagactgaggacgagaagaagaggaaggaggagctgaaggagaagtttgaggggctgtgcagggtcatcagggaggttctggggtgacaaattgagaaggtggtggtgtctgatcgcgttgt

SEQ ID NO: 55571 - DNA, 267 bp, Zea mays
gccaaagaattccctcccctagccgccgccgccgctcgtctccctgagaggtgccgggaccgaggaactggccgagttctaggtagagaatcggttttgcttgtctcagcacggggtctgctgcgtctggtggtggtgaaggggagaaattcgtgagatctgttccggatcaggcgtgcgagctcgggaatcaggggtttcacacatagcttcgtcgatttgaatttgatgtactaatggagtctaagggtggcaaaaagtctagca

SEQ ID NO: 55572 - DNA, 100 bp, Zea mays
aacgcattggtcttaggcatagaagccccagaggaacacggccactgccatcatgagcagggcattgaggttgaccacacgggcccagctcgggtcctcg

SEQ ID NO: 55573 - DNA, 259 bp, Zea mays
taaggttataactggcgcaattcctgacaacgtgggtcaaaaacttattggccttgttacaagtagagatgaaatcgctgatttactaaagcttgatgatgtcattgatcttgtcattccaagaggcagcaataagctggtttcgcaaatcaaagcatcaactaagatacctgtcctcggtcatgcggatggtatttgtcatgtatacattgacaaatcagctgacatgaatatggcaaaacgaatagtgatggatgcc

SEQ ID NO: 55574 - DNA, 267 bp, Zea mays
ccctgacagcaaggttgcttgcgagacctgcaccaagaccaacatggtcatggtctttggtgagatcaccaccaaggccaatgtcgactacgagaagattgtcagggagacatgccgcaacattcgtttcgtgtcgaacgatactcggcttgacgctgaccactgcaaggtgcttgtgaacattaagcagcagtcccctgatattgctcagggtgtgcagggccacttcaccaagcgccgcgaggaattggagcttgtgaccagggg

SEQ ID NO: 55575 - DNA, 261 bp, Zea mays
agatgatccaagaaaggccaccacatcatatggaatacaagataaagagtatcccaggaaggccaccacatcttatggagttcaaggtgagaaggacccaagggaagctaccatctcatatgggtcccaggatgatgaggattctagaaaagtcaacatgtcatatgggtctaatggtgaggacgacccaagaaaggccaccacatcatatgggtcccatggtgagtatgaatcaaataaggccacgatgtcatatgggtt

SEQ ID NO: 55576 - DNA, 264 bp, Zea mays
cgccgacctgcccagcctccggtcgctggacctccggcacaaccagctgacgggccccatcccggcggggctggtgcaggggcagttccggtcgctggtcctgtcctacaaccagctcacgggccccatcccgcgcgacgacgcgccgacgagatcaacaccgtcgacctctcccacaacaggctcaccggcgacccctcccacctgttcgccgccggccggcccatcggcaaggtggacctgtcgtggaactacctcgacttc

SEQ ID NO: 55577 - DNA, 261 bp, Zea mays
acctgagaagcatatagcaccagcggaacacgggaacggcggaagcaaacaactagaaattccccagcccggttctttgcgtgcggttgatctcgtcggaggcccggccgcggttccccaatccgccatcgaattcgatggcggccaacgccgggaataagatccgcaacgccaagctggttcttcttggagatgtgggcgctggcaaatctagcttggttcttcggtttgttaagggacagtttgttgaattccaggaat

SEQ ID NO: 55578 - DNA, 264 bp, Zea mays
attggagggggtgacgcatgcccttcggtccagtgaatatcatgacaggaatgcacaatattatcgaatccttcaagacatggggttgaggagagtagaaatttatgaattcagccgattgaatatggtttacactcttctaagcaagcggaagcttctctggtttgtacaaaacaagaaggtcgaagattggactgatccacgttttcctactgtccaagggatagtacgtcgtggcttgaagattgaggcattgatacaatt

SEQ ID NO: 55579 - DNA, 259 bp, Zea mays
agaggagcagcagcagcaggcggcgccgaggagcggcatcccactcagtgcttgcaaccatggctaggggattgaagaagcacttgaagaggctcaatgcgcccaagcattggatgctcgacaagcttggcggagcttttgctcccaagccatcttctggacctcacaagtccagggagtgccttcctctgatcctcatcatcaggaacaggctcaagtatgctctgaactaccgtgaggtcatttctatcctgatgca

SEQ ID NO: 55580 - DNA, 259 bp, Zea mays
acattgccttgaggtcgtcgattagaaacgattttgttgaaggtgtgcgtgctgttttagttgacaaggaccagaatccgaagtggaatccagccactctggaagaagtaaacatggccgaggtggaatcagttttcgagccattaggggccgaggctgagttgagtgtgtgaaatatggcctgccacactcagttttcttatttgtgctgcaataataatgtatacaaaacagaaatgcgatgcccacagaaacaata

SEQ ID NO: 55581 - DNA, 255 bp, Zea mays
caagcacttctcagcgtgctgttcctcttatctggccattgggcgatgctgttactttctctcccaatggtgtactacaattatacgctataccagcggcgacaacatctggtagatgtgacggagatatttaatcaacttggccgtgagaagaagcggcgcctttttaagatagtcagcctcatagttctcctgttcctgtccttgttctggatgatctggagtgtgttgtcggaggaggacgagtaggctgac

SEQ ID NO: 55582 - DNA, 265 bp, Zea mays
aaagcttctttcgtctattccggaattcgctgattttggaaagctttttaagtcatctgcacctgtagaattgactgaagctgagaccgaatactcagtgaatgttgtgaagcatatttttgatcgacatgttgtgctccaatacaactgtaccaatacaattcctgaacaattgcttgaacaggttattgttttggttgatgcttctgaggctgacgaatttttagaagttgcttcaaagcctttagaatcattaccatatgat

SEQ ID NO: 55583 - DNA, 210 bp, Zea mays
taccaagttggctaaacggtacattgatcattcgtttgttctgaggctacttgacctctttgattcagaagaccctagggagagagagtacctcaagatgatacttcaccgtgtctatggaaagttcatggttcatcggccctatattcggaaagccattaacaacattttctatcagttcatctatgaaactgcaaaatcacatggaat

SEQ ID NO: 55584 - DNA, 171 bp, Zea mays
gccgcagcctccaaagccactcccaaacccccgcctccagaaccttctcgaagctccccgccgcctcctccactcgcacacatggcgaaggaaccaatgcgcgtgctcgtcactggcgccgcaggacaaattggatatgccctggttcccatgattgctaggggtgttatg

SEQ ID NO: 55585 - DNA, 265 bp, Zea mays
gcgtatcatcgttttccatcgctcctactcctatcatccagaaaatctgagcggtattgatggcgcccaaggcggagaagaagccggcggcgaagaaggtggcggaggaggagccctcggagaaggcggctccggcggagaagggccccgcggggaaaaagcccaaggcggagaagcggctacctgcgggcaagtccgccggcaaagagggcggcgacagaaaggtaagaagaaagcgagaaagaccgtgagaactacaggacta

SEQ ID NO: 55586 - DNA, 218 bp, Zea mays
agccgctcgcgatctagaactagatgacacagctgctttcaaaaacttcaataagtggggcaatattgtgtttcccctaccatttggaagagttctcagtccctccgaaagttttatccatgaactggatgagaagacaagtgcttctctgaaattcacggtaatgaacccaaaaggacgcatctggacatggttgcaggtggtggtgctagtgtcat

SEQ ID NO: 55587 - DNA, 169 bp, Zea mays
tagaagattacctactttcaggaccgcccagatgttatggcaaaatatacttgccgcattgaagctgataaaactttgtatccggttttattgtccaatgggaatcttattgagcagggagaccttgagggtggaaagcattacgcactgtgggaggatcccttcaaga

SEQ ID NO: 55588 - DNA, 147 bp, Zea mays
attgagacaagtgcaatgataattacatttgtgttgctcgggaagtatctcgaggtgcttgcaaaagggaagacatcggatgcaattaagaagcttgtagaactggtcccttctactgctgttttggttctgaaagacaaagaaggg

SEQ ID NO: 55589 - DNA, 135 bp, Zea mays
taccaagtgggaattggatgtacgctgcaaagcttgatggcgaaggtgctgatatgtatgatgcagctgttgcattggctgactgcatgattgaacttggtattgcaatagatgggggaaaagacagtctttcca

SEQ ID NO: 55590 - DNA, 208 bp, Zea mays
tagccgcgacttcgtgctggtggcggccgacacctccgccgtgcagagtattctcgtccacaagaccgacgaggacaaggtgatggtgctcgactcgcaaaagctgatgggcgcttcaggggagcctggtgatcgggtgcaatttacggagttcatacagaagaacctccacctgtaccagttccggaacaccatcccgctctcaacc

SEQ ID NO: 55591 - DNA, 198 bp, Zea mays
tgtcccaaaggtcaacaaggaaatcttcaaaatgcagagagtgaatgctccagctgggcagatgcagctaaagggcttgattgaggcctatgttgaaaaaacgggcagcgagaaaggtattgcgattttgaggggatgggaggcctatttgccgctcttctggcaactggtaccgcccagtgaagaagactcgcctga

SEQ ID NO: 55592 - DNA, 286 bp, Zea mays
ggagaagcgaacaagcaggcttcgagaacaagggggagggggaggaccaagcgaaagggggaactagagcaagatgggcggcgaactgctgattgcgctcctcctcgtctctgctgctgccgcccctcaggtacttggagttggcaatggagacaatcacatgagaatcatccaagaggacatcattgagacagtcaacaaccatcccagtgctgggtggacagcctcacgtaatccttacttttcaactatacaattgcgaatttaagcacatacttggagtgaa

SEQ ID NO: 55593 - DNA, 256 bp, Zea mays
cccagattatgttcgagactttcaatgttcctgccatgtacgttgcaattcaagcagtgctgtcactctatgccagtggacgtactactggtattgttctcgactctggtgatggtgtgagtcacactgtgcccatttatgaaggatatgcccttccccatgccattcttcgtctggatcttgctggtccgggactcacagactccctcatgaaattctcactgagaggggtattcctcacacctctgccagcgag

SEQ ID NO: 55594 - DNA, 260 bp, Zea mays
cgtcgcttccagccgccgccgcgtccgcctcgccaagcgcacagccgccgcagcacatcgctctcttgatctcagccatggcggaggtggagcagcaacaggacacgccgaagctcttcaaccgctggaccttcgatgatgtccaggtgaacgacatctcgctgaacgactacctcgctgtgaacgcgacgaagcacgcgatgtacctgccgaacaccgcggggcgctactccaagaagcggttcgccaagcgccatgcc

SEQ ID NO: 55595 - DNA, 202 bp, Zea mays
gaccgacaaagcgcttgtccacaaaagttggaccgtggggtgggagcggcgggtctccgatggacatcactgcagagccccagcgtctcaagagcatcaccgttgctactggcatcgccgtgacctcgattgcgttctcctacgtcgactccgccggccaaacccaatctgctggtcgctggggcggttccggtggagaaac

SEQ ID NO: 55596 - DNA, 229 bp, Zea mays
tggcgcagatcatcgatggcaaggccatcgccgccgacgtccgccgcgaggtcgccgccgatgtggccgcgctctcgtcagcccacggactcgtgccgggggttgccgtagtcatcgtggggagcaggaaggactcgcagacgtacgtgaacatgaagcgcaaggcgtgcgccgaggtcggcatctgctccatcgacgtcggactcccggatgacatctccgaagacgc

SEQ ID NO: 55597 - DNA, 275 bp, Zea mays
tggtgtacacaacttctttgttacttttatcgaggtcttgcgtgacaggcctgctggtcatgattgggagcttgaacctggagtcacatgtggtgactatttgtttgggatgttgcagggaacacgttctgctctttatgcaaatgaccgtgaatctatctctgttactgtgcaagaggtaactcctagagctgttggagcactggttgcactttatgaacgtgctgtggggctttatgcttcttggtaaatatcaatgctatcatcaactggtg

SEQ ID NO: 55598 - DNA, 288 bp, Zea mays
tgagagacgaaggaagagagcctaggactgactcactgacccgaacccgttcccggcgggacttcctctcgaatcgtcccagtcgagaccctagttgccccacgaaccgaggatccaagatgagtttcctgttcgggaagaggaagacgcccgccgagctgttaagagaaaacaagagaatgctagatcgatccatcagggaaattgagcgagagagacaaggattgcaggcccaggagaaaaagctcatcactgagatcaagaaaacagctatagaaggccagatgg

SEQ ID NO: 55599 - DNA, 252 bp, Zea mays
cctgcgttggcattccgcctgctggacttcctcgtgctgtgtctctgtctgtacgtctcgctctcagacgactgggccgccgccgcttggtgctgaggctttcgttggtctcttcggcggcgacgagcacccaccagcagttctgtagaaatggctgatggtgaagacatccagcctcttgtctgcgacaatggcaccggaatggtccaggctggttttgctggggacgatgcaccaaaggcggttttccct

SEQ ID NO: 55600 - DNA, 254 bp, Zea mays
aaaaatcggatggcaagcttaactttcttgggttcaccaaatttttgcacggtgtcacgatacggggttcaaatacaagacgacactaaacagatgcaaactgtattcgcttctaatttgaagcctctcatcgattatatggcgctgattgctgttacctcctgcctgcgctgcccgagtctggtcaattgacatccttggttgtgatgcccttccgctgttggcgtcgtaactttgtagggtacatgtaaaga

SEQ ID NO: 55601 - DNA, 215 bp, Zea mays
atgactcttatgtcttatctgagtcgagcctgtttgtctacccgtacaagattgtgatcaagacctgtggaactacaaagcttctgctcgctattccgaggatccttgaacttgctgaagagctcctgttgccactcgctgcagttaaatactcccgtggaacgttcatattccctggagcacaaccttccccacacaaggacttcgctgacgag

SEQ ID NO: 55602 - DNA, 260 bp, Zea mays
cacggttccactccaactctccgatctccaggaatccgcggctgatgcgccggcgatggcggctcccatggtcgacgccgaatacctgcgccatgtcgacagggcccgccgccacctccgcgccctcatctccaacaagggatgcgcccgatcatgctccgcctcgcatggcatgatgctggaacttatgacctgaagacaaaactggtggtgcaaatggtccgattagtatgacgaagataccccatggtcaaatgctg

SEQ ID NO: 55603 - DNA, 272 bp, Zea mays
agcgccgccagacactccgtagtctgtaccccaagcaccggcgcggcggcggcggctaccatggcagtcgggaagaacaagaggatctccaagggaaagaagggtggtaagaaaaagaccgtcgatcccttctctaagaaggactggtatgacatcaaggccccatcggtcttcagtgtgcgcaacattgggaagactctcgtgtccaggacacagggtacaaggattgctctgatggtctgaagacagagtctttgagtttgtctagctga

SEQ ID NO: 55604 - DNA, 269 bp, Zea mays
aattgactgaagctgagactgaatactcagttaatgttgtgaagcatatttttgatggacatgttgtgctccaatacaactgtaccaatacaattcctgaacaattgcttgaacaggttactgtttttgttgatgcttctgaggctgatgaatttttagaagttgcttcgaagcctttagaatcattaccatatgattctcctgggcagacctttgtcgcttttgagaagccagaaggtgtcattgctactggcaagttctccaatatc

SEQ ID NO: 55605 - DNA, 268 bp, Zea mays
taggatcgtcgcaatctgggttcgggaggagctggttctccaattcacaaatttgagggccataaagctgctgttctttgtgttcagtggtcacctgacagagcatctgtttttggaagttctgcagaagatggtttcttaaatgtttgggaccatgagaaggttgggaagaagaaaaattctaatgtcgcagctgggcttttctttcagcatgctggtcatagggataagatcgtagacttccactgggattcgtcagatccttgga

SEQ ID NO: 55606 - DNA, 286 bp, Zea mays
taggatcgtcgcaatctgggttcgggaggagctggttctccaattcacaaatttgagggccataaagctgctgttctttgtgttcagtggtcacctgacagagcatctgtttttggaagttctgcagaagatggtttcttaaatgtttgggaccatgagaaggttgggaagaagagaaattctaatgtcccagctgggcttttctttcagcatgctggtcatagggataagatcgtagacttccactggaattcgtcagatcatgggacattgtcagtgtctcaga

SEQ ID NO: 55607 - DNA, 284 bp, Zea mays
gcggcggcgaggaggctctaggggcgccagcgaggtggtggtccgtggggactgggaggggagggcggcgatggaggagaaggcgtcgtcgccgctggttccgccgccgtcggagatcgacctcgaggcgggcggcggcggggagcagctccagtgccggatctgcctcgagaccagacggagggacttcatcgcgccctgcaagtgcaaggggacgtccaagtacgtgcaccgcgactgccatcgacactggaaggccgtgaaagaggttttgcatttcccat

SEQ ID NO: 55608 - DNA, 121 bp, Zea mays
gatcatcggatggcaagcttaactgtgttgtggttcaccaaatttttgcacggtgtcacgatacggggttcaaatacaagacgacactaaacagatgcaaactgtattcgcttctaatttg

SEQ ID NO: 55609 - DNA, 286 bp, Zea mays
acgcaacatctgggctgatgatcttgctacatctctcagcactctccagtctcttgaggctgttgttgggaaggacaagcttgtcgtatcaacttcctgctcgctcatgcacaccgctgtggatcttgtgaacgagactaagcttgacagcgagattaagtcttggcttgcttttgctgcccagaaggttgttgaggttgatgctcttgctaaggcatttgctggtcaaaaggatgaggcttacttcgcagcaaatgctgcagctcagggctcgaggaaatcctca

SEQ ID NO: 55610 - DNA, 146 bp, Zea mays
aactccgcctgccgctgcttcggctacatggtctccaagaagaagtacatctacaccatcgacgacgactgcttcgttgccaaggacccatctggcaaggatatcaatgctcttgagcagcacatcaagaacctcctcagcccatc

SEQ ID NO: 55611 - DNA, 260 bp, Zea mays
ccaaggtcttaaaatgtgagtatgcagtccgtggggagattgtcatccatgctcagcgcctgcagcaacaactacaaacacaaccagggtctcttccttttgatgagatcctctattgcaacattgggaatccccaatctcttggtcagcaacctgtgacattcttcagggaggttcttgctctttgtgatcatccgtgcctcttggaaaaagaggaaaccaaatcattgttcagtgctgatgcaatttctcgagcaaag

SEQ ID NO: 55612 - DNA, 226 bp, Zea mays
agatgtcctcctccttcggggacgatgtcgtcgtcgtcgctgcctacaggacgccgatatgcaaggccaagcgaggaggcttcaaggacacctacccagaggacctcctcactgttgttctcaaggctgttctggacaacactagaatcaatccagctgacatcggtgacatcatcgttgaggaggtgctcggccctggttcccagcgtgcaaacgagttgcagat

SEQ ID NO: 55613 - DNA, 208 bp, Zea mays
aattgactgaagctgagactgaatactcagttaatgttgtgaagcatatttttgatggacatgttgtgctccaatacaactgtaccaatacaattcctgaacaattgcttgaacaggttactgtttttgttgatgcttctgaggctgatgaatttttagaagttgcttcgaagcctgtagaatcaataccatatgaatctcctggggc

SEQ ID NO: 55614 - DNA, 269 bp, Zea mays
aaagagtgtgttgaaatcttcatcactccctgggaaacttgctgattgtgcatcagctaatcctgaagaatctgaaatctttattgtcgaaggtgattctgcgggcggtagtgcaaagcaaggacgggatagaagattccaggctattttgcctctaagacgtaaaattctcaacattgaaagaagggatgaagcagccatgtacagaaatgagagatccaaaacctatcttgcacttggataggagtgaaggtgaggatttaagagga

SEQ ID NO: 55615 - DNA, 201 bp, Zea mays
tctcgagccgaatcggctcgaggaatccttgagcttgctgaagagctgtctatgccacttgctgctgtgaagtactcccgtgggacgttcatctttcctggcgcacagccagccccccacaggagcttctctgaggaagttgctgcacttaaccgctactttggcgggctgaaatctggtggtaatgcttatgtgattgga

SEQ ID NO: 55616 - DNA, 274 bp, Zea mays
agctgacatcttcgtgaccaccactggcaacaaggatatcatcatggttgaccacatgaggaagatgaagaacaatgccattgtctgcaacattggccactttgacaatgaaattgatatgctcggccttgagacctaccctggcgtcaagcgcatcaccatcaagccccagactgaccgctgggtgttccccgagaccaacactggcatcattgtacttgctgagggtcgcctgatgagcttgggtgtgctactggcatctagcttgtcatgt

SEQ ID NO: 55617 - DNA, 272 bp, Zea mays
ggcttttcatgagtaaaaccaaccgaccaccaatctccatgcgccgccttgtcaagtttatggaaggaaaggagaagaacattgctgtcattgttggcacagtcacagatgacaaaaggatccaggaggttccagcaatgaaggttactgccctgaggttcacggagacagcaagggccaggattgtcaatgctggtggcgagtgcctcacatttgaccagcttgctcttcgtgctccacttggcgagaacacggtcctcttgaggggcccc

SEQ ID NO: 55618 - DNA, 274 bp, Zea mays
ctgatgacgaggacaaacgatgcaagtggtggtgggaagcttccccggaagcgcttctatcgcgccagggcacacagcaacccgctcagcgactcgcacttcccagtcccaatatcacctgaagaggtcgatctctcacagcactacccgcggtacttccctgctgacaagggcagcgacggtgaggaggctgcagcgccacaacagatccgcttcgccgatgtgggttgcggatttggcggtttgcttgtagggctctcgcctctcttcccag

SEQ ID NO: 55619 - DNA, 274 bp, Zea mays
cctcaatttccacaaacgcaagccccaatctcgccgtcaccacccccaatccagcaaacgcaaaccccatctcgccgccgccgccgccgcgatgtctcgccgctatgacagccgcacgacgatcttctcgccggaggggcgtctctaccaggtggagtacgcgatggaggcgatcggcaacgccgggtcagccctcgggatcctagcggccgacggcgtggtcctcgtcggcgagaagaaggtgacctccaagctcctccagacctcgcgctcc

SEQ ID NO: 55620 - DNA, 277 bp, Zea mays
ggccaggtctccctctccccggctctccgccttcctcttccagtccccgcgcgcgagatcgccgccccgtgtgggccctagatcccgatggcctcgcgccgccgcaccctgctcaaggtcatcatcctcggcgatagtggggttgggaagacttccttgatgaaccaatatgtgaacaagaagttcagcaatcagtacaaggctacgatcggcgcggatttcctcaccaaggaggtgcagttcgaggacaggctcttcactctgcaaatatgggaca

SEQ ID NO: 55621 - DNA, 276 bp, Zea mays
agctcctctcttcctttctctctcgccgcacgcaggcagttcgagagggcgtgcgttgctcgaggggcggtaaatggcagcggcgacgacgaggggcagggccgacggtgacgccggcgccggcgcggtggcggatgtggacgccgtggccaacgacgtccacgcgtccatcaacaacatcacggctcggcgaaatctcgggtacctgtcgtgcgggataggcaaccccatcgacgactgctggcgctgcgactcggactggcacacaaccggaag

SEQ ID NO: 55622 - DNA, 274 bp, Zea mays
ggtggacctctcggtgacgcggcgcgaggacctagtcgagcaggtgaggcacgcggccgggacggtgggcttcttctggctggtgaaccacggcgtggcggaggagctgatgggcggcatgctccgcggggtgcgccagttcaacgagggctccgtagaggcgaagcaggcgctctactccagggacctggctcgcaacctgcgcttcgcctccaacttcgactcttcaaggccgctgcggccgactggcgcgacacgctcttctgcgaggtgg

SEQ ID NO: 55623 - DNA, 210 bp, Zea mays
cttatttacaacagaaaggtttcccagaagttgctctacactttagtgaaggatgagaagaccagatttaacttagctcttgagagtggaaacattcaaattgcagttgcttctgcgaaggagattgatgacaaggatcactggtacaagttgggaattgaggccctgaggcagggaaatgttggtatagtggaatatgcttaccaacga

SEQ ID NO: 55624 - DNA, 273 bp, Zea mays
gcaaatacgtttgtgggagaggttcttggacttgaccccagagaggtaaatgttccagtcattggtgggcatgcaggaattacgatactaccactcctttcacaggtgaatccttcctgctcattcacctcggaagaggttaaatacctcacttctcgcatacagaatggtgggacagaagtagtcgaggctaaagctggagcaggatcagcaactctttcaatggcctatgcagctgccaaatttgcagatgcttgcctgagaggattgcgt

SEQ ID NO: 55625 - DNA, 259 bp, Zea mays
ggcggttcatctgttccccttttgccaaagcactatgtgatgatgtgttgatggactatgatgcactgaaggctgtgcaatctggattgggtaccgcagctgttatcgtgatggacaaatctacggatgtcgttgacgcgattgctaggctgtcctacttctacaagcatgagagttgtgggcagtgcacgccttgccgagagggccacaccctggctctggatgatcatggagaggctcaaggttggtgacgcaaact

SEQ ID NO: 55626 - DNA, 256 bp, Zea mays
gattctgcatctggaaactgccttcatcttgaaagaaaagctccacgtcccttctccagccacccagccccaagatggtgatgctgctgctgctgctttccgcactggctggcctcttcggtgcggtagagggacaagcatttcatcttgggaagtgccccaatcctccggtgcaggagaattttgacgtgactaagtatctcggaagatggtacgaaattgcgaagatcccaccaacctttgcacattggacgct

SEQ ID NO: 55627 - DNA, 244 bp, Zea mays
ctgaagcaccacttcctgcactcactgtgctagctgctcaaaccgtagtagtaacagtccatcaccaccaatggctcccaaggttgcgctcttccttgccctgagcctcctgtttgctgccaccgcgcatggctgcgaacccaactgttctggcccagtcgtcccaacgccgccagtcgtgccgactccgtggtcgcacagccacgggcgctgcccgatcgacggctcaagctcaaggtgtgcg

SEQ ID NO: 55628 - DNA, 267 bp, Zea mays
agcgcagttgtcgtctcttgcggtgccgttgctggttctcacaccttttaggtctgttctcgtcttccgttccgactctctctttttcgttgcagccactgaagatcctggtgtcgccatgggccgccgccccgcccgttgttaccggtattgtaagaacaagccgtacccaaagtctcgtttctgccgaggtgtccctgatgccaagattcgcatttttgacctggggcggaaataggcataagtggatgagtttccgctttgtgg

SEQ ID NO: 55629 - DNA, 278 bp, Zea mays
caaaacacgagggcgtctcccgcaggactggtcactcggcacgcaggcagaggcagcatagcagcagccagctccatccatcctctttcccctcctcgcttcgcttcctcggcggattcctcctccctcgaccgtccccgtccccgtccccttccggcgcgcaagtcgcccgagatggcaaacgcgagatcgggtgtcgctgtgaatgacgagtgcatgctcaagttcggcgagctgcagtcgaagaggctgcaccgcttcctaactttcaagatgga

SEQ ID NO: 55630 - DNA, 122 bp, Zea mays
ctgaagcaccacttcctgcactcactgtgctagctgctcaaaccgtagtagtaacagtccatcaccaccaatggctcccaaggttgcgctcttccttgccctgagcctcctggttgctgcca

SEQ ID NO: 55631 - DNA, 273 bp, Zea mays
ctcgagccgctcgccgctcgacttcgtgttgtcgtgggggccgttgctgtaccaggtgtcccgggtggacgagaagggcctgcagcagtgcaacagcgtggcggccaagatcaaggagcagctggagaaggggcagttcgcggacgccgaggcctcgtggtcggagctggagggcgtcgtcctcgccagctccaactccgtcaacttctacaactttctcaaggacgaggcgtcgggggacgccaccgccactgccacagcggcggtgtcgac

SEQ ID NO: 55632 - DNA, 270 bp, Zea mays
tggcgatgcaatcgatgaccctcaagaaaatggtcgaggacggctgcgcgacaaaggcatcccgctccccaacgtcacctcccacatcctcgacaaggtcatcgagtattgcaacaagcacgccgagccgaccgggccgggcgacgcggccggcaccaccaacaggtccgccgaggatgagctcaacatcttcgacgcagacttcgtcaatgtagagcactccaccctcttggacctcatcctggctgcaaactacctggacatccaggg

SEQ ID NO: 55633 - DNA, 273 bp, Zea mays
cttcccggtctcctccgcccgttgccttcgtcccctccatctccggctgcgtcgccggcgagcccgacaccgcgaatcggatccgccgacaaggcgagagggaaaagatggggcttacgttcaccaagctgttcagccggctgttcgccaagaaggagatgcggatcctgatggtgggactcgacgccgccggaaagaccaccatcctctacaagctgaagctaggcgagatcgtcaccaccatccccaccatcggattcaatgttgaaactg

SEQ ID NO: 55634 - DNA, 263 bp, Zea mays
actctcctcagtaactatagtttttttgttccttgggaggatagaaaaaatatatccttggttttcttgaacagataacatttcaggtgtgcttctgaagagagatttcgttgaacaggatgaatgcattggcagcaaccagcaggaacttcaagcaggcagctaagctgctgggcctcgactccaagctggagaagagcttgctcattccattcagggagatcaaggttgaatgcacaatcccaaaagatgatggaactttg

SEQ ID NO: 55635 - DNA, 260 bp, Zea mays
cacaaagagtcaaccttgccactattagaaggacaagacttgcaagcctgcccttgctaatgccatcttcagtactatagcttttgtgcttggtgcggtcacctcactggtttctggttttcttggaatgaagatagcaacttatgctaatgcccggacaactttagaggctagaaagggcgtcgggaaggcatttattactgccttccgatctggtgcattatgggcttcctgcttgctgccagcggtcttttggttct

SEQ ID NO: 55636 - DNA, 135 bp, Zea mays
cgaggacatccgggtaaactgcgtggtttcaggaattatcaacactgacttcagcaacgtgtttcatgggaatgagtctctctggaagaccttcaaggcacatcatcagctgccgaggattggggagtcagagga

SEQ ID NO: 55637 - DNA, 265 bp, Zea mays
caagcaggggaagatgtcagacgcgctgatcaacggcctcgccggcgccggcggcgaggatcatcgcccagctccttacctacccgctccagaccgtgaacgcgcggcaacagacggagcgcgacccctccaagccggcgttcaaggacggcgccgctcgccagttgtatctggttgtgaagaacgaggggtgggcacgcctgtatggcgggcttatgcctctctcgtcggcaccgctgcctcccaaggtgtctactactaattc

SEQ ID NO: 55638 - DNA, 259 bp, Zea mays
tattgctgcatatcgtgccaagggcaaaagtgaagcaggaaagaagggccctggcaggccaacaggctcaaagaagaagaacgaaccagaagatgaggaggaggaggaggaagaagaagatgaagatgaggaggaagaggatgaagatgaagaataaatggctatcctttaatgatgcgtgtggaatgtgtgtgtgtgctcaggcaattattttgctaaaatgtgaattcaagtgcagctcaatactagcttcagtata

SEQ ID NO: 55639 - DNA, 264 bp, Zea mays
  unsure (1)..(264): unsure at all n locations
ggcggaggtgcaggtcctgcggctntgtggtcgatgccatctcctgggccgcctggcgcaatcgtggctaaacaggtactgctgggccggaacgtggtggtcgtacgctgtgaaggcatcaacatttctggcaatttctacagaaacaagttgaagtacctggctttcctccgcaagcggatgaacaccaacccttcccgaggcccctactcattttgagcccccagccgcatcttctggcggaccgtgcgaggtatgctgccc

SEQ ID NO: 55640 - DNA, 263 bp, Zea mays
atcgcaccaaacatgccacaaaaccaggcctgcctggatgtgatggaggaaggcatattatgtggaggccaagctggtgttttgaaggagctcatggttttcaaggagctggtgatagcaccaacatcacaggctcttgtccatgttttctttgcacaacgttccacgacaaaggtgccaggtgtacactgatgttcaactgaaaccaaggccaattagaaaagttgctgttattggtggtggtctgatgggatctggaattg

SEQ ID NO: 55641 - DNA, 267 bp, Zea mays
gacacattcctcttcacctcggagtctgtgaacgagggacaccctgacaagctctgtgaccaggtctcagatgccgttcttgacgcttgccttgctgcggaccctgacagcaaggttgcttgtgagacctgcaccaagaccaacatggtcatggtctttggtgagatcaccaccaaggccaatgttgactccgagaagattgtcagggagacctgccgcaacattggttttgtgtcaaacgatgttgggcttgacgccgaccactgc

SEQ ID NO: 55642 - DNA, 268 bp, Zea mays
gcctcggaggcgttcagctgcttcacgatgaagctgaacagttccttcccagccactggctgccagaaactcactgaagtggacgatgaacgcaaacttcgtactttctatgagaagcgtatggccacagaagttgctgctgacgctctgggtgaagaatggaagggttatgtggtccgaatcagtggtgggaacgacaaacaaggtttccccatgaagcagggtgtcttgacccatggccgtgtacgcctgctaatgagtaaggggc

SEQ ID NO: 55643 - DNA, 267 bp, Zea mays
ttggtttatgtttctagagagaaacgaccaggctataaccatcataagatagctggtgctatgaatgcattggtccgagtctctgctgtactaacaaatgctccatatttgttaaacttggattgtgctcactacatcaacaacagcaaggctataaaggaagcaatgtgttttatgatggaccctttactaggaaagaaggtttgctatgtacagttccctcaacgatttgatgggattgatcgccatgaccgatatgctaaccgg

SEQ ID NO: 55644 - DNA, 271 bp, Zea mays
caacaatattcgatgattcatcgtcttgaaacaaacaagttgaggaatgttgccaagttctttgcacatttgttggggactgatgccctcccttggcatgttttggcctacatcaggttgacagaggaagacactacatcatcttctcgaattttcataaaaatattgttccaagaattatcggagcacctgggcatacgcctactcaatgagaggctgaatgatcctaacatgcaaggttcctttgagtccatcttcccaaaggatcatc

SEQ ID NO: 55645 - DNA, 253 bp, Zea mays
catcaactgactttagaggcgcaggattcatatccctggagaatcttttgttctttgccaagacgttctccgcatcgtttcagagacttctaaataaacagtgcggtaacagagccacatgggagtacccatttgcggttgctggtgtaaatattacattcatgatcatgcagatgctagatctccagtctactaagccaagaacatttgtgcgagccatttttatccaaatgctctcagaggatgagtgggc

SEQ ID NO: 55646 - DNA, 261 bp, Zea mays
ccgctgtcatcaagcacatgtcaccggacatagcgaagatccgtcgcctggttcgccagtccaagtgcctccaggacaagatgactgccaaggagatctcaacctggctggcggtcgtcaagcaggaagaggagctgtaccagaagctgaacccgggcgcacgccaccggcgtctactggtggcatcgcaagtgccatatccttcaacaccagtcgagcgagtatgatgtggacatcatcgatgagtgcaagggggacgag

SEQ ID NO: 55647 - DNA, 235 bp, Zea mays
gagaaggtagccaagactgttgactcggaggagctcactgtggaggagcgaaacctcttgtctgttgcatacaagaacgtcattggagcccgccgcgcctcatggcgcatcatctcctccatcgagcagaaggaggagggccgaggcaatgaggaccgagtaacactcatcaaggattatcgtggtcaaattgagactgagctgacccagatctgtgatggcatcctcaagctgc

SEQ ID NO: 55648 - DNA, 267 bp, Zea mays
ctcatggagagcacagacgaaattaagaacaggttggcagccaaagaagttgaggtgcaggagtcgaagagcaccctcgacgccaagctcacgacgattgggaacatcgtgcatgagtccgtgccagtcagcgacgacgaggcaaacaataaaattgtacggacatttggagaaaagagagtagaggaaaatttgaagaatcacgtggacctttgcaggatgcttgacattgtcgcattggagaagggtgctgatgtggctggtggt

SEQ ID NO: 55649 - DNA, 263 bp, Zea mays
cttttctcgtttagaacctctaaaatttcccccactcgccagtcgtagcagcacctgtagcagccatggacgccagcggagccggtagcaaggggaagaagggggcggccgggcgcaaggcaggcggccccaggaagaagtcggtgacgcggtccgtcaaggccgggctgcagttccccgtcagccggatcgggcgctacctcaacaagggccggtagtgcagtcctggtgcactggcgcccccgtctaccttgccgcggttc

SEQ ID NO: 55650 - DNA, 129 bp, Zea mays
cccaaatcgaccgagcgaattcaccacagcttctcaccaccgctaccttcgatggcacccaaggcggacaagaagccggcggcgaagaagcctgcagaggaggagcccgcgacagagaaggcggagaag

SEQ ID NO: 55651 - DNA, 260 bp, Zea mays
ctggcccgtcgccgccgacgagaacaacaagcccgtgccgttcgacatggaaggcgtctggcacgccatggaggagtgccaccgcatcggccttgctaggtccgtcggcgtcagcaacttctctgcggccaagatgtcccggctgctcgccttcgccgccgtaccgccggctgtgaaccaggtggaggtgaacgtcggctggcgtcaagagaggtcagggaggcctgcgccaagaacggcgtcgtcgtcaccgccttctc

SEQ ID NO: 55652 - DNA, 102 bp, Zea mays
gatcggtatcgatctcggtaccacctactcctgtgtcggtgtgtacaagaacggtcatgtcgagatcatcgccaatgaccagggtaaccgtatcacaccctc

SEQ ID NO: 55653 - DNA, 263 bp, Zea mays
gcggcgggcccggagggtacgtggcggcgatcaaggccgcgcactggggctcaagaccacctgcatcgagaagaggggcactctcggcgggacctgcctcaacgtcggatgcatcccatccaaggctcttttgcattcatcacatatgtatcatgaagcaaagagttcttttgcacaccatggagttaagtttccaactctggaagtggactcccagccatcatggctcagatagacaaagctgtggcaggactaacaaaggg

SEQ ID NO: 55654 - DNA, 261 bp, Zea mays
gatcggtatcgatctcggtaccacctactcctgtgtcggtgtgtacaagaacggtcatgtcgagatcatcgccaatgaccagggtaaccgtatcacaccctcatgggttgccttcaccgatagcgagaggctcatcggtgaggctgccaagaaccaggcagccgtcaaccctgagaggaccatctttgacgtcaagcgtctcatcggaagaagttcgcggacaaggaagtccagagggacatgaaacttgttccctacaag

SEQ ID NO: 55655 - DNA, 267 bp, Zea mays
cttccgctcgctccccagctccagcaggcagatcagatccatccaaccacgaacaggaaggaaggtaggaggaggggctgaagttgaaccatgagtgccgtcgcggtttcgtcgtcgctgaacccgaacgcgccgctcttcatcccggcggcgctgctgcaggtggaggacttctcgccgcagtggtgggacctcatcaccaccaccgcctggttccgcgaccactggtcccgcgagcacgcccacctggacgagatagccgagcag

SEQ ID NO: 55656 - DNA, 128 bp, Zea mays
tcggggacaacaagcccgagtacgaccaggacccgcaccggcaggcgctggtggactgggtcgacagggtgggcgatgcggcgtcgccggccaccgtcttcgacttcaccaccaagggcatcctcaac

SEQ ID NO: 55657 - DNA, 242 bp, Zea mays
tcttcatccgcgacggcatcaagttcccggacatggtgcacgcgctcaagcccaacccgcggacgcacatccaggacaactggcgcatcctcgacttcttctcgcaccacccggagagcctccacatgttctccttcctcttcgacgacgtcggcatccccgccgactaccgccacatggacggatccggggtgcacacgtacacgctcgtcagccgcgccggcatcgtcacctacgtcaag

SEQ ID NO: 55658 - DNA, 248 bp, Zea mays
tctcgagccgattcggctcgacgttcaggatccacatcttcccgagcgagttcttggttgacactcttcctcttcggaccacctccaaggctcttggtgtagcttgccactctcaccaatcaagttttcatgtctgatctcgacattcagatcccaactgccttcgatcccttcgctgaggccaatgcttcggactctggtgcggcagcagggtcaaaggactacgtacacgtgcgcatccagcagcg

SEQ ID NO: 55659 - DNA, 258 bp, Zea mays
  unsure (1)..(258): unsure at all n locations
ctcacttctgcgccgccacccactacaggtaaggaagaggaggagggcaggatgtcgcaccgtaagttcgagcacccgaggcacggctccctcggcttccttcccaggaagcgctcctcccgccaccgcggcaaggtgaagtcatttcccagggatgaccccaagaagccttgccatctcactgccttccttggctacaangctggcatgactcacattgagccgtgagttgagaagccaggatccaaactccataag

SEQ ID NO: 55660 - DNA, 243 bp, Zea mays
ccgagtcgctcgtcagatcctccagcaacacagcaccttcgccgccgccgccatgggtaaggttcacggatcgctggcccgcgctgggaaggtgcgcgggcagacgcccaaggttgcaaagcaggacaagaagaagaagccccgcggccccgctcacaagcgcatgcaatacaaccgccgcttcgtcaccgccgttgttggattcggcaagaagcgcggccccaaactctcggagaagtagat

SEQ ID NO: 55661 - DNA, 266 bp, Zea mays
ctcgagccgattcggctcgagcgttcaggatccacatcttcccgagcgagttcttggttgacctcttcctcttcggaccacctccaaggctcttggtgtagcttgccactctcaccaatcaagttttcatgtctgatctcgacattcagatcccaactggcttcgatcccttcgctgaggccaatgctggggactctggtgcggcagagggtcaaaggactacgtacacgtgcggattcagcagcgtaatggtcggaagagcctga

SEQ ID NO: 55662 - DNA, 156 bp, Zea mays
ttcgagcgattcggtcgagcgttcaggatccacatcttcccgagcgagttcttggttgacctcttcctcttcggaccacctccaaggctcttggtgtagcttgccactctcaccaatcaagttttcatgtctgatctcgacattcagatcccaact

SEQ ID NO: 55663 - DNA, 258 bp, Zea mays
gcaagatggcacaccatggccaggaaacaataccagggaccatcctggaatgattcaggttttccttggtcacagtggtggtcttgatactgagggtaatgagctaccccgtttggtctatgtttctcgtgaaaaacgtcctggattccagcatcacaagaaagctggtgccatgaatgctcttgtccgcgtctcagctgtgcttaccaatgggaaatacatgttgaatcctgattgtcgatcatacatcaacaacag

SEQ ID NO: 55664 - DNA, 254 bp, Zea mays
tttgagacaagtgcaatgataattacatttgtgttgctcgggaagtatctcgaggtgcttgcaaaagggaagacatcggatgcaattaagaagcttgtagaactggtcccttctactgctgttttggttctgaaagacaaagaagggaaacatgttggtgagagggagattgatgcacggttggtccaacctggtgatgtcttaaaagtggctcctgggtcaaagattccagctgatggtgttgtccgttgggg

SEQ ID NO: 55665 - DNA, 217 bp, Zea mays
gtggaaccagagttccagttggtggtggagacaacaacgttgttcacaaagccgaggacgttgtgagcactatgcttgccaagggtttcgtgctaggcaaagaccgcggttggcaaggccaaagcattcgatgagaagcatggcttcacatccacagccggtgctacagtggcctcaattgacaagaagattgggctgactgataagatcacgacag

SEQ ID NO: 55666 - DNA, 274 bp, Zea mays
atcaactttttgagaacacaattggttgtaagtcgtgaaaataaattacgcttgctgatgatttatgcagcacttaacccagagaagtttgaaagcgacaagggtgcaaaattaatgcagttggcaggattatctgctgatgacatgattgctgtaaataatatgcgttgcttatgtgggcctgataccaaaaagtcttcagtagggggttttacactggaatttgatgttcacaagaaggaacacacaaatcgaaaagagcgaacaagggaag

SEQ ID NO: 55667 - DNA, 232 bp, Zea mays
gcagctttgttagctggattgcctctggcaggaaatcctgcctggtggaggacaatgtttggacttgctgtagttccatccattctgctggctgtaggaatggccttttcgcctgaacagccctcgttggctattccagcaaggaaaggttactcaagcagaattagctgtaaaaagactgtatggaaaagaaatggttaccgaaattatgtttgatctgagagctagtggc

SEQ ID NO: 55668 - DNA, 272 bp, Zea mays
ctggcatgtccttccgggttcccaccgtggatgtgtcagttgttgacctcactgtcagaatcgagaagggggcctcttacgaggaaatcaagaaagctattaaggctgcttctgagggcccactcaagggtattatgggctacgtggaggaggatctggtttccaccgacttcaccggtgacagcaggtcgagcatcttcgacgccaaggccgggattgccctgaacgaccacttcatcaagctcgtctcttggtacgacaacgagtggggc

SEQ ID NO: 55669 - DNA, 277 bp, Zea mays
gtcggctagtcccaaggctgctgccgccgcctgccgctaggggatcgcttgctttcctcggaccactctgccgaccacatctacaccgcatcaacggtccttccaagtgagctccaatcccctgtctgtagatggagagggtgctcaaggatgacgccgtcgaggagaagggcgagcgcgccaggatgtgatcgtttgttcgggccatggcaatctcggatttggtgaagaccacattggggcccaaaggaatggacaagatcctgcaatcaactgg

SEQ ID NO: 55670 - DNA, 265 bp, Zea mays
gcggcggcgcgggcggacaaggagcaggcggaggaggagttgtgccaagccacaatgggtatctcgcgtgactcgatgcacaagcgccgagccaccggtggaaagcagaaggcctggaggaagaagcgaaagtatgagcttggtcgccagccagccaacaccaagttgtcaagcaataagacggtgaggagggtcgtgttcggggaggtaatgtgaaatggagggctcttcgccttgatactggtaactactcatggggaaatga

SEQ ID NO: 55671 - DNA, 272 bp, Zea mays
tgaaaacttcagttggtcttgtatatctccttgcctgtatcctggaacctttcatgccttccttttcaaaagaagtgctacgtcaattaaacctgtccccagaagaaaatatttctttcagtgaagaaaatggcgaaagtgtgaaggcaaaacccccttgggatcttgtaccagcagggcacaaaatagggaggcctgtacctctgttttgaggattgaaagatgaaaaggtgagtgagtatagggaaaaatatgcggggcagtcagctgag

SEQ ID NO: 55672 - DNA, 251 bp, Zea mays
gcagcatgtgacaccttcagatctggtgctgttgagcagctgagaactcatgcaaggaggcttcagatacctatatttgagaagggttatgagaaagatccggcagttgtagcgagggaggctattcaggaagcaacccggaacaaatcagatgttgttctggatgacaatgctggacgtatgcaggacaatgaggcactcatgaggggactctccaagctaatcaatctcaatagcccagacctgggttt

SEQ ID NO: 55673 - DNA, 220 bp, Zea mays
acgaggatgtgctcttcagtgtgctatgctcagccccactttcaaagtgcgggaattccaggttaatgatgggtttcctttctcagttgcgatgtcatggaaacaagactcccagaacagtgcaccccaacagacccttgtattcccaaaggggaatgcaattccgagcatttaatctctaacggtctataaatcgagtacatttgaaattgatggtttg

SEQ ID NO: 55674 - DNA, 267 bp, Zea mays
  unsure (1)..(267): unsure at all n locations
tgcgaagaaggaagctcctgcccctcctaaagctgaagccaaagcgaaggctttaaaggccaagaaggcagtgttgaaaggtgtccacagccacaaaaagaagaagatccgcacgtcacccaccttctggcggccgtattcactgcgactccggagacagcccaaatatcctcggaagagcgctcccagtagnaacaagcttgaccactatgctatcataagtttccgctgaccactgagtctgccatgaagaagatagaagacaac

SEQ ID NO: 55675 - DNA, 265 bp, Zea mays
gcggcgtgagaagccatgagcagcaaagtctctcgcgacaccctgtacgaggcggtgcgggaagtcctgcacgggaaccagcgcaacgccgcaagttcctggagacggtggagttgcagatcagcttgaagaactatgatccccagaaggacaagcgcttctcgggcaccgtcaggcttaagttcactccccgccctaagttctctgtgtgtgtcctgggggaccagcagcactgtgacgaggctaaggccgtggatatccccca

SEQ ID NO: 55676 - DNA, 266 bp, Zea mays
ggacacaaacccttgtgaagagtgccattgtgcaagttgatgctgccccattcaagcagtggtacctcactcactatggagttgacattggtaggaagaagaaaacccctgctgcaaagaaggataatgctgagggacaagaggttgaggcagcagctgaggaaacgaaaaagagcaaccatgtcacgaggaagcttgagaagcgcaaggagggacgtacccttgacccacacattgaggagcatttggcagtggacggttgctgg

SEQ ID NO: 55677 - DNA, 257 bp, Zea mays
  unsure (1)..(257): unsure at all n locations
atcganagtggggagcactcattgagaaccaccagtacaagagagaaaggtgacacaagtaaaggggacatccatcaccatgtccatcacatccacagcagcggcaacaagctagtagcagatgttttcttcttccacgacgtcctacgcccagggtccgaaatcacgccgatcatcccaccgaccaccaccctaccacctctgctgcctctccgcgaggccgacgcgctcccgttctacaccgggcgcttcgccga

SEQ ID NO: 55678 - DNA, 244 bp, Zea mays
caggcagatcagatccatccaaccacgaacaggaaggaaggtaggaggcctgaggggctgaagttgaaccatgagtgccgtcgcggtttcgtcgtcgctgaacccgaacgcgccgctcttcatcccggcggcgctgctgcaagtggaggacttctcgccgcagtggtgggacctcattaacaacaccgcctggttccgcgaccaatggtcccgcgagcacgcccaactggacgagatagccgag

SEQ ID NO: 55679 - DNA, 201 bp, Zea mays
cactcccagggtatactccatagagacctgaaatcagagaacatacttcatgggagaagatatgtcagtcaaagtcgcagatttcgggatttcatgcttggaatcacagtgtggaagtggcaaggggtttacaggaacctacaggtggatggctccggagatgatcaaagaggaacatcatactaggaaagtggacgtgta

SEQ ID NO: 55680 - DNA, 261 bp, Zea mays
cgcagctccaaagccactcccaaacccccgcttccagaaccttctcgaagctccccgccgcctcctccactcgcaccgatggcgaatgaaccaatgcgcgtgctcgtcactggcgccgcaggacaaattggatatgccctggtacccatgattgctaggggtgttatgcttggtgcagaccagcctgttattctgcacatgcttgacattccgccagcagctgaagcccttaatggtgttaagatggaattggttgatgct

SEQ ID NO: 55681 - DNA, 256 bp, Zea mays
gcccaactacctcatgctcgcgcaggtccagctgcccctcgacgacgccgaggccgacgcccgccactacgacgatgaccacgccgacatcggtggttttggcgccgcctccggcaaggtgcaaattgttcagcagataaatcatgatggagaggtcaatcgagctcgctatatgccccaaaattcatttataattgctactaagacagttagcgcagaagtatatgtttttgactatagcaagcacccatctaag

SEQ ID NO: 55682 - DNA, 263 bp, Zea mays
  unsure (1)..(263): unsure at all n locations
gccgaagaagaggagaagcgaacaagcaggcttcgagaacaagactgcagggggagggggaggaccaagcgaaaggggaactagagcaagatgggcggcgcactgctgcttgcgctcctcctcgtctctgctgctgccgcccctcaggtacttggagttggcaatggagacaatcacatgagaatcatccaggaggacatcatcgagacagtcaacaaccatcccagtgctgggtggacagcctcacgtaatcctntattttc

SEQ ID NO: 55683 - DNA, 273 bp, Zea mays
ctttctttggaacaaagaggttaattgggcgacgctttgatgatccacagacacagaaagagatgaagatggtgccatacacaatcgtgaaggctccacatggtgatgcctgggttcaaacaacagatggcaagcagtactcaccaagtcaggtcggtgcatttgtgctgaccaagatgaaggagacagctgaatcttaccttggcaagtctatctcaaaggcagtgattactgtcccagtttaattcaatgacgctcacggtcaggccacaa

SEQ ID NO: 55684 - DNA, 270 bp, Zea mays
ggccggcgcgccagttgaccagaccatcgcgacgctcgcagctcacttggagcagggcgactgcatcatcgatggggggaacgagtggtacgagaacacggagaggagggagaaggccatggaggagcgcggcctcttgtatcttggcatgggtgtctctggaggagaggagggtgcccgcaacggcccgtccttgatgcccggaggtcgttcgacgcttacaagtacgtcgagacattgttctcaaggtggctgctcaggtccctgaca

SEQ ID NO: 55685 - DNA, 264 bp, Zea mays
acagctgctcctgccgcacggttacccgtgcaccgagcacaccgttcaaacctatgatggctttcttttgtctcttcagcatattccacatggcagaaatggaattgcagataatactgaacctccagttttgcttcagaacggtctttttccagggtggagatacatggttcataaattccaatgaacaatcacttggatatatccttgctgacaatggttttgatgtttgggtcggaaatgttcgtggcacacgttggagta

SEQ ID NO: 55686 - DNA, 266 bp, Zea mays
tgttcaggatccacatcttcccgagcgagttcttggttgacctcttcccccttcggaccacctccaaggctcttggtgtagcttgccactctcaccaatcaagttttcatgtctgatctcgacattcagatcccaactgccttcgatcccttcgctgaggccaatgctggggactctggtgcggcaccagggtcaaaggactacgttcacgtgcgcatccagcagcgtaatggtcgcaagagcctgactaccgtccagggattgaa

SEQ ID NO: 55687 - DNA, 264 bp, Zea mays
cgggatcaaggagccagagagcgggacgcagcgagcgttccgccggagatcgagaccgtagctagggtttgaggcgccgggctgcggtggacgagatgtcgacgccggcgaggaagcggctgatgcgggacttcaggcgcctgcagcaggacccgcccgccgggatcagcggcgcgccgcacgacaacaacatcatgctctggaacgccgtcatattcgggccggatgatacgccgtgggacggtggcacgttcaagcttacct

SEQ ID NO: 55688 - DNA, 264 bp, Zea mays
gccagacactccgtagtctgtaccccaagcaccggcgcggcggcggcggctaccatggcagtcgggaagaacaagaggatctccaagggaaagaagggtggtaagaaaaagaccgtcgatcccttctctaagaaggactggtatgacatcaaggccccatcggtcttcagtgtgcgcaacattgggaagactctcgtgtccaggacacagggtaccaggattgcctctgatggtctgaagcacagagtctttgaggtttgtcta

SEQ ID NO: 55689 - DNA, 242 bp, Zea mays
ctcaacacagcacaggcagctcgagagagagagagagagagagatgtcgtggttcgggcaccaccaccacaatcagccggctcccccggcgtcgggccccaaccaggtgttcaagatcgtctgccgcgccaacgagaactactgcctggccgtccgcgacggcgccgtcgtgctggcgccggtcaaccccaaggacgaccaccagcactggtacaaggacctgcgctttcgcacccgggtca

SEQ ID NO: 55690 - DNA, 263 bp, Zea mays
tcctcaaccaaattcaaggtcacagcggcgaacctctcggctatcatatctggccgcggcaagggtcggaagggtctggggcaagggcggcgccaagcgccaccgcaaagtgctgcgcgacaacatcgcaggcatcaccaagccggcgattcgcatgttggcgaggaggggcggcgtcaagcacatctccgggctcatctacgaggatacccgcggcgtgctcaagatctttcctcgagaacgtcatccgcgacgccgtcacc

SEQ ID NO: 55691 - DNA, 256 bp, Zea mays
gtcagcttgagttcaaggctgtcctgtttgtgccgaagagggccccctttgacctcttcgacaccaggaagaaactgaacaacatcaagctctatgtgcgccgtgtcttcatcatggacaactgtgaggagctgatcccagagtggctgagctttgtcaagggcattgttgactctgaggaccttcccctcaacatctcccgtgagaccctccagcagaacaagatcctcaaggtcatccggaagaacctggtgaa

SEQ ID NO: 55692 - DNA, 258 bp, Zea mays
tctggcgcccatgccatcgctgggaggcacacccctggtaccttcaccaatcagctccagacctctttcagcgagcctcgcctgctcatccttactgacccaaggattgaccatcagccactcaaggagtctgctctggggaacatcccgaccattgccttctgcgacactgactctcccatgcggtatgtcgatatcggcatcccagccaacaacaaggggaggaacagcattggatgccggttctggcttttggcc

SEQ ID NO: 55693 - DNA, 129 bp, Zea mays
ggcaagactatcaccctcgaggtggagtcgtctgacaccattgacaatgtcaaggctaagatccaggacaaggagggcatccctcctgaccagcagcgccttatcttcgccggcaagcagcttgaggac

SEQ ID NO: 55694 - DNA, 255 bp, Zea mays
gcgacaaacattggcttgatgatgatcagtggcctgtttgttaatggaccctatgctctgataacaaccgctgtttctgctgattttgggaactcacaaatctcttaaaggagattctcgcgcattggccacggtaaccgcaattatagatgggacaggatctcttggtgctgcactaggaccattcataacgggcttcatttcaagaaaaggatgggatttagtattcacaatgcttgcactctgtgcactggt

SEQ ID NO: 55695 - DNA, 254 bp, Zea mays
gaaatctccagtcgaatatcaaggagcaagagatgtaaagccaatcgtagagtttgctctgtcacaggtcaaggcccttcttagagataggttgagtggtaaggcatcagcagggtcaaatggcaagacatctggaggttcaagtgagaaaaatgaaccaagtgcatcagtagaattaaattcgcgtaacttcgatgaactcgttgtcaaaagcaaggacatttggattgtggaattctttgcgccatggtgtg

SEQ ID NO: 55696 - DNA, 255 bp, Zea mays
gggccattgaaggatcacatttatttgcatctgaaccatctgccacctgaggttctcaaggaaaggcttcctggtatttctgaagatgctgctatttttgctggtgttgatgtcaccaaggagcccattccagttttgcctactgtgcactacaatatgggcggtattccaacaaactaccatggggaggtagtggatatcaagggtgataatccagatgctgttgttcctggtctaatggctgctggtgaagca

SEQ ID NO: 55697 - DNA, 256 bp, Zea mays
gcgcaatttaagcacatacttggagtgaaaccagcatcacagaatgcactaagcaatgttcctgtcaaacgttattcaagatcactggaacttccaaaagagtttaccgctagatctgcatggtgccgttgcagcacaattgggaacatacttgatcaaggtcactgtggctcttgttgggcttttggtgctgtggagtgcctccaggaccgtttttgcattcacctcaacatgagcattttactttcagtcaatg

SEQ ID NO: 55698 - DNA, 250 bp, Zea mays
ggcgcacagcacacgaacacacaccgcgcccagctccgaggtgatcttccggcggccggcgagatgagccgtggcacaggcgcgggctatgaccgccacatcaccatcttctcccccgagggacgcctgtaccaagtcgagtacgcgttcaaggcggtgaagtcggcgggtgtcacgtcgatcggcgtccgcggcgcggactccgtctgcgttgttacgcagaagaaagtcccggataagttgctggatc

SEQ ID NO: 55699 - DNA, 167 bp, Zea mays
accgtcgctgcgacattcggctcaatgtccgcgatgctgctagagaagctgctcttcgtgagatcaaggcgcgcatcaagaagaccaaggatgagaagaaagcgaagaaggcggaggtgagcaagtcccagaagacgcagaccaagggtgcggtccagaagggttcc

SEQ ID NO: 55700 - DNA, 134 bp, Zea mays
gctggccccggtcaaccccaaggacgaccaccagcactggtacaaggacatgcgcttcagcacccgggtcaaggacgaggaaggcatgccggcgttcgcgctcgtcaacaaggtccacgggctcgccatcaagc

SEQ ID NO: 55701 - DNA, 123 bp, Zea mays
gtgccgttcgccggctggagcatgcccatccagtacagggactccatcatggactccaccgtcaactgccgcgccaacggcagcctcttcgacgtcgcccacatgtgcggcctcagcctcaag

SEQ ID NO: 55702 - DNA, 123 bp, Zea mays
cctccaccaacgtactcgctcggattcggtcgacttttgttgatgtcctcaaggagggaggcgtcctccctggcactcaggttgaccagggcaccattgaggttgttggcactgctaaggaga

SEQ ID NO: 55703 - DNA, 131 bp, Zea mays
ctgtacagagattttgtcaggctttccctattgtcatcaattgaggacccttttgatcaggatgactggagttcatgggcatcattgcagtcctcagttgatatccaaattgtgggtgatgatttactcgt

SEQ ID NO: 55704 - DNA, 153 bp, Zea mays
ccctggcccagtatttctgatagcgctaaggatctggtccgcaatatgcttactcgggatcctaaaaagagatttagtgctcatgaggttctctgccacccatggattgttgatgatgccgtggcgcctgataagcctattgattctgctgtt

SEQ ID NO: 55705 - DNA, 134 bp, Zea mays
gcattttctacgatcacttcttcgactgggggttcaaggacgaaatcgccgccctggtggcggtgcgcaacgcaatggcatcacgccgacgagcgagctcaccatcctcgagcacgacggtgactcctacgtgg

SEQ ID NO: 55706 - DNA, 202 bp, Zea mays
gtcgtcgtaagctgcagctagtgtggactggagatccaccactccaccagtccggtccatctgctggacctcgattggtttcttcttacctaggaacatccggggatgtcgactcctgcgaggacgaggctgatgagggatttcaagcggttgatgcaggaccctccggccggcataagtggcgccccgcaggataacaaca

SEQ ID NO: 55707 - DNA, 211 bp, Zea mays
caaatactttggatgtgagcttggtgcacagtccaaatttgatgagaagacagggatttccttggttaatggggctcatgatactgcaaagctggctggtctccttgaggtattcatcaagaagtatgtccagtgttatgggtgtgggaatcctgagactgagattctcatatcaaagactcagatgctatcactgacatgtgcagctgtg

SEQ ID NO: 55708 - DNA, 152 bp, Zea mays
tagtagctggctttgatcaagaagctgcagctgcagtcatggcacgcttggtgtcatttaagatggaaactgaggttgattttgacccagtaaggtggcttgatcgagctttgatacgtttatgctcaaaatttggagattatcagaaggag

SEQ ID NO: 55709 - DNA, 137 bp, Zea mays
cataaagagtcaaccttgccactatagcaaggacaagacttgcaagcctgcccttgctaatgccatcttcagtactatagcttttgtgcttggtgcggtcacctcactggtttctggttttcttggaatgacgatag

SEQ ID NO: 55710 - DNA, 169 bp, Zea mays
ccactgcctcgtgtggccgtcgtctcccgttcggaacgccaagccccccctccggcgaaatggcccccaagcgaggtggcagggcgccggtgccggccaagaagaagacggataaagtgacgaaccctctattcgagaagaggccgaagcagttcggcatcggcggcgc

SEQ ID NO: 55711 - DNA, 235 bp, Zea mays
gtcttcgtcgaccccttcgcaaggcctcggttccatccttcgccggaggcaccgcccgtcaacaggacttgatctactactcactagcggtgtagaggcgaagagaagaacttgaccatgagcagcataggcacaggttacgatttgtctgtcacgactttctccccagatggtcgtgtcttccaggtcgagtatgccaccaaggccgtcgacaacagcgggactgttgttggga

SEQ ID NO: 55712 - DNA, 144 bp, Zea mays
gaagctgatgaaatgctttctcgtggtttcaaggatcagatttacgacatcttccagcttctcccagccaagattcaggctggagtcttctctgctaccatgccccctgaggcccttgagattaaccgcaagttcatgaacaag

SEQ ID NO: 55713 - DNA, 171 bp, Zea mays
cactgcctcgtgtggccgtcgtctcccgttcggaacgccaagcccccctccggcgaaatggcccccaagcgaggtggcagggcgccggtgccggccaagaagaagacggataaagtgacgaaccctctgtttgagaagaggccgaagcagttcggcatcggcggcgcgttg

SEQ ID NO: 55714 - DNA, 223 bp, Zea mays
ctccgttgctcgcctcgggtcatcccctaagcagggagttgatctatccgctgcagccatgagtaagttgcagtctgagtctgtcaaggatgccatctcccagattgttggggatgccaaggagaagaataggaagttcactgagactgtggaacttcagattggtctgaagaattatgatccacagaaggacaagcgtttcagtggctctgttaagttgccc

SEQ ID NO: 55715 - DNA, 139 bp, Zea mays
ggtgaccttgcgtacgtacgtcgtagcggctcgtccagctcgctcgccaccgccctggacccgtacaagcactgcccgtcgagcgccttcaacgccccgtactggaccaccaactccggcgcccccgtgtggaacaacg

SEQ ID NO: 55716 - DNA, 270 bp, Zea mays
cagagacggaaccagagacgggccagagtatccccctcctcctccatgaaactcgctgtcaccctcaccctggtcacactggccctctgctgcagctccgcttctgccgagatctgcccgagctttcagcgtgtcatcgaaaccctcctcatggacacaccctccagttatgaggctgccatggaacttttcagccctgatcaagacatgagggaggcacgggctcagctgaagaagctggtggccacctcccccaaagaccagagaaag

SEQ ID NO: 55717 - DNA, 158 bp, Zea mays
caaatcagattcagtttgactttctgggtaaagattcaataagatactttaacaccgtagaggttgaagagcttgtgtacaaggcaattgagggtttccgtgctggaaagaagccaggacaagatctatttgacaagattgatacatctaggctaaat

SEQ ID NO: 55718 - DNA, 274 bp, Zea mays
  unsure (1)..(274): unsure at all n locations
ggaaggtataagggaaggcagttcagttcagtatgtcatttctttggatatcaggctcgaggatctacaccatcaaatttcgactgtgactatgcttatgctcttggacgtatctccctgcatatgattgccgttggattgactggctacatggcaactgtggctaatctgaaagaccctgttgacaaatggagatgtgctgctgctcctttaactgcgatgatgagtgtgaagaggcatttacgtggacctggagncatccctatagggaggc

SEQ ID NO: 55719 - DNA, 135 bp, Zea mays
ctgtttccgcgcgcgagatcgacgccccgggtgggctctagatcccgatggcctcgcgccgccgcaccctgctgcaaggtcatcatcctcggcgaaagcggggttgggaagacgtctttgatgaaccaatatgtg

SEQ ID NO: 55720 - DNA, 140 bp, Zea mays
ctcgagccctcgagccgccttttgctcggaacgcacacacagcccggtccccgatctccgagcccctcggcgatccaagctgcagatcttcgtcaagaccctcactggaaagactatcaccctcgaggtggagtcttctg

SEQ ID NO: 55721 - DNA, 137 bp, Zea mays
cgcacagcatcaagtacaatggtactgttcagggtctcaagtatatctggagaacagagggcctccgtggacttttcaagggcaatggtaccaattgtgcaaggcttgttccaaattctgccgtgaagttttttagc

SEQ ID NO: 55722 - DNA, 271 bp, Zea mays
gcttctcgagaagctgcgtgctgcttcctgggatcatgctgtcaaagatgcggaagatctaaaagtctttgcgaaagattctggttctcctgaagctaatgatttgactcactgggaccttaccttctggagtgaacgactgagagagtctaaatatgatatcaatgaggaagagctgcgcccttattttgcactacccaaggttatggatggcctcttcactctggcacataagctttttgaagttactgttgaacctgcagatgggctg

SEQ ID NO: 55723 - DNA, 142 bp, Zea mays
cggagaccgagcgaggcaggcaacccaccaccgagaggcagggacaggaacaggaagccggaggccaagatgtcgtcggtgttcagcggcgatgagacggcccccttcttcggcttcctcggcgccgccgacgccctcgtct

SEQ ID NO: 55724 - DNA, 230 bp, Zea mays
cactttgaagaagccatgcgctttgcgcagcgttctgtcagtgacaatgacattccggaagtatgagatgtttgcccagacccttcagcagagtcggggctttggcagcttcagattcccttcagggaaccagggtggagctggccccagtcagggcagtggaggcggcacaggtggccgtgtatacacagaagacactgatgatgacctgtataagtaagtggtggtgg

SEQ ID NO: 55725 - DNA, 142 bp, Zea mays
ctcgagccgctacaaggagatcctaccaagggcggagtacttctcccaggcactttacaccttcgacatcggtcaaaacgacatcacctcaagctactttgttaacaataccaccgaagaagtcgaagccataatccctgat

SEQ ID NO: 55726 - DNA, 132 bp, Zea mays
gccgccgctgcagtgtccatagccaccgcaggagactgagatggggggttttgtcaagacccacaagaccaatgcgtacttcaagcgtttccaggtgaagttcaagagaaggcgcgctggcaagacagacta

SEQ ID NO: 55727 - DNA, 144 bp, Zea mays
gtgtgggaaaggcaaggtgtggcttgacccaaatgaagttagtgagatctccatggcaaactcccgccagaatatccggaagttggttaaggatgggtttatcatcaagaagcctcataagatccactctagatcccgtgcaag

SEQ ID NO: 55728 - DNA, 143 bp, Zea mays
gacacattgccttctgttttctccagcatgcgcttgctccagctcctgttcagggccagccctgccaccctgctcctggttctactgcctgcagttgggggccaacaaagctcaggacaacactcggaagatcataataaaga

SEQ ID NO: 55729 - DNA, 132 bp, Zea mays
gcgacttccaggtggagcgctacgtgtacaagcgccgcactgatggtatctacattattaaccttggaaagacctgggacaagcttcagttggccgccagggtcatcgttgccattgagaatccgcagacat

SEQ ID NO: 55730 - DNA, 273 bp, Zea mays
gattgccacagctgtcatcacgttatttaatgaacctagtgctgaagacagtacaaagggtccattgacagttgcacagaaaaaagcccagaacatcatggagtcctttgaaaatccatttaggatgtttctgccctcactgggacaccgtgtcacgtctctcaggcagcgaagttcgatccatcaaccaaaatctatgaaatcagcaaccgttggaagctggcccaggtacaagtacaaaaagactctaagaagctgtcaagaagaaggcag

SEQ ID NO: 55731 - DNA, 274 bp, Zea mays
ggaaaaccacctgtacttattgagaaagatgaaagcctggataagtttgacccagcaaaactgaagaaacttcgcccaagtttcaaggagaatggtggtaccgttacagctggaaatgcttctagtataagtgatggggcggctgcatagttttggtgagtgggcagaaggctcaagagcttggcctgcaagtccttgcaaggatcagaggatatgcagatgcagctcaagctccggaactttttacaaccaccccagcacttgcgataccaaa

SEQ ID NO: 55732 - DNA, 271 bp, Zea mays
ggcggccaccgagggcggcggctgcgactgcaacacctgcaagtgcggcaccagctgcggctgctcctgctgcagctgcaactgagctggcccggcccggcgatggcgcacgagagtcgagaggaggaggacgacgacgaggcgtataaatataatagcggcgtccagtaaataagctccagtcaactgcacccgccattatccatggtcgctcgctcctcgcctgcgtctcctggtcctggggttcgtctgaacgtcctcgcggcttcac

SEQ ID NO: 55733 - DNA, 272 bp, Zea mays
taggcactcatcaaggaacattatttcttggaattgtataattcttgcacacttgctgcatggttctccaagtgaagcactggatcgcttttgtgagatgaaacaagaaggcgtgctgccagatcatacaactttgactgccgtaatcaaggcctatggcctccagggaaaggtatctgaggcgaaacggatatttcacaatatgacccacgatcacaacattactccagatttagatcattacacagctatagttgatctccttggccgct

SEQ ID NO: 55734 - DNA, 270 bp, Zea mays
gttgaaggtagatcggaaaggtatgcagttcagaaagatgagagcttgtcagaaataaggacgcagctccttcagattgaaaatcagcaaagcagtttactggatcttctccagaaatttatggggaagtccgagaacggtatgcattctttggagacaagagtgcatgggctggagatggctttggatgagatctctcgtgatttggccttctcttcgggaaggatgtcaagcagagagcctgatgcaaagacgtgctgcattccgagc

SEQ ID NO: 55735 - DNA, 270 bp, Zea mays
gctgaaggacctgcagaaggacccccccacatcatgcagtgcaggtcctgctggtgaggacatgtttcattggcaagcaacaattatgggaccacctgacagtccctatgctggtggtgtttttttagtgaacattcatttcccgccagattaccccttcaaacctccaaaggtttctttcaagacaaaggtcttccatcctaatatcaacagcaatggaagtatatgccttgacattctcaaagagcagtggagccctgctttgacaat

SEQ ID NO: 55736 - DNA, 277 bp, Zea mays
caaaccttaagggatttgaggcagctattgcagcaggggcaaaagaaatcgcaatatttgcatcagcttctgaaggattttccaagtcaaacataaactgcaccattaaagagagcattgcccgttataatgacgttgctcttgctgcgaaagagaaagaaattcctgtccgagggtacgtttcttgtgtggttggatgcccagtagatggaccagtgccaccttcaaacgtagcttatgtagcgaaagaactttatgacatgggctgctatgaggt

SEQ ID NO: 55737 - DNA, 273 bp, Zea mays
cggctcgaggaagtataaagagggcctcactagggaagagggaatacaactggtgtcagaagcaatatgtgcaggtatcttcaatgacttgggtagtggaagcaatgtggatgtctgcgtgataaccaaggggaagacagaatacttgagaaaccaccagttgccgaatcccagaacttatgttagttcaaagggatatagcttcaccaaggggcagactgaggtgttgtccgcaaagatcacacatctcaagcagaaggttgaggtcactga

SEQ ID NO: 55738 - DNA, 273 bp, Zea mays
ggcgcatcctcgacttcttctcgcaccacccggagagcctgcacatgttctccttcctcttcgacgacgtcggcatccccgccgactaccgccacatggacggatccggggtgcacacgtacacgctcgtcagccgcgccggcaccgtcacctacgtcaagttccactggcgccccacctgcggcgtgcgctcgctgatggacgacgaggccgtcgccgttggcggcgccaaccacagccacgccaccaaggacctcacggacgccatcgcgg

SEQ ID NO: 55739 - DNA, 204 bp, Zea mays
aaaaaaaaaacaaaaagggtaccggacgcggcgaaagcctcgccccccgccgctctcgcatcgtctccggagcgcacgtcagatcaggtgcgccgcgcccccctcgcctaagctgcgacgaccatccatcgaacaggaaggatgacgggctccatggatctcccggccaagggcgggttcagcttcgacctgtgccgccggaac

SEQ ID NO: 55740 - DNA, 264 bp, Zea mays
acttcacacgtcatattctcaagggtcttgcttttttacatagccaaaagattatgcatagggatatcaaaggggcaaatttgttagttgatattaacggtgtagtgaaattggctgacttcggaatggcaaagcatttgagtactgcagctcctaatctttcattgaagggaacaccatactggatggctcctgaggttgttcgggctacactcgataaaagtgcaggttatgatcctgctgttgatatttggagccctggct

SEQ ID NO: 55741 - DNA, 271 bp, Zea mays
tgtgaccctccctcagccgcgtcgcgtcgcatcctacgatccaaagctctctctgctcgcagccatggcgaagaactacccgaccgtgagcgccgagtacagcgaggctgtggagaaggccaggcgcaagctccgagccctcatcgccgagaagagctgcgccccgctcatgctccgcctcgcgtggcactccgcggggacgtagcgagtgtcgtcgaggaccggcggtccattcggcacgatgaagcatccagtcggaattggctcacgg

SEQ ID NO: 55742 - DNA, 268 bp, Zea mays
cttcaaactcctattcaaggttggatgatggcaattgtgatggctcttttgagtggttttgctggggtgtatacagaagctatcattaaaaaacggccatcaagaaacatcaacgtgcagaacttttggctatacatatttggggtgatcttcaatctagttgcaatttgtgttcaggattatgatgcagtcatgaataaaggctttttccatgggtattcattcatcacagttttgatgattctgaaccacgcactgagtggaattg

SEQ ID NO: 55743 - DNA, 276 bp, Zea mays
caagaaagttgggtacaaccctgataagattgcctttgtccccatctctggttttgagggcgacaacatgattgagaggtccaccaaccttgactggtacaaaggcccgaccctgcttgaggctcttgaccagatcaccgagcccaagagaccttcggacaagcccctgcgtctccccctgcaggatgtgtacaagattggtggtattggaactgtaccggttggtcgtgtggagactggtgtcatcaagcctggtatggttgtcaccttcggtcc

SEQ ID NO: 55744 - DNA, 272 bp, Zea mays
gtccgactcccagccgtcgtctgctgcgtactccgcctccagtttggtctgtttcttgcaagttgctcttgcggtagttcccccaactgtcaccatgcagaacgaggagggtaagactgtggacctctatgttcccaggaagtgctcggccacaaacaggatcatcactgccaaggaccatgcctctgtccagatcaacattggccacttggatgcgaatggcctgtatgatggtcacttcacaacatttgctctctctgggtttgtccgtg

SEQ ID NO: 55745 - DNA, 266 bp, Zea mays
cccagacccagcagctattgtggtcgtccctcagccgcgtcgcaccgcatcgcattctacgattcgaagctctctctgctcgcagccatggcgaagaattacccaaccgtgagcgccgagtacagcgaggccgtcgagaaggccaggcgcaagctccgcgccctcatcgccgagaagagctgcgcgcccctcatgctccgcctcgcgtggcactccgcggggcagttcgacgtgtcgtcgaggaccggcggtcacttcggtactat

SEQ ID NO: 55746 - DNA, 269 bp, Zea mays
gacgagacgagtcccctccccccacctcgcctcacccaaccggaacgaacaagttacaatctcatcccaaccccgcctcgaccggatctcgtcggactcggatccgcccgaccaccccgcgccgccgcagatcaaagaagatggcagctgtcgacacattcctcttcacctcggagtctgtgaacgagggacaccctgacaagctctgtgaccacgtctcagatgccgttcttgacgcttgccttgctgaggaccctgacagcaaggtt

SEQ ID NO: 55747 - DNA, 264 bp, Zea mays
gacgagacgagtcccctccccccacctcgcctcacccaaccggaacgaacaagttacaatctcatcccaaccccgcctcgaccggatctcgtcggactcggatccgcccgaccaccccgcgccgccgcagatcaaagaagatggcagctgtcgacacattcctcttcacctcggagtctgtgaacgagggacaccctgacaagctctgtgaccaggtctcagatgccgttcttgacgcttgccttgctgaggaccctgacagca

SEQ ID NO: 55748 - DNA, 264 bp, Zea mays
gacgagacgagtccccttcccccacctcgcctcacccaaccggaacgaacaagttacaatctcatcccaaccccgcctcgaccggatctcgtcggactcggatccgcccgaccaccccgcgccgccgcagatcaaagaagatggcagctgtcgacacattcctcttcacctcggagtctgtgaacgagggacaccctgacaagctctgtgaccaggtctcagatgccgttcttgacgcttgccttgctgaggaccctgacagca

SEQ ID NO: 55749 - DNA, 261 bp, Zea mays
cggaccgccgtgttgtggctgccaccgcaaccaccctggacctgctcccggctaagggcgccaagcgcgggttttctgacgaggcgccgacgccatcgcccggagcagcttccgggaagggaaagaaggtagcggaagaggaggacgacaagaaggttgcagcgacgccgcagccggtcgcaaaagctcaggtggtgggatggccaccaatccgaagctaccgcaagaacacgatgtctaccacccagctgaagggcagca

SEQ ID NO: 55750 - DNA, 257 bp, Zea mays
gcactaggcccttattctcaggccatcaaagcaaataatcttgtgtttgtttctggagttcttggcttgaatcccgagaccaggaagtttatctctgcaaatgctccgcagcaaactgagcaggttatgaaaaacatgggcgagatattgaaagctagtggtgctagctattcttcagttgtgaagacaacgatcatgttggctgatctgcaggatttcaataaagtaaacgagatctatggcaaatatttcccggc

SEQ ID NO: 55751 - DNA, 227 bp, Zea mays
cggctcgaggacttaatgtccaagttagtgatgtgaagaatgttatcatctggggtaaccacacgtcctctcagtaccctgatgttaaccatgccacagtgaagacttccactggggagaagcctgttcgtgagcttgtctctgatgacgagtggcttaatggtgaattcatcacaactgtccaacagcgtggtgctgcaatcattaaagcgagaaagttctccagt

SEQ ID NO: 55752 - DNA, 262 bp, Zea mays
tcccgtcgcatcccatcccactaccacccatctcgtcgtccgccgattcgatccggttcttccaacccaggggctgtgatggcgacgaagaggagcgtgggcaccctcggcgaggcggatctgaaggggaagaaggtgttcgtgcgcgccgacctcaacgtccctctcgacgacgcccagaagatcaccgacgacacccgcatccgagcctccgtccccaccatcaagttcctcctcgaaaagggcgccaaggtcatcctcg

SEQ ID NO: 55753 - DNA, 267 bp, Zea mays
aaagaagatcatcttgctctctctcaaatatatccccaagaaagcctgtgaccgccggatcaatgaatttgttaaacgtgctagagctgccaagatccatgcttatataataggtcatctaaagaaggagatgcctacaatgatgggcaaagcaaaagcccaacaacgactcatagacaatctgcctgatgagtttgcaaaggtgcaacgggaataccatcttccgtcgggagattttccttacgtggagcacttcaaagaggtgtt

SEQ ID NO: 55754 - DNA, 264 bp, Zea mays
ctcgcctagccgccggagaagcgccgctcgctcaggaggacagccatggcgccggagccggaggatgatattatgaacgagaagaatccccgcccgctcgacgaggatgacatcgcgctcctcaaaacctatggactggggccgtattcgaccagcattaagaaggtcgagaaggagatcaaggaaatggccaagaaaatcaacgacctctgtgggataaaggagtctgatacagggctggctccacctagccagtgggatttg

SEQ ID NO: 55755 - DNA, 262 bp, Zea mays
gcacgggcgggatgatcgtctcgctcatctgcctcgggtcggggctcaccgtcgcggggcatcacccggacaccaaggtcgcgtgggccgtcgccctgtgcatcgcgtccaccctgtcctacatcgccttcttctccatcggcctcgggcccatcacgggcgtgtacacctcggaaatattcccgctgcaggtgcgcgcgctgggcttcgcggtgggtgtggcgagcaaccgcgtcaccagcgccgtcatctccatgacctt

SEQ ID NO: 55756 - DNA, 257 bp, Zea mays
tcaggcccgtgtacatctacggcccgctcaactacaaccccgtcgaggagtggtttttccaccgcctcaaggccggccgccccatccccatccccggcgccggcccccagatcacgcagctcggccatgtcaaggatctggcaagagccttcaacctggtgctcgggaacccccaggcgagcaagcagatcttcaacatctccggggccaaatatgtcaccttcgacggccttgcgcgggcatgcgcaaaggctgga

SEQ ID NO: 55757 - DNA, 259 bp, Zea mays
  unsure (1)..(259): unsure at all n locations
ctttggtcattgtgtgcaacaagactgacttgcagccacttgaacgggcttctgaggatgacatgaagctagtcatggagatgaaggcagaggctttgaagactataatccaagctggtggtcctaatgatgagggtgttttgttgactatgagcactttaactgatgatggtgtaatggctgtcaaaaatgctgcatgcgagaggcttcttgaacagagggtggatgtaaagatgaagtcanaaaagatgatggattg

SEQ ID NO: 55758 - DNA, 236 bp, Zea mays
ggaagagccagttactattgattttcagccattcaagcctatcaatgtgtcactctacctttgtgacaacaagttccacactgaggctttacttgagctcttggaatctgatgataagtttgggttcattgttatggctggtaatggtactctttttggcacactaagtggcaatacccgtgaagtgcttcactaattcactgttgacctcccaaagaagcatggtataggagggc

SEQ ID NO: 55759 - DNA, 264 bp, Zea mays
agccgcgtcgcgtcgcatcctacgatccaaagctctctctgctcgcagccatggcgaagaactacccgaccgtgagcgccgagtacagcgaggctgtggagaaggccaggcgcaagctccgagccctcatcgccgagaagagctgcgccccgctcatgctccgcctcgcgtggcactccgcggggacgttcgacgtgtcgtcgaggacgcgcggtccattcggcacgatgaagcatcagtcggaattggctcacggcgctaacg

SEQ ID NO: 55760 - DNA, 262 bp, Zea mays
cattattgccgtctcccttttgcgtgacaaagaaagagagcgagaagcagtcgccatgtctggcatcatccacaagatcgaggagaagctccacatggggggcgaccacaagaataaggaggaggagcaccacaagaaggccgaggagcaccacaagaaggaggagggggagcaccacaagaaggacggcggggagcacaaggaaggcatcgtggagaagatcaaggacaagatcaccggcgagcacggcgacaagtccggc

SEQ ID NO: 55761 - DNA, 259 bp, Zea mays
cggaagtttcagatcctcgcatcgtccgcaccttatcctctcgactttacagtacctgctctcagctcctccctatctcaatggcatccgcgaatgccatctccaccgcctccctcctccggcccctctctcagggcagggcgacgaggtcacagcggttcgtggtgcgtgcgaacgccaaagacattgcctttgaccagaaatccagggcagcgctgcaggccggcgtcgagaagctggcaaacgccgtcggtgtcac

SEQ ID NO: 55762 - DNA, 266 bp, Zea mays
tgacgagattattcgattggagtttagtcattatgatgtcaagtcgtctaaaactataccagcaaaggattttgcattgtccatggttgcttctgctgacatctaccatatcaacaagctgcttgatagagctgatggtttggtcaaggagccagatctgaaggacatacgcatcacctttgaggtatgacttgcgttcttgatatcaaaattatttttgcactcagtttatctcttattattttcatgaatgtgtatttgcaacc

SEQ ID NO: 55763 - DNA, 263 bp, Zea mays
cttgctctaaaacaatcgcagtcctgcaagttgttgctgctgctcctacccctgcctctgcaattgggtttgagggatatgagaagcgcctcgagatcagcttctatgaggcacctgtcttcgctgaccccaacgaaggggattgtgtgcactcttgcgtccctagatttactctatttctgaccatgcacggtgcaccgttgtctctgagctatcaaacgaggactttgactcttatgtcttatctgagtcaagcctgtttg

SEQ ID NO: 55764 - DNA, 249 bp, Zea mays
agaggttgaacaacttcagagtggcaggtttgcagatgtcgaagaattggtatatctgaaatggataaatgcctgcctacggtatgagctgagaaacaaggatgccccatcagggaagactgttgcacgagatcttagcaagaccctgagccccaagtctgaattgaaggccaaacagctgataatggaatatgccaatgtgggtgcggaggacagtcacttggggcatgtcgaattcggttcagagtg

SEQ ID NO: 55765 - DNA, 263 bp, Zea mays
gaagccgccgcaccagcaatcacagcagcccggagaacgccctggtccaacaagatgcagatcttcgtgaagacgctgacagggaagaccatcaccctcgaggtcgagagcagcgacaccatcgacaatgtcaaggccaagatccaggacaaggaagggatcccgccggaccagcagcggctgatctttgccgggaagcagctggaggatggccgcacccttgcggactataacatccaaaaggagtctacgctccacctcgt

SEQ ID NO: 55766 - DNA, 256 bp, Zea mays
aagtacgagaacgaggacctcatcaaatacggcttccccgaggacatctggttccatgtagataagatgtcctctgcacatgtgtatgtgagattgaataaaggtcaatcaatggatgacatgagtgagggttgctggaagactgtgcgcacttgtcaaagctaattccattcaaggtaataaagtcaataacattgatgtagtttatactccatggtacaatttgaagaagaccccttcaatggatgtaggccaa

SEQ ID NO: 55767 - DNA, 259 bp, Zea mays
atttttcagatcctcactcgccgccgccgccgctcgtccctcgccccatcgcgatggcccggatcaaggtgcacgagctgcgggggaagagcaaggcggatctgcaagcgcagcttaaggagtttaagtcggagctctccctgctacgcgtagccaaggtcaccggcggggctcccaacaagctctccaagatcaaggttgtgcgcacctccatcgcgcgcgtgctgaccgtcatctcgcagaagcagaagtcggcgct

SEQ ID NO: 55768 - DNA, 183 bp, Zea mays
agcgccagcaagcgcagcagaccaatctccaacctcacgggcgttcagggcgccgtcaatgtgcagggcgaggaccagaagccgctcgatgtcgtctccaacgaggtgttctccaactgcctcaagtcgagcgggcgcaccggcgtgatacgctcggcggcggaggacgtgcccgtagcggtg

SEQ ID NO: 55769 - DNA, 222 bp, Zea mays
tcaagtgtacgcgaactcggcattcagctcgacgttaatgttgatgctcttgctaaggcattggctggtcaaaggatgaggcttacttcgcagcaaatgctgcagctcaggcctcgaggaatcctcaccccgtgtgaccaatgaagaagtccagaaggctgctgctgctactacaagggctctgaccaccgccgtgcgaccaacgttcatgctacattggat

SEQ ID NO: 55770 - DNA, 185 bp, Zea mays
atcaagtcgtcaactcgggctaatgacagcgctacatggcactcatggatctccaggacgggaacgagaggcttttctacaagttgccattgacaacgtcgaggagttacttccaatcgtgtacactccaaccgttggcgaggcctgccaaaagtatggatccatatttagtcgccctcagggtc

SEQ ID NO: 55771 - DNA, 209 bp, Zea mays
tctgcagcgtagtcgctcggcattcggctcagctatggaaagctgggtcatagctataatgccttggatgtcatctgctacctctctatagctcatctatgccgataacccagtgactctggcaaggtccacagcactgttcgacaacgatggctgtcaggtgatgattttataacatcacgtatgaaggaagtagcgcgagacgctcg

SEQ ID NO: 55772 - DNA, 187 bp, Zea mays
gaaaatgctatttttaccattcctccagagctggcttatggagcatctggtctcactaccaactaatcccacccaatgcaaccctgcatttgatgttgaactgatttcatggaccagtgtcaaagacatttgcaaagatggcggcatattcaagaagatccttaaagagggagagcaactgggagaa

SEQ ID NO: 55773 - DNA, 255 bp, Zea mays
cagcatacacagcgatacgtacagactacgagacacttacgagactacgaaatcgacacgacactaccagaacatacgtactactatcgtaccccaacgacgcaaagcgatatcaccgccggcgctgagctgttggtttatcaagacctcctatctggcgacgagctcctgtcggattcattcacctacaaggagctcgagaacggcgtcctgtgggaggtcgagggcaagtgggtcacccaaggtcctgttgat

SEQ ID NO: 55774 - DNA, 182 bp, Zea mays
agtgatatgcaattcagtcgagatgtttggcctgcagtctgtgctgctatggactatatggatcagtttgaccgtgatggtgatggtctcattgagaatgatggatttcctgatcaaacctatgatgcttggactgttcatggaatcagtgcttactgtggttgtacttggacttgctgcac

SEQ ID NO: 55775 - DNA, 186 bp, Zea mays
ctagatgggcgcgagaatccccaagcaaacaaacagggtagaggtcgagggcgaggagaggagaggcgaggagaggagaggttgggtctgggacaccatggctaccgatgaagctgtacggggcggtgatgtacgtggaagtgacgaggtgcgcaacggcgtaggaggaggctggctccgactacg

SEQ ID NO: 55776 - DNA, 187 bp, Zea mays
aagacttaccacaagacatatgcctagacttcaaccagagaatattgtcacgaatgctaagatattcgagcatgtgaatgcaatgccaactaaaaacggatgcacaccatcacagctagcattggcatgggttcacatcagggaaacgatgtttgccccatacctggaacaacaaaaatcgagaact

SEQ ID NO: 55777 - DNA, 184 bp, Zea mays
gctgaaaccagagcagtacattctgaaggttggtgaaggacaggctgcccagtgccatcgcggattacacagctatggatatcccaccaccccgatgccctactctggatacttgggtgcatgttttcatgggagtctaccacaccgtcttcgactatggcaaactgagggttggcttcgcgag

SEQ ID NO: 55778 - DNA, 186 bp, Zea mays
acgagactcggtttacaaaactgtcccaaactgtgagccataccggcctctccaaaggccacctatcgaaggtttctatactagctggtgattacacaaagcagaaatacctggcttctatggacggtgcagtcttataccgggaagactttgcgcccagtccatagtgcaggattatagcaggct

SEQ ID NO: 55779 - DNA, 165 bp, Zea mays
atcggcggtggcatgtgggcgtggcgggatgctgatccggagtgctgaccaagcgagctgatcacgcgccgcagtgtagacgccggcaagtcaagtacttcagtcgtcgtcgagctgttcgtgatcgagttcatcctgtttcatacgggagatcggaggtggcag

SEQ ID NO: 55780 - DNA, 183 bp, Zea mays
tgcgacaatggcactggaatggtcaaggctggttttgctggcgatgatgcaccaagggtggtattaccctagcattgttggcgtccacgccacactggtgtcatggtagggatgggacagaaggacgcatatgttggcgatgaggcacagtccaagagaggtattcttacgatcaagtacccg

SEQ ID NO: 55781 - DNA, 177 bp, Zea mays
acatgtgcaggagttccttaattatgctaaattcgtgttgtggtggatttcattaggtgtggcttcatcaattggactggctctgggttgcatacatttgtgctgtatctaggtactcatattgctctgttcactattaaagctgttcagtgtggccgaattgatttgaaaatggct

SEQ ID NO: 55782 - DNA, 190 bp, Zea mays
ttctcctccagttcataggcacagcagcagaaagcgccaggtgcttccgaacatggcgaacaggggcttgcatctggctactgttcctcgtccttctcgggctgatcgtccaatttggcagccgggcagatcctgttgccgggcttcacctgggagtcgtggaagcagaacgggggctggtcacacttcc

SEQ ID NO: 55783 - DNA, 177 bp, Zea mays
agctgaaaccagagcagtacattctgaaggttggtgaaggccaggctacccagtgcatcagcggattacacagctcatggatatcccaccaccccgtgaccctctctggatcttgggtgatgttttcatgggcgtctaccacaccgtcttcgactatggcaagctgagggttggctt

SEQ ID NO: 55784 - DNA, 178 bp, Zea mays
aggaagattgaattggccatcagcgtatgaggattatcctgtggagcttccgtttggtaccttacttacagtagggggtacctcaacttcatgttgactggatgtacctctgctcttcgttttggtattgtacttggccttgcactgttgactctgggtatctcaagtttgagctcac

SEQ ID NO: 55785 - DNA, 272 bp, Zea mays
cgcatttatttgtcactgatcgttgatcagcctagctagctagcgctgttttcctgtgtgcgagtggcgcccgttcaatgtgcgcgttcgcagagggtgttccacttcggcaagggcaagagcgagggcaacaagaccatgaaggaactgctgggcggcaagggcgcgaacctggcggagatggcgagcatcgggctgtcggtgccgccagggttcacggtgtcgacggatgcgtgccagcagtaccaggacgccgggtgcgccctccccgc

SEQ ID NO: 55786 - DNA, 273 bp, Zea mays
gcccatcaaggaggagttcccaatcctctcttacgccgatttctaccagctcgcgggagctgtggccgtggaggtcaccggtggtcctgagattcccttccaccccggtagggaggacaagcctcagcccccacctgagggccgccttcctgatgccactaagggttctgaccacctgaggcaagtttttggcaagcagatgggcttgagcgatcaggacattgttgccctctctggtggccacaccttgggaatgtgcacaaagagcggtct

SEQ ID NO: 55787 - DNA, 278 bp, Zea mays
ccgccatgaacttcatgcaccgcgacgaggaggtggactactacccgtccaggcacgcggtcgtgcggcaggcggcgccgcccacgccactgccgcccaggccggtcgcggggaggagggagaaggcaaccatacgcaagcccaacgacttcaagcagccaggggagaggtaccgctcctgggacgaccgaccgacaggaccgattcgtgacgcgattcgccgactcgctcggacacccaaaggtcagccaggagctcaggtccatctggatagacct

SEQ ID NO: 55788 - DNA, 278 bp, Zea mays
cacaggtatcttgcggaatttaagactggtcctgagaggaaggaatctgctgagagcacgatgatggcctacaaggctgctcaggacattgcgctggctgagctggcacctacccatccgataaggcttgggcttgctcttaacttctcagtgttctattatgagattctgaactccccagacaaagcttgcaaccttgcaaagcaggcgtttgatgaagctatctcccagttagacacccttggggaggagtcatacaaagatagcactctgatcat

SEQ ID NO: 55789 - DNA, 275 bp, Zea mays
attttcaggatattgcagaagagggatgtagtctttggagttgatcgtagtgcaaaggtttcctttgctgattcctaccctcaagttgatgacgaaataatggcacaggtcagaacagtatttcttgatggccttcctccctcatgggatgaagaccgtgttaagaaatatctcaaaaagtatggagctattgagaaacttgaacttgctcgaaacatgccagctgccaagagaaaggattttgggtttgttacatttgatacgcatgataatgc

SEQ ID NO: 55790 - DNA, 275 bp, Zea mays
gttcccactagcaaccgtccccacaatcctccgacgatgcctgccgcaccgacgctgttgcccccctgcgacgcggaggagccgctgctggcggagtcctccgaccgcttctccatgttcccgatccgtttcccgcagatctgggagttctacaagaaggcggtggcctccttctggacggcggaggaggttgacctctctgccgacgcccggcactgggacgaggcgctgtcccccgacgagcggcacttcatctcccacgtgctcgccttctt

SEQ ID NO: 55791 - DNA, 275 bp, Zea mays
acattttggatcaagcccttttgaggcctggccgcatagacaggaagattgagtttccaaatcctaacgaggactcacgtttcgatattctgaagatccattcaaggaaaatgaacttgatgcgtggtatcgatctgaaaaagatcgcagaaaagatgaatggggcctcaggagctgagctcaaggccgtctgtacagaggctggaatgtttgctctccgtgagagaagggtgcacgttacacaggaggacttcgagatggcagtggccaaggtg

SEQ ID NO: 55792 - DNA, 267 bp, Zea mays
gcgtccgtgacggcaccgacgtcgtgctctggaagtggtgcgagggcgacaaccagcgctggaagatccagccctactactgaaccaacggatgatatgaccatcgcgcccatcgatcgtgcacatgcatgcatacgtactagcagaataacaggggtcttatctcccgaggcgtcttttgcatgcatgtcagctattgcatagataaagcaggagcgagacaaagggtgttcatgtatattgcagctgtatcactgtatgtatgtg

SEQ ID NO: 55793 - DNA, 269 bp, Zea mays
taaagctatgtgcttccttatggacccaaacctaggaaggaatgtctgttctgtccaatttcctcagaggtttgaaggtattgataggaatgaccgatatgcaaacaggaacactgtgtttttcgatattaacttgagaggtcttgacggcattcaagggccagtttatgtgggaactggttgtgtgtttaacagaacggccttatatggttatgagcctccagtcaagaaaaaaaagccaggcttcttctcttcgctttgtgggggaa

SEQ ID NO: 55794 - DNA, 272 bp, Zea mays
ctcgacctcatcgtcgacgacggcggcgacgccacgctgctcatccacgagggtgtcaaggccgaggaggagtacgagaagaccggcaagatccccgacccggagtccaccgacaacgctgagttcaagatcgtgctcaccatcatccgcgacgggctcaaggctgaccccaagaagtaccgcaagatgaaggagaggcttgtcggcgtctctgaggagaccaccacgggtgtcaagaggctctaccagatgcaggagaccggcgccctcct

SEQ ID NO: 55795 - DNA, 269 bp, Zea mays
atgatatgcaattcggtcgagatgtttggcctgcagtctgtgctgctatggactatatggatcagtttgaccgtgatggtgatggtctcattgagaatgatggatttcctgatcaaacctatgatgcttggactgttcatggaatcagtgcttactgtggttgtctttggcttgctgcacttcaagctgcagctacaatggctcatcgccttggggatcggcactttgctgagaagtacaagctcaagtttataaaagccaaagcagta

SEQ ID NO: 55796 - DNA, 274 bp, Zea mays
tgcagctggtgagcctctcgtcgatgattggagctgtctcaagtccacggttcgtacttttgaggcgcaatgtgggtcgttggcgcagtatgggatgaagcacatgcggtccttcgcaaacatctgcaacgctggcatccttcctgaagcagtgtcgaaggtcgctgctcaggcttgcaccagcattccttccaacccctggagttctatccacaagggttttagcgcctaagaatcgtaaggtgaggcgaaatatttcagccgctccaccgca

SEQ ID NO: 55797 - DNA, 274 bp, Zea mays
tatcgccgttgctgctgccgcgtccacagaatggggggtttcgtgaagactcataagaccaatgcgtatttcaaacgtttccaagtgaaattcaagagaaagcgggctggcaagacagactacagggccaggataaggctgattaaccaagacaaaaacaagtacaacacacccaaatacagatttgtcgtgcgatttaccaacaaggacatcactgcccaaatcatatctgctagtatagcgggtgatatggttcttgcttctgcctactcgc

SEQ ID NO: 55798 - DNA, 272 bp, Zea mays
  unsure (1)..(272): unsure at all n locations
ctcgagccgcgccgccgtacctcctcctcccgcgcagagccaccgccaccgccggaaatgactancatcctggccacggagacgatggacatccccgagggggtcacggtcacggtggcggccaagctggtgacggtggaggggccgcgcggtaagctcacccgcaacttcaagcacctcaacctcgacttccagctgcaggacggcggtcgcaagctcaaggtcgacgcctggtttggcacccgccgaaccatggccgccatccgcaccgc

SEQ ID NO: 55799 - DNA, 270 bp, Zea mays
cgcgaggcaaaagcgcaaacgcgaccacagacagagcgcgcttcaaggccttttttttttgagataagaaggaggagaggaggagatggcggtcacgatcacctgggtgaaggcgaggcagatcttcgacagccgcggcaaccccaccgtcgaggtggacgtgggcctcagcgacggcagctacgcgaggggggccgtacccagcggcgcatccactggaatatatgaggccttggagacgacggatggaggatctgattatcttggcaa

SEQ ID NO: 55800 - DNA, 266 bp, Zea mays
gaggaggtgagccaccggaagcggagacgtgagttgtcgaccaaccccgtcgatccggctgcggcgcggcgtgctagatcgctaccgaccatggtggtggaggagatcgccgagggggtgaagaacctcaccgttaccggagatgcggcggcttcaggcggagaggggcagaggaggggcggcggcggcagcagcaaccgcatccaggtgtccaacaccaagaagcccctcttcttctacgtcaacctcgccaagaggtatatgca

SEQ ID NO: 55801 - DNA, 268 bp, Zea mays
gaaacatagagagagcggttctacgtccgagtcgtcgcatcaggtcccctcgattcgccggcggcgccaccaaccaagctcatacatctgaattgactagtcaaactcagtgatctctttggggactaatcaaactcaagaactaagtttcatgtctgatctcgacgtccagcttccatctgcttttgatccgtttgcagaggcaaatgctgaggactccagtgctggtgctggatcaaaggactatgtgcacgtgcgtattcagcag

SEQ ID NO: 55802 - DNA, 271 bp, Zea mays
acggcggttcgacacggaccaggacgggcgcatcagccgcgacgagctgcggcgcgccctgcgtgccatccgctcccggttcacggggtggaggagcaggcagggcatcagttacgccgacgctgacggcgacggctacatcgacgacagcgaggtcgatggcctcatcgagttcgcgcagaagaacctcggcctcaagatcgtcgcctactgatctcacatggggcgcggcgccggcggtcggggggtgggacgcatagctcgccatgag

SEQ ID NO: 55803 - DNA, 269 bp, Zea mays
ctcgagccgcgccgccgtacctcctcctcccgcgcacagccaccgccaccgccggaaatgactaccatcctggccacggagacgatggacatccccgagggggtcacggtcacggtggcggccaagctggtgacggtggaggggccgcgcggtaagctcacccgcaacttcaagcacctcaacctcgacttccagctgcaggacggcggtcgcaagctcaaggtcgacgcctggtttggcacccgccgaaccatggccgccatccgcac

SEQ ID NO: 55804 - DNA, 265 bp, Zea mays
atgcgatgcaatcgatgaccctcaagaaaatggtcgaggacgctgcgccacaaaggcataccgctccccaacgtcacctcccacatcctcgacaaggtcatcgagtattgcaacaagcacgccgagccgaccgggccgggcgacgcggccggcaccaccaacaggtccgccgaggatgagctcaacatcttcgacgcagacttcgtcaatgtagagcactccaccctcttggacctcatcctggctgcaaactacctggacatca

SEQ ID NO: 55805 - DNA, 268 bp, Zea mays
agaggaagttcttcctcacatggtactcaaacaaactgatcaagcacggtgataagatcttggacgaagcaaacaaggtcttcctgggatgcaaggtgcagctggcaatcaaagtctctggcatacactggtggtacaacgttccaaaccatgcagctgagctcactgccggatactacaacttagatgacagagatggctacagaaccatagcacacatgctcacaaggcatcgtgctagcatgaacttcacttgtgctgagatgag

SEQ ID NO: 55806 - DNA, 266 bp, Zea mays
gctcgccaccgccatggacccgtacaagcatcgcccgtcgagcgccttcaacgccccgtactggaccaccaactccggcgcccccgtgtggaacaacgacagctccctcaccgtcggcgcacgaggtcccatcctgctggaggactaccacctggtggagaagctagccaacttcgaccgcgagcgcatcccggagcgcgtggtgcacgcgcgtggcgccagcgccaagggcttcttcgaggtgacccacgacatcacccacctga

SEQ ID NO: 55807 - DNA, 260 bp, Zea mays
ctcgagccgcgccgccgtacctcctcctcccgcgcacagccaccgccaccgccggaaatgactaccatcctggccacggagacgatggacatccccgagggggtcacggtcacggtggcggccaagctggtgacggtggaggggccgcgcggtaagctcacccgcaacttcaagcacctcaacctcgacttccagctgcaggacggcggtcgcaagctcaaggtcgacgcctggtttggcacccgccgaaccatggccgc

SEQ ID NO: 55808 - DNA, 264 bp, Zea mays
cctcggttcgcctcgtcgtcgtcatgggcaaggcctccaaggacaagagggacatctactaccggaaggccaaagaggaaggctggagagctcgcagcgccttcaagctcctccagatagaccaggagttcaacatcttccatggagtgaagcatgtggttgacctgtgtgctgctcccggaagttggagccaggttttgagccggaacctgtatgtaccagcaaaacagtcttctgattgcaaggaaggtgatcttcctctca

SEQ ID NO: 55809 - DNA, 262 bp, Zea mays
gtcacagtgctatgaggatgctaagctgatgaagctgtttcctgaaatcataagaacactgtatgaccaagatgtcctagctgaagatactgtcctgctttggttccgtaaaggttcaaaccagaagggcaggcaatctttcgtgaaagctctggagccgtttgtcaaatggctcgaggaggctgaggaggaagaataagtttttgatttggagaacggccgaatgctggcctaagtgttactttatatttctgaagttaga

SEQ ID NO: 55810 - DNA, 270 bp, Zea mays
cgcttgcccaatcagagcaatgaagttctccgtctctcctgttgtgcgtgttgctgttcagtgcaaggttgcctctgaccttcccaagctagtcgaaggtttgaagcgtctagcaaagtccgatcctatggttctctgtacaatggaagaatctggtgagcatatcattgctggagctggtgagcttcatcttgagatttgcctgaaggatctgcaggaggacttcatgggtggtgctgaaattattgtttccccacccgtcgtctcctt

SEQ ID NO: 55811 - DNA, 270 bp, Zea mays
ctaatctagaagctcccctctccctccctccctctctctctctctcttcgccgtccgaagctccgcacccaatctaatcgacacctcaccgagatgggccgcaagttcttcgtcggtggcaactggaaatgcaatggaaccacagatcaggtcgagaagattgtcaaaaccctgaatgaaggacaggttcccccttcagatgttgtcgaggtcgttgtcagccctccttatgtcttccttcctgtggtcaagagccagctgcgccaagag

SEQ ID NO: 55812 - DNA, 268 bp, Zea mays
tagagagactgcaaaggacttggcccttgagcttgtcgaaaatgggctggcaaagtatgttgagtggagtgccaatatgcttgatgttgaagtaaaaataaagctgaagaatgcagaacttcaggctaaaaaggatcaattgagaatctggacagggtttaagccaccagcgacaaactcgaagcccattcatgaccagaaatttaatggaaaagtggtagaggttgtaagtggggattgcattattgtggctgatgattctgctcca

SEQ ID NO: 55813 - DNA, 262 bp, Zea mays
agcgacgccacaaccacacgttcacggtagcgagagcttatcgtcgtcggcggtgaagatggtgtcgctgaagctgcagaagcggctcgccgctagcgtcctcaagtgtgggaaaggcaaagtctggcttgaccccaatgaagtcagcgagatctccatggctaactcccgccagaacatccggaagttggttaaggatgggtttatcatcaggaagcctcagaaggttcactctaggtcccgtgcaagaagggcacatgag

SEQ ID NO: 55814 - DNA, 259 bp, Zea mays
agagaatccccaagcaaacaaacagggtagagggagaggagaggagaggagaggagaggttgggtctgggacaccatggctccgatgaagctgtacggggcggtgatgtcgtggaacgtgacgaggtgcgcaacggcgctggaggaggctggctccgactacgagatcgtgcccatcaacttcgccaccgccgagcacaagagccccgagcacctcgtccgcaacccgtttggtcaggttccagctctgcaggatggtg

SEQ ID NO: 55815 - DNA, 257 bp, Zea mays
cggcacacacaccacaccacacctcctcgcttccactccgctcgtctgacatctcgtcccgtcctttcgtttcgaagcctcgcgagccccgacgatggccaccgccgcggtgtcggtcgacgagaagctcgacaagcttcgcgccgaggtcgccaagctcgaccagatcagcgagaacgagaagtccgggttcatcagcctcgtgtcacgctacctcagtggggaagcggacagatcgagtggagcaagatccagac

SEQ ID NO: 55816 - DNA, 266 bp, Zea mays
cttctcctcctcgcctcctctccctagcctccacgacgcaagggagagtgacggaaagcgacgcggcgcgagcgaggagggccaaggggaagaggggaagcaccgcaccaggacccttgttcgccgcagtcgcctctgatctccgcgaggttgtcaggattcaatatgtcgaccagcacattcgctacttcctgcacgctgttgggcaatgttagaacaacgcaggcctcccagacagcggtgaagagcccttcgtctctaagctt

SEQ ID NO: 55817 - DNA, 264 bp, Zea mays
gcagacaccctcttcccctctccactcccaatcttatcgtcgcctccctcgacgtcgctgctgcctccacttcaccatggcgcttcacgccccggtcctcgttctgaaggactcgctgaagcgggagtctggcgcgaaggttcaccaagccaacatccaggcggccaaggctgtcgctgacatcatacgcactacattgggtcccagatccatgctgaaaatgcttctggatgctagtggaggtattgtggttactaatgatgg

SEQ ID NO: 55818 - DNA, 260 bp, Zea mays
atagcaaaaatgatgaagtcccatgctaagagcgatgctctacttgaagtagaatatagggaggaagtgggcactggtttaggtcctacaatggaattctatacattgataagtcatgaatttcagaagtctggtctaggcatgtggagaggggaacttccttgtaaatctggtacccatgatactcatgtttctagatttgtggttgcctctaatggacttttccctagaccgtggtctgcttctgaagatcctgcttc

SEQ ID NO: 55819 - DNA, 255 bp, Zea mays
atctttactggtctatgacattaccagacgccagatcttcgatcatatatcccgctggctagatgaactacgaacccatgccgacaagaacattgtgataatgctggttggcaacaagagtgatctcgaggagcagcgagcggtgagcactgaagatgccaaggagtttgccgagaaggagaacctcttcttcctggagacctctgcgctccaggcaacaaacgtagagagtgcttttcaaactgtcttgacaga

SEQ ID NO: 55820 - DNA, 260 bp, Zea mays
  unsure (1)..(260): unsure at all n locations
caggttttcctccatagttgaagtcccatgggagggcgccacgacaatgtcagctctgttcgagatttgtatcanaaagtactctcgacggaggtgtcttggcacgaggaagctaattaagagggaatttatggaatcttctgatggtaggaagtttgagaaactgcaccttggtgaatatgaatgggatacctacactgaggcatttaatcgtgcatgtaatttttcttctggacttatcaagatgggccacgacctag

SEQ ID NO: 55821 - DNA, 273 bp, Zea mays
agcgacgccgccgccgcaagccgtccgccttgcccctcgaaggcttggtcctcctccttgtatcccgacctcccccgcgacagacccgtttccccgctaggctagagttatcgttcctctgcagcgatggcgatcaagcggaccaaggcggagagaagatcgcgtacgacaagaagctgtgcagcctgctcgatgagtacaccaaggtggtcatggccctcgcggacaacgtcggctccaagcagctccaagacatcggccggggcctcaggg

SEQ ID NO: 55822 - DNA, 268 bp, Zea mays
agctgacggaataaaagttgtaactgataaaggagaagagctcattgcagatgttgtcctatttgcgacagggcgcacaccaaactcccagagactgaacttgcaagctgcaggcgttgagattgaccgggttggagccatcaaggttgacgaatattctcgtacttctgctcccagtgtatggggtgtgggtgatgtaacaaaccggataaatttaacacctgttgcattgagggagccacttgctttgctaaactgtgtttggtgg

SEQ ID NO: 55823 - DNA, 230 bp, Zea mays
aagaaacaagagaatggtgtttgtgggcgactcagtcaacaggaaccaatgggtctctctcgtgtgcatggtggaggcctcaatacctgacgacaggctcaagatacgcaccttcaatggctcactcatctccttcaaggcattggaatacacgcaacgatagatttctactggtcacaactactggtggagtctaacagggacaaccccattatccaccgggtggagta

SEQ ID NO: 55824 - DNA, 250 bp, Zea mays
ccaaattctgccgtctccaccgccgccgcagccagcgtcaccggagggatctgccgactcccttgctccacgcgatgaacaccgacatcaccgcctcgactaagccggagtacccggtggtggatcggaacccggccttcaccaaggtggtcggcaacttctctgcgctcgactacatgcgcctctccaccatctccgccgtctccgtaaccgttggctacctctccgggatcaagccggggatccgggg

SEQ ID NO: 55825 - DNA, 250 bp, Zea mays
gtgcgggatatccagaaactttgttgtttccaggaccccgactcaagttgcaagccatgctcaaaagtactttgttagacagacaaactcatcgagacggaagaggcggtcaagcttatttgatatggtcccagaaatgccaatggatgagtccccagctgctgtggaacattttactctccaaaatactcaagatgaggatacaagttcaattcacgtgccaaccttacatcttggacaacggaaggaa

SEQ ID NO: 55826 - DNA, 174 bp, Zea mays
gtcgtagcggctcgtccagctcgctcgccaccgccatggacccgtacaagcaccgcccgtcgagcgccttcaacgccccgtactggaccaccaactccggcgcccccgtgtggaacaacgacagctccctcaccgtaggcgcacgaggtccatcctgctggaggactaaccact

SEQ ID NO: 55827 - DNA, 215 bp, Zea mays
ctgcgcctcccgtcctcctcttccatccgtcccgcgcggcaacgtgccggcgtcgggtctgtccgctgcatggctcggcgaccggattcctcctattccccgctgcgttcggggcagggcggtgaccgtgcaccgactgaactggcgccgctgttccctggttgcgattacgagcactggctcatcgtcatggacaaaaccggggggcgagggcg

SEQ ID NO: 55828 - DNA, 256 bp, Zea mays
cttccgcaagcatatgcctagacttcaaccagagaatattgtcaagaatgctaagatattcgagcatgtgaatgcaatggcagctaaaaaaggatgcacaccatcacagctagcattggcatgggttcaccatcagggaaacgatgtttgcccctacctggaacaacaaaaatcgagaacttcaaccagaacgtgggggcgctttcctgtgagttgacaccagatgagatggccgaactcgagtcctgtgctgctg

SEQ ID NO: 55829 - DNA, 249 bp, Zea mays
atggaccacctcgccgccgagacgtcggccgcgcgcttcgatgtcgaggcgatgaaggtagcatgggctgcctcgcgacacgccgtcgaagactgcgaccgcatggcccgactcgtcgcgtccgaccctgtcttccgcaaggataaacagaacatgctctccaggaaggacttgtttaaggacactctaagaaaggcagcccatgcatggaagcgtattgtggaataagtctcacagaggaggaagcag

SEQ ID NO: 55830 - DNA, 191 bp, Zea mays
atgagctgggcctgccctgcatcgagatggccggcgtcgcccacaagatcgacttccgcgagggccccgcgctccccgtcctcgacgacctcatcgcggaggagaagaaccacgggtcgttcgacttcgtcttcgtggacgccgacaaggacaactacctcaactaccacgagcggctgctgaagctggtg

SEQ ID NO: 55831 - DNA, 249 bp, Zea mays
cgctttgcctcaattctgccaaagcgatcggctgcactgtactcaacatcggcacacaagacctcgccgaagggaggcctcatctggacctgggcttaatatctcaaataatcaagatacaactgttggcaaatgttattctgaaaagcacacctcaattagttgaattggttgaggacagtaaggagatgggaggagcttatgagtttatcccctgaaaagattctactaaggtggatgaactttcaa

SEQ ID NO: 55832 - DNA, 214 bp, Zea mays
gtcgtcgtctgctccgggctgctgttctgcgcctccacaaggctttggcctctgttgtaagatttaagcttaacctccaaccatgggcaaggagaagtcccacatcaacattgtggttattggccatgtcgactctggcaagtcaaccacaccggccacctgatctacaagcttggaggcattgacaagcgtgtgattgagcagttcgagaagg

SEQ ID NO: 55833 - DNA, 187 bp, Zea mays
atgcgatccggcaaggagctggagaaggagcccaaatttctcaagaacggtgatgctggtatggtgaagatggttcccactaagcccatggtggtggagaccttttctcagtatcctcctcttggtcgatttgctgtccgtgacatgaggcaaacggtggctgtcggagtcatcaagagtgtggaga

SEQ ID NO: 55834 - DNA, 218 bp, Zea mays
ctatgatagaagaggaagtgtgtccaagcagcgaaaccttaactgctgttgtttctgtattcgccaggcacaaatttcttccccatggcaagaagctgcactcctttgctattaggagtgggctcatggacacaatcttggtagcatcattgttgacctctatgcgaaatgcggtgagttagtgtcatcgattcagctgtttgagggattcaatgggg

SEQ ID NO: 55835 - DNA, 242 bp, Zea mays
atcgcgcgtcggcaccgtgagataaagccttaaaactgcaaagaaggattttaccaagactgaggacgacttaaagtctctgcagagtgtggggcaaataattggagaagtactccgacctcttgataatgaacgctttatcgtgaaggccagcagtggtccccgatacgtggtcggttgccgaaataaagtggacaaggagaagttgacatctggtaatcgtgttgtacttgacatgacga

SEQ ID NO: 55836 - DNA, 242 bp, Zea mays
gtcgcgcgtcggcaccgtgagattaagccttaaaactgcaaagaaggattttaccaagactgaggacgacttaaagtctctgcagagtgtggggcaaataattggagaagtactccgacctcttgataatgaacgctttatcgtgaaggccagcagtggtacccgatacgtggtcggttgcccgagtaaagttgacaaggagaagttgacatctggtactcgtgttgtacttgacatgacga

SEQ ID NO: 55837 - DNA, 240 bp, Zea mays
atctttgctggtctatgacattaccagacgccagatattcgatcatataccccgctggctagatgaactacgagcccatgccgacaagaacattgtgataatgctggttggcaacaagagtgatctcgaggagcagcgagcggtgagcactgaagatgccaaggagtttgccgagaaggagaacctcttcttcctggagacctctgcgctccaagcaacaaacgtagagagtgcttttca

SEQ ID NO: 55838 - DNA, 234 bp, Zea mays
gcttctccctcctcctcgctcgctcgatcgctcccacgtcctcgcctccctccacaaacctccaccaccatccaggatcgcagcgcggcgcgcgagagaggggtgagcaggtcgggcaagatgagggagatcctgcacatccagggcggccagtgcggcaaccagatcggcgccaagttctgggaggtgatctgcggcgagcactgcgtcgactcaacgggcggtactcgggga

SEQ ID NO: 55839 - DNA, 245 bp, Zea mays
cgtcgccgtgcgctcgctctctctgtccctcaaggccttcgccggcgaagagcgcctagtcacccaccaggatgaagtttgttgctgcttacctgcttgctgtccttgctgggaactccagcccctctgctgaggacttgacggccattctggagtcagttggctgtgaagttgacaatgaaaagatggagctcctgctgtcccaactgatcggtaaggacataccgagctcattgctgcgggca

SEQ ID NO: 55840 - DNA, 233 bp, Zea mays
ctgctcgagcgcagtgcttgatgccgatgcgcaccaggcgctcgcgcaggaatatggaatcaaggagtttcccactattaaggtgttttcccctggtaaacctccagttgattatacaaggagcaagagatgtaaagccgattgtagagtttgctctgtcacaggtcaagtcccttcttagagataggttgagtggtagggcatcagcagggtcaaatggctagacatctgga

SEQ ID NO: 55841 - DNA, 239 bp, Zea mays
gcattttctacgatcacttcttcgactgggggttcaaggacgaaatcgccgccctggtggcggtgcgcaacgcaatggcatcacgccgacgagcgagctcaccatcctcgagcacgacggtgactcctacgtggcggagattgacggcaaggtcattgtaaagatcggcgtcaggtacgacgtcggccatctcatctcggcgggtttttgaggtcgccggccacgcaaagactacgccg

SEQ ID NO: 55842 - DNA, 207 bp, Zea mays
ccttctcctcggctgacctggtggtgtttgctgagctgttttggaacccaggggtgctgatccaggctgaggaccgcgtgcaccgcattcgacagaccagcttctcccgtgctcactacctcgtggcaacgggcacagctgatgactacctttggcccctgattcaagagaagattaaagttctggcagaagccgggctttctgaga

SEQ ID NO: 55843 - DNA, 238 bp, Zea mays
ctttggaacaaacaagctaaagtatcctgtacatagcatccttgtattcgatcagcacaaaaatgcaattcctgttgcgtggattataacccccaattttgcacatggtgaaatatataaatgggtgggtgctctttatgatcgagcgcatacaaaagatcctacttggcaattgggtggcttcattattgatggtcccttgactgacgttcgcacaataagagtagtattccattgc

SEQ ID NO: 55844 - DNA, 232 bp, Zea mays
ttaacggatagcgctcctcgttggcgccactggcgggtggttctgcctctggtctggtgtgtttgtgtgtggtcacacttgccagccagcagaggcgcctgcttgtacctagattactgtttccattgtcgtcatcatcggctaacattgtcataatgtcagtttgggtaatgttagattaagtaattattgtgttctgtaatcttgtatgttgcccttcttttgtgtggtt

SEQ ID NO: 55845 - DNA, 211 bp, Zea mays
cctctccggacggcaagtccctgacgctctggatggacaacagctcgggcagcgagttcaagtctgcgcgggcgtaccggaacggctacttcgccgcgtccgtcaaggtgcagccggggtaaaccgccggcgtcaacaccgcattctagctgtcgaacagcgaggagtacccggggcaccacgacgagaatctacatcaggctgctgggga

SEQ ID NO: 55846 - DNA, 236 bp, Zea mays
gtcctgctcaggagctttttgagaagcctttcttccagtcggtggccagagctttgcgtccaggtggagttgtatgcacccaggcagagagcatatggctacatatgcacatcattgaagatattttcgtcaattgccgcaagttttcaaaggctcagttaactatgcttggacaacagtacctacataccctagcggagttattgggttcatgctttgctccaccgaagggcctg

SEQ ID NO: 55847 - DNA, 236 bp, Zea mays
ctattgtcgatttacttccaggcactccatacaacatgcaaattgccaattgctgcaaggcaggagttgtaaatacctttaaccaggacccagcaaatgctgcttcctccttccagaccagtgttggtcttgctggaactaccaataaaactgttaaggtgccaaggaacttcactcttaagactccaggccctgggtacacatgtgggcgtgccattgttggcaggcctacaaag

SEQ ID NO: 55848 - DNA, 209 bp, Zea mays
gcgcgtcaggtagcgctgggacgacctcctcgacaagctcatcgacgaccatgcggccaggatggcaacccatcaggacgaggacgacgataaggacttcatatacgtcttgctgtctcttcagaaggagtatggcctcacgagagaccatatcaaggctatcttgatagacatgttcgaggccggaaacgacgactcgtaaatgacgt

SEQ ID NO: 55849 - DNA, 114 bp, Zea mays
ctcaggggtggcatgcagatcttcgtgaagacacttactggcaagacgatcacccttgaggtggagtcctcggacaccatcgacaatgtcaaggctaagatccaggacaaggaa

SEQ ID NO: 55850 - DNA, 268 bp, Zea mays
gccgccgccctaagccacgtgctgaggctttcgttggtctcttcgccggcgacgagcacccagcagttctgtagaaatggctgatggtgaggacatccagcctcttgtctgcgacaatggcactggaatggtcaaggctggttttgctggcgatgatgcaccaagggcggttttccctagcattgttggccgtcctcgccacactggtgtcatggtagggatgggacagaaggacgcatatgttcgcgatgaggcacagtccaagaga

SEQ ID NO: 55851 - DNA, 279 bp, Zea mays
ctccaaggcacgttatgaagagattgtgaaggaagtctcatcctacctcaagaaagttgggtacaaccctgataagattgcctttgttcccatttctggttttgagggcgacaacatgattgagaggtccaccaaccttgactggtacaaaggcccaaccctgcttgaggctcttgaccagatcaccgagcccaagaggccttcagacaagcccctgcgtctgcccctccaggatgtgtacaagattggtggtattggaactgtaccggttggtcgtgt

SEQ ID NO: 55852 - DNA, 278 bp, Zea mays
atttagaagcgcccctcctcctctcccccatccgtacccaatctaatcgacacccggccgagatgggccgcaagttcttcgttggtggcaactggaaatgcaatggaaccgcagatcaggttgagaagattgtcaaaaccctgaatgaaggaaatgttccctcttcagatgttgttgaggttgttgtcagtcctccttatgtgttcctcccggtggtcaagagctagctgcgccaagagttccagttgctgctcagaactgctgggtgagaagggagt

SEQ ID NO: 55853 - DNA, 278 bp, Zea mays
ctggaatagagtgaaggtccggtactgtgatggtggatctttcactggtgatggctctgatgcggctgcaggcctttatttccgaggtcagcgcatttggcaggccgctatggatgacctaatggcccaaggaatgcgttatgctaatcaggcccttctttctggatgctctgccggtggtgtttctaccatacttcactgtgatgaattccatggattgtttccctcgaataccagagtcaaatgcctagctgatgctggaatgtttcttgacactg

SEQ ID NO: 55854 - DNA, 279 bp, Zea mays
acgtgttggggatctggaccgcacaatcaagtactacacggaatgctttgggatgaaactgctgaggaaaagggatgttcctgatgagaagtacaccaatgccttccttggctttgggccagagaacaccaactttgcagttgaattgacatacaactatggcgttgacaagtatgacattggaacgggctttgggcatttcgcaattgctaatgatgatgtgtacaagttagctgagaatatcaaatccaagggtggtaagatcacccgcgaaactgg

SEQ ID NO: 55855 - DNA, 278 bp, Zea mays
aaggaacagagcagacgacgcgaggcgatttctgcgggtttgcttgctccatctgtagaccttaggccgccgccgggcgaccgtgcgcgtgcggtgctcacgccccaccccgctcaggtgaaggcacttcaagatgggcgaggtacacgaagctgacaagaacattgagatctggagggtgaagaagttaatcaaggcacttgatgctgcaaaggggcaatggaactagcatgatttctctcatcatgccacctcgtgatcagatttcacgcgtcact

SEQ ID NO: 55856 - DNA, 279 bp, Zea mays
gttccccactagcaaccgtccccacaatcctccgacgatgcctgccgcaccgacgctgttgcccccctgcgacgcggaggagccgctgctggcggagtcctccgaccgcttctccatgttcccgatccgtttcccgcagatctgggagttctacaagaaggcggtggcctccttctggacggcggaggaggttgacctctctgccgacgcccggcactgggacgaggcgctgtcccccgacgagcggcacttcatctcccacgtgctcgccttcttcgt

SEQ ID NO: 55857 - DNA, 277 bp, Zea mays
caacgtccgcgctttctccggcgacatgcccaccgatcctgccggcacgtcggcgaagcgggggcggtataacgtaacggccgtgcagaagctctccgagtcactgacggcggcggcgtgccatgacctgacgtacccctacgccgtgttctactgctacacgaccaacccggcggccacgtacctggtgaagctggcagcccaggatggcggggcgccggacatggaggcgttggtcgtgtgccacctcgacatcgtcgtgtggagtcccagacac

SEQ ID NO: 55858 - DNA, 282 bp, Zea mays
cgatagggttctcgatactccgatcactgaggcgggcttcactggcattggtgttggtgccgcttaccatggtcttcgacctattgtagagttcatgacatttaacttttcgatgcaggcaattgatcacataattaattcagctgccaagtcgaactacatgtctgctgggcagatatctgttcctattgtctttaggggtccaaatggtgctgctgctggagttggtgcccaacactcacagtgctatgcagcttggtatgcacatgttcccggattgaa

SEQ ID NO: 55859 - DNA, 268 bp, Zea mays
  unsure (1)..(268): unsure at all n locations
aatggagctcttcttttgatcgcagaaaatgaaagttgtccacagccccagacatcagagcatcttgctgctgttgaaatcatgcgtcttactgcatatcatcattctgcagaacaagatcgatcttatccaggaaagcgcaggngtgaatcagcatgaagcaatccaaaaattcatccagggacaaatagctgaaggtgcacctgtggtgcctatatccgcccagctgaaatacaacattgatgttatctgtgaataccttgtgaag

SEQ ID NO: 55860 - DNA, 267 bp, Zea mays
atcaccgtatcctcagatcagaggcgagcagaaaccacaccactctactgacgcccgacgagcagtgtaacattttccttcagccatgggtaaggagaagactcacatcaacattgtggtcattggccatgtcgactctggcaagtcgaccaccactggccacctgatctacaagcttggaggtattgacaagcgagtgattgagaggttcgagaaagaggctgccgagatgaacaagcggtcattcaagtatgcgtgggtgcttga

SEQ ID NO: 55861 - DNA, 275 bp, Zea mays
ctggtgttggacggagggggaggggacgtggatggcggggaggattacgtggagacgcgatactacgatggcctcataggcatcgacaagcagcatcacacgactgggacaggctttatcaaagtggagagatccaatggcagcaccttcagtgtgatgactaacggctacccacctgccagctctgtccgctgcacgagcaatcctgcgacaaatgattggataccatcttctgaatcgatcatccctgcttcgaacaagcccagcaggagcga

SEQ ID NO: 55862 - DNA, 224 bp, Zea mays
atcggcgagataccgaagttgtcgggagacgtccggacctgtgggacgacagcgtacgtcagccagtcggcgtggatacagagcggcaaaattcaggagaacatactgttcggtatggagatggacagagacaagtacgacagggtgctcgagtcgtgcgcgctcaagaaagacttggagaacctgccgtttggcgaccagacagtcatcggcgagcgaggcat

SEQ ID NO: 55863 - DNA, 279 bp, Zea mays
cctcgagccgattcggctcgagtcccatcccactaccacccatctagtcgtccgccgattcacatccggttcttccaacccacgggctgtgatggcgacgaagaggagcgtgggcaccctcggcgaggcggatctgaaggggaagaaggtgttcgtgcgcgccgacctcaacgtccctctcgacgacgcccagaagatcaccgacgacacccgcatccgcgcctccgtccccaccatcaagttcctcctcgagaagggcggcaaggtcatcctcgccag

SEQ ID NO: 55864 - DNA, 272 bp, Zea mays
agtgtgtggaactccaagtggagcgctcttattatgatcatggggatactttaatgattgcagtgaccgctttctcggacacacgcagtctgtggatacaatgctgaagctggatgaagacactttggtttctggatcatcagatggtgtgatcagattagtgggcatcctacctaataggataaaacagccacttgctgaacattcagaataccccattgaggcccttgctttgtcaaacgacaagaatatttaggcagcatctcacatga

SEQ ID NO: 55865 - DNA, 273 bp, Zea mays
aacggatttcactgagcttgcaaaccaggagccgtggctctcatctatgaagttggttgtgaaacctgacatgctctttgggaaacgtgggaagagtgggcttgtggccctcaacctagatcttgcccaagttcgccaatttgtcaaggagcggttgggagttgaggtcgagatgggtggctgcaaagctccaattacaaccttcatagttgaaccatttgtgccacatgaccaagagtactacctttcgattgtatctgaaaggcttggcaa

SEQ ID NO: 55866 - DNA, 267 bp, Zea mays
  unsure (1)..(267): unsure at all n locations
atcagaggaagacaaatcatctgagcctagtcttgaatactggtttaagtgcatcgatcttgatggtaatggtattttaactttcaatgaaatgcaatttttctacgaggagcaattgcaccgaatggagtgcatggcacaagagcctgtgctttttctggacatattatgccagatgattgatatgattggaccagagaatgagagctatttaactctacgggacttaaaacggtgtanactctcaggagacatattcaatattct

SEQ ID NO: 55867 - DNA, 274 bp, Zea mays
  unsure (1)..(274): unsure at all n locations
atcatagtgatcattattattcaaagccagaatcaagaaaggttcaggcggtaaaaaagccatcaaaagactgggtcaaacgtattcagcatgagtggaaagtcttagagaaagatttgccagatactatatttgtgagggcatatgaggatagaatggacctgcttagagctgtaattatgggaccagctggtactccttaccatgacgggctcttcttctttgacatttacttccctcctcagtatccanatgtaccaccgatggtgaatta

SEQ ID NO: 55868 - DNA, 274 bp, Zea mays
tcgcgaactgcaccggaaggagaaggagagaagcgagagtctccccagccagagcaagccgaatccgaagctagcggagaggagagagggctgagtgaggatgccgacggttacctgcaacgcgtgcaacgcggggttcgacgacgaggagcagcagcggcttcactaccgctctgaatggcacctttacaacctcaagcgcaaggtggctggagttcctggtgtcacagaggctctgtttctggctaggcagctgctttggcggaggggagca

SEQ ID NO: 55869 - DNA, 270 bp, Zea mays
agcacacacacgcaaccagatctcccccaaatccagccgtctgcacctccgcttcaagatgcagatctttgtgaaaaccctgactggcaagactatcaccctcgaggtggagtcgtctgacaccattgacaacgttaaggccaagatccaggacaaggagggcatccccccagaccagcagcggctcatcttcgctggcaaacagcttgaggatgggcgcacgcttgccgactacaacatccagaaggagagcaccctccaccttgtgct

SEQ ID NO: 55870 - DNA, 273 bp, Zea mays
acaggtttggtcaaggagaatcactggtgttagtgatgggctagttcaagggactgaagcatttgctcagggtttggctttcggggtttctggtgttttaagaaagccagttgagagtgccagacagtatggtgttataggtattgcacctggcattggccgtgcttttgtgggtttcattgtccaacctttaagtggggctctggattttttttcactgacggttgatggaatcagtgctagttttatgagatgtgttaacattttaagtaa

SEQ ID NO: 55871 - DNA, 272 bp, Zea mays
caactatgcagctgcctactgcactggccttctgttggctcgccgtgtgctcaagacccgtggtttagataaggaatatgagggcaatgttgaggccactggtgaggacttctctgttgagccagctgatgagaggaggcctttccgtgctctcttggatgttggccttattaggactacaactgggaaccgtgtctttggtgccctcaagggagctttggatggtggactggatattcctcacagcgagaagaggtctgctggtttcaaga

SEQ ID NO: 55872 - DNA, 275 bp, Zea mays
gttccttctgccaagcacaacacagaccatcgtctgcccgcccaactgcacccgccgccgtcgcctcccaaaacccaaccaaaccctagattcgccgccctcagctccggtcagaccctccccccttcgaagatgccgaacctcgagtgccggatgtatgagcagcggttcgcggatgttgatgctgctgtgatgatccatgttaagcacatcgctgacatgggcgcgtacgtctctctgctcgagtacaacaacatcgagggcatgattctctt

SEQ ID NO: 55873 - DNA, 270 bp, Zea mays
gcagaagagcagcgcctgagctccagcaataagtgtcgagaagggcgtgaaggtgttggggatgtgggcgagccccatggtgatcagggtggagtgggcgctgcggctgaagggcgtcgagtacgagtacgtcgacgaggacctcgccaacaagagcgccgacctgctccgccacaacccggtgaccaagaaggtgcccgtgctcgtccacgacggcaagccgtcgccgagtcccacatcatcgtggagtacatcgacgaggtctggaag

SEQ ID NO: 55874 - DNA, 270 bp, Zea mays
gccggatgcagggacaaggacctcgcccacatcgaggcgcacatggaggccttcaacaagaagggcggggacgtcaagtggcacatccacgacgaccgatcgctgctcgcattgcagggtcctcttgctgcacctactctgcagttgctgacgaaagaagatttgagcaaaatgtacttcagtgacttcaagatgattgacatcaatggatatgcatgctttctgacgagaactggctacaccggcgaagatggttttgagatctctgtt

SEQ ID NO: 55875 - DNA, 273 bp, Zea mays
aggaagagcactgccagtttgcatgccccctttgctccaagtcggtttgtgacatgtcgaaggcatgggaaaggctcgacatggagctggcaactctgtctgactcctgtgatcacaaaatggtccgcatattatgcaacgactgcggggcaatatcagatgtgcagttccatttgattgcgcacaagtgccagaattgcaagtcatacaacacccgccagatttgaagtaagaatcgcaagtcacacaacaccgtcagatctgaaatagcaa

SEQ ID NO: 55876 - DNA, 261 bp, Zea mays
attatggacatgcggcactccaaatgaccggactttgaatgatggagacatggcactaatggatatgggagctgaataccatttctatggatctgatatcacatgctcataccctataaatgggaaattcaacagaagtcagacaataatatacaatgctgtgcttaaggctcataatgctgttatatcagacatgcggcctggagttaattggatggatatgcacaaattagcagaacgggcaatacttgaatctctcag

SEQ ID NO: 55877 - DNA, 273 bp, Zea mays
atccaactggcaggaaggaacgtgatggccaagacgagctcgttcaagctggagcacccccttgagaagaggcagtctgaggctaatcggatcagagagaagtaccctgacagaattccagtgattgttgagaaggctgagaggagtgacattcctgacatcgacaagaaaaagtacctcgtccctgctgatcttacggttggacaattcgtgtatgttgttaggaagagaatcaagctcagtgctgagacagctatcttcatctttgtgaag

SEQ ID NO: 55878 - DNA, 164 bp, Zea mays
cggctcgagcggctcgagcggttcgaggcggatacggtgatgtcggcaagggttgtgctgctgtccacaagcatgctggtgcccgtgtcattgtgaccgagatcgaccccatctgtgtcgtccaggctctgatggagggtcttcaggtccttcccttggaggac

SEQ ID NO: 55879 - DNA, 202 bp, Zea mays
ctacgggtgtctgattcatgtgaccttaactttgtccagcttcatagtgatgaatctcgtgcattggttcatactctttcaaagaataatcgtatcatttatgtactaaatgctgatgacgatggaaaactaatcaacattcctgatattgaatacgaacttgattggtacttagtggacagtgcaaagggcggaagtggaa

SEQ ID NO: 55880 - DNA, 238 bp, Zea mays
gctgcatcgaccccgcgccacctccgcctgcctcccccggcaccgatcgggtttgatcgatggcgtcgaagaggatcctgaaggagttgaaggacctgcagaaggacccgcccacctcctgcagcgcaggtcctgttggtgaggacatgttccattggcaagcgaccatcatggggccttcggacagcccatttgcaggtggggtattcttggtgaacattcacttcccaccggatta

SEQ ID NO: 55881 - DNA, 267 bp, Zea mays
aggaaggcgaggagaggggaacccggcccagggagagttgtggggaggggatcggcggcggaggagatggaggagcgggagaagctcgtgtgcctggccaagcttgccgagcaggcggagcggtacgacgatatggtggaattcatgaagaatcttgctaggatggacgtggatatgagtgctgaagaaaggcatttgttctcagttggtttcaagaacactattggagcaaagagggcatcatggagaatcatttgttcacatgag

SEQ ID NO: 55882 - DNA, 270 bp, Zea mays
atgcatgatgtcagtgttgcaaagatcaacccacaggcacccttagataaagtctgcctgctcggttgtggtgttcctactggtcttggagcggtgtggaatactgcaaaggttgaatctggctcagttgttgctgtttttggccttggaacagttggacttgcagttgctgagggagcaaaagctgctggtgcttctcgagttattggcattgacatcgacaataaaaagtttgatgttgcatagaactttggagttacagaatttgtt

SEQ ID NO: 55883 - DNA, 269 bp, Zea mays
gaactcgagacctcgcccgcccaaatacgaaagcctcagatctcagtgaccagcgccgccgcttcgttcgtgtcgaggggagaagaggaaatggcggcgagcgagggcgtgctcctggggatgggcaaccccctcctcgacatctccgccgttgtcgatgacgccttcctagcaaagtatgacatcaagctgaacaatgccattctcgctgaggagaagcacttgcctatgtatgatgagttggctagcaacagcaatgttgaatatat

SEQ ID NO: 55884 - DNA, 226 bp, Zea mays
agagtagggcgcagagaatccccaagcaaacaaacagggtagaggtagagggagaggagaggataagagaggagacgagaggttgggtctgggacaccatggctccgatgaagctgtacggggcggtgatgtcgtggaaccttacgaggttcgcaacggcgctggatgaggctggctccgactacgagatcgtgcccatcaacttcggcaccgccgagcacaagag

SEQ ID NO: 55885 - DNA, 270 bp, Zea mays
gaaacaatcaaccagcaacactcttctcgtataacataatacagcgaaggtaactcacatggcaacttccatgggttgtctcgtcttgctctgccttgtttcttctctccttcccagtgccgtccttggccacccatggggtggcttgttcccacagttctatgaccattcgtgccccaaggcgaaggagattgtgcagtccattgtggcacaggctgtggccaaggagaccaggatggcggcatctttggtcagactgcatttccatga

SEQ ID NO: 55886 - DNA, 272 bp, Zea mays
acccgacgcatataaaactagtgcgcgatgctgtctctacagccagagataaagagcgtagaaggcgaaagggtgtgcctattcttgtgcctggcttatgtcttcctaaagcactgcagccttttcttcctatatatcagcagggtttaattagtgggtcggccgagacaaaagaacaggcagctgaaggtctaggagagttaattgacgtaacaagtgagaagactcttaaggaagttgtagtgccaattacaggacctcttattcgcatc

SEQ ID NO: 55887 - DNA, 159 bp, Zea mays
aaaatgatatctggaaaaccattgtatgttgcatttgcacagcgcaaagaagatagacaagcgatgttgcaggcacagttttctcagatgcgccctgctgtaccaatgacacccactctagccccacgccttccaatgtactctccgatggctcctcag

SEQ ID NO: 55888 - DNA, 265 bp, Zea mays
aggcagagttgttgggacattcggttatatggcgccagagtatgcatcacatggtagtgtgtcgcctaagttcgacatctttagcttcggcgtcttgatccttgagatcgtgaccaggagaagcaactgcagctctgatgaccacagcactgtgaatctcctaagtgatgtctgggatcactggaagaaagtgacgatgccacaaatgcttcacgggtcactggatgatttgcccgagcccaacgctgcgatgcatccacattgg

SEQ ID NO: 55889 - DNA, 263 bp, Zea mays
cgggtggcccgggacagagctagcaccgccacccttgagcagatctctgctggtggcaagggcttggtggtgccgtggtgtgaccaactgaaggtcctgtgccacccctccgtcggtggcttcctgagccattgtgggtggaactcgaccctggaggccgtgttcgctggagtgccgatgcttgcctttcccgttgcttgggatcagctggtgattggccatctcgtggctgatgagtggaagatcggcgtcgacttgaggga

SEQ ID NO: 55890 - DNA, 267 bp, Zea mays
gcagcttatgctaaggaagtcgaagaacacataacttatggaagttcaggtagggttgcaggcttcattgcagaaacattccaaggtgtgggaggtgctgttgaactagctcctggatacctaaagttagcttatgacattgtgcgcaaggctggtggcgtttgtattgctgatgaagtccagagtggttttggccgtactggcagtcattactggggattccagacacaaggtgtcattcctgacatagtcaccatggcaaaggga

SEQ ID NO: 55891 - DNA, 262 bp, Zea mays
ccatttcggcctctgtccatcgcaagttcaatctcacctccatccatgggtaaagagaagtcccacatcaacattgtggttattggtcatgtcgactctggcaagtcgaccaccacaggacaccttatctacaagcttggaggcattgacaagcgtgtgatcgagaggttcgagaaggaggctgctgaaatgaacaagcggtccttcaagtacgcgtgggtgctcgacaagctcaaggctgagcgtgagagaggtatcacca

SEQ ID NO: 55892 - DNA, 265 bp, Zea mays
gtaggagggtatgtctgggcttgcaagaattatgatggagatgtgcagagcgatttcttagctcaaggttttggctcattgggtttgatgacttcggtactggtgtgccctgatggaaagacgatcgaagctgaagctgcccatggtactgttacccgtcattaccgtgttcaccagaaaggaggtgaaaccagtacgaacagtattgcctcaatctttgcgtggacaagaggacttgcgcacagggcaaagcttgatgacaatg

SEQ ID NO: 55893 - DNA, 264 bp, Zea mays
cggacaaggagcaggcggaggaggagctgtgccaagccacaatgggtatctcgcgtgactcgatgcacaagcgccgggccaccggtggaaagcagaaggcctggaggaagaagcgaaagtatgagcttggtcgccagccagccaacaccaagttgtcaagcaataagacagtgaggagggtccggcttcgtggcggtaatgtgaaatggagggctcttcgccttgatactggtaactactcatggggaagtgaagctgttaccc

SEQ ID NO: 55894 - DNA, 266 bp, Zea mays
cactcgagccgattcggctcgaggcagatgggaatgaagtgccacaccctgagaagaaagaatgcgagtacaggaatgggaactgggtttctgacaatcgtagaccactatactcagggtttggttgtaagcaatggctttcagagagttggtcctgcagactaacccagcgacaagatttcgcgtatgaaaaattcagatggcagcctgaagcttgtgagatgccagagtttgaggcctcacacttcttgagaagaatgcaggat

SEQ ID NO: 55895 - DNA, 262 bp, Zea mays
ggacgacgcaccgcacactacccgacggtggaactcctcgcccgcgtcgctgctccggtctccgcgctgctagccgccgactgtaataactataacatttcaggtgtgcttctgaagagagatttcgttgaacaggatgaatgcattggcagcaaccagcaggaacttcaagcaggcagctaagctgctgggcctcgactccaagctggagaagagcttgctcattccattcagggagatcaaggttgaatgcacaatccca

SEQ ID NO: 55896 - DNA, 254 bp, Zea mays
ctcgagccgagcagacccatgcatcaaccagcatggactgtggatcgatggatgctgttactcctgtcaggatttgttctaagttaatcctaaggaaaaaatggtgcttcttggtgctgcaaaatggttgtgctcatctgaaaagctacttactctcgctttgagtgcgaataaggcaaaggttgccagtttttcaaaaaaaaaaaaaaaaaaaaaaaggggggcccgcggacaagtggccccgtgaaccgggg

SEQ ID NO: 55897 - DNA, 264 bp, Zea mays
cacacttcctcgcgctcgcgctctcgagtcccgactcacctgcttctagccatggaggcgcctccatcttctcccttcctagtgttgctcctgctgttcttcccttcgagcggccttgccgcccccatggattttaaccatgaagtgcaagtccttatggtgatcaagaccctcctcaaggacccctatggcgcgctgagaaactgggacaggaactccgtcgatccctgtacctggtccttcatctcctgctcgccggagaat

SEQ ID NO: 55898 - DNA, 263 bp, Zea mays
ccagatgttaagagggagttcaatatgagactcacagatattgttacacaattcaagatgcaaggcgtgaatactgctttgtactacaagaacaaggagatggaagatacctttaacatagtgcctacgagtgctgtaagtggtgaaggtattcctgatttgcttctgttactggttcaatggactcagtagacaatggaagaaaaactcacttttgttgatgaagtccagtgtactgtactggaagtcaaggttgttgaagg

SEQ ID NO: 55899 - DNA, 128 bp, Zea mays
ctgtaacaatgcttattgaatccagctagttgcttatttgtggatcctctctctttgttgttggccacctttatctcgtgatgtttgtgtgcatgtgaatactctgaatgtgcatttcgaagtttgag

SEQ ID NO: 55900 - DNA, 260 bp, Zea mays
tcaggagtcagttcgtaaacaaatagtacaggagctcaaaataaaccaagcaacacagagccctcatatagttatgtgccatcaatctttttaccacaatggtgtaatatatcttgttcttgagtacatggaccgtggatcgcttgcagacattgttaagcaagtgaagactattctggagccataccttgcagtactttgtaagcaggtcttggagggttaattgaatcttcatcatcaaaggcacgtgattcacaggg

SEQ ID NO: 55901 - DNA, 258 bp, Zea mays
gctccaacccaccccatcaggcttggccttgctctcaacttctcagtgttctactacgagatcctgaactcccctgatcgcgcctgcaaccttgcaaaacaggccttcgatgaggcgatctctgagctagacagcctgggagaggagtcatacaaggacagcactctgatcatgcagctcctgcgcgacaacttgaccctatggacttccgacaccaacgaggatggcggcgacgagatcaaggatgctgctgccccg

SEQ ID NO: 55902 - DNA, 261 bp, Zea mays
  unsure (1)..(261): unsure at all n locations
gtctcctaaaatttcccctttccacacaacatatgagcccanaaatggctaacgggagtgtggcatcacgtttacgagagnggtctccatctgagtcacctcttagctgggaaccaagaagacggattgcactgggatctgcaagaggactttcttacttgcatgatcactgcgatcccaaaattcttcatcgggatgtcaaagctgcaaatattcttttggatgaggacttcgaggcagttgtgggtgatttcgggcttg

SEQ ID NO: 55903 - DNA, 261 bp, Zea mays
gctgagctcaggaaatcccctctggtctccccgtcccccattccacccgccgccgccgacgcgccgcgcctgttcaagatgaatgtggagaagctcaagaagatggcgggtgctgtgcgcactggaggaaagggcagcatgcgcaggaagaagaaggcagtccacaagaccgcaaccaccgatgacaagcggcttcagagcacgttgaaaagaattggagagcacactattcctggtattgaggaggtcaacatcttcaag

SEQ ID NO: 55904 - DNA, 262 bp, Zea mays
ggcagcgcggaggccgcacgatgcctggagttactgtaaaagacgtgaaccagcaggagttcgtcagagctctggcagccttcctcaaaaagtccgggaagctgaaagtccccgaatgggtggataccgtcaagctggccaagcacaaagagcttgctccctacgatgagaactggttctacacgcgagctgcttccacagcgcggcacctgtacctccggggtggcgctggggttggctccatgaccaagatctatggggg

SEQ ID NO: 55905 - DNA, 259 bp, Zea mays
ctcgatttatgaatcacaacagccagcccaaatgtgagaccctcaagtggacagtgaatggggacactcgtgtgggcctgtttgccgtctgtgacattcctgcagggacggagctgacttttaactacaacctcgattgtctgggcaatgaaaaaacggtctgccggtgtggagcctccaattgcagtggattcctcggggatagaccaaagacctcgacgaccctttcatcagaggaaaagggcaaaaagaccaaaaa

SEQ ID NO: 55906 - DNA, 261 bp, Zea mays
ctcgcctcgttcgcctcgcctccgccccgccccgccccgagcagagcgcagccctatccggagctgggatggcggacgcgaacagcagcagcagcagcagcagcagccacagcaggcggcagcggcagccaccggcgtgtggaagacggtcaagcccttcgttaacggcggggcctctgggatgctcgcgacctgcgtcatccagcctatcgacatggtcaaggtgaggatccagttgggtgagggctctgctggtcaggt

SEQ ID NO: 55907 - DNA, 258 bp, Zea mays
caatttagaagcgcccctcctcctctcccccatccgtacccaatctaatcgacacccggccgagatgggccgcaagttcttcgttggtggcaactggaaatgcaatggaaccgcagatcaggttgagaagattgtcaaaaccctgaatgaaggaaatgttccctcttcagatgttgttgacgttgttgtcagtcctccttatgtgttcctcccggtggtcaagagccagctgcgccaagagttccaagttgctgctca

SEQ ID NO: 55908 - DNA, 260 bp, Zea mays
acattttggatcaagcccttttgaggcctggccgcatagacaggaagattgagtttccaaatcctaacgaggactcacgtttcgatattctgaagatccattcaaggaaaatgaacttgatgcgtggtatcgatctgaaaaagatcgcagaaaagatgaatggggcctcaggagctgagctcaaggccgtctgtacagaggctggaatgtttgctctccgtgagagaagggtgcacgttacacaggaggacttcgagatg

SEQ ID NO: 55909 - DNA, 233 bp, Zea mays
ctcgagccgagcagactgcatgcatcaaccagcatggactgtggatcgatggatgctgtcactactgtcaggatttgttctaagtgaatcctaaggaaaaaatggtgcttcttggtgctgcaaaatggttgtgctcatctgaaaagctacttactctcgctttgagtgcgaataaggcaaaggttgccagtttttcaataaagtgctatattccaaaagggggggccgctggc

SEQ ID NO: 55910 - DNA, 256 bp, Zea mays
ctgatactgatgcttcctcccactataaggttccgttctcaagaactgtctacattgagaaaactgattttcgcctaaaggactcaaaagactactatgggctagcccctggtaaatctgtcatgctaaggtatgcgttccccataaaatgcacagatgttatctctggtgatagtcctgatgatattgttgaaattcgagctgaatatgatcctttgaagacttctaaactgaagggtgttcttcactggattgc

SEQ ID NO: 55911 - DNA, 257 bp, Zea mays
cgtttctgcatgacacctactgaaaggttgttagtctacccatacatggctaacgggagtgtggcatcacgtttacgagagcggcagccatctgagccacctcttagctgggaaccaagaagacggattgcactgggatctgcaagaggactttcttacttgcatgatcactgcgatcccgcaatcatccatcgggatgtcaaagctgcaaatattcttttggatgaggacttcgaggcagttgtgggtgatttcgg

SEQ ID NO: 55912 - DNA, 253 bp, Zea mays
ctcgcgtccattaggtccatagcatctggaggggacccgtctggcgtctggcgtctggcgtctggcgtctgtctgggaccgggctgcccagccgctcgatcgacgttcggcgaggacctgctccggtactccggttggttggaccggagggcggaggcgcggcgatgggggcgctgtcgcggccggaggaggtgctggcgctggtgaaattgcgggtggcagcggggcagatcaagcgtcagatcccgcccga

SEQ ID NO: 55913 - DNA, 259 bp, Zea mays
gtcgccaccggccaccgccaccctcgatcacgccgtccgtcgaggtaaggtcagcatggtgagggtcagtgtgctcaacgatgcgctcaagtccatgtacaacgctgagaagattggcaagaggcaggtcatgatcaggccgtcatccaaggtcatcatcaagttcctgacggtcatgcagcgccatggctacattggagagttcgagtacgttgatgaccaccgatcgggcaagattgtggtcgaactcaacgggagg

SEQ ID NO: 55914 - DNA, 254 bp, Zea mays
cctgcacagaacaaaggccacgctgatcggcttgctggaggccggcagggccaacgagtgggtggtgacggcgaactcggcagcgccatgaagatgaaatcggctaacaaagcggggctcaggaagcagttcatgaggatatgggagaggctgcacgtcacggagctcggggtggcagccttcctcttctcctgcggctggtacgatcttgcgtacgggagggaccatttcttcatctacctcttcttccagtc

SEQ ID NO: 55915 - DNA, 254 bp, Zea mays
gataaaactgaagctcaaagctgtctacatgtatgctgctggattttacacatattcaattttcgctctcctgttctgggaaacaagacgttcggactttggagtatcaatgtcccccatatagcaactgttgttctgattattctttcctacattttccgattcgctcgtgttggcactgttgttttagcccttcatgatgcaagtgatatattcctagagattgggaagatggccaagtacagtagctgcga

SEQ ID NO: 55916 - DNA, 175 bp, Zea mays
cggcgcctcccgtcctccacttccatccgtacccgcgcggcaacgtccgactgtcggtctgtacgctgcatggctacggcgacggattcctcctattccccgctgcgttcggggcagggcggtcacgtgcacgactgaactggcgccgctgttccctggttgcgattacgcgcac

SEQ ID NO: 55917 - DNA, 177 bp, Zea mays
ttcccatatccgctcccctacctctccagccatctcccgtactaccgtacgactcgtctctagcacctacacctacgccgccagccatggcccgcatcaagctcggacatcacggtttcggaaggatcggcaggctcgtggccagggtcgccctgcagagcgaggatgtcgagctcg

SEQ ID NO: 55918 - DNA, 176 bp, Zea mays
tcattgggtaaggtcgattgtagtcatgcaaataacacaatcgatgggctgatttgtgctgtcctactaccttcctatgtagcagtatttcacaggcagtatctggcgaggactaaagcagagagaaccaagatagtgctgaagcagaagcactgctgcttggatacccatgaata

SEQ ID NO: 55919 - DNA, 181 bp, Zea mays
acggacacgagtcactggaaagactatcaccctcgaggtggagtcttctgacaccatcgacaacgtcacggccaagatccaggacaagagggcatcccaccagaccagcagcggctcatttttgccggcacgcagctcgaggacgggcgcagctggacgactacaacattcagaaggagag

SEQ ID NO: 55920 - DNA, 165 bp, Zea mays
gctaagggaactttgacaacatgcgtacttgtgactaagctcttgaacggtgaggttggacccaagatcaatccataatccatctagggataagactttcagtttttagatgactgactatgagatacaagaatgaaaggtctgatactattatcctagctggtg

SEQ ID NO: 55921 - DNA, 173 bp, Zea mays
atcaacccttacgaattacaacatccagaaggagagcaccctccacttggtgctgcgtctcaagggcggcatgcagatctcgtgaagacacttactggcaagacaatcacccttgaggtggagtcctcggacaccattgacaacgtcaggaccaagatccaggacaaggaggg

SEQ ID NO: 55922 - DNA, 169 bp, Zea mays
ctcaggaacaggctcaagtatgctctgaactaccgtgagtcatttactatactgatcgcacgccatgtacttgtgatggcacggtcaggactgacaagacctaccctgctgagttcatggatgtactttccatccctaagacaatggagaactacaggctgctttatga

SEQ ID NO: 55923 - DNA, 173 bp, Zea mays
gtccgacctgggcttcgacgcctggcgcctcgacttcgccaagggctactcccccgaggtcgacaaggtctacgtgacgccacggccccgaccttacgccgtcgccgaggtatggaacagcatggcgtacgacggggacaacaagcccgagtacgaccaggacccgcaccggc

SEQ ID NO: 55924 - DNA, 281 bp, Zea mays
tgtcgcacgcaggcttcggctcgacggaaacaggatgggtgccaaagaaactcgatgtgtatatagatgtgccagatacaattgatatcacacatatgcgcagaaaggattacagcctggggaagagctgctacctgaaggaggttctggtgacgacagtgccgagcctgctaatcctgttgccagtgaaattattgtaacccagcttgcaagcatgggcttcaactaccttcattgtcagaaagctgctattaacacatcagacacaggagttgaggaac

SEQ ID NO: 55925 - DNA, 269 bp, Zea mays
caaatccacaggcccattcatacatgtggggagctcagcccatggtaccaccttatgggactccaccaccaccttatgtgatgtatccacctggagcagtatatgcccatccctctacacctcctactatgcatccgtttagtcattaccctatgccaacaaatggacatgctgaaactcctggaaccgcgccaagtgctccagaaatgaatgggaaaagtgagcctggcagaacatctgctccatctgccaatgggattacctcgcac

SEQ ID NO: 55926 - DNA, 267 bp, Zea mays
tttttgtttttgggaatcagaaaataactttatttcattctgtgtagcgggccgatttccagcctcagaacttctggaactgcttcttggtgccggcagccttggtgaccttgagcacgttgaagcgcactgtcttgctcagaggccggcactcgcccactgtgacgatgtcaccgatctggacgtccctgaagcagggggacaggtgtacagacatgttcttgtggcgcttctcgaagcggttgtacttgcggatgtagtgcagat

SEQ ID NO: 55927 - DNA, 269 bp, Zea mays
ctcccaggctgactgtgctgtccttatcattgactccaccactggtggttttgaggctggtatctccaaggatggccagacccgtgaacatgctctccttgcgttcacccttggagtgaagcagatgatttgctgctgcaacaagatggatgcaaccactcccaaatactccaaggcacgttatgaagagattgtgaaggaagtctcatcctacctcaagaaagttgggtacaaccctgataagattgccttggttcccatttctggtt

SEQ ID NO: 55928 - DNA, 220 bp, Zea mays
ttatgttgctgaatcaagagacgcttcaataaatcatgaaggcgacttacgttctgaaaactatgtcgactgacaacaagggtttgtattcaacaaccttcaaagttccagatgtttatggagttttccagttcaaagttgagtaccaaagactgggatatactggtctgtcttttacaagcggattccggtaagtccttaaagacataatgagtatgag

SEQ ID NO: 55929 - DNA, 273 bp, Zea mays
cgccgccgccgccctaagccacgtgctgaggctttcgttggtctcttcgccggcgacgagcacccagttctgtagaaatggctgatggtgaggacatccagcctcttgtctgcgccaatggcactggaatggtcaaggctggttttgctggcgatgatgcaccaagggcggttttccctagcattgttggccgtcctcgccacactggtgtcatggtagggatgggacaaaaggagcatatgttagcgatgaggcacagtcctcgagaggtat

SEQ ID NO: 55930 - DNA, 263 bp, Zea mays
ggagtctggagacgacgtgcagaaatggcacctcgaaagggtaaggaaaagaaggaagaacaggtcatcagcctcggacctcaggtggctgaaggagagaatgtatttggtgtctgccatatctttgcatctttcaatgacacttttgtacatgtcactgatctttctggcaaggaaaccatcttccgtgtgactggtgggatgaaggtaaaggcagaccgagatgaatcctcaccatatgctgctatgttggctgcccagga

SEQ ID NO: 55931 - DNA, 259 bp, Zea mays
ctcgcctcgggtcaaaccctaagcagggagttgatttatccgctgcagccatgagtaagttgcagtctgagtctgtcaaggatgccatctcccagattgttggggatgccaaggagaagaataggaagttcactgagactgtggaacttcagattggtctgaagaattatgatccacagaaggacaagcgtttcagtggctctgttaagttgccccatatccctcgtcccaagatgaaggtgtgcatgcttggtgatgc

SEQ ID NO: 55932 - DNA, 232 bp, Zea mays
  unsure (1)..(232): unsure at all n locations
ctgctgnagctcgagccgttcgctttgaggagagtgagatcaagtgggcgtcacgctgggacacctacctgttgatgaccgatgatcagattcactggttttctattgtgaactctctcatgatcgtgcttttcctatcaggcatggttgccatgataatgcttcgcactctctacagagacatttctagatacaatcagcttgaaactcaggaggagcaccagaggaaaca

SEQ ID NO: 55933 - DNA, 278 bp, Zea mays
ctgaacaatgctattctcgctgaggagaagcacttgcctatgtatgacgagttggctagcaagagcaatgttgaatatattgccggaggagccacccagagatctatcagggttgccccatggatgcttcaaactcctggtgcaacaagttacatgggatgcattggaaaggaccaatttggtgaagaaatgaagaaaaacgctcaagctgcaagggtgactggtcattactaacgaggatgagactgctcctactggcacatgtgctgtatgtgttg

SEQ ID NO: 55934 - DNA, 271 bp, Zea mays
gtttggaacaaacaagctaaagtatcctgtacatagcatccttgttttcgatcagcacaaaaatgcaattcctgttgcgtggattataacccccaattttgcacatggtgaaatatataaatgggtgggtgctctttatgatcgagcgcatacaaaagatcctacttggcaattgggtggcttcattattgatggtcccttgactgacgttcgcacaataagagaagtattccattgccctgtgctgatcagtttatggcgtatccggcat

SEQ ID NO: 55935 - DNA, 212 bp, Zea mays
cgccgctgttccccgcaacctatcgtcccaatctcgtccgacccggcgcgtcgtcccctccagatctccgtcgccctctccaggtagcagaaactgttctgctgcagtctgacaaagtggagggcttaggagcttctgcttcttttatgtctgaacaatctttgctttatttgggattgttgggagagtactctcgtgcaacgaggaaaagg

SEQ ID NO: 55936 - DNA, 263 bp, Zea mays
gcgccccggcgggccggatcgtgatggagctgtacgccaacgaggtgcccaagaccgcggagaacttccgcgcgctgtgcacgggcgagaagggcgtgggcaagtccgggaagccgctccactacaagggctccaccttccaccgcgtcatccccgagttcatgtgccagggcggcgacttcacccgcggcaacggcaccggcggcgagtccatctacggcgagaagttccccgacgagaagttcgtgcgcaacacaccgccc

SEQ ID NO: 55937 - DNA, 270 bp, Zea mays
tgctcgccaagagttcttcttgtataggcaaaggcaaaagcaggagcaaaaaggtttcgttggcgatggcgagctcgtggacgcttcctgaccacccgaagctccccaaggggaagccggtggctgtcgtcgtgctggacggatggggcgaggccaaccccgaccagtacaactgcatccatgtcgctcagactcctgtcatggactcgttaaagaatggtgctcctgagaaatggagactagtgaaggctcatggaacagctgtgggtc

SEQ ID NO: 55938 - DNA, 271 bp, Zea mays
cccagacccagcagctattgtggtcgtccctcagccgcgtcgcaccgcatcgcattctacgattcgaagctctctctgctcgcagccatggcgaagaattacccaaccgtgagcgccgagtacagcgaggccgtcgagaaggccaggcgcaagcaccgcgccctcatcgccgagaagagctgcgcgcccctcatgctccgcctcgcgtggcactccgcggggacgttcgacgtgtcgtcgaggaccggcggtcgcttcggtactatgaagt

SEQ ID NO: 55939 - DNA, 273 bp, Zea mays
tccgccgtcctcctcgggacacgcaacgtccgcgctttctccggcgacatgcccaccgatcctgccggcacgtcggcgaagcgggggcggtataacgtaacggccgtgcagaagctctccgagtcactgacggcggcggcgtgccatgacctgacgtacccctacgccgtgttctactgccacacgaccaacccggcggccacgtacctggtgaagctggcagcccaggatggcggggcgccggacatggaggcgttggtcgtgtgccactcg

SEQ ID NO: 55940 - DNA, 268 bp, Zea mays
gaggctgcttgtctatgagtttgtccccaataacacattggagttccacttacatgcgaaagatcgaccaacaatggagtggcctgctagattaaagatcagtttgggtgctgccaagggtttagcttatcttcatgaagactgccatccaaagatcatccatcgtgacataaaggcatctaacattcttcttgacttccaatttgaagctaaggttgctgattttggacttgcaaagttcactactgataacaacacccatgtttcg

SEQ ID NO: 55941 - DNA, 266 bp, Zea mays
gaaaaatcagaagaagttcagatgaacacctaagacaaaccaggtcggagacaatgagtaacagcgtcaaatcatcttttcatgatcccaagctgaaaggcaagccctccagagagcgttatgtgacccacaaccgagcacattggtgacagaccttcggggcctgtctgaagccacagcctccacggagagccctgtggccgactctgcactctccaccctggctgggatcagagcatgagcatcctctgctggttcctgactgg

SEQ ID NO: 55942 - DNA, 265 bp, Zea mays
cggacgcacacacacgcaaccagatctcccccaaatccagccgtcggcacctccgcttcaagatgcagatctttgtgaaaaccctgactggcaagactatcaccctcgaggtggagtcgtctgacaccattgacaacgttaaggccaagatccaggacaaggagggcatccccccagaccagcagcggctcatcttcgctggcaaacagcttgaggacgggcgcacgcttgctgactacaacatccagaaggagagcaccctcca

SEQ ID NO: 55943 - DNA, 261 bp, Zea mays
ggctgacggaataaaagttgtaactgataaaggagaagagctcattgcagatgttgtcctatttgcgacagggcgcacaccaaactcccagagactgaacttgcaagctgcaggcgttgagattgaccgggttggagccatcaaggttgacgaatattctcgtacttctgctcctagtgtatgggctgtgggtgatgtaacaaaccggattaatttaacacctgttgcattgatggaggcaacttgctttgctaaaactgt

SEQ ID NO: 55944 - DNA, 261 bp, Zea mays
ggaggcggacaaggtaagcagcaatcgcaggaaccctagcgccgccgcacccgcaggaatgggtatcgacctcgtcgccggtgggaggaataagaagaccaagcgcactgcgcccaagtctgacgatgtctacctcaagctcctcgtcaagctctaccgtttcttggtcaggaggaccaagagcaatttcaacgctgtcattctcaagaggcttttcatgagtaaaaccaaccgaccaccaatctccatgcgccgccttgt

SEQ ID NO: 55945 - DNA, 261 bp, Zea mays
cttggacacccacgccaagtttgggatatttccttcctggggtctttcacagaagctttctcgcatcattgggccgaatagagcaagggaagtgtcactaacttgcatgcctgttactgctgaaatggcagagaggtgggggcttgttaaccacgtcgtggatgataatgaggtgctgagtaaggcgatagaggttgctgaggctattgtgaggaacaaccgcaacttagttgtattgtacaaatcggttataaatgatgg

SEQ ID NO: 55946 - DNA, 263 bp, Zea mays
ctggaccaatctgccaccacactttgatcacacacaggaagttgagatcagaaaaatgcaggctgccgctactgccgccgggttctcggccgtgctgcccgccaagggcaggccggcggcgaggagcagcgtggtggcccgtgtccccgccacaaggaggagcgtccgtgtagctgccgtcgtcgcgaccgaggccgcgcagatcgactacagctcaagcgtctcggtgttcccgatggaggcctgcgacctgcttggtggcg

SEQ ID NO: 55947 - DNA, 264 bp, Zea mays
caaaatctgcacgagagacagacgacgagatggccgatgcggaggacgccgccgccgcgcgccgacgggtcgccataaccgactaccgcaagaagctgctcaactgcagggagctcgagtcgcgcgtcggcaccgtgagagaaagccttaaaaatgcaaagagggattttaccaagactgcagacgacttgaaatctctgcagagcgtggggcaaataattggagaggttctccgacctcttgataatgaacgctttattgtga

SEQ ID NO: 55948 - DNA, 263 bp, Zea mays
ccactacaggtaaggaagaggaggagggcaggatgtcgcaccgtaagttcgagcacccgaggcacggctccctcggcttccttcccaggaagcgctcctcccgccaccgcggcaaggtgaagtcatttcccagggatgaccccaagaagccttgccatctcactgccttccttggctacaaggctacgcatgactcacattgtccgtgaggttgagaagccaggatccaaactccataagaaggaaacttgtgaggctgttac

SEQ ID NO: 55949 - DNA, 256 bp, Zea mays
gcgctgcgctcgcgtctctcgtccccctcagatccaccgactcgctctgagtctctgaccgccccttccgtcgtacccgttcgaaggcgcggcaagcgagcgattcagccagattcgattcgacatgaatcccgagtacgactaccttttcaaacttctgcttattggtgattctggtgttgggaaatcatgcttgcttctcagatttgcggatgattcatatttggacagctacatcagcacaattggggttgat

SEQ ID NO: 55950 - DNA, 250 bp, Zea mays
aaccccggcgaagttgttaaacctgaccaattcaaggcaataaacgacgaggggatgccgatttaccagaggcccttcatgaaggggaagctctacattcatttcacggtggagttccccgactcgctggcaccagagcagtgcaaggctctcgagtcggtacttccgccaaagccttcgtccaagctgtcagacatggagatcgatgaatgcgaggggccacccttgcatgatgtgaacaacatcgagg

SEQ ID NO: 55951 - DNA, 262 bp, Zea mays
aaccccggcgaagttgttaaacctgaccaattcaaggcaataaacgacgaggggatgccgatttaccagaggcccttcatgaaggggaagctctacattcatttcacggtggagttccccgactcgctggcaccagagcagtgcaaggctctcgagtcggtacttccgccaaagccttcgtccaagctgacagacatggagatcgatgaatgcgaggagacaaccatgcatgatgtgaacaacatcgaggaagagatgcgca

SEQ ID NO: 55952 - DNA, 263 bp, Zea mays
atcgcctgcaacagcctggaccatgacccggacctccagcacatgccgctcttcgttgtctcccccaagctgttcggcaacatatggtcctacttctaccagcggaccctggccttcgacgccgcctcgaaattcctcatcagctaccagcactggaccttctacccggtaatgtgcatcgccaggataaatcttctggcgcagtccgctgtcttcgtcctgaccgagaagagggtgccgcagcggctgcttgagatcgccgg

SEQ ID NO: 55953 - DNA, 259 bp, Zea mays
gcgcgacggaaaccccaaacccaacctcatctcttttctcggcctctaccgccccctcgatcggtcggccggtcagctatgacgccgggaagctcggccgccggatccggcgtcgtcgttcctcggaacttcaggctcctagaagagcttgaacgtggagagaagggcatttaatatgggacagtgagctatggaatggatgacgcagatgacatctacatgcgatcatggactggcactattattggccctcataata

SEQ ID NO: 55954 - DNA, 256 bp, Zea mays
gaagagaaggtcatggatttgtacaagaagaaatgtgaaggtcctctaagaacaggaatcaggacagggattataagtggaatcggttttggagtttcctttttcttgctatttggggtatatgcagctagcttttatgctggtgctcggcttgttgaggacaggaagacaacctttcctaaagttttcagggttttcctagctcttgcaatggcggcaattggagtgtcgcaatcaagtacccttacatcagatt

SEQ ID NO: 55955 - DNA, 249 bp, Zea mays
ccatttcggcctctgtccctcgcaagttcaatctcacctccaaccatgggtaaagagaagtcccacatcaacattgtggttattggtcatgtcgactctggcaagtcgaccaccacaggacaccttatctacaagcttggaggcattgacaagcgtgtgatcgagaggttcgagaaggaggctgctgaaatgaacaagcggtccttcaagtacgcgtgggtgctcgacaagctcaaggctgagcgtgag

SEQ ID NO: 55956 - DNA, 172 bp, Zea mays
ctgtgttggggatctggaccgcacaatcaagtactacacggaatgctttgggatgaaactgctgaggaaaagggatgttcctgatgagaagtacaccaatgccttccttggctttgggccagagaacaccaactttgcagttgaattgacatacaactatggcgttgacaag

SEQ ID NO: 55957 - DNA, 277 bp, Zea mays
gcgtgtccgtcgcggcgaacatctcgggcggccacctgaacccggccgtgacgttcgggctggccgtgggcggccacatcaccatcctgacgggcgtcttctactgggtggcccagctgctgtgcgccaccgtggcgtgcctgctcctcgggttcgccacccacggcaaggccatcccgacgcacgccgtcgcgggcatcatcgatctgaaaggcgtcgtgttcgaggtcgtcatcaccttcgcgctcgtctacaccgtgtatgccaccgccgccga

SEQ ID NO: 55958 - DNA, 280 bp, Zea mays
ttcaaagccctgcggcgatttcgattcttcccctctatctccaggtatacccatcggagcagcactgacaaaaattctccagatatggcaagcaaaaggattcagaaggaactcatggatctgcaaaaggacccaccgacatcatgcagtgcagggcctgctggagaggatctattccactggcaggccacaatcatgggtcctagtgacagcccctatgcaggcggggttttctttattaatatccattttcctcctgactacccctttaagcctccaa

SEQ ID NO: 55959 - DNA, 274 bp, Zea mays
gcttcacgccggcaaccgctaccgcctcgtcgccgcgctccgggccacatctccgcctccgcgcgcccgctccacggcctcgtcctccttcagggcggggaggagaagacacggtactgcaccgatcacctcgagctcttcaggcaggagagctacttcgcctatctctttggagtgcaggaaccagggttctacggcgcaattgacatcgcctctggacagtcaattttgttcgctccaagattgccagctgactatgctgtttggatgggtg

SEQ ID NO: 55960 - DNA, 279 bp, Zea mays
caggctgcccgcagcgccgccagctacatgctcttcgaccccaaggacagcgtcatgcagcagaacctggtgtattaccggttccaccgggctcgctggggcctggaagaggaggacttccagccccgggaggaggccatgctctacacaaccagaccgccgagctgcgggagctgctggagttcacccacatgtacctgcagtcagatgatgagatggagctggaggagacagaaccgcccctggagcctgaggatgccctatctgacgccgagtttg

SEQ ID NO: 55961 - DNA, 285 bp, Zea mays
tctcgagccgaatcggctcgagcattgacaagggtagagatctcactgctgtgttagaacacttctcaaaatttgttaaacctgcttttgaagacttcatcctcccaacgaagaagtatgctgatgttatcatcccacgcggaggagacaagatgtggcaattgacctaatcgttcagcatattcggactaaacttggacaacatgatcttcgtaaaatacaccctaatctgtatgtaattcagactacttatcagatacgaggcatgcacacaataataaggga

SEQ ID NO: 55962 - DNA, 278 bp, Zea mays
gtggcagtactgctacaaccagcggacgcctccgcgcgggcgcactcccgcgcctactcccaggcgctcaagctggagggcatcgacttcgccgagctggtgcggaggcaccagctccggctcgggtacggcagcaagggcggcgtcttcgaggacctggacgacacccagaagctggaggtgtacaacagcatcatcgtcgactcggggcgggcggggctaccggtgcggatgttctcgtcgggccgctctgccggtggccctaagattgcagccac

SEQ ID NO: 55963 - DNA, 276 bp, Zea mays
cctcgagccgcgctcgagggctccgacgtcgtcatcatccccgccacggtgcccaggaagcacggcatgactagggaagacctcttcaacatcaacgccggcatcgttaaggggctctgcactgccatcgccaagcactgcccaacgctcttgtcaatatgatcagcaaccctgttaactccactgtcccgattgcggcggaggttttcaagaaggctggtacttatgatgcgaagaagctgtttggtgtgactactcttgatgttgttcgtgcta

SEQ ID NO: 55964 - DNA, 272 bp, Zea mays
tgacgagattattcgattggagtttagtcattatgatgtcaagtcgtctaaaactataccagcaaaggattttgcattgtccatggttgcttctgctgacatgaaccatatcaacaagctgcttgatagagctgatggtttggtcaaggagccagatctgaaggacatacgcatcacctttgaggtatgacttgcgttcttgatatcaaaattatttttgcactcagtttatctcttattattttcatgaatgtgtatttgcaacttcagga

SEQ ID NO: 55965 - DNA, 273 bp, Zea mays
gactgagggacctttagccttagaggtggctgctgcagagaattcgaccctccaggatggtgctggcgcttacctagcccccgagggtgttggcggggatgattcggctcggatgggtagcgcaagtgcgacccagcccccgaggtgttgccggagatgatccgactcggatgggtagcgcaagctgtgacccagtcctcgagggtgtccgagcgggttctccctcttgcacttccatggatgttcacgtagggtcttctcctccacactgtg

SEQ ID NO: 55966 - DNA, 278 bp, Zea mays
gtgaccaggtctcagatgccgttcttgacgcttgccttgctgaggaccctgacagcaaggttgcttgtgagacctgcaccaagaccaacatggtcatggtctttggtgagatcaccaccaaggccaatgttgactacgagaagatgtcagggagacctgccgcaacattggttttgtgtcaaacgatgttgggcttgacgccgaccactgcaaggtgctcgtgaacattgagcagcagtcccctgatattgctcagggtgtgcatggccacttcacca

SEQ ID NO: 55967 - DNA, 275 bp, Zea mays
gaggaacagagcagacgacgcgaggcgatttctgcgggtttgcttgctccatctgtagaccttaggccgccgccgggcgaccgtgcgcgtgcggtgctcacgccccaccccgctcaggtgaaggctcttcaagatgggcgaggtacacgaagctgacaagaacattgagatctggagggtgaagaagttaatcaaggcacttgatgctgcaaggggcaatggaactagcatgatttctctcatcatgccacctcgtgatcagatttcacgcgtca

SEQ ID NO: 55968 - DNA, 273 bp, Zea mays
ggatgatgttgttattcagtttgtgaatcctaaagtgcaagcttcaattggtgctaatacatgggtggtcagtggaactccacagacaaagaagctgcaagatctgcttccgtccattatcaaccagctcggccctgacacctagacaacctgcggaggcttgcggagcaattccagaagcaggcccctggtgcttcaggtgcagaggctggcgccacgctggtgctgctcaggacgatgacgatgacgttcctgagctcgtccctggagaga

SEQ ID NO: 55969 - DNA, 262 bp, Zea mays
catatgattaagccggtgaaatcgtcatgattgaaggccccattcgtagctcaaatgtgatgctctactctaaggacaatagtgtggtaagcagggttggccacaaattccttgaggacgggaccaaggtccgatatctggtcaagaccggttaagtaatcgacagtgttgagaagtgggtaaaggtttttacggaaggaaattcggagtaacagttttagcatgataacctgcaaaatgctctgaacgcatactgcgtcgt

SEQ ID NO: 55970 - DNA, 274 bp, Zea mays
gaaatagtcaatacccaggtacttgctttcaatggccagcctgttaaaaatttaaagaacttggcgaccatggtggaaaattgcaaggatgaatttttgaagtttgatctggagtatgaccagattgttgtcctcgagacgaaactgcaaaggctgctacccaggacattctgacgacgcactgtataccttctgcaacgtcggatgaccttaaggcctagtgggagaagggagcatgacgcagccctgggcctgggccagggccatcaggtgg

SEQ ID NO: 55971 - DNA, 275 bp, Zea mays
attgtgttgaagatgaccaaaggttgctggtctatgaattcatgcctcgtggcagtttggataaccatctttttagaaggtctcttcctctcccatgggcaatcagaatgaaggttgcactcggagcagcaaagggtctggctttccttcatgaagaagcagaaagaccagtcatttatcgcgattttaaaacatctaacatactgctggatgcggagtataacgcaaagctctctgattttgggcttgcgaaagacggacctgtaggtgataaa

SEQ ID NO: 55972 - DNA, 292 bp, Zea mays
  unsure (1)..(292): unsure at all n locations
agcgcggaggccgcacgatgcctggagttactgtaaaagacgtgaaccagcaggagttcgtcagagctctggcagccttcctcaaaaagtccgggaacctgaaagtcnccgaatgggtggataccgtcaagctggccaagcacaaagagcttgctccctacgatgagaactggttctacacgcgagctgcttccacagcgcggcacctgtacctccggggtggcgctggggttggctccatgaccaagatctatgggggacgtcagagaaacggcgtcatgcccagccactt

SEQ ID NO: 55973 - DNA, 275 bp, Zea mays
catcgatctcgtttcaaatccatccatcctcgtttcctccgtcccgcagcatctcaaccccatggccaagatcaagatcgggatcaatgggttcggcaggatcggaaggctggtggccagggtggccctgcagagtgacgatgtcgagctcgtcgccgtgaacgaccccttcatcagcaccgactacatgacctacatgttcaagtacgacactgtgcacggacagtggaagcaccatgaagtcaaggtgaaggactccaaaacccttctctttg

SEQ ID NO: 55974 - DNA, 275 bp, Zea mays
aggaagcccaagtgctctcttgggtgcgctcgtcgccggtggcagtgagccagtgatgcatcttcatctccggcttccttattaggatcaacccgtcgatcgatcatggcgtcgtcgagctcggctgctactaccagtggtgacagtcagggtctcaaggctcgagatgcctgcatcgtcggcgtcgcccgcacgcccatcggcgcacttctcgggtcgctgtcgtccctccccgccaccaagctcggctccatcgccatccagggtgctctcaa

SEQ ID NO: 55975 - DNA, 270 bp, Zea mays
gagctggtgaagcttgctacagagaggggccgcaaagctaggcctaacttgaaggtgggcatttgtggagaacacggtggagagccttcctctgtggccttcttcgcgaaggctgggctggattacgtttcttgctccctttcagggttccgattgctaggctagctgcagctcaggtcgctgtctgaggctgcctcctcattggcaaccggattgcctgctgctggtggatgtggtgatcaacagtattattacagagccatgctatgt

SEQ ID NO: 55976 - DNA, 270 bp, Zea mays
gaaatagtcaatacccaggtacttgctttcaatggccagcctgttaaaaatttaaagaacttggcgaccatggtggaaaattgcaaggatgaatttttgaagtttgatctggagtatgaccagattgttgtcctcgagacgaaaactgctaaggctgctacccaggacattctgacgacgcactgtataccttctgcaacgtcggatgaccttaaggcctagtgggagaagggagcatgacgcagccctgggcctgggccagggccatca

SEQ ID NO: 55977 - DNA, 271 bp, Zea mays
ggcttctgcagttatcctgcttgtgatgcagtggttgtcggggggacttgtgttgattctctgtattgtgaagcgaggagaattctccaggcaggttgtcacaaagttgggaagcagcttctcaacagtggcttttgtattgttgtggcaacttgcaccattttagcaatggttgcaaccgtaccacttgcccagcttttatgttttcatgtccttcttgtgaaaaagggaattagcacatatgattacatcatagctttgagggagcagg

SEQ ID NO: 55978 - DNA, 283 bp, Zea mays
ccgaaagccagcgaccgtggccatgcagtcgccggagctctcctcttcctccccggttctcctcaatatagggggcaagaagtacgcgacaaccgtggagacgctgatgcagcgggagcccgactccatgctcgccgccatgttcagcgggcggcacacgctccatgatcacccaaccacggggaaggggatggtcttcgtggacagggacgggaagcacttccgccacgtgctcaattggctcagggacggcgccatccccgtgctgtccgagtccgactac

SEQ ID NO: 55979 - DNA, 263 bp, Zea mays
ccatttcatccttcaaagaagcagtatcggcaagaaccgagctgaagctgccatggaattcttacaagaattacatagcgatgtctctggaagttttgtggaagagagtccagaaaaccttctagacaatgatccctcatttttctgcaggattactgatgtagttgcaactcagcttcctgaaagcacgtcactacgcttagcagatgtcctctggaattctcagattcctcgtttgatctgtatgacatatggactagttg

SEQ ID NO: 55980 - DNA, 278 bp, Zea mays
gaactgtaccggttggtcgtgtggagactggtgtcatcaagcctggtatggtagtcacctttggtccaactggcctgactactgaggtgaagtctgttgagatgcaccacgaggcgcttcaggaggctcttccgggcgacaatgttggcttcaacgtgaagaacgttgctgtcaaggatctcaagcgtgggttcgtggcctccaactccaaggatgaccctgccaaggaggctgccagcttcacctcccaggtcatcatcatgaaccaccctgggcag

SEQ ID NO: 55981 - DNA, 283 bp, Zea mays
gtaattgatgagcacataggctgtgccatgagtgggcttattgctgatgctagaacactagtcgagcatgctcgtgttgaaactcagaatcataggttctcatacggggagccaatgaccgtagaatcttcaacacaagctatttgtgacttagctctgcgctttggcgaaggtgacgaagagtcaatgtcacggccatttggagtctctctcctaattgctggacatgatgagaatggacctagcctgtactacaccgacccatctggtactttttggcaat

SEQ ID NO: 55982 - DNA, 264 bp, Zea mays
ggaagctgctgcggcccctgagtttgctgcagtcactgattaccaaggagctgatcagtggggcggtgaccagtggacctctgatgtggctgcaccacctgttgctcctactggtgctgattggggtgctgcacagctccggttcctaccggtgatggctgggatcaaactgtggcccctgttcctgtggatggcactgttcctccagtggtcgctcctactggttgggaatcagcagcccagcccactgcccaaggctgggaa

SEQ ID NO: 55983 - DNA, 268 bp, Zea mays
accagatcctgacccgggatgccaagggcatcagccaggagcagatgaatgagttccgggcctccttcaaccactttgaccgggatcactccggcacactgggtcccgaggagttcaaagcctgcctcatcagcttgggttatgatattggcaacgacccccagggagaagcagaatttgcccgcatcatgagcattgtggaccccaaccgcctgggggtagtgacattccaggccttcattgacttcatgtcccgcgagacagccga

SEQ ID NO: 55984 - DNA, 291 bp, Zea mays
ggcatcaaccagattgttacaggcgacttgatctccttgtctgaacaagagcttgtcgactgtgacacttcgtacaatcaggggtgcaatggaggtctgatggactatgcatttgagttcatcatcaacaatggcggaatcgacaccgagaaggattacccttacaagggcacggacggacggtgtgatgtcaacaggaaaaacgcgaaggttgtcactattgacagctacgaagatgtaccagcgaacgatgagaagagtctgcagaaggcagttgcaaaccagcctgtc

SEQ ID NO: 55985 - DNA, 307 bp, Zea mays
agttattcttcggagtaagtcgggattcggatcgagccgagtctgagctcatctccacgcgccgccgccgccgctcgacgcccaccgcgcaccatggcggaacagactgagaaggctttcctcaagcagcctaaggtgttcctcagctcaaagaaatctggcaagggtaagaagccaggcaagggtggcaatcgattttggaagagcattggccttggtttcaagactcccagggaagcaattgaagggacctacattgacagagatgtccattcactggaaccgtttctaacagaggcagaataat

SEQ ID NO: 55986 - DNA, 211 bp, Zea mays
tgagctggtgaagcttgctacagataggagccgcaaagctaggcctaacttgaaggtgggcatttgtggagaacacggtggagagccttcatctgtgagcttcttcgcgaaggctgggctggattacgtttcttgatcccctttcgggttccgattgctaggctagctgcagctcaggtgcttgtctgaggctgcctcctcattggaaacc

SEQ ID NO: 55987 - DNA, 273 bp, Zea mays
cgccggagctcgacaaggacgaccgacgacgcacgcggagatccggcgtactgcaaattttgaaaactgaactgtaagatggcatcagcagagctttcccgtgaggaaaatgtgtacatggcgaactcgctgagcaggcggagaggtacgaggagatggttgagttcatggagaaggtagccaagactgttgactcggaggagctcactgtggaggagcgaaacctcttgtctgttgcatacaagaacgtcattggagcccgccgcgcctcat

SEQ ID NO: 55988 - DNA, 284 bp, Zea mays
ggcaaggtgtatgacatccccaagggccacatcgtcgcgacatcaccatccttcgccaacaggctgccccacatctacaagaaccctgactcatatgaccctgaccggttcggtcccggaagggaggaggacaaggctgcaggtgccttctcgtacatctccttcggtggtggcaggcatgggtgcctcggtgagcccttcgcctaccttcagatcaaggcgatctggacgcacctactgaggaactttgagttcgagctggtatcgccgttcccagagaacga

SEQ ID NO: 55989 - DNA, 283 bp, Zea mays
tgggcaaccccctcctcgacatctccgccgtcgtcgatgacgccttcctgacaaagtatgacatcaagctgaacaatgctattctcgctgaggagaagcacttgcctatgtatgacgagttggctagcaagagcaatgttgaatatattgccggaggagccacccagaactctatcagggttgcccaatggatgcttcaaactcctggtgcaacaagttacatgggatgcattggaaaggacgagtttggtgaggaaatgaagaaaaacgctcaagctgcagg

SEQ ID NO: 55990 - DNA, 278 bp, Zea mays
atgactgctcctccgtcacgcatcaggatgccctgaaagaactttggaggtaggcttaccctaacagacaacttcctcctctgaagtcagatctctggaaggagatgggctggcagaactacgatccatccacagattttagagcagctgggttcatgtccttggagagtctaatatattttgctagaaattacccagattcctttcacaggctactgcataaagcagatggtaagagagctgaatgggagtatccttttgcagtaggcggcgtaaac

SEQ ID NO: 55991 - DNA, 277 bp, Zea mays
atgactgctcctccgtcaagcatcaggatgccctgaaagaactttggaggttggcttaccctaacagacaacttcctcctctgaagtcagatctctggaaggagatgggctggcagaactctgatccatccacagattttagagcagctgggttcatgtccttggagaatctaatatattttgccagaaattacccagattcctttcacaggctactgcataaagcagatggtaagagagctgaatgggagtatcttttgcagtaggcggcgtaaac

SEQ ID NO: 55992 - DNA, 267 bp, Zea mays
gttccaggacttaaggttctcacaccatactcttcagaagatgcccgaggcttgcttaaagctgctattagagatcctgatcctgttattttcttggaaaatgaattgctttatggagaatctttcccagtttctgctgaagtgcttgattctagtttttgcctaccgattggcaaagctaagatagaacgtgggggtaaagatgttaccattactgcattctccaagatggttggctatgctctccaggctgcagagatactgtcc

SEQ ID NO: 55993 - DNA, 270 bp, Zea mays
tccgccagctacgcaacaccagacgctccagcagtcctgcactcggagctcgctcgcccgacggcccaccatgatcatccccaagaagaaccgcaatgagatctgcaagtacctcttcaaggagggcgtgctgtatgccaagaaggactacaacctggcgaacacccacagattgatgtgcccaaccttcaggtgatcaagctcatgcagagcttcaagtccaaggactatgtcagagagacctatctcctggcagtgactactactggt

SEQ ID NO: 55994 - DNA, 275 bp, Zea mays
cgccatctacgacgacctccgccgcaaggaccccgaactgtacaagaggaatgggttgctgcctatgctgaagaggaacacctcggtgaagctggcgcctcagcggtggcaggacaatgccggcgacggggtgtttgatatgataatgacctttgaggagagggtctttgacttggttgttgaagatatgaataaccgcgagccgaggttgatgaagtgtgtgctgataataaatatggatgtcaaagataaccatgaagaagctggtgttgggg

SEQ ID NO: 55995 - DNA, 273 bp, Zea mays
aaaagacgtgagccagcaggagttcgtcagagctctggcagccgtcctcacaaagtccgggaagctgaaagtccccgaatgggtggataccgtcaagctggccaagcacaaagagcttgctccctacgatggagactggttctacacgcgagctgcttccacagcgctgcacctggacctccggggtggcgctggggttggatccatgcaccaagatctatgggggacgtcagagagacggcgtcatgcccagccacttcagccgaggctcca

SEQ ID NO: 55996 - DNA, 276 bp, Zea mays
ctgatcttcagggtgacgaggatcaggcttacaggaaaatcaggctccgtgctgaagatgtgcaaggcaggaatgtgctcacaaacttctggggcatgaattttaccaccgataagctcagatctctagtaaagaagtggcagacattgattgaagcccatgttgatgtcaagacaaccgacaactacatgctgcgtttgttctgcattggttttaccaagaggcgcccaaaccaggtcaagagaacctgctatgctcaggcatcccagattcggc

SEQ ID NO: 55997 - DNA, 272 bp, Zea mays
ccgcacgagaccttggcaaagcatcttttccactgggagacaaatccgttgagttgggcaatgaggacgagggctgcattttatgtggcacaggcgttggaatactgcagtagcaaagggagggcactctatcatgacctgcatgcatacagggtcgtcttcgatgcggaaggtaacccaagactatcatgttttggtctgatgaagaacagccgtgatggaaagagctacagtactaatttggccttcacgcctcctgagtatcttaagac

SEQ ID NO: 55998 - DNA, 274 bp, Zea mays
cagtcacagtctgaaatgccagagcaatcagaaccatctagcatggcttcagacgcagcctctgacattgcctcggaggacggtgcttcaacgacagcaccatctgagttggatgaggtgaactcgctgtctgatagcgtatccaatttgacaacggatgatgctacttcaaacgccccatccactgaaaacggaaatggtgtggcagggtcctgatggttatagttatgcagacccagttctttttcccacacacagtgctgctttttttata

SEQ ID NO: 55999 - DNA, 278 bp, Zea mays
ccgccacctacgcaacaccagacgctccagcagtccagcactcggagctcgcgcgcccgacggcccaccatgatcatccccaagaagagccgcgatgagatctgcaagtacctcttcaaggagggcgtgctgtatgccaagaaggactacaacctggcgaagcacccacagattgatgtgccctaccttcaggtgatcaagctcatgcagagcttcaagtccaaggagtatgtcagagagaccttctcctggcaggtatactactggtaactcaccaa

SEQ ID NO: 56000 - DNA, 273 bp, Zea mays
aagcgttaccctatgaatgatgcagcgggaacaataaatgaaattggggcaacaatccgaagggtgatgggtggaacaagtggaatcttgtatgccatactctgcaaggctgcgtatgcaagcttaaagcagagctcaactgtcactgcgaataaatgggctgatgctttagaggcctccattgctgctgttagcaaatatggtggtgccagcgcaggataccgcacaatgttggatgccctaattcctgcttctgctgttctgaaacagaga

SEQ ID NO: 56001 - DNA, 272 bp, Zea mays
tgcacaatccccttcgccgccgccaagatggtgaacgttcctaagaccaagaagacgtactgcaagaacaaagagtgcaagatgcacacactccacaaggtgactcagtataagaagggcaaggatagcctgtctgcccagggaaagcgccgttatgaccgcaagcagtcaggatatggtggtcagaccaagcctgtcttccacaagaaggccaagaccaccaagaagattgttctgaagctgcagtgccagagctgcaagcgactactcac

SEQ ID NO: 56002 - DNA, 271 bp, Zea mays
agagaatccccaagcaaacaaacagggtagagggagaggagaggagaggagaggagaggttgggtctgggacaccatggctccgatgaagctgtacggggcggtgatgtcgtggaacgtgacgaggtgcgcaacggcgctggaggaggctggctccgactacgagatcgtgcccatcaacttcgccaccgccgagcacaagagccccgagcacctcgtccgcaacccgtttggtcaggttccagctctgcaggatggtgacttgtacctct

SEQ ID NO: 56003 - DNA, 272 bp, Zea mays
cgattgcatcacaggaacttggttaagctgataggtatatgcacagaggggcatagccgatgtttggtatatgagcttgttccaaatggcagtgtggaatctcacttgcatggatcagataagggagccgctcggtttgactgggacgctaggctcaaaatcgcactaggtgcagcacgtggacttgcatatttgcatgaagattcaagcccacgtgtcatacaccgcgatttcaagtccagcaacatcttactggaacatgacttcacccc

SEQ ID NO: 56004 - DNA, 271 bp, Zea mays
acaagcggtacttctgaagtcatccaatgtgttggatcactggataaactcagcaactgaaagtctagttagctttgttcaccaggagatggatgcatatcgtctttacacggttgtgccatatttggtaaaatacattgactatcttactaacatatatgtgcgcttgaaccgcaaacggttcaaaggacgtactggagaagaagactgcagaatttctctctcaacactctaccatgttctcgtaacaacttgcgtggtgatggctcca

SEQ ID NO: 56005 - DNA, 277 bp, Zea mays
gagacatttggaatacccatacctggttgtgcgaaaaacccaaagaaactagctgaagctgtggacaaggtcattgttccggatttccatccaaaagagggtgttaagatagagacagatgagaaggctactagcctatcctctgcgtccgttgatgatgctgccgtcattgaagagcttattgcaaagctgcaagcaatttctaaaacattgtcaccaggattccgtatgaaccctatacagtttgagaaggatgatgataccaatttccatatgg

SEQ ID NO: 56006 - DNA, 271 bp, Zea mays
  unsure (1)..(271): unsure at all n locations
tggaatctggttccccaaacttccctcaacaaggaacctagtccacaggttttgagcatcatcaataccctttgctcagatagtagaaacatcgtttttcttgtcagtggtcgagacaaagataccttgggaaagtggttctcctcatgtccaagattggggattgcagctgaacatggttacttcttgaggtggtctagagaagaagagtggcaaacatgcactcaggcattggacttcggatggatgcaaatggcgaacagntgatgaa

SEQ ID NO: 56007 - DNA, 276 bp, Zea mays
cgcgcctgtccactttccccgtgcttctccgccgtcgaggccgcgtcccagtgcgaagagaccacgactcatatggccagccgctgggtccggcccgaggtgtacccgctgttcgcggcaacgggcgtggccgtcggcatctgctgatttcagctcttccggaacatcaccggcaacccggaagtcagggtaaactaggcagggagggcaactggtgtgcttgataaccatgaggaggggaggcgttacgccatgcatggcctaatatgctttgtg

SEQ ID NO: 56008 - DNA, 267 bp, Zea mays
agcgcaatggcatcacgccgacgagcgagctcaccatcctcgagcacgacggtgactcctacgtggcggagattgacggcaaggtcattgtaaagatcgggtccaggtacgacgtcggccatctcatcccggcgggttttgatgtcgccgcccacggcaacgactacgccgtctgggagaaagccggcgccgaacaagtgactcgagcataatagagtgctcgagattacgaattggatcctcagtccaatgtccacgggactgcat

SEQ ID NO: 56009 - DNA, 272 bp, Zea mays
gcagcgcttgcggtcgtccctcagccgcgtcgcaccgcatcgcattctacgattcgaagctctctgctcgcaggggaccatggcgaagaactacccaaccgtgagcgccgagtacagcgaggccgtcgagaaggccaggcgcaagcaccgcgccctcatcgccgagaagagctgcgcacccctcatgctccgcctcgcgtggcactccgcggggacgttcgacgtgtcgtcgaggaccggcggtcccttcggtaccatgaagtgcccggcgg

SEQ ID NO: 56010 - DNA, 269 bp, Zea mays
cacgaacccttccctgacagcggcggcgacatggtgctcgaggcgacgatgatctgcatagacaactcggagtggatgcggaacggcgactacgccccgtcgcggttccaggcgcaggccgatgccgtcaacctcatatgcggtgccaagacccagtcgaacccggagaacacagtaggcgtgatgacgatggccgggaagggcgtccgcgtgcttgtcactcccaccagcgacctcgggaagattctcgcctgtatgcacgggttgga

SEQ ID NO: 56011 - DNA, 270 bp, Zea mays
actcgagccgctcgagccgagggcgatggcgcaaactagcctgcctcctggatttcgtttccacccaactcatgtagacattgtttcctactatttgaagaggaagattatgggaaagaagcttattgtagacgctatatcagaggttgatctctacaagtttcctccctgggatctccctgaaaagtcctctcttcgaagcaaagatcttgaatggttcttcttttgtcctcgtgacaagaagtaccctaatgggtctaggacaaaccg

SEQ ID NO: 56012 - DNA, 268 bp, Zea mays
tgtgcatgttgttgttggtacacctggtcgtgtgtttgatatgctgcgcagacagtccctccgccctgataacatcaagatgtttgttctagatgaagctgatgaaatgctttctcgtggtttcaaggatcagatttacgacatcttccagcttctcccagccaagattcaggttggagtcttctctgctaccatgcccccggaggcccttgagattacccgcaagttcatgaacaagccagtgagaatcctcgtgaagagagatgag

SEQ ID NO: 56013 - DNA, 132 bp, Zea mays
cggatgtcagattgctgaaggaaatgggcatggacgcatataggttctctatctcttggcctagaatactgcctaagggaacggtcgaaggaggtattaaccaggatggcatcgattactacaaaaggctca

SEQ ID NO: 56014 - DNA, 272 bp, Zea mays
tcgacacaaacccttgtgaagagtgccattgtgcaagttgatgctgccccattcaagcagtggtacctcactcatgatggagtcgacattggtaggaagaagaaaacccctgctgcaaagaaggataatgctgatggacaagaggttgaggcagcagctcaggaaacgaaaaagagcagaccatgtcacgaggaagcttgagcagcgcaaggagggacgtacccttgacccacacattgaggagcaatttcgcattggacggttgctagcat

SEQ ID NO: 56015 - DNA, 268 bp, Zea mays
gcttttattgttgaatatgggaaagacagggatgttgaactaggttttcatgttgatgattcagaagttacattaaatgtgtgccttggaaaacaattctttggtggtgaattatactttcgaggtattcggtgtgagaatcatgtgaattcagagacacaacatgaggaaatgtatgactacacacatattcctggttgggctgtactccaccatggtcgacacaggcatggtgctcgagctacttcatctggtctcagaataaatc

SEQ ID NO: 56016 - DNA, 267 bp, Zea mays
gcttcacgccggcaaccgctaccgcctcgtcgccgcgctccgcggccacatctccgcctccgcgcgcccgctccacggcctcgtcctccttcatggcggggaggagaagacacggtactgcaccgatcacctcgagctcttcaggcaggagagctacttcgcctatctctttggagtgcaggaaccagggttctacggcgcaattgacatcgcctctggacagtcaattttgttcgctccaagtatgccagctgactatgctgtttg

SEQ ID NO: 56017 - DNA, 270 bp, Zea mays
attgtctgctgcctgctcgtgaaatctattctgatgggtcataccgtgcaggacgtagctatgatggctctgtttgggatatttatttggacgctgatcgaatacactttgcaccgcttcctgttccacatcgagaccaagacctactggtggaacaccgcacattaccttcttcacgggtgccaccataagcaccccatggactcgctcaggcttgtgtttcctcctactgcaacagcaattttgtgtttcccgttctggaacctggtc

SEQ ID NO: 56018 - DNA, 267 bp, Zea mays
tcccatatccgctcccctacctctccagcatctcccgtctccgtcgtctcgtctctgctcctcacctcgccgccagccatgggcaagatcaagatcggaatcaacggtttcggaaggatcggcaggctcgtggccagggtcgccctgcagagcgaggatgtcgagctcgtcgccgtcaacgaccccttcatcaccacggattacatgacctacatgttcaagtacgacaccgtgcacggccaatggaagcacagcgacatcaccctc

SEQ ID NO: 56019 - DNA, 265 bp, Zea mays
gccaagggtgtggagaagggattccctcttctttcccttcttagcagcatcctcccagtctacaaggaggtcattgctgagttgaaggcagctggggcttcatggattcagtttgatgagcccactcttgtcctcgaccttgaatctgacaaatgggctgcattctctgctgcatacgcagaacttgaatctgtactttctggattgaatgtgcttgttgagacttactttgctgatgttcctgctgagtcctacaagaccctaa

SEQ ID NO: 56020 - DNA, 266 bp, Zea mays
gcggcgggtactacggcggcggtggcatcgcgacgccggggtacgctccggcggtcccgtacgggatgtcgcaggtgaacatcgagggcaacgggtgcgggcgggcgctgccgccgcagccgaccgtgaaggtgtactgccgcgccaaccccaactacgccatgagcgtccgcgacgggaaggtggtgctggcgccggcgaaccccaaggacgagtaccagcactggatcaaggacatgcggtggagcacgagcatcaaggacgag

SEQ ID NO: 56021 - DNA, 173 bp, Zea mays
cgagaagtcccacatcaacattgtggttattggccatgtcgactctggcaagtcgaccaccacaggacaccttatctacaagcttggaggcattgacaagcgtgtgatcgaaaggtttgaaaaggaggctgctgaaatgaacaagcggtccttcaagtacgcgtgggtgctcg

SEQ ID NO: 56022 - DNA, 269 bp, Zea mays
tcccatatccgctcccctacctctccagcatctcccgtctccgtcgtctcgtctctgctcctcacctcgccgccagccatgggcaagatcaagatcggaatcaacggtttcggaaggatcggcaggctcgtggccagggtcgccctgcagagcgaggatgttcgagctcgtcgccgtccacgaccccttcatcaccacggattacatgacctacatgttcaagtacgacaccgtgcacggccaatggaagcacagcgacatcaccctca

SEQ ID NO: 56023 - DNA, 266 bp, Zea mays
gtgatatgcaattcggtcgagatgtttggcctgcagtctgtgctgctatggactatatggatcagtttgaccgtgatggtgatggtctcattgagaatgatggatttcctgatcaaacctatgatgcttggactgttcatggaatcagtgcttactgtggttgtctttggcttgctgcacttcaagctgcagctacaatggctcatcgccttggggatcggcactttgctgagaagtacaagctcaagtttataaaagccaaagca

SEQ ID NO: 56024 - DNA, 253 bp, Zea mays
ggagttcaaggagaagaaccctaagaacaagtctgtcgctgcggtggggaaagctgctggcgacaggtggaaatccctgagcgagtcggacaaggctccctatgtagccaaggctaacaagctcaagctcgagtacaacaaggccatcgctgcctacaacaagggcgagagcactgcagctaagaaggctcctgccaaggaggaagaggaggaagatgaagaggagtctgacaagtccaagtcggaggtcaat

SEQ ID NO: 56025 - DNA, 266 bp, Zea mays
gtctgcttcgcagagagccagccatggcgatctcccagatctcacgcatagtccttgccatccgtctcctggccgtcgccttcgccgccgcgccagctgcgcttgcggacggcgatgacgtggtggcccttaccgaatccacgttcgagaaggaggtcgcaaatgaccgcggcgccctcgtcgagttctacgccccctggtgtggtcactgcaagaagcttgctcctgagtatgatagacttggtgcaagtgctaagaaagctaaa

SEQ ID NO: 56026 - DNA, 216 bp, Zea mays
atcaaaactagaagatgctgccacctgttcaaagatgacaataaagaagaaagaaggtggtgtgctaaaaatggaaggtgcaaatgaaggaaggaaaggtgtactatctatgaatgctgagatccttgaagtaatcctgctttccatcttgtagagattaagaaaaataatggggatacactagaatatgaaaatttgtttaagcaggacatgaaa

SEQ ID NO: 56027 - DNA, 264 bp, Zea mays
caggaatatccagaagatcacaaaggctatgaagatggttgcagcatcaaagctccgggcagttcagacaaggactgaaaattcacgtggcttgtggcaaccgttcaccgcccttcttggggatgctcctagtgttgacgtcaagaagaatgtgattgtgggcaataactctgaataagggactctgtggtggaattaattcaccatcagtgaaagttagcagggcccttcacaaattgacatctggtccagaaaaagaaacca

SEQ ID NO: 56028 - DNA, 266 bp, Zea mays
tcccagcaatccctagcagaagccttccatcctcactcgctcgatggcccgcacgaagcagacggcgaggaagtccaccggcggcaaggcgccgaggaagcagctggcgactaaggcggcccgcaagtctgcccctgcgaccggcggagttaagaagccccaccgcttccgccccggcaccgtcgcgctccgggagatccgcaagtaccagaagagcacggagctgctgatccgcaagctgccgttccagcgcctggtgcgggaga

SEQ ID NO: 56029 - DNA, 259 bp, Zea mays
gttaggcaccttgcttcaagtggtgtggatgtatttactgctctttctggtggtgttggagctctatatggtcctctgcatggcggcgaaacgaggcagtacttaaaatgtgaaatgagattggaagcatggaaaatatcccagattccatggtaggagtgaagaccaggaagaggaagatttccggtttggggcaccgtgtgtataaaaactatgaccctcgtgctaaagtcataaggaaattggcagatgaggtgtt

SEQ ID NO: 56030 - DNA, 265 bp, Zea mays
ctgcaccaagaccaacatggtcatggtctttggtgagatcaccaccaaggccaatgttgactacgagaagattgtcagggagacctgccgcaacattggttttgtgtcaaacgatgttgggcttgacgccgaccactgcaaggtgctcgtgaacattgagcagcagtcccctgatattgctcagggtgtgcatggccacttcaccaagcgccccgaggagattggagctggtgaccagggacacatgttcgggtatgcgaccgat

SEQ ID NO: 56031 - DNA, 289 bp, Zea mays
agctgggttccacactgcggtcaaccggagaatctctctcaggttgtccaaaaagaaggcgaccagagcccgcatctcgatgatgcctattggtactccacgtgtgccttaccgaacacctggtgaaggaacctggcaatggcttgacatatggaacgctctgtaccgtgagcggattatcttcattggggacaatatagatgaagaattcagcaaccaagtgttggcaagcatgctctatcttgacagcattgataattccaaaaagataatgctatacattaatgga

SEQ ID NO: 56032 - DNA, 287 bp, Zea mays
ggtatggaacagcatggcgtacgacggggacaacaagcccgagtacgaccaggacccgcaccggcaggcgctggtggactgggtcgacagggtgggcggggcggcgtcgccggccaccgtcttcgacttcaccaccaagggcatcctcaacgccgccgtcgaaggcgagctatggcggctcatcgacccgcaggggaaggcgccgggagtcatcggctggtggcctgccaaggccgtcacctttgtcgacaaccacgacaccggctccacgcaggccatgtggccgt

SEQ ID NO: 56033 - DNA, 288 bp, Zea mays
aggatcttgaggctgctggtattcaggtgatccagattgatgaggcagctctaagggagggtctgccactgcgcaagtcagagcatgcattctacctggactgggctgtccactctttcagaatcaccaactgcggagtccaggacaccacccagatccacacccatatgtgctactccaacttcaattacatcatccactccatcatcgacatggacgcagatgtgatcaccatcgagaactcccggtccgacgagaagctactgtccgtgttccgcgagggtgtga

SEQ ID NO: 56034 - DNA, 288 bp, Zea mays
  unsure (1)..(288): unsure at all n locations
agtncacccaagcttccctttagttcatcctcgcaccagcgacgcagcatcccgtagaccgagcaaggcaacccaccactgagaggcacgcagaggagcaggaagccggagaccaagatgtcgtcggtgttcagcggcgatgagacggcgcccttcttcggtttcctcggcgccgccgccgcactcaacagctcatgcatgggcgcacgtacgggaccgcgaagagcggcgtcggcgtggcgtcgatgggtgtgatgcggccggagctcgtcatgaagtccatcgtgg

SEQ ID NO: 56035 - DNA, 284 bp, Zea mays
aaaactctggtgctccctgtacctgcctttaatgtgattaatggagggtcacatgctggaaacaagcttgccatgcaggagttcatgatcctcccaactggtgcctcctcgttcaaggaggccatgaagatgggagttgaggtgtaccacaacctgaagagcataatcaagaagaagtacggtcaggatgcgacaaacgttggggatgaaggtggttttgcacctaacattcaggaaaacaaagaaggccttgaactattgaaggcagccatagaaaaggctgg

SEQ ID NO: 56036 - DNA, 285 bp, Zea mays
catcctactgtcacacacacacacacacacagacaagtggtttccaaagccaagtgtgtgtactagcaaccagctagctcgggcggcagcaggcagccatcatgtcggaggagaagcaccaccacttcttcaaccaccacaagaaggacgaggagcagcccgccggcgagtacgggtactccgagaccgaggtggtcaccgccaccggcgagggcgagtacgagaggtacaagaaggaggagaaggagcacaagcacaagcagcacctcggcgaggccggcgcca

SEQ ID NO: 56037 - DNA, 282 bp, Zea mays
aagaattccctcccctagccgccgccgccgccgctcgtctccctgagaggtgccgagaccgaggaactggccgagtactaggtagagaatcggtttttcttgtctcagcccggggtctgctgcgtctggtggtggtgaaggggagaaattcgtgagatctgttccggatcaggcgtgcgagctcgggaatcaggggtttcacacatagcttcgtcgatttgaatttgatgtactaatggagtctaagggtggcaaaaagtctagcagtagtcgttctatgat

SEQ ID NO: 56038 - DNA, 284 bp, Zea mays
gttcctcgctatgaagatggaaattttgttggcccaaccattctggctgatgttaaaagtgacatggagtgttacaaggaggaaatatttggtccagtgcttctcttaatgaaggcggagagcctagaagatgccatccaaatcataaacagaaacaagtatggcaatggtgcttccatatttacaacatctggcgtctctgccaggaaatttcaaacagacattgaagctggccaggtgggcatcaacgtgccgattccagtccccctgccgttcttctcctt

SEQ ID NO: 56039 - DNA, 275 bp, Zea mays
gttcctcgctatgaagatggaaattttgttggcccaaccattctggctgatgttaaaagtgacatggagtgttacaaggaggaaatatttggtccagtgcttctcttaatgaaggcggagagcctagaagatgccatccaaatcataaacagaaacaagtatggcaatggtgcttccatatttacaacatctggcgtctctgccaggaaatttcaaacagacattgaagctggccaggtgggcatcaacgtgccgattccagtccccctgccgtt

SEQ ID NO: 56040 - DNA, 276 bp, Zea mays
ggccgctcgcgatctagaactagatgacacagctgctttcaaaaacttcaataagtggggcaatattgtgtttcccctaccatttggaagagttctcagtccctccgaaagttttatccatgaactggatgagaagacaagtgcttctctgaaattcacggtactgaacccaaaaggacgcatctggacaatggttgcaggtggtggtgctagtgtcatatacgcagacactgttggtgatttgggatatgcttcggagctaggaaattatgcaga

SEQ ID NO: 56041 - DNA, 282 bp, Zea mays
gcagaggacgtggggctgtacgccctctgggatcagcttatggggctgctgcctcacgtaagtccacattgaagccattacactgggttaaagtgacaagggcccttcaaggtagtctgtgggaagaattgcagcgcaacgatgactcacagagtgtttcagagtttgatatatcagaacttgagagcctttttcctgcagatgttccgaagtccgatgacagctcaaaatctgaacgtagaaaatcacttggatcaaaaccagaaaaagtgcacctaattg

SEQ ID NO: 56042 - DNA, 281 bp, Zea mays
ctttattcgttccccgcctcaccccgagccagccgtctcgctagggtttctccgccgccgccgccgccgccatgcctcgccgcagctcaggaaggtctgccccacgcccagctccccgtgctgctccagtgaggaacccgccacagccagcacgccaggctcctcctccagctcctgttcgagatggtggtgaacccatgtttggaggaattgggtccaccattgctcaaggtatggcgtttggcacgggtagtgccatggcacacagggctgttgatgct

SEQ ID NO: 56043 - DNA, 281 bp, Zea mays
gtttcggaaacaagtacccgaagcgccctcatcacagaggcgcgtcgatacctcacaacggcgtcaagtatgggtgcaaaggagattacaagtggagggacacaaagaaggcaaaccctaacatccttgtcggagcaatggtggctggccccgacaggcgtgatggctacaaagatgtccgcacgaactacaactacacggagcctactctcgcagcgaatgctggtctggttgcagcgctgatctctatatccgatatcaaaaccggacggttcggcatc

SEQ ID NO: 56044 - DNA, 277 bp, Zea mays
atttagaagcgcccctcctcctctcccccatccgtacccaatctaatcgacacccggccgagatgggccgcaagttcttcgttggtggcaactggaaatgcaatggaaccgcagatcaggttgagaagattgtcaaaaccctgaatgaaggaaatgttccctcttcagatgttgttgaggttgttgtcagtcctccttatgtgttcctcccggtggtcaagagccagctgcgccaagagttccaagttgctgctcagaactgctgggtgaagaaggg

SEQ ID NO: 56045 - DNA, 280 bp, Zea mays
agcaagaagatgaagatctccagggaaatctctgacgccagtgggaagacgatcccagtggaagagatcctaacgatcgacgtgaagccggggtggaagaagggcaccaagatcacgttcccggagaagggcaacgagacgcccaacacgatcccggcggacctcgtcttcatcatcgacgagaagccgcacccggtgttcacccgcgacggcaacgacctggtggtgacccagaagatcccgctggcggaggcgctgacggggtacaccgcgcacgtga

SEQ ID NO: 56046 - DNA, 274 bp, Zea mays
ggagaagtttgaggggctgtgcaaggtcatcaaggaggttctgggtgacaaagttgagaatgtggtggtgtctgatcgcgttgtggactcaccgtgctgccttgtgactggcgagtatggctggaccgccaacatggagaggatcatgaaggcacaagccctgagggactcgagcatggcgggctacatgtcgagcaaaaagacaatggagatcaacccagagaaccctatcatggatgagctccgcaagcgtgccgaggctgacaagaatgac

SEQ ID NO: 56047 - DNA, 277 bp, Zea mays
cggctcgagacacaagatagctagctaggaacaatggagcagaaggttctcgtcgccgtgggcgtggccgtgctactcgtcgtcgtcctctccaagctcaagtatgtgctcgtcaccaagccgaagcttaacctgcccccagggccatggacgctaccattaataggtagcacccaccacctggtcaccagcccgtcgatctaccgggcgatgcgtgatctcgcgcaaaagtacgggccgctgatgatgctccggctgggcgaggtgcccacgttgg

SEQ ID NO: 56048 - DNA, 277 bp, Zea mays
ctcccgcaactgccgccgccactcccacgctcgcagccatgccgcccaagctcgacccgtcgcaggtggtggaggtgttcgtccgtgtgaccggcggcgaggtcggcgcacgtcttcgctggcccccaagatcggcccgctcggtctttcccccaagaagatcggagaggacatcgccaaggagacggccaaggactggaagggcctccgcgtcaccgtcaagctcaccgtccagaaccggcaggccaaggtctccgtcgtcccctccgccgcggcg

SEQ ID NO: 56049 - DNA, 275 bp, Zea mays
gtggacctctatgtccccaggaagtgctcggccacaaacaggatcatcactgccaaggaccatgcctctgtccagatcaacattggccacttggatgcgaatggcctgtatgatggtcacttcacaacgtttgctctctctgggtttgtgccgtgctcagggcgacgcagacagctccttggacaggctgttgcagaagaagaaggctgatatcaagcagtagattttacatctagtttaccaagaattggacactgccttagctatgttttgaa

SEQ ID NO: 56050 - DNA, 274 bp, Zea mays
gtgggcggcggctgcgactgcaacacctgcaagtgcggcaccagctgcggctgctcctgctgcagctgcaactgagctggcccggcccggcgatggcgcacgagagtcgagaggaggaggacgacgacgaggcgtataaatataatagcggcgtccagtaaatacgatcatgtcaactgcacccgccattatccatggtcgctcgctcctcgcctgcgtctcctggtcctggggttcgtctgaacgtcctcgcggcttcacgacggcgatgccg

SEQ ID NO: 56051 - DNA, 267 bp, Zea mays
actccacccaatcgaaggacctagcgagcggcacggcggcggcgatcggagaagatggtgcgcaaggcgaaggttgagttcgacgagcagccgccggataacttcgacccgaagaacccgtatgccgacccggtggcgatgctcgagtaccgggaacacctggtgcgagagaagtggatccagatcgagaccgccaagatcatccgggagcgcctccgctggtgctaccgcatcgagggcatcaaccaccaccagaagtgccgccac

SEQ ID NO: 56052 - DNA, 276 bp, Zea mays
aagatttggaaaattaagaaactgatcaaggcattggaatcagccagaggcaatggcacaagcatgatctctctaatcatgcctccacgtgatcaggttgctcgagtggctaagatgttaggtgatgaatatggtactgcttcgaacatcaagagtagagttaatcgtcaatctgtgttggctgccatcacctcagctcagcagaggttgaagctctacaacaaagtgcctcctaacggattggttctgtacactggaactattgttactgaagac

SEQ ID NO: 56053 - DNA, 272 bp, Zea mays
atgcatgagagagatgttaacgaacttttggagaaatgccacccattgggcatgtttgacagcattgcatcacttgctgttgctcaaaacatgcgtgagctttatagattggttctagtcgatacaccactggcccctttattctcagagtgcattacatctgaggatttggatgacatgaatattgagattatgaggaacactctctacaaagcatatcttgaggacttctacaaattttgccagaaactaggtggtgcaacagctgagat

SEQ ID NO: 56054 - DNA, 274 bp, Zea mays
cagcagctcttgcggtcgtccctcagccgcgtcgcaccgcatcgcattctacgattcgaagctctctgctcgcaggggaccatggcgaagaactacccaaccgtgagcgccgagtacagcgaggccgtcgagaaggccaggcgcaagctccgcgccctcatcgccgagaagagctgcgcacccctcatgctccgcctcgcgtggcactccgcggggacgttcgacgtgtcgtcgaggaccggcggtcccttcggtaccatgaagtgcccggcgg

SEQ ID NO: 56055 - DNA, 272 bp, Zea mays
attgacgaggagatccgcaagcttgatgagaaaattgctgatgcggaggagaacttgggtgagagcgaagtccgtgaagcacatcttgccaaatctttgtactttataagggtcggtgagaaggaaaaggccctggaacagcttaaagtcactgaaggaaaaactgtagctgttggccaaaagatggatcttgtgttccacactttgcagattggttttttctacatggattttgatctgatatcaaaatccatcgataaggcaaagaactt

SEQ ID NO: 56056 - DNA, 277 bp, Zea mays
aaactctctctaccgtccgataccccaagcaccagcgcggcggcggcgaccatggctgtcggaaagaacaagaggatctccaagggaaagaagggtggcaagaaaaagaccgtcgaccctttctctaagaaggattggtatgacatcaaggcaccgtcggtgttcagtgtgcgcaacatcgggaagactctcgtatccaggacacagggtaccaggattgcttctgagggtctgaagcacagagtctttgaggtttgcctagctgatcttcagggcg

SEQ ID NO: 56057 - DNA, 275 bp, Zea mays
cgaaaccagatcgccacgacaagggccgaggggcccggaggggcgcgtaagcaatggcggcaggctaccgggccgaggacgattacgattacctcttcaaggtggtcctgatcggcgactccggcgtcggcaagtccaacttgctctcacgcttcacgcgcaacgagttcagcctcgagtccaagtccaccatcggcgtcgagttcgccactcgctctctccaggtcgacggcaaggtcgtcaaggcccagatttgggacaccgccggccaggaa

SEQ ID NO: 56058 - DNA, 276 bp, Zea mays
gcgcggaggccgcaagatgcctggagttactgtaaaagacgtgaaccagcaggagttcgtcagagctctggcagccttcctcaaaaagtccgggaagctgaaagtccccgaatgggtggataccgtcaagctggccaagcacaaagagcttgctccctacgatgagaactggttctacacgcgagctgcttccacagcgcggcacctgtacctccggggtggcgctggggttggctccatgaccaagatctatgcacggacgtcagagaaacggcg

SEQ ID NO: 56059 - DNA, 276 bp, Zea mays
  unsure (1)..(276): unsure at all n locations
ctggaagcagcgttggtttcgtggagaccctagagaatgatcttttggagcatcgaggcaagggtattgatgcacagattgcatctggtggtggaaggatatatgttaccatggaccgttatgagaatgactgggatgtggttaaacgtggctgggatgctcaggtgctcggagaagcaccctactgtaacanaagtgcacttgaggctgtgaaaacagtgagagcacagcccaaggctaatgatcaatacttgcccccatttgtgatagttgatg

SEQ ID NO: 56060 - DNA, 274 bp, Zea mays
agtcgactctggcaagtcgaccaccacaggacaccttatctacaagcatggaggcattgacaagcgtgtgatcgagaggttcgagaaggaggctgctgaaatgaacaagcggtccttcaagtacgcgtgggtgctcgacaagctcaaggctgagcgtgagagaggtatcaccattgatatcgctctgtggaagtttgagaccaccaagtactactgcacggtcattgatgcccctggacaccgtgacttcatcaagaacatgatcactggtacc

SEQ ID NO: 56061 - DNA, 269 bp, Zea mays
gtcgccgccgccctaagccacgtgctgaggctttcgttggtctcttcgccggcgacgagcacccagttctgtagaaatggctgatggtgaggacatccagcctcttgtctgcgacaatggcactggaatggtcaaggctggttttgctggcgatgatgcaccaagggcggttttccctagcattgttggccgtcctcgccacactggtgtcatggtagggatgggacagaaggacgcatatgttggcgatgaggcacagtccaagagag

SEQ ID NO: 56062 - DNA, 267 bp, Zea mays
aacatttactctagtgctctgaaggcgacactaacttggcagaatatgattacgattcaggagtgtcgcgaggcctgtggaggtcaaggtctgaacactgagaaccgcataggaattttcaaatctgaatttgatgtccagtctacatttgagggtgataacaatgtgctaatgcagcaggtaagcaaagcgctttatgctgaattttagggtgcacaaaagaagcagcagccattcaagggattgggtttggaacacttaaatggc

SEQ ID NO: 56063 - DNA, 267 bp, Zea mays
accttgcggattacaacatccagaaggagagcaccctccacttggtgctgcgtctcaggggcggcatgcagatcttcgtgaagacacttactggcaagacaatcacccttgaggtggagtcctcggacaccattgacaacgtcaaggccaagatccaggacaaggagggcatcccaccggaccaacagcgcctgatcttcgccggcaagcagctggaggatggtcgcatcttcggagttccaacatccagaaggagagcaccctcca

SEQ ID NO: 56064 - DNA, 182 bp, Zea mays
acgaggtctacctgcgcgagggctgcattcaatgatgtgtatattgcatatgaattgatggatactgatctgcatcaaattattcgatcaatcaagactttgtacagaggagcactgtacagtattttactttatcaaattcttcgtggcttgaagtatatacattcagcaaatgttcttca

SEQ ID NO: 56065 - DNA, 182 bp, Zea mays
ttatgctgaactcccagaggcggtggaccttttatacaaaggaactatgagagttttgcttgtgttactgcatgactttacctgaatttatttgtgattaccacttcagtttctgtgatgtgattacttcaagttgcattcaaatgcgcaatgtcattacttagtgcttttaccagtaacat

SEQ ID NO: 56066 - DNA, 176 bp, Zea mays
gtgccagagtcacgctctaccccgactcaccgccttcctcttccagtccccgcgcgcgagctcgccgccccgtgtggctcctagcacccgatggcctcgcgccgccgcaccctgctcaaggtcatcatcctcggcgatcgtggggttgggaagacttccttgatgaaccaatatgt

SEQ ID NO: 56067 - DNA, 183 bp, Zea mays
acaagtttgtggccaatgaaccaaccactaagggtggcacctactatcctcttactgtacagaacgctctgcgagctcaggacatgcttcggagtgcaaactgccttggctatatctacgttgacagcggaggtgctaatactacccaggcggctgacgttttacctgaacgtgataattttg

SEQ ID NO: 56068 - DNA, 175 bp, Zea mays
gtagacgaagatcaaggaggtttcacatgagtggcaattggttaacaagcagaagcctatctggatgaggaagcctgaggatattaccacggaagagtatgactgctttactacaagagcttgaccaacgactgggcagatgctctcgacgtgaagcacttctctgttgagggtc

SEQ ID NO: 56069 - DNA, 173 bp, Zea mays
gtcgttgcagacggtgctacgccctggttcccagcgtgcaaacgagtgcaggatggctgcgttgtttgctggcttccctaaaccgtccctgttagaactgtcaaccgccagtgttcatctgggctacaggcagtagcgatagtcgcgctgctataacggctggttactaatga

SEQ ID NO: 56070 - DNA, 188 bp, Zea mays
catacgacacaagctctcgcctaccccagctctacccgcgacgaagcatcaccaggtaggatgacgggctacaatggatctccggccaaggcggttcagcttcgacctgtgccgaccgcacagtatgctggagaagaacgggctcaaactcccgggattcaggaagaccggaacaaccatcgtcggcc

SEQ ID NO: 56071 - DNA, 205 bp, Zea mays
gcagaagacgacggtgctcgattcggctcggtgtgcgccaggacatcgttgccatgagaatccgcagacattatcgtgcagtctgctaggccctatggcacgagggctgtacctcaagtttgcgcatacactggtgcccatgccattgctggcaggcacactacctggtacattcaccaaccagttgcaaaccaccttcagtgag

SEQ ID NO: 56072 - DNA, 179 bp, Zea mays
gcactctcaaccgtccgagaccccaagcaccagcgcggcggcggagggcggcggcgaccatggctgtcggaaagaacaagaggatctccaagggcaagaagggtggcaagaaaaagaccgtcgaccctttctctaagaaggattggtatgacatcaaggcaccgtcgggttacagtgtg

SEQ ID NO: 56073 - DNA, 154 bp, Zea mays
gtggacctctatgtccccaggaagtgctcggccacaaacaggatcatcactgccaggaccatgctctgacagatcacttggccactggcatgcgatggctgtatgatggtcattcacaagttgtctctcgggttgtcgtgctcaggcgagcgac

SEQ ID NO: 56074 - DNA, 175 bp, Zea mays
tctacaggtatatctagaactgaaccctcagcagacattccattggactattccccattaaatccagtatgtgctattatggatccataccctgaactgccgaagtatcccaacaaacaactgtgaaaatagaactactggtagagaagtcagaacattgtccggatgattatac

SEQ ID NO: 56075 - DNA, 166 bp, Zea mays
acgagggaggtatgtggtgctcgatgagtacggcaaccccaaagttgtgcatgatggagtcactattgcccgtgcattgagctgtatgatccaatggaaaatgctggtgcagcattgattcgtgaggttgctagcaagaccaatgattcagctggtgatgggacta

SEQ ID NO: 56076 - DNA, 163 bp, Zea mays
cgccatcttatcctgactgacccgaggactgatcatcagcccattaaggagtactgcccttggacacattcccacctcgccttctgtgatactgattcccctatgcgctatgttgatatacggcattcccgccaataacaaggggcaacagagcattggttgt

SEQ ID NO: 56077 - DNA, 172 bp, Zea mays
gaccacgaactgggcgcgtacgggctcgatctggcccatgaccttcgggctcgactgctgcgcggtggagatgatgcacgccgagcgcgtcccgctacgacttcgaccggttcggcgtcatcttccgtccgtcgacgagccagtaccgattgcatgatcgtcgacggcagct

SEQ ID NO: 56078 - DNA, 172 bp, Zea mays
gacgttcacggtagcgagagttatcgtcgacggcggtgaagatggtgtcgctgaagctgcagatgcggctcgcgtaagcgtacctcaagtgtgggcacggcaaagtctggcttgaccccaatgaagtcagcgagatctccatggctaactcgcgaccaaacatccggaagtt

SEQ ID NO: 56079 - DNA, 202 bp, Zea mays
tagcactcgtttccaggtatgttcaccagggcaagggaatgcttcatcgccatcagctgcttgcggagtttgatgccctgtttggatagtgacaaggagaagtatgcaccctttgaagacattcttcgtgctgctcaggaagcaattgtgctccccccatgggttgcacttgctatggggccaagtccggttgtctgggatt

SEQ ID NO: 56080 - DNA, 281 bp, Zea mays
ccgccaccaggtgcagagtctttcgtcatctcttctccggcgaagaacccccagtcgcccaccagatcacttgttaaactttgttgaggggtgatggcggtttctttcgcaaacctcagctccgaggcagggcttaatacgcttgatgagtaccttctcactcgcagctacatcactggctaccaagcttccaatgatgacttggctgtctacacttcgttttcgtctgctccctcgtccaagtatatcaacgtagcaaggtggtttaatcacattgatgc

SEQ ID NO: 56081 - DNA, 155 bp, Zea mays
tgcgaaccaagcagaccccagcagaagaagcgaagtcgtcgccggagcaggaggaagagcgagcagcaagatgtcgtggcaggcgtacgtcgatgaccacctgctgtgcgacatcgaaggccagcacctcagcgccgcggctatcgtgggccacg

SEQ ID NO: 56082 - DNA, 281 bp, Zea mays
cttcattcttttagcttcatgtatatagatctaaatctagaggtgtagatcctacggacgaacaatggagagatatatcccatcagttcaaggtgaaaaaacattttccattctttgacatggcataccaagggtttgccagtggtgatccagagagagatgccaaggcaatccgaattttccttgaagatggacaccaaattggatgtgctcagtcatacgcaaagaacatgggactttatggacaaagagcaggatgcttgagtattttgtgtgaagat

SEQ ID NO: 56083 - DNA, 264 bp, Zea mays
gtcttgggaacagaggttcaacgtcgcacttcgagcggcccgagcacttgcaaccctcaccatgattgccggccacagatcctgcacctcaacatcaagtcatccaacagtatgttagatgggaaatacgaagctaagctatctgactatggattggggaagctgttgccgattctatgaagcattgaattgagtagaattcacaccgcaattgggtacattgctccggagcggtcatctccaacgttgagatgagacgacaag

SEQ ID NO: 56084 - DNA, 277 bp, Zea mays
aagaggaaggctggagagctcgcagcgccttcaagctcctccagatagaccaggagttcaacatcttccatggagtgaagcatgtggttgacctgtgtgctgctcccggaagttggagccaggttttgagccggaacctgtatgtaccagcaaaacagtcttctgattgcaaggaaggtgatcttcctctcatcgtcgcaattgacttgcaaccaatggccccaatagaaggtgttatacaagtgcagggcgacatcaccaatgctcggacagcaga

SEQ ID NO: 56085 - DNA, 275 bp, Zea mays
cacctatcatcgccgctgcgccgtctcctccgctcccgtcgtccggaaatatggcgtcccacattgctggataccctcgcatgggccccaagatggagctcaagtttgcacttgagtctttctgggatgggtagagcaccgctgaggatctggagaaggttgctaccgacctcagggccagtatctggaagcagatggctgatgctgggatcaagtacatccccagcaacaccttctcgtactatgaccaggtccttgacaccactgccatgctc

SEQ ID NO: 56086 - DNA, 248 bp, Zea mays
tgatagatcacgagcttcgcaaacttcggttgatagactggggcttagctgagtgttaccatccaggcaaggactataatgtccgcgttgcatcgaggtatttcaagggacctgaactccttgttgatttacaagactatgattattctttggacatgtggagtcttggttgcatgtttgctggaatgatatttcgcaaggatacattcttttatggccatgacaacatgaccaactggtgaagattg

SEQ ID NO: 56087 - DNA, 284 bp, Zea mays
tgccgcgccgctctccgtcatgaaaatggtgatccagacgaagagcgtggagtacatgccgctgttcctgtcactggcttccctggtgaacggcatctgctggaccgcctacgcgctcatccgctgtcgactctacatcaacaatcccaacgggctgggcgtgctgttcgcgctggcgcaagtgctcctgtacgccatctactacaagaacgaccagaagatcgtggaggcacgcaaacgcaaagctgggccaggtcgccatgacggatgtggtcgtcgacggc

SEQ ID NO: 56088 - DNA, 152 bp, Zea mays
actcgagccgattcggctcgaggattcaggatccacatcttccagagcgagttcttggtacacctcttcctcttcggaccacctccaaggctcttggtgtagcttgccactctcaccaatcaagttttcatgtctgatcgcgacattcagat

SEQ ID NO: 56089 - DNA, 274 bp, Zea mays
ccgcggggcgccagacgcaatttcgccctcgattcgaccccgattcgtccgcccgcgaccgagattccctccgccaagcgcggatctgaacgctgcgctccgtgtcgccgctcgaatccgccatgaagggggccaaatccaagggcgccgccaaggccgatgccaagctggcggtgaagagcaagggggcggagaagcccgccaagggcaggaaagggaaggccggcaaggaccccaacaagcctaagagggctcccagcgctttcttcgtgtt

SEQ ID NO: 56090 - DNA, 267 bp, Zea mays
caactgttcatgccatcactgccacccagaagactgttgatggactctcagtcaaggactggagaggtggcagggctgccagctttaacatcattcccagcagcaccggtgctgccaaggctgtcggtaaggttcttcctgaattgaatggcaagctcactggcatgtccttccgggttcccaccgtggatgtgtcagttgttgacctcactgtcagaatcgagaagggggctccttacgaggaaatcaagaaagctattaaaggct

SEQ ID NO: 56091 - DNA, 274 bp, Zea mays
atgagccaccggaagcggagacgtgagcactcgaccaaccccgtcgatccggctgcggtgcggcgtgctagatcgctaccgaccatcgtggtggaggagatccccgagggggtgaagaacctaaccgtcaccggagatgcggcggcttcaggcggagaggggcagaggaggggcggcggcggcagcagcaaccgcatccaggtgtccaacaccaagaaacgcctcttcttcctacgtgcaactcgccaagaggtatatgcaacagcacggcgat

SEQ ID NO: 56092 - DNA, 272 bp, Zea mays
agctgacatcttcgtgaccaccactggcaacaaggatatcatcatggttgaccacatgaggaagatgaagaacaatgccattgtctgcaacattggccactttgacaatgaaattgatatgctcggccttgagacctaccctggcggcaagcgcatcaccatcaagccccagactgaccgctgggtgttccccgagaccaacactggcatcattgtccttgctgagggtccgctgatgaaccttgggggtgctactggccatcctagctttg

SEQ ID NO: 56093 - DNA, 279 bp, Zea mays
gtgcgtgcaatcgacgcagatgcgcgggcgctcgcaccaccacaaccacgacccgatggctttcatgcgctcccgctcaaatgcatcttctggcatgggatttgctcctaacattagggagacattcgttgagcttcaaatgaagaaggcattccgatatgttatcttcaaaatcgaagagaagcaaaagcaggtggttgtggagaagacaggggctactactgaaagctatgatgattttttggcctctctcccagagaatgactgccgatatgcgct

SEQ ID NO: 56094 - DNA, 269 bp, Zea mays
cccagacagcggtgaagagcccttcgtctcttagcttcttcagccaagttacgaaggttccaagcctgaagacctccaagaaactggatgtctccgccatggctgtatacaaggtgaagcttgtcgggcctgaaggtgaagagcacgagtttgatgctccagacgacgcctacatccttgacgcagccgagactgccggtgtggagttgccatactcgtgccgtgctggggcttgcatcacctgtgccggcaaaatcgagtctggttcg

SEQ ID NO: 56095 - DNA, 270 bp, Zea mays
gtcttgggaacagaggttcaacgtcgcacttggagcggcccgtgcacttgcttaccctcaccatgattgccggccacagatcctgcacctcaacatcaagtcatccaacattatgttagatgggaaatacgaagctaagctatctgactatggattggggaagctgttgccgattctaggaagcattgaattgagtagaattcacaccgcaattgggtacattgctccggagctgtcatctccaactttgagatataacgacaagagtga

SEQ ID NO: 56096 - DNA, 257 bp, Zea mays
ggagcattcgagaagccgaagaaaattcgaagacgaggagcagctacactgcggacggacttcgggcatggagggccagttccaggttggcaaggaggaggtcatccaagcatggtacatggacgacagtgaagaggaccagaggcttcctcatcatcgcgagcccaaagaatttatccctctcgacaaactttccgaactaggaatattaagctggcgcctatatgctgatgattgggagaatgatgagacctcaa

SEQ ID NO: 56097 - DNA, 158 bp, Zea mays
gcaaatattgcctgtcctcgataaatttggaggtgctatggcaattgtaaagagtgatatcggcggcaatatcacaagactggaaaacaagtatacttcagaaccatcaaagtatgaacacttgtacagcatggttcaggaagaagttcaaaacaagc

SEQ ID NO: 56098 - DNA, 199 bp, Zea mays
tggacatgcactctggatgcacatttaatcaccgctatgtcaagtccaacccaagataggttgaaaatgcaacctggatgctaactgtttttcattgttttgggctgtacttctgcttgcactttgaggcatttcagcttgggttggcaccagtatacatggctttcctacgatttatgggtgacgaaaatgattctat

SEQ ID NO: 56099 - DNA, 273 bp, Zea mays
accacggcatcgaggccactctcatggacgccatgatggacgcgtcgaggagagtcttcaggcagccgctccaggagaagcagaagcacagcaacatgatcgacggcaagcacttccagctccaagggtacgggaacgaccgggtggcgtcggaggaccaggtcctggactggtgcgaccgcctgtacctcttggtggagcctcaggaggacaggagccttgacctatggcccgcatgtctaaggtgtgatcttcccatgatgtgaatcgatt

SEQ ID NO: 56100 - DNA, 274 bp, Zea mays
gctgaaatggctgggatgagccataggattcgtgagagaactgatgctctagatgctgcaggaaataccacggctgcaattgggaagggttttgccattggctctgcagccttggtttcccttgcaacatttggtgctttgtaaaccggggtggtatctccactgtttatggtctgactcctaaagtattcatcgggcttattgtcggtgctatgctcccgtactggttctcggcaatgaccatgaagagtgtgggcagtgctgcgctcaaaat

SEQ ID NO: 56101 - DNA, 239 bp, Zea mays
ctgagcagtgtgactgcttatggttctgatcttgtccgtggaacccaaactcttgggcttgtcacgagtgctggtttccctgctggaaagtacctctttgctggtgttgtggatggacgcaacatctgggctgatgatcttgctacatctctcagcactctccagtctcttgaggctgttgttgggaaggacaagcttgtcgtatcaacttcctgctcgctcatgcacaccgctgtggg

SEQ ID NO: 56102 - DNA, 288 bp, Zea mays
taggatagatcacgagcttcgcaaacttcggttgatagactggggcttagctgagttttaccatccaggcaagtaatataatgtccgcgttgcatcgaggtatttcaagggacctgaactcctagtggatgtacaagactatgattattctttggacatgtggagtcttggttgcatgtttgctggaatgatatttcgcaaggaaccattcttttatggccatgacaaccatgaccaacttgtgaagattgcaaaggtccttggaacagatgggttgaatgcttattt

SEQ ID NO: 56103 - DNA, 268 bp, Zea mays
cttgagaatattcttaaagtaggggagcacgacaagaccatgggcgcaacaggtgacattaatgttttcgctcagatgattgacgacgcggaaggcctggaaaaaatcgagaacctacagagccatgataataatgaaatctatgaaaaggctgtaaagcttcttgagacttactggatggaggaggaagatgatgcaatggctactgctggggaagctgctcctgctgtttttgactttagccaggtggcaacccccccgggggggg

SEQ ID NO: 56104 - DNA, 287 bp, Zea mays
gtcggcttccgccagcgcccagctggaggtctcgctgttcccttcacgatacgcccccccaaagcggatcaaaccctagatctcgtcttgtcgccccgttcctccgatcccatcctatccgatcctcatggattcctcctcgtccagcctcagccagcagcccgagttcgactacctcttcaagctactccttatcggcgactccggcgtcggcaagagcagcctcctcctccgcttcaccgccgactccttcgatgacctctcccctaccataggtgttgacttca

SEQ ID NO: 56105 - DNA, 236 bp, Zea mays
ctcactgctcgttgccggctgcccccgcggccccggccagtccatcccctcgctcgctccccaactccagcaggcagatcagatacatccatccattcgcggaccggaaggaaaggaagggttgaactatgagcgccgtggcggtttcgtcgtcgctgaacccggacgcgccgctcttcatcccggcggcgctgctgcaggtggaggacttctcgccgcattggtgggactcatca

SEQ ID NO: 56106 - DNA, 276 bp, Zea mays
accgtttggtgagtactatgaaagggatgtgaacattgcaaacaatcgctttgatctcttgatggtggactacataccagaagcagtccatcttatatctcatttgttacaaccaaacccagaggcaagaccgacagcagtatatgtcatgcaccatccactcttttggagccctgaattgcgtctttcgtttctaagggataccagtgacagaattgagaaaacaggtgaactgacctcataaacacactggaaagcatagatctttggcgtttg

SEQ ID NO: 56107 - DNA, 196 bp, Zea mays
gttgttgagaagtccactgtccctgtcaagaccgctgaggctattgagaagatcttgacccacaacagcaagggcatcaactaccagagcctttccaacccagagttccttgcggagggcactgccattggggccttgttaaagcttaagagattcttaatccgttggcgggaaaacccttgaggcaaagaaaggc

SEQ ID NO: 56108 - DNA, 284 bp, Zea mays
catgtacaacctttagcaattgacctagtggaaaagatgctaacttttgatcctagacactgaataactgtcgaaggcgcacttgcacacccttacttggcatcacttcatgacataagtgatgagccagtctgctcaatgcccttcagcttcgacttcgagcagcatgcattatctgaagaacagatgtaggatctgatctaccaagaggctcttgcattcaacccagattaccagtagccatagttcggttccagccggtgcatgcgttcattgacatggag

SEQ ID NO: 56109 - DNA, 288 bp, Zea mays
tgataaaactgaagctcaaagctgtctacatgtatgctgctggattttacacatattcaattttcgctctcctgttctgggaaacaagacgttcggactttggagtatcaatgtcccaccatatagcaactgttgttctgattattctttcctacattttccgattcgctcgtgttggcactgttgttttagcccttcatgatgcaagtgatatattcctagagattgggaagatggccaagtacagtagctgcgagtggctagcagttatggcatttcttctttttg

SEQ ID NO: 56110 - DNA, 249 bp, Zea mays
gattaggaagatgaagggtttgaagcagaagaaggctcacctgatggagattcaggtcaatggtggtaccattgctgacaaggtggactacggctataaattttttgagaaagaggtccctgttgatgctgtcttccagaaggatgagatgtttgacatcattggtgtgaccaaaggtaaaggttatgagggtgtggtcactcgttgggggtgtcacccgcctatccccaaaaaacccacaggggtctc

SEQ ID NO: 56111 - DNA, 213 bp, Zea mays
caagattcagctacagttgctggcgacagaaaatatgatgtatacatgggtattgatgtttttggacgaaatacatttggtggtggtcaatggactacaaatgttgcccttgatctacttaagaaagttgatatctcagctgccatatttgctcctggatgggtatatgaaactaagcaaccacctgactttcagagagcgcagaatcattgg

SEQ ID NO: 56112 - DNA, 256 bp, Zea mays
atgggatggtgctttctacggcccaaaaattgatattggtgtgtttgatgcccttaagaggaaatttcagtgtgcaaccctacagctggattttcagctgcccattcggttcaagctggcttattctgctgacgatgaagccaaaattgaaaggcctgtgatgatacacagggccactcaaggttcggttgaaaggatgcttgccattcttttggagcattacaatggtaaatggcccttatggctaagcctcgcc

SEQ ID NO: 56113 - DNA, 273 bp, Zea mays
tgtttaggaagatgaagggtttgaagcagaagaaggctcacctgatggagattcaggtcaatggtggtaccattgctgacaaggtggactacggctataaattttttgagaaagaggtccctgttgatgctgtcttccagaaggatgagatgattgagctcattggtgtgaccaaaggtaaatgttatgagggtgtggtcactcgttggggtgtcacccgccttccccgcaaaacccacaggggtctccgcaaggttgcttgtacggtgcatg

SEQ ID NO: 56114 - DNA, 262 bp, Zea mays
cacaaacacaagtcgtcgtaggcagcgagcgtctctcctctcccacgcatcgcgccaaggaagacagagagatcgccgctccccttctcggcgtcggtggtgcgggcgccctccctcctcgtgcgagatctgtctggtcacagatctatctgactaaatggtgaacatctgctgcatcggtgctcggctatgtcggtggcacaaccatggccgtcattgccctcaagtgcccatacattgacgtcgtcgtcgttgacatctc

SEQ ID NO: 56115 - DNA, 274 bp, Zea mays
atcacggcatcgaggccactctcatggacgccatgatggacgcgtcgagggagttcttcaggcagccgctccaggagaagcagaagcacagcaacatgatcgacggcaagcacttccagctccaagggtacgggaacgaccgggtggcgtcggaggaccaggtcctggactggtgcgaccgcctttacctcttggtggagcctcaggaggacaggagccttgacctatggcccgcatgtctaaggtgtgatcttcccatgatgttgatcgatta

SEQ ID NO: 56116 - DNA, 264 bp, Zea mays
gtaatagtcaatacccaggtacttgctttcaatggccagcctgttaaaaatttaaagaacttggcgaccatggtggaaaattgcaaggatgaatttttgaagtttgatctggagtatgaccagattgttgtcctcgagacgaaaactgcaaaggctgctacccaggacattctgacgacgcactgtataccttctgcaacgtcggatgaccttaaggcctagtgggagaagggagcatgacgcagccctgggcctgggccaggg

SEQ ID NO: 56117 - DNA, 257 bp, Zea mays
ctaagacctacccgcagcaggctggcaccgtccgtaagaacggcttcatcgtcatcaagaaccgtccctgcaaggttgtggaggtttctacctccaagactggtaagcatggccacgccaaatgccactttgtcgcatagacatattcaatgggaaaaagcttgaagatattgttccttcatcacacaactgtgacattccgcatgtgaaccgtactgagtatcagctgattgatatttctgaggatggattgtgag

SEQ ID NO: 56118 - DNA, 275 bp, Zea mays
accacggcatcgaggccactctcatggacgccatgatggacgcgtcgagggagttcttcaggcagccgctccaggagaagcagaagcacagcaacatgatcgacggcaagcacttccagcagcaagggtacgggaacgaccgggtcgcgtcggacgaccacgtcctggactggagcgaccgccttgacctcttggtggagcctcaggatgacaagagccttgacctatggcccgcatgtctaaggcgtgatcttcccatgatgttgatcgattaa

SEQ ID NO: 56119 - DNA, 246 bp, Zea mays
ggcagtgctaaggtttatatcaacggtcatccaatctctgaacgagctctccggaaatcagtgatgatagttggtcctgttggccctagttcatattggtacgactaccgtgctggattttggggtgtcttcggacaagagtgtagatgcatcataccatcattcataaaagaattcaactatccaatgctcaagaactgcgctggtggtagcactggggttttcgtaaatgggagagagctccac

SEQ ID NO: 56120 - DNA, 271 bp, Zea mays
ttagctttttgaagttactgttgaacctgcagatgggctggctccggtctggcacagtgatgtcaaattttattgagtcaaagactcttccagtagccctgttgcttacttttacttcgatccttattcaagaccatctgaaaagcgtggaggggcttggatgactgtagtcttttctcgaagtcgcgtgctagctcgcaatggtttggctgctaggctgcctgttgcccatatagtgtgcaatcagactccaccagttggcgagaagccc

SEQ ID NO: 56121 - DNA, 274 bp, Zea mays
agtcgtccctcagccgcgtcgcaccgcatcgcattctacgattcgaagctctctctgctcgcagccatggcgaagaattacccaaccgtgagcgccgagtacagcgaggccgtcgagaaggccaggcgcaagctccgcgccctcatcgccgagaagatctgcgcgcccctcatgctccgcctcgcgtggccctccgcggggacgttcgacgtgtcgtcgaggaccggcggtcccttcggtactatgaagtgcccggcggaactggctcacggcg

SEQ ID NO: 56122 - DNA, 260 bp, Zea mays
ctgccttgtaatcgagaaggatagtttcccgcatgataccctggaaattgttgcgtggacagattatcggttgatcatggctgctcgccagacgatatacaaacatattcagggcgtgcaattccatccggcgagctctcatctactaaagggaggctctggtctaaattttatcaagattattgaaggctacgaagcctcgaattgctctccgtgatttatctagtttgaagcagcagcagccctgcgtcgggttggtt

SEQ ID NO: 56123 - DNA, 268 bp, Zea mays
caactcgccgtctgccttctgcgcctccatttcggactctgtcccttgcaagttcaatctcacctccaaccatgggtaaagagaagtcccacatcaacattgtggttattggccatgtcgactctggcaagtcgaccaccacaggacaccttatctacaagcttggaggcattgacaagcgtgtgatcgtgaggtttgagaaggaggctgctgaaatgaacaagcggtccttcaagtacgcgtgggtgctcgacaagctcaaggctga

SEQ ID NO: 56124 - DNA, 267 bp, Zea mays
cagcaacggcttcttccgaggtgttccgatggcggtcctggccatggacgacgcgacgcgcgtggtgaagcggcccttcttcacgacacacgaggagctcctggaggaggagtactacgacgagcaggcgccggagaagacgcgccgtctgatggcggagcaggtgcagctgctggagcggagttccgaggaagagaacaagctggagcctgagcgcaagaccgagctggctcgccgcctggggatggcgccccgccggtggccgtg

SEQ ID NO: 56125 - DNA, 270 bp, Zea mays
gtagataggaactgtttacactgaagcttccaaagctggagccaagggcttgcctttcctcaaagttatggagaatggggagcttgaaggaatcggtccactgttatcgagtctgaaacctgaaaagaaagaccagctcatggaactctggacacaaagacgggtgaccttatcctgtttgcactgggtgcaaaatcatcagctaatcagattcttggacggttaagattatttattgctcataagctagaggtgatagacacgtctgca

SEQ ID NO: 56126 - DNA, 269 bp, Zea mays
gatcgtaaagatcgggtccaggtacgacgtcggccatctcatcccggcgggttttgatgttgccgcccacggcaacgactacgccgtctgggagatagtcggcgccgaacaagtgactcgagcataatagagtgctcgagataccgatttgcttctcagtacaatgtacacgggactgcattgataatataagtggtttctcctctaataagtaagggagcgtaaaagggcacattggagccatgcatatgtcaccttaaatattgttg

SEQ ID NO: 56127 - DNA, 269 bp, Zea mays
cagcaacggcttcttccgaggtgttccgatggcggtcctggccatggacgacgcgacgcgcgtgggcaagcggcccttcttcacgacacacgaggagctcctggaggaggagtactacgacgagcaggcgccggagaagaagcgccgtctgacggcggagcaggtgcagctgctggagcggagcttcgaggaagagaacaagctggagcctgagcgcaagaccgagctggctcgccgcctggggatggcgccccgccagtggccgtgtg

SEQ ID NO: 56128 - DNA, 274 bp, Zea mays
cagagagctctgactcaattgtccaaggtcacagcggcgaacctctcggctatcatgactggccgcggcaagggcgggaagggtctgggcaagggcggcgccaagcgccaccgcaaggtgctgcgcgacaacatccagggcatcaccaagccggcgattcgcaggttggcgaagaggggcggcgtcaagcgcatctccgggctcatctacgaggagacccgcggcgtgctcaagatcttcctcgagaacgtcatccgcgacgccgcacctacac

SEQ ID NO: 56129 - DNA, 268 bp, Zea mays
tgtctctaaacagcagtatcactgcaacggatgtggaatatgtagaatcggagggagggagaatttcttccactgttcaaaatgtggatgttgctattcaattgcgctgaagaatagtcatgcatgtgttgaaggggcgatgcatcatgactgtccaatctgcttcgagtacttgttcgattcgacaaatgatgtttccgtcctgccttgtggtcataccattcatgtaaagtgcctgaaagacatggaagagcacgccagtttgcat

SEQ ID NO: 56130 - DNA, 270 bp, Zea mays
  unsure (1)..(270): unsure at all n locations
ngaggcacacaaacccatcgcagggcattctcgagcatagcttctctgcctctctctcccctcctctcctctcgtccactcctttgtccaaagcttcgagatggctcagcagaaggtggtggtcagggttccaaccatgacagatgacaagatcaagcagaaggccatcgaagctgttgcggacatttacggtattgactccatagcagcggatctgaaggagaacaagatgaccatcataggcgagatggatgcagtagcgattgccaa

SEQ ID NO: 56131 - DNA, 262 bp, Zea mays
cttcgtaaagatcgggtccaggtacgacgtcggccatctcatcccggcgggttgtgatcgttgccgcgcacggtaacgactacgccgtctgggagaaagccggcgccgaacaagtgactcgagcataatagagtgctcgagataccgatttgattctcagtacaatgtacacgggactgcattgataaaataagtggcttctcctctaataagtaagggagcgtataagggcaattggagccatgcatatgtaacctaaaat

SEQ ID NO: 56132 - DNA, 259 bp, Zea mays
cttgtgaccctccctcagccgcgtcgcgtcgcatcctacgatccagagctctctctgctcgcagccatggcgaagaactacccgaccgtgagcgccgagtacagcgaggctgtggagaaggccaggcgcaagctccgagctcctcatcgccgagaagagctgcgccccgctcatgctccgcctcgcgtggcactccgcggggacgttcgacgtgtcgtcgaggaccggcggtccattcggcacgatgaagcatcagtcg

SEQ ID NO: 56133 - DNA, 131 bp, Zea mays
cagtagggtagcttcgcgtgtcggtaattatatggtatgaaccatcaccttttggctctacatggtatgacgcgtaagatactaccttccaactgaataactcagatatgctcacataaagcggatggggc

SEQ ID NO: 56134 - DNA, 265 bp, Zea mays
gttacctaccggagcagggagcacgccgcacgagccctttccgccgccgccaaaatggtgaacgttcctaagaccaagaagacctactgcaagaacaaggagtgcaagaagcacactctccacaaggttactcagtacaagaagggtaaggatagcctgtctgctcagggaaagcgccgttacgagcgcaagcagtcaggatatggtggccagaccaagcctgtcttccacaagaaggccaagaccaccaagaaatcgtgttgaa

SEQ ID NO: 56135 - DNA, 262 bp, Zea mays
cacgcctccgctccgcccacggttccactccaactctccgatctccaggaatccgcggctgaggcgccggcgatggcggctcccatggtcgacgccgaatacctgcgccaggtcgacagggcgcgccgccacctccgcgtcctcatctccaacaagggatgcgccccgatcatgctccgcctcgcatggcatgatgctggaacttatgacctgaagacaaaaactggtggtgcaaatggttcgattagatagaagaagagta

SEQ ID NO: 56136 - DNA, 265 bp, Zea mays
ccgacatcgtctcttcgtccccacgagcaaccgataatccgccggcgctgagatgttggtttatcaagacctcctatctggcgacgatgtcctgtcggattcattcacctacaaggagctcgagaacggcgtcctgtgggaggtcgagggaaagtgggtcacccaaggtcctgttgatgtagacattggtgctaatccatccgccgagggtggtgaagatgacagcgttgatgacacagccgtgaacgtggttgatattgttgac

SEQ ID NO: 56137 - DNA, 264 bp, Zea mays
cagccttgtaatcgagaaggatagtttcccgcatgataccctggaaattgttgcgtggacagatgatgggttgatcatggctgctcgccacaggatatacaaacatattcagggcgtgcagttccatccggagagcatcataactactgaagggaggctcatggtcaacaattttatcaagattattgaaggctacgaagcctcgaattgctctccgtgatttatctagttggaagcagcagcagccctgcgtggggcgggtga

SEQ ID NO: 56138 - DNA, 260 bp, Zea mays
cgcaattcagttttttcccgttcaccggagaaagaatggcgctgccgacagctaacacgggcttccgtcacggctgccaggagtctcccgcgatgggattgatgtcggcgccgcggttggcactgcgtcgtccggcgcggtctccgggcacaggagtaggactggcagagggaagtttccagtggcatccacaagtctagatgactatcttccaatgcgaacaccgaagtgaaaaatcggacattaaccgtgatatcaca

SEQ ID NO: 56139 - DNA, 259 bp, Zea mays
ctggaaaccttaggatcttcaaggctaacctgctggactacgacgccatggcagctgcggtcgtcgggtgccagggggttttccatgtggccactcctgtgccttcggaggacctgactgacccagagctacaaatgctgggtcctgctgttaccggcaccacgaatgtgctcaaagctgcctccagcgcgaacgtccagcgagtggtggtggtgtcgtccatggttgccgtcgagatcagccccaaaattggcctgaa

SEQ ID NO: 56140 - DNA, 259 bp, Zea mays
gctaaacagctgacgaaaaggaccccgcttagactcggagcgactgctgggttgagacttatcggagaggagcaatcagagcagattctcgaagcagtcaggaaccttatccacactaagagcaaatttcagtacaagcccgagtggatcaatgttattgagggatctcaagaaggatcccccctatgggttgctctgaattatctgttggataaattgggaggggactactcacagacagtagctgtgctgacatggg

SEQ ID NO: 56141 - DNA, 261 bp, Zea mays
gtagtctcttcctacctgaagaaggttggatacaaccctgataagatccacttcgttccaatctctggttttgaaggtgacaacatgattgagaggtccaccaaccttgactggtacaagggcccaaccctacttgaggctctggacttgatcaatgagccaaagaggccttcagacaagcccctgcgtctcccccttcaggatgtgtacaagattggtggtattggaactgtccctgttggacgtgttggactggtgtca

SEQ ID NO: 56142 - DNA, 262 bp, Zea mays
ctgaacgccgccgccgccgccgccgcccgccgctcggggattgcctgctttcctctgccgaccacatctacaccgcacaactggtccttccaagtgagcttcaatcccctgcgtgtagatggagagggttctcaaggatgacgccgtcgaggagaagggcgaccgcgccagaatggcatcgtttgttggggccatggcaatctcggatttggcgaagaccacattgggtccaaaaggaatggacaagatccgcaatcaactg

SEQ ID NO: 56143 - DNA, 260 bp, Zea mays
gcgcggtaggctgcacgatgcctgcagttactgtaacaggcgtgaagcagcaggtgctcgtcagagctctgggaatcttcctcataaagaccgggaagctgacagtccccgaatggatggataccgtgaagctggccaagcaccaagggcttggtccctacgatgagaactagttctacaggcgagctgcttccacagagcggcacctgtacgtccggggtggcgctgaggttggctccatgaccaagatgtatggcgga

SEQ ID NO: 56144 - DNA, 226 bp, Zea mays
ctcctcctccagagctcgtcgccaccggccaccgccaccctcgatcacgccgtccgtcgaggtaaggtcagcatgatgagggtcagtgtgctcaacgatgcgctcaagtccatgtacaacgctgagaagatcggcaagaggcaggtcatgatcaggccgtcgtccaaggtcatcatcaagttcctgacggtcatgcagcgccaacgctacattggcgagttcgagt

SEQ ID NO: 56145 - DNA, 260 bp, Zea mays
gtccagcgtcggagatctccgcccccatggagacgctggccagcgccatgcggcgcgagatccgccggtccaaggccccgccctcctcctctgcttcctccgccctcgcctcgggcagggtccctctcgtcatggccttcctctcctgcctcgcctggctctacgtcgccggccgtttgtggcaggacgcgcagacccgggcgatcctgtccggcctcctcgagaagagctctaccagcgtcccgaagtgctctcggtgg

SEQ ID NO: 56146 - DNA, 282 bp, Zea mays
ctaaagacctgtgccatacttgacatttgatgaggcagctgaacttgcctattttgagagcgcaggttttgcatccacaatcaatgcggccagctagagaaggcgatgtacctgtgagggttaagaattcttataaccgtcgagcccctggtacccttatcactaaagcaagagatatgagtaagactgttttgactagcattgttttgaaatcaaatattacaatgcttgatatagtcagcacacgcatgcttggccagtacggttttctagctaaggttt

SEQ ID NO: 56147 - DNA, 285 bp, Zea mays
ccttctccgatggccgcgcccgtgtcgcagccgccggtgtacgacagggcgtccacacagtttctcccccgcgggataggcgcgctcccggagtccgctcccacgtccctccggttatccgtcggacgccgtcgccgggccgccagcatagatgtgaaggcatcgggaaatgtgttcgggaactacttccaggttgcaacctatggcgaatcccatggagggggtgttggttgcgttatcagtggctgcccacccagaattcctctcactgaggcagacatgcaa

SEQ ID NO: 56148 - DNA, 286 bp, Zea mays
cgcagctattgtggtcgtccctcagccgcgtcgcaccgcatcgcattctacgattcgaagctctctctgctcgcagccatggcgaagaattacccaaccgtgagcgccgagtacagcgaggccgtcgagaaggccaggcgcaagcaccgcgccctcatcgccgagaagagctgcgcgcccctcatgctccgcctcgcgtggcactccgcggggacgttcgacgtgtcgtcgaggaccggcggtcccttcggtactatgaagtgcccggcggaactggctcacggcg

SEQ ID NO: 56149 - DNA, 281 bp, Zea mays
cccttccctccctccctctccccgcgggccgccagaggaatttcgccctcgattcgaccccgattcgtccgcccgcgaccgggattccctccgccaagcgcggatctgaacgctgcgctccgtgtcgccgctcgaatccgccatgaagggggccaaatccaagggcgccgccaaggccgatgccaagctggcggtgaagagcaagggggcggagaagcccgccaagggcaggaaagggaaggccggcaaggaccccaacaagcctaagagggctcccagcg

SEQ ID NO: 56150 - DNA, 277 bp, Zea mays
tcttaaaacctgtgccatacttgacatttgatgaggcagctgaacttgcctattttggagcgcaggttttgcatccacaatcaatgcggccagctagagaaggcgatgtacctgtgagggttaagaattcttataaccgtcgagcccctggtacccttatcactaaagcaagagatatgagtaagactgttttgactagcattgttttgaaatcaaatattacaatgcttgatatagtcagcacacgcatgcttggccagtacggttttctagctaa

SEQ ID NO: 56151 - DNA, 286 bp, Zea mays
aggaacccagggttcagaagaagctgcaagaggagctcgaccgtgtggttggccgtgaccgcgtcatgctggagaccgacttccagaacctcccctacctacaggccgttgtcaaggaatcactccggctgcacccgccgacgccgctcatgctcccgcacaaggccagctcgaacgtcaagataggaggttacaacatccccaagggcgccaacgtgatggtgaacgtgtgggcggtggcgcgtgatcccaaggtctggagcaacccgctggagtacagaccgga

SEQ ID NO: 56152 - DNA, 274 bp, Zea mays
tgcgaaggagtagcagcagcaggcggcgccgagtagcggctccccatctcgagcttgccaccatggctagaggattgaagaagcatttgaagaggctcaatgcccccaagcattggatgctggacaagcttggcggagcttttgctcccaagccatcttctggacctcacaagtctagggagtgcctgccactgatcctcatcatcaggaacaggctcaagtatgctcttacataccgtgaggtcatttccatcctgatgcaacgccatgtact

SEQ ID NO: 56153 - DNA, 281 bp, Zea mays
ttcgagcgcggattaattccgggtatggttttgtctgcactggaacggtgaggtcgctgttaagataattagctgagattagtcattgatatatttctattccattcactgagtcatgtctatacttttaacttttagctacatattcaaagggaagtcaccttatacattgaagcatgggagacccgatcatgaagcaacagacacggccaatctgcatgcgcctattcaatatcctaaaccagatggacatataacatttgatgtcccaacatctttat

SEQ ID NO: 56154 - DNA, 280 bp, Zea mays
ccacatgctcacaaggcatcgtgctagcatgaacttcacttgtgctgagatgagggacagtgaacagagttcagaggcgaaaagtgcacctgaggaactggttcaacaggtgctgagtgctggatggagagagggcctaaatttggcatgtgaaaatgcactcaaccgatatgatgcaacagcttacaacaccatcctcaggaatgcaagacctcaaggcatcaacaagaatggccctccagaacacaagttgcacggattcacctacctccgagtatct

SEQ ID NO: 56155 - DNA, 280 bp, Zea mays
cggctcgaggttttgctgctctccgaccccgagctccgaaggccgcagcatcaggcgcggttcccctcgcgtgtgaccgagatggcgctgccgaatcaggggaccgttgattaccccagcttcaagctcgtcatcgtcggcgatggtggaactggtaaaactacatttgtgaagaggcatctcactggagagtttgagaagacatatgaaccaaccattggtgtggaagttcatccgttggatttcaccactaactgtggtaagatcaggttctactgct

SEQ ID NO: 56156 - DNA, 283 bp, Zea mays
gagagtttgaatcaaaacaggaggcacatggtgaccaaattttgatcaaggcctcagtcctggctgagttacagaggcggatactaaaagccgaggccacagtacgtgaaaaggatgaagagaacgagatgcttcatcagcggcttcagcaatatgaaaaccgctggttagagtacgagcagaaaatgaaagctatggaggaaatgtggcagaagcaaatgcgttcgctgcaatcgagcctttccgtagcaaagaagagccttgttttggatgaaacgcctag

SEQ ID NO: 56157 - DNA, 281 bp, Zea mays
ctgatcgcgtgattccgcatcccgttcgcgagcgcgacacacgctgacagctcacggctgaccttcccgagtcccgacggcctccagctccatcttgattcttgaggcgaagcccggtgcgtaagagtctgccatggccagcgagaataaggtctttgggttcgaggaagtcgccaagcacaacgtcaccaaggactgctggatcatcatcgccggcaaggtgtatgacgtcactccgtttatggatgagcatctggtggagacgagttttgctaactgta

SEQ ID NO: 56158 - DNA, 282 bp, Zea mays
atcgcctctcagaaccgagatcctcaaaacccttctcccccctcccggatcgagtgcttgagctccgaccaaatctcgcagcggctgcaattccgagcccgaagagcggatcaggcgaggacgacgccttcgattctgatctgcggtcggcgcgacctagagagaaccggagatgcagcagggcgacggcacggaggcgcaggtgacgtgggaggaccagcagaacatcaaccgcttcggtcgcctcaacaaccgcctccacgagctccaggacgagatcaa

SEQ ID NO: 56159 - DNA, 277 bp, Zea mays
ataacgctcaagctgcaggagttactgctcattactacgaggatgagactgctcctactggcacatgtgctgtatgtgttgttggtggtgaaaggtcattgattgcaaatctgtcagcggcaaactgatacaaatctgagcatctaaagagaccagagaactgggcactagttgaaaaggcaaaatacatctacattgctggatttttccttacagtgtcgcctgattctatccagctagttgctgagcatgctgcagcaaataacaaggtgttcct

SEQ ID NO: 56160 - DNA, 277 bp, Zea mays
cgagtatgctgagatggagaatgtccttgccagaacaaagcgtgagtcagagaacaccaagaagtatgccatacagagcttctccaagagcttgttagatgttgcagacaatttgtctcgggcatcatctgttgtcaaggcaagtttctcaaagatagattcatctaacgattctgatgaagctgtaacactactgaaaaccctactagagggtgttgagatgactgagaagcaacttggagaggtcttcaagaagtttggagttgaaaagtttgat

SEQ ID NO: 56161 - DNA, 275 bp, Zea mays
gttgatacgagtgacttggagcttaaacctcagggaagactttctgttactgtggtaaaagcaacttctttgagaaataaggagatgatcggtaaatcagacccttatgtgaaactgtatgtgcggccaatgtttaaggtcaaaacaaaagtcatagatgatgacctgaatccggaatggaatgaaacatttgacttgattgtcgaagacaaagaaacccaatctgttatttttgaggtttacgacgaagacaaacttcagcaagacaagagact

SEQ ID NO: 56162 - DNA, 277 bp, Zea mays
gctctttatgcatcctcgttacatgcatggagctgctactagcccagaggttaaagtatatgcatatgcggctgcacaagttaagaaagctttggaggtcactcactacctaggtggtgaaaactatgtgttttggggtggaagagagggttaccaaactcttctgaacactgatcttaagagagaacttgaccatttggctaactttcttcaagctgctgttgactacaagaagaagattggattcaacggaacactgttgatagagcctaaacca

SEQ ID NO: 56163 - DNA, 279 bp, Zea mays
cgtcgcttccagccgccgccgcgtccgcctcgccaagcgcacagccgccgcagcacatcgctctcttgatctcagccatggcggaggtggagcagcaacaggacacgccgaagctcttcaaccgctggaccttcgatgatgtccaggtgaacgacatctcgctgaacgactacctcgctgtgaacgcgacgaagcacgcgatgtacctgccgcacaccgcggggcgctactccaagaagcggttccgcaaggcgcagtgcccgatcgttgagcgcctta

SEQ ID NO: 56164 - DNA, 275 bp, Zea mays
  unsure (1)..(275): unsure at all n locations
atgcaatgtcatcggtagtccagatgagcaatcttggcctcaaggattgtcacttgcagaagcaatgaagtatcagttcccacagatcaaaggcagtcaactggccgaggtgatgacaacagccagtagcgatgcaattgacctcatctcatcactatgctcatgggatcctagcaagagaccaaaggccgcagaagtcctccagcataccttttttcagggttgtacatgtgttccactccctgtccgtccanaagcttcatcacttcctagaa

SEQ ID NO: 56165 - DNA, 275 bp, Zea mays
ggcttttcatgagtaaaaccaaccgaccaccaatctccatgcgccgccttgtcaagtttatggaaggaaaggagaagaacattgctgtcattgttggcacagtcacagatgacaaaaggatccaggaggttccagcaatgaaggttactgccctgaggttcacggagacagcaagggccaggattgtcaatgctggtggcgagtgcctcacatttgaccagcttgctcttcgtgctccacttggcgagaacacggtcctcttgaggggccccaag

SEQ ID NO: 56166 - DNA, 273 bp, Zea mays
cgccgacatggtgaagtactcgcaggagccgggcaaccctaccaagtcggctaaggccatgggcagggatctgagggtccacttcaagaacacaagggagacagcctttgcgcttcgcaagttgtctttgaccaaggctaagcgataccttgaggatgttattgctcacaagcaggcaattcccttccggagatactgtgggggtgttggtcgcaccgcgcaagctaagtcgcgccactccaatgggcagggccgctggcacgttaaatcagc

SEQ ID NO: 56167 - DNA, 277 bp, Zea mays
gacccagcagctattgtggtcgtccctcagccgcgtcgcaccgcatcgcattctacgattcgaagctctctctgctcgcagccatggcgaagaattacccaaccgtgagcgccgagtacagcgaggccgtcgagaaggccaggcgcaagcaccgcgccctcatcgccgagaagagctgcgcgcccctcatgctccgcctcgcgtggcactccgcggggacgttcgacgtgtcgtcgaggaccggcggtcccttcggtactataaagtgcccggcgga

SEQ ID NO: 56168 - DNA, 274 bp, Zea mays
gtgttggattgcacacagattgtagcttttcctacatccattcccggctccctggatatttaggcgagtatctggctttaactggtgctagactgaatgcgaaggaaatgatttctgctggtcttgctactcattttgtcagttctgaaaaattggaagaacttgaaaaacgtctactggatttggacacaggtgctgagtctgcagtccgagctgttattgaagaattttcaacagatgttcaaactgatgaagatagtatattgaataagct

SEQ ID NO: 56169 - DNA, 276 bp, Zea mays
gtcatcttctccaagtcatactgcccgtactgcaaaagagcaaaggccgtgtttaaggagcttgagttgaagaaagagccatatgttgtggagcttgatcagcgagaggatggctcagagattcaggatgccttacttgagatagttggcaggcgtactgtccctcaagtttttgtccatggaaagcacctgggtggttctgacgatactgttgactcctacgaaagtggaaaactggctagacttctaaacatcggagtcaaggacgacctttga

SEQ ID NO: 56170 - DNA, 281 bp, Zea mays
tgcggagaactgtaatcattatgaggcctacaaaggagaattcaacgtcccatgacggtcagattcggtttcttgtgtatgttttggagaatgcgatcctggaccaacgtgaaggtcaagagaaaatggtatggctgatagacttcacaggatggacaatggcccatgccacacccataaagactgcaagagaatgtacaagcatcctgcaaaatcattaccctgagaggctggccattgcatttctgttgaatcccccaaaagtattcgaagccttttac

SEQ ID NO: 56171 - DNA, 277 bp, Zea mays
ctcctctcctttcctctcctctaggctctagtcctctcgcatccgcagcttccccagccagctagggtttgcagatgacgaccgcggcgcgccccacctgggcgccggccaagggcggcaacgagcaggggggcacccgcatcttcggcccctcccagaagttctcctcccgcgacctcgccgcgcacacctccctcaagccaagaaaagacggtcaacagacccaagaggagttacagaagaggaatctcagggaggaacttgaggaacgtgagcg

SEQ ID NO: 56172 - DNA, 282 bp, Zea mays
tgaaccgagaccaccaccgctctgcctcgcctcgcctcacctcacctcacctcgccgactagggttttgtaccgccgtggatctcgccgtccccgccatggacgtctcgcacgcgggatcctccgtcgccggcgaggctccgacgaccggggagcaccggatggggactaccatcgtcggggtctgctacgagggcggcgtcgtcctgggcgccgattccaggaccagcactggaatgtatgtagccaaccgtgcttcagacaagattactcaactgacaga

SEQ ID NO: 56173 - DNA, 274 bp, Zea mays
gctttctgcgtgcgggaggggggttgacaggcgatggcggccgagggcgaggcggcggcgctggagttcacaccgacgtggatcgtcgcggcggtctgctctctcatcgtgctcctctcgctcgtcgccgagcgatgcctccactacctcggcaagacgctcaagaggaagaaccagaagccgctcttcgaggcgctgctcaaggtcaaagaagagttgatgcttctggggttcatctccctgctgctgacggtgttccaggggatgatccgga

SEQ ID NO: 56174 - DNA, 273 bp, Zea mays
ctaatgtcatttttgggcttgctttgggttacaaatcagtcattatcccaatttttgctattgcgtttagtatcttcctcagcttcagccttgctgccatgtatggtgttgctgtggctgctcttggaatgctgagcaccattgccacaggtcttgctattgatgcatatggccctatcagtgataatgctggaggaatagctgaaatggctgggatgagccataggattcgtgagagaactgatgctctagatgctgcaggaaataccacgg

SEQ ID NO: 56175 - DNA, 273 bp, Zea mays
gaaccttctcgaagctccccgccgcctcctccactcgcaccgatggcgaaggaaccaatgcgcgtgctcgtcactggcgccgcaggacaaattggatatgccctggttcccatgattgctaggggtgttatgcttggtgcagaccagcctgttattctgcacatgcttgacattccgccagcagctgaagcccttaatggtgttaagatggagttggttgatgctgcgtttcctcttctgaagggagttgttgctacaactgatgttgtggaa

SEQ ID NO: 56176 - DNA, 274 bp, Zea mays
catcaaggcaccgtcggtgttcagtgtgcgcaacatcgggaagactctcgtatccaggacacagggtaccaggattgcttctgagggtctgaagcacagagtctttgaggtttgcctagctgatcttcagggcgacgaggatcaagcttacaggaaaatcaggctccgtgctgaagatgtgcagggcaggaatgtgctcacaaacttttggggtatgaattttaccactgataaactgagatccctagtgaagaagtggcagacattaatcgaa

SEQ ID NO: 56177 - DNA, 271 bp, Zea mays
caccccggcagccgcaaacgccttcgccgtcgcgtcccgctcctccgcccgcccgacgcgacccctaggacctggagagagaggtcggcatggctgccgcagtggtcgacgacgctggtatggacgccgtccagaagcgcctcatgttcgaagacgaatgcattttggtggacgagcaggacaatgttgttggccatgagtcaaagtacaactgccatttgatggaaaagattgattctgagaatctgctacatagggcattcagtgtgtt

SEQ ID NO: 56178 - DNA, 275 bp, Zea mays
aagcaatcttgcaatccacccctcgaaagataacctcaatcaacaccagaagctctcgatcccaccgaggaagaagaagagagaggaatggcgtccgaggagggagtcgtgatcgcctgccacaccaaggccgacttcgacgcccacatggccaaggccaaggaggccggcaagctggtgatcattgacttcacggcctcctggtgcggcccctgccgcttcatcgcgccactgttcgtcgagcacgccaagaagttcacccaggctgtgttcct

SEQ ID NO: 56179 - DNA, 273 bp, Zea mays
gtcattcataacagctgatgcttcaggggcaaaacatttgaacatcacactgacaaggtcaaaatttgaatctcttgtacacgatctgattgagagaactagagatccatgcaagaactgtttgaaggatgccggaatatctactaaagaggtggatgaagtacttcttgttggtggaatgactagggttccaaaggtgcaggaggtagtctctgaaatctttgggaagaacccaagcaaaggagtcaatccagatgaagctgtggccatggg

SEQ ID NO: 56180 - DNA, 272 bp, Zea mays
ctcgagccgtttcaatacacctaccctggatatattggagatgaatgtcttattggtaactggtttgggaagaagagtgtccaggaggaaagaagtgcagccatttcactagctgacaagatgattgagtctttaaaatttcaggctgttctggttcgcatttatgaaggaaaggaacccactgaatttttcccaatatttcaaaacttggttatatacaagggagggacaagtactgggtataagaaatttgtctcagaaaatggcattga

SEQ ID NO: 56181 - DNA, 254 bp, Zea mays
atctcgcatatccgctcccctacctctccagcatctaccgtctccgttgtatccgtctctgctcgtcacatcgccgccagccatgggcaagatcaagatcggaatcaacggtttcggaaggatcggcaggctcgtggccagggtcgccctgcagagcgaggatgtcgagctcgtcgccgtcaacgaccccttcatcaccacggattacataacctacatgttcaagtacgacaccgtgaacggcccatggaacc

SEQ ID NO: 56182 - DNA, 272 bp, Zea mays
gtttcctcgcagtcgctcactgcgtgcgccaaaagcagcagcagctccagccgtcgccgtctccactctccagtctccagcactgctccgcgcgcgtcggatcgagggagggcaggcggacgaggaggagagatgagtctcttcgggcttggacgaaaccagaagacattccgccccaagaagagcgcttcatcaggtagcaagggagcacagctccgaaagcacatagatgccactctcggcagtggaaaccttagggaagctgtgaggtt

SEQ ID NO: 56183 - DNA, 267 bp, Zea mays
cgccggagctcgacaaggacgaccgacgacgcacgcggagatccggcgtactgcaaattttgaaaactgaactgtaagatggcatcagcagagctttcccgtgaggtaaatgtgtacatggcgaactcgctgagcaggcggagaggtacgaggagatggttgagttcatggagaaggtagccaagactgttgactcggaggagctcactgtggaggagcgaaacctcttgtctgttgcatacaagaacgtcattggagcccgccgcg

SEQ ID NO: 56184 - DNA, 273 bp, Zea mays
atgctctctaccgtccgagaccccaagcaccagcgcggcggcgggggcggcggcgaccatggctgtcggaaagctcaagaggatctccaagggaaagaagggtggcaagaaaaagaccgtcgaccctttctctaagaaggattggtatgacatcaaggcaccgtcggtgttcagtgtgcgcaacatcgggaagactctcgtatccaggacacagggtaccaggattgcttctgagggtctgaagcacagagtctttgaggtttgcctagctga

SEQ ID NO: 56185 - DNA, 275 bp, Zea mays
caccaagaaggcagcggccgttgaccctgtggaaccggagaaggttctcaaggcggccggcgaggtcggcgcctacgtcgactgcgttctcaccacccatcaccactgggatcatgctggtggcaatgagaagatgaggctgcaggtgccagggataaaggtatttggaggatccctggacaatgtgaaaggctgcactgatcaggtggagaatggaatgaagttgtcacttgggaaggacattgagatactatgcctacacacgccttgccaca

SEQ ID NO: 56186 - DNA, 276 bp, Zea mays
gaagtctcttcctacctgaagaaggttggatacaaccctgataagatccacttcgttccaatctctggttttgaaggtgacaacatgattgagaggtccaccaaccttgactggtacaagggcccaaccctacttgaggctctggacttgatcaatgagccaaagaggccttcagacaagcccctgcgtctcccccttcaggatgtgtacaagattggtggtattggaactgtccctgttggacgtgttgagactggtgtcattaagcctggtatg

SEQ ID NO: 56187 - DNA, 278 bp, Zea mays
gggatttgtgttcgttagtcattccatgtgccctgacaaccttagatcattggtcaccagaagttaaggtacagggaatggtaagctttgtacacatagcgaagaatgtgaaagcaacggaattaagtttgtatgaagatgccatacttgatgcgtgctgtcagaacattcctgcagatgatgagttatggtaccaggttattgaggtatctgtgatgttgctgacattcacccagcggagcaatcctcgtagcccctggtatgatcgaatgcttagt

SEQ ID NO: 56188 - DNA, 289 bp, Zea mays
cgttccatttccccatctcccagatccaattcgcgagttctccctcctctgcctcgactggggcgaggcgggcggccccgacctcatcgtcgacgacggcggcgacgccacgctgctcatccacgagggtgtcaaggccgaggaggattacgagaagaccgacatgatccccgacccggagtccaccgacaacgctgagttcaagatcgtgctcaccatcatccgcgacgggctcaaggctgaccccaagaagtaccgcaagatgaaggagaggcttgtcggcgtctct

SEQ ID NO: 56189 - DNA, 287 bp, Zea mays
cgacgtatgagaaggtggcttctgttttcaagttggatgaaggagttgttattgctaaccttgacgctgacaaacacagggatttggctgagaagtatggagttagtggatttcctaccttgaagtttttcccaaagggaaacaaagctggtgaagattatgatggtgatagggacttggttgactttgtcaagttcattaacgagaagagtggtaccagccgtgacacaaagggtcaactaacctcagaggctggccgtatagcaagtctggatgtcctggctaag

SEQ ID NO: 56190 - DNA, 288 bp, Zea mays
gcagaaaccacaccactctactgacgcccgacgagcagtgtaacattttccttcagcctgggtaaggagaagactcacatcaacattgtggtcattggccatgtcgactctggcaagtcgaccaccactggccacctgatctacaagcttggaggtattgacaagcgagtgattgagaggttcgagaaagaggctgccgagatgaacaagcggtcattcaagtatgcgtgggtgcttgacaagctcaaggctgagcgtgagagaggtattacaattgatattgccctg

SEQ ID NO: 56191 - DNA, 287 bp, Zea mays
gcttccagagccccccgccgccgctgcgccctcctctcggtcctgccgtccgtcgaggtaaaaggacagcatggtgagggtcagcgtgctcaatgatgctctcaagtccatgtacaatgctgaaaagatagggaaacgtcaggtcatgatcaggccgtcatccaaggtgatcatcaagttcctgacggtcatgcagcgccatggctacattggcgagttcgagtacgtggatgaccacagagctgggaagatcgtggtggagctgaatggaagactgaataaatgtg

SEQ ID NO: 56192 - DNA, 287 bp, Zea mays
caatcccgagcagtggtgcgaaacctcgagcgctcgcgccggtgaccataacaaagaggaagccgcggtagactggtagcggcagcagtaagggggagatgtcgtcggcgttcagcggcgatgagaccgcccctttcttcggcttccttggcgcctccgctgcgctcgtcttctcatgcatgggggcggcgtacgggacagccaagagtggcgtcggcgtggcgtccatgggtgtcatgcgcccagagctcgtcatgaagtccatcgtgcccgtggtcatggctggt

SEQ ID NO: 56193 - DNA, 280 bp, Zea mays
aaacgctctctaccgtccgagaccccaagcaccagcgcggcggcgggggcggcggcgaccatggctgtcggaaagaacaagaggatctccaagggaaagaagggtggcaagaaaaagaccgtcgaccctttctctaagaaggattggtatgacatcaaggcaccgtcggtgttcagtgtgcgcaacatcgggaagactctcgtatccaggacacagggtaccaggattgcttctgagggtctgaagcacagagtctttgaggtttgcctagctgatcttc

SEQ ID NO: 56194 - DNA, 284 bp, Zea mays
caagatccaggacaaggagggcattccaccggaccagcagcggctgatcttcgccggcaagcagctggaggatggtcgcaccttggctgactacaacatccagaaggagagcaccctccacctggtgctccgcctcaggggtggtatgcagatttttgtgaagacattgactggcaagaccatcaccttggaggtggagtcgtctgacacaatcgataatgtcaaagccaagatccaggacaaggagggcattccaccggaccagcagcgcctgatctttgctg

SEQ ID NO: 56195 - DNA, 286 bp, Zea mays
acgctttccttcgagtgccatggccgatccggcggaggagaacgttgtctcgccgccaccgacacctgcggccccagccgtgggcgcctcagacccgcccctgcagcctgctgctgacagcgcctcaacggagaaggtgtctgctccggcgccggaggtaaggtcccggggattcaggcttcttggagaggacacttccgtgcacaaatcccttgggggcggtaaaactgctgacgttctcttatggaaagacaagaaaacttctgctgttgtaataggcggcgca

SEQ ID NO: 56196 - DNA, 287 bp, Zea mays
atcgcctgcgatcttcgtagcctccgtcgcgtcgagcatagatcatgtcggcctactgcggaaagtacaaggatgagctcatcaagaatgctgcctacattggcacccccggcaagggtatccttgctgctgatgagtccactggcaccattggcaagcgcctttccagcatcaatgtcgagaacgttgaggagaaccgccgtgccctccgtgagctcctattctgctgccctggtgctctccagtacatcagcggtgtgatcctcttcgaggagaccctgtaccag

SEQ ID NO: 56197 - DNA, 284 bp, Zea mays
aggcggctgcgacgacgccgacgacgggccctctccagcacctataacatcctgcaatgccagaaggtcagcgacttcctcatcgccgcggcctacttctccatcccgctcgagctgctctacttcgccacctgctccgacctcttccccctcaaatggatcgtgctgcagttcggcgccttcatcgtgctctgcggcctcacgcacctcatcactgtgttcacctacgagccgcactccttccacctcgtactcgctcttaccgtcgccaagttcctgacggc

SEQ ID NO: 56198 - DNA, 286 bp, Zea mays
cgccgtcatctcattctccctcgcaccgacgaggtcaggtcagagaccttcgagtactactagtcatggcccgcatctagaaggcagcaagaaagggggcggctggggcgcgcgttcgtgtacgtgatcctgggcggcggcgtggccgctggctacgccgcgctcgagttcgcccgccgcggtgggtactcccgcggagagctctgcatcatctccgaagaggccgttgctccttatgaacgtcctgcactaagcaaaggctatttactcccagaaggtgctgctc

SEQ ID NO: 56199 - DNA, 279 bp, Zea mays
ctggttttgaaggtgacaacatgattgagaggtccaccaaccttgactggtacaagggcccaaccctacttgaggctctggacttgatcaatgagccaaagaggccttcagacaagcccctgcgtctcccccttcaggatgtgtacaagattggtggtattggaactgtccctgttggacgtgttgagactggtgtcattaagcctggtatggttgttacttttgggcctactggtcttactactgaggttaagtccgttgagatgcaccatgaggctc

SEQ ID NO: 56200 - DNA, 286 bp, Zea mays
aggcaaggacatgacccaggatacaacctttgagtttgagaggaagaggaacaggcccgagcgctacgaccgcaatttgacggagcagaccctgaaggctatcccgcttattacaaagattaggcatgatcgtatggaaaaacacatctcaaacagacataaacctggtaaacgcaaggagatggaaaaggattccaaggagctggagcaggacatcgccatgctcccgaagaagcttattagcaaccatcttgcggctgagaaaacgaaggtcaaggttgaagtt

SEQ ID NO: 56201 - DNA, 284 bp, Zea mays
catccagccgccaccaggtgcagagtctttcgtcatctcttctccggcgaagaacccccagtcgcccaccagatcacttgttaaactttgttgaggggtgatggcggtttctttcgcaaacctcaactccgaggcagggcttaaaaagcttgatgagtaccttctcactcgcagctacatcactggctaccaagcttccaaggatgacttggctgtctactatttgttttctgctgctccctcgtccaagtatatcatcgtagcaaggtggtttaaccacattg

SEQ ID NO: 56202 - DNA, 281 bp, Zea mays
actcgagcgaattcggctcgagtggtacttcaggtcactcaatgaagtgatcatcactgcacttaaatccgcctactctataacggcagcaagagtagaaggtctcactggtgtttgggttggggaccgtaaagttgcggcgatagggatccacggttctcggatgatagtttatcacgggctcgcactaaacataacaactgaccttgctccattcagaatgattgatccttgcggcataaaggaccgcggtgtggggagcattaaggagatactacaaa

SEQ ID NO: 56203 - DNA, 281 bp, Zea mays
cggcgaggagggcaggaagaccgaagaccgagccgtgcgggggctgcggacgggaacgggacaggacctcaaaatctcagatccttcctgcatgcccgcccgtgcccgtcgacgcgtcgttcacgccggccgcgccccacctccgccctctcctcctccagggggatcggatacgccacaggctgcgcgatggtgctgtgggtcttcggctacggctccctcatctggaaccccggcttcgacttcgacgacaaaatcctcggcttcatcaagggctacaa

SEQ ID NO: 56204 - DNA, 278 bp, Zea mays
attgacttgttgattgatagattatctgctttagttagatttggaggggcatcatctgattggatccttcctttacattcactgcttggaccctctgatcaaaggaaagtgttccagtctccaccagataacttccgcaaggttattattgccacagacatagcagagaccagcattacaattgatgatgtagtatatgtagttgatactggaaagcacaaggagaaccgttataatccacacaagaaaatgtcaagcatagtagaagattggatttc

SEQ ID NO: 56205 - DNA, 277 bp, Zea mays
cgaagcttggtattaaatactgctacaacagaccatgtgctctgtatgctgctcctgatcctttcggacaagaagctgagaaatcattaactgagggcaataagggtgaaactacaactatgatcaaattaacagcaaacctgagcagtgcctttttcccacggttcagtccggatgggaagtatcttgtcttcatctcagcgaagagtgctgtagatagtggggcacacaatgccacaaattcattgcatagaatcgaatggtgtacagatggaaa

SEQ ID NO: 56206 - DNA, 285 bp, Zea mays
gctgaattgtcatcaggaaagctggagatggaagcgaggaggaattaaagaggacaataaacgcctgatcgcagcggtagagcctaccgtctgtaaccggaaggtcccgggttcgagccccagcctctgcatattatgcgggtaacgcttggcgcttaaagatacccttccccagaccccgcacagtgcgggaagcctacgacactggaaagcagaaaaccatacaggcaatgacaggttgtgcgaggggttgtgtacttgtgtgagatgctgccgcggacgtgt

SEQ ID NO: 56207 - DNA, 279 bp, Zea mays
aggacgaggaaggcatgccggcgttcgcgctcgtcaacaaggccacggggctcgccatcaagcactccctcggccagtcccacccggtcaagctcgcgcctttcaacccggaccaggaggacgcgtcggtgctgtggacggagagcaaggacgtgggcaagggcttccgctgcatccgcatggtcaacaacatctgcctcaacttcgacgccttccacggcgacaaggcccacggcggcgtccatgacggtaccgagatcgtgctctggaagtggtgcg

SEQ ID NO: 56208 - DNA, 281 bp, Zea mays
ctgagatcctgtcttcgaccacggactcacgctttgcgaggcagctgggcatccctgccctcgggttttctccgatgaccaggacgccgatactgctacatgaccataacgagtttctggaagacagagtgttcctgaggggcatccaagtgtacgaacatgtcatcagagcactaagctcgttccaaggctgattcgtaaaaacaaaaagaagaaggaaaagtgttgttgcgtggagtgtaacatagctggatccccaactctcatctgctgaatgaagg

SEQ ID NO: 56209 - DNA, 281 bp, Zea mays
acctgatgtcgccatgactcttgctgtggttgccctctttgccgatggcccgacagccatcagagacggtaaaacattctcagccctacaaccatgcctcttctacatcactacttgacaagactaaaaactattggctcgttggcagtggcttcctggagagtaaaggagaccgagaggatggttgcgatccggacggagctaaccaaggtaaggctacatacttcacatgtctcacgtcgtctttccatagctcgctgcctcttagcggcttgcctgcg

SEQ ID NO: 56210 - DNA, 279 bp, Zea mays
acatgtggatcttgaacctgtgcaaactgaaaggccaggagaattgacagcatattacaagattgctaaacattataagtgggccttggacaacctattcattaaacataattttgctcgagtaatcattctagaagatgacatggagattgccccggattttttcgactacttcgaggctgcagctaaactacttgataatgacaagacgattatggctgtttcgtcttggaatgacaatgggcagaagcagtttgttaacgacccaaaagctcttta

SEQ ID NO: 56211 - DNA, 276 bp, Zea mays
accgacgccccatgatttcgctctcttcttcccgtcgagacccaaccataccagcggcgccgcaggtgacgaggaggcggagtagagtggccggactacctcgacacctccactgcaaccatgggtatctcacgtgattcgatgcacaagcgccgggccaccggtggaaagcagaagacgtggcgcaagaagcgaaagtatgagcttggccgccagcctgctaacaccaaactgtctagcaataagacagtgaggagggtccgtgtccgtggaggc

SEQ ID NO: 56212 - DNA, 277 bp, Zea mays
agatcggtatcgatctcggtaccacctactcctgtgtcggtgtgtacaagaacggtcatgtcgagatcaacgccaatgaccagggtaaccgtatcacaccctcatgggttgccttcaccgatagcgagaggctcatcggtgaggctgccaagaaccaggcagccgtcaaccctgagaggaccatctttgacgtcaagcgtctcatcggaagaaagttcgcggacaaggaagtccagagggacatgaaacttgttccctacaagattattaacaagga

SEQ ID NO: 56213 - DNA, 282 bp, Zea mays
ctccttctcactgcctgtccaggcgccgccgcttcgccgctgcccgtttcttcgaaccactccgaagctgccccgccatggacagctccgccactgacggcgcgaggctaccgccgccaagggccgggagtcgcctctgcgtcaggtgcggtgagaggaaggccgcgctgaagcggcccaaaaccctagaacagatctgtagggaatgcttctatatcatctttgaggacgaaattcatcaaactattgtccagaattctctgtttaaagctggtgagcgtg

SEQ ID NO: 56214 - DNA, 282 bp, Zea mays; identical to SEQ ID NO: 37197

SEQ ID NO: 56215 - DNA, 275 bp, Zea mays
gcggagttgcgagagctagagaagagtcatactagagagaatactgcagtcagccctccggaggtacaacgtccaaagaaagcaaggattcagatgttttcccctgcggagggggtgccagataatgtaatagtctagattgagtatgcgaagtctggtcgctctacctgctaaggctgcagtgagaatattgccaaaggtgccctccgccttggtgcctcttttcctgatccccgtggctacgaaaatactaagtggtaccatgttgtgtgctt

SEQ ID NO: 56216 - DNA, 279 bp, Zea mays
tgggagaagatgtagtccacccacttaaagtttctctggaagatctttacaatggcacctcaaagaagctctctctttcgcgcaatgtcatctgctccaagtgcaagggcaagggctcgaagtctggtgcctcaatgaggtgccctggttgccaggggtcaggcatgaaagtcactattcgtcagctgggcccttccatgatacagcagatgcagcagccttgcaatgagtgcaaggggactggagagagcatcaatgagtatgaccgctgcccagggt

SEQ ID NO: 56217 - DNA, 276 bp, Zea mays
gagccaaccaggaggatgccctcgcgcgaattgaaaagctttcagaagtaaacccgatgcttggcttccgtgggtgcaggcttggtatatcgtaccctgaattgacagagatgcaagcccgggccatttttgaagctgctatagcaatgaccaaccagggtgttcaagtgttcccagagataatggttcctcttgttggaacaccacaggaactggggcatcaagtgactcttatccgccaagttgctgagaaagtgttcgccaatgtgggcaaga

SEQ ID NO: 56218 - DNA, 279 bp, Zea mays
gagccaaccaggaggatgccctcgcgcgaattgaaaagctttcagaagtaaacccgatgcttggcttccgtgggtgcaggcttggtatatcgtaccctgaattgacagagatgcaagcccgggccatttttgaagctgctatagcaatgaccaaccagggtgttcaagtgttcccagagataatggttcctcttgttggaacaccacaggaactggggcatcaagtgactcttatccgccaagttgctgagaaagtgttcgccaatgtgggcaagacta

SEQ ID NO: 56219 - DNA, 278 bp, Zea mays
cctcagctcccatatccgctcccctacctctccagcatcctcccgtctccgtcgtctcgtctccgctcctcacctcgccagccatgggcaagatcaagatcggaatcaacggtttcggaaggatcggcaggctcgtggccagggtcgccctgcagagcgaggatgtcgagctcgtcgccgtcaacgaccccttcatcaccacggattacatgacgtacatgttcaagtacgacaccgtgcacggccaatggaagcacagcgacatcgccctcaaggac

SEQ ID NO: 56220 - DNA, 277 bp, Zea mays
accgcatgttcatcacacggacggagtgggcgactgaatggggcggcgccaagcagaaggacgtcggcacaccgttcaagcgcctccccttctactgttgctcgctcacgtttcttccattcgaggatccagtgtgcaccgtcgatggaagcgtctttgatttaatgagcataatcccataccttaaaaagtttgggatgcatccagtaaccggagcaccactcaagcacgaagatctgattcctctcacattccacaagaactcagatggagagtt

SEQ ID NO: 56221 - DNA, 275 bp, Zea mays
atagaagtattttctgaccttgaagcaagtaaatatcagatggctgagtatcggatatctatttatgggaggaagataagcgaatgggaccaaatggcaagttggatagtgaacaatgaattatatagcgagaatgttgtttggttaattcagattcctcggatatacaatgtatacagggagatgggcacaatcaattctttccaaaacctccttgacaatatttttctccctctttatgaagtaactgttgacccagcttcacatcctcagct

SEQ ID NO: 56222 - DNA, 278 bp, Zea mays
ataaaataagcacttacacaattggccctttccaaacctccaacggagagaaggccaaactgaaagtgaaagtgcgtctcaacatccatgggaccgttacagttgattcggtgataatgctggaggaggatgtggaagttccagtctcatctgcaaatgaagctccaaacgatactatgaagatggacacagatgatgtgccaagtgatcctgctgctggatctgatgtgactatgcaggagcagcctcctgcagctggaaatggagcacaagataat

SEQ ID NO: 56223 - DNA, 277 bp, Zea mays
gtcaatttgcagtccggggagagattgtcacacgtgctcagaaactgcaacaagaactgcagagaaatccagagtcgcttccttttgatgagatactctactgtaacattggaaatccccattccattggccaacagccagttacctatttcagagaagttctatctttatgtgagaatccagctctcctggacaaaagtgaaacgcatgctttatacaggtcagatgctatagagagagcacggaaaattctagacaaaataccaggaagagctac

SEQ ID NO: 56224 - DNA, 274 bp, Zea mays
gtctcctcccacccgcaaccgcaggagagaaaggggaagcccgccgccgccccggcccccagcaaccagcagatcgggacctctgttctgcgcaatccatccatggcggaggaatcaggccgtcccttgccaaagtttggtgaatgggatgtcaacgatccggcttccgcagacggatttactgtcatattcaacaaagccagagatgagaagaagggtgggaatggtcaagacacagactcaccttccaaggaccccaggactgagagggtgg

SEQ ID NO: 56225 - DNA, 272 bp, Zea mays
atttcatgtacgaagctccccttggctacaagatcgaggacgttcgcccagccggaggaatcaagaagttccagactgctgcttattccaactgcgtccgccagccatcctgatatcgcctcacatgcaattcgcggtagagtaggattttaattcagttttcctcttgtgtcggtagttttccgttggctctggctgccttcctctgcttctgagattccaacttgtcttgcccatctctccttttcctctctcatcctctctttcttgca

SEQ ID NO: 56226 - DNA, 274 bp, Zea mays
ccgttccatttccccatctcccagatccaattcgcgagttctccctcctctgcctcgactggggcgaggcgggcggccccgacctcatcgtcgacgacggcggcgacgccacgctgctcatccacgagggtgtcaaggccgaggaggattacgagaagaccggcaagatctccgacccggagtccaccgacaacgctgagttcaagatcgtgctcaccatcatccgcgacgggctcaaggctgaccccaagaagtaccgcaagatgaaggagag

SEQ ID NO: 56227 - DNA, 274 bp, Zea mays
gttgttgagaagtccactgtccctgtcaagaccgctgaggctattgagaagatcttgacccacaacagcaagggcatcaactaccagatcctttccaacccagagttccttgcggagggcactgccattgaggacctgttcaagcctgacagagtgcttatcggtggccgggagacccctgagggcaggaaggccgtccaggctctcaaggatgtgtacgctcactgggttcccgaggacaggatcctcaccaccaacctgtggtctgctgagc

SEQ ID NO: 56228 - DNA, 268 bp, Zea mays
aacccaaactcttgggcttgtcacgagtgctggtttccctgctggaaagtacctctttgctggtgttgtggatggacgcaacatctgggctgatgatcttgctacatctctcagcactctccagtctcttgaggctgttgttgggaaggacaagcttgtcgtatcaacttcctgctcgcttatgcacaccgctgtggatcttgtgaacgagactaagcttgacagcgagattaagtcttggcttgcttttgctgcccagaaggttgtt

SEQ ID NO: 56229 - DNA, 265 bp, Zea mays
ctggaggaattgagtaacaaaggcttgatcaaggagagtgagggtgcccgagttatatttattcaaggtcatcaaatccctttgattgttgttaagagtgatggtggcttcaactatgcctcaacagacttaactgctctttggtatcggctcaatgttgagcaggcagagtggatcatatatgttacagatgttggtcagcagcagcactttgacatggttttcagtgctgcaaagatggccggttggctcccagatccaagtg

SEQ ID NO: 56230 - DNA, 266 bp, Zea mays
ggaggtccgtagctgctcatccgtggcatgatcttgagatcggtcctgatgctcctgctgttttcaatgttgttgttgagatcacaaagggaagcaaagttaaatatgagctcgacaagaaaactggactgattaaggttgatcgagtcctgtactcatcagttgtataccctcacaattatgtgttcgttccgaggactctttgtgaagacaatgacccaatggatgtgttagtcctgatgcaggagcctgttgttcctggttcg

SEQ ID NO: 56231 - DNA, 260 bp, Zea mays
cgagtctcgtccacccgtcgtcctcctagctcctctactcgccagtcgccatgggcaagattaagatcggaatcaacggcttcggaaggatcggcaggctcgtggccagggtcgccctccagagcgaggatgtcgagctcgtcgccgtcaacgaccccttcatcaccacggactacatgacctacatgttcaagtacgacaccgtccacggccactggaagcacagcgacatcacactcaaggactccaagacccttctc

SEQ ID NO: 56232 - DNA, 266 bp, Zea mays
ggcacctgcatgtgtacgactggcctggcggtgatttcaagcagacacttgatctaggtgacactggactccttccccttgaggtgaggtttttacatgatccatcaaaggacactggctatgttggctgtgctttaacaagcaacatggtgagtattttcaagaccgcggatggatcgtggagccatgaggttgctatctctgtgaaaccactgaaggtccgcaactggattctgccggaaatgccaggattgataactgatttc

SEQ ID NO: 56233 - DNA, 265 bp, Zea mays
gttcaggatccacatcttcccgagcgagttcttggttgacctcttcctcttcggaccacctccaaggctcttggtgtagcttgccactctcaccaatcaagttttcatgtctgatctcgacattcagatcccaactgccttcgatcccttcgctgaggccaatgctggggactctggtgcggcagcagggtcaaaggactacgtacacgtgcgcatccagcagcgtaatggtcgcaagagcctgactaccgtccagggattgaag

SEQ ID NO: 56234 - DNA, 264 bp, Zea mays
gagatatgcgtcatgctttgtgctgaccatggtccctgtgtatctggtgctcataactctatagttactgctagggccggaaaggaccttgtttccagcttggtgtctggattattgacgattggtccccgtttcggtggagcaattgatgatgcagcccgatacttcaaagatgcatgtgataggagcctcacgccatacgagtttgttgaaggcatgaaaaagaagggaatccgtgtgcctgggattggtcacaggattaag

SEQ ID NO: 56235 - DNA, 257 bp, Zea mays
gcccaagtgcgcacaccacaacaaccactacgacgggttcatgaacttcatgcaccgccacgaggaggtcgactacttcccctccaggtacgacgccgccaggaacgcgcccaggtaccccatcccgaccgcccacattgccggccgccgagagaagactgtgattagcaaggagaacaacttcaagcagcccggggagaggtaccgcgcgatggacccagcaaggcaagagcggttcatcaccagatgggtcgacg

SEQ ID NO: 56236 - DNA, 255 bp, Zea mays
gtgacaaggggaaggaggttatggaggaaggaggaagtaagggaaagggtaagggtaagggtaaggggaagaaggcttggtcaagaaggaagaaaggggtgaccgtaaggttgcagggtttatattcatgtgcaatgcaaagactaagaaggagtgctaccagagtcgcttgtttgggatgcctagtgggaagattgaaatggtcaagaagattaggccaggggtcaagctgttcctgtatgattttgacttgaa

SEQ ID NO: 56237 - DNA, 261 bp, Zea mays
tgtgtgtggaactccaagtggagcgctcttattatattcatggggatactttaatgattgcagtgaccgctttctcggacacacgcagtctgtggatacaatgctgaagctggatgaagacactttggtttctggatcatcagatggtgtgatcagattagtgggcatcctacctaataggataaaacagccacttgctgaacattcagaataccccattgaggcccttgctttgtcaaacgacaagaaatatttaggcag

SEQ ID NO: 56238 - DNA, 262 bp, Zea mays
cggcaactgcgatgcttgggcggccagagacccttctggggttctctcaccatacaagtttaaccgcaggcagtgcaaagcagcgacgtttcgctgaagatcatatactgcggggtgtgttacggtgacgttatgtggatacagaacaagcacaacgactcagtttatcctctggttcctgggcatgagatagctggggttgtgactgaggttggcgcagacgtcaaggccttcaaggtgggtgaccacgcggcgttggaac

SEQ ID NO: 56239 - DNA, 254 bp, Zea mays
ggtgaccaagaaggtgcccgtgctcgtccacgacggcaagccggtcgcggagtccaccatcatcgtggagtacatcgacgaggtctggaagggcggctaccccatcatgccgggcgacccctacgagcgcgcccaggcgaggttctgggccaggttcgcggaagacaagtgcaacgctgctctgtacccgatcttcaccgcgaccggcgaggcgcacgcaaggcggtgcacgaggcccagcagtgcctcaagac

SEQ ID NO: 56240 - DNA, 252 bp, Zea mays
ggacttctgtgattttatctcaccttctactgaagagcaatcttcacgagcagctgctgtgcaagatgtctctgatgttgtcaaacatatatggccacagtgcaaggtggaagtttttggatctttcaggacaggtctctatctaccaacaagtgatatagatgttgtgatatttgaatccagagttaagactcctcaagttggtctatatgctcttgcaaaagcattatcccagaaaggtgttgctaaaaa

SEQ ID NO: 56241 - DNA, 255 bp, Zea mays
tggagtccattgacatatgtgagattgatcagctggttattgatgtgtgcaaagatttcttcccacacttgtctgttggatttcaagatctcgtgttcaacttcatgtcggcgatgctgtggagttcttgagaaatgctcctgaagggacatatgatgctatcattgttgattcgtcagatccaatagggcctgctcaggaacttgtagagaagcctttttgtagtaccaattgctagagctttgaggcctggag

SEQ ID NO: 56242 - DNA, 265 bp, Zea mays
gcgatgccgaagaacaagggaaagggaggcaagaaccggaagcggggcaagaacgaggcggacgacgagaagcgggagctggtgttcaaggaggacgggcaggagtacgcgcaggtgacgcggatgctgggcaacggccgctgcgaggcgctctgcatcgacggcaccaagcgcctctgccacatccggggcaagatgcacaagaaggtgtggatcgccgccggggacatcgtgctcgtcggcctgcgcgactaccaggacgaca

SEQ ID NO: 56243 - DNA, 260 bp, Zea mays
ggcatctactgcatcttcgagcgcggcagccagaggccgcctggactgcggaccccagatgatctgccgctacgataccatatactcggacggcacggccaacctcgataccggcgccgacttcgcagctgccttggacatcgaccacctcaacgaccgcgctcacggtagctcaccgactggctgctctggctcaagtcgtccgacctgggcttcgacacctggcgcctcgacttcgccaagggctactgccccgaggt

SEQ ID NO: 56244 - DNA, 257 bp, Zea mays
gcaggatctgctctggagcagcttaaaacttatctccatacatcagcaaacgacataccaaggatcattggtgactccatcccaatgaaggcgacttttttcataacatatgtgatggttgatggttggactggaatagctggtgaaatattgagactgaagccgcttatattcttccatctgaagaactttttcttggtcaaaaccgaaaaggacagagaagaagctatggaccctggcagtatctgctttgactc

SEQ ID NO: 56245 - DNA, 260 bp, Zea mays
cgatgatatgatttcctgatctggtgtgcttgcagggatggtgaagcttcaaagttgactgaaaatggcttccaatttcttctgatggaacaaatgcacaactttggtacataatgagagaatacatttcatctgctgaggaacgtggagtggaccctacggagctgatatcatttctcttggaacttagctttcataaattgggagcggtaaagtgatagtactttcagaacatcacgttaagcaagtagctatacata

SEQ ID NO: 56246 - DNA, 150 bp, Zea mays
tttagtttccatatttgacaatttagttactaaagtggaataaattggagggactaaaaattagtctctaaaaccaaacacccccttagtttgttgtggtaataattcctgtatcaattatgtcataaataaaagctagggaaccttgat

SEQ ID NO: 56247 - DNA, 258 bp, Zea mays
caagaagagggaagagcaccaaggaccttcggcgcccgttcaggatccacatcttcccgagcgagttcttggttgacctcttcccccttcggaccacctccaaggctcttggtgtagcttgccactctcaccaatcaagttttcatgtctgatctcgacattcagatcccaactgccttcgatcccttcgctgaggccaatgctggggactctggtgcggcacagggtcaaaggactacgttcagtgcgcatccagca

SEQ ID NO: 56248 - DNA, 246 bp, Zea mays
cgaggaagagatgcgcaggaagcaagctcacgctgcccaggaggcgtacgaggaggacgacgagatgccgggcggagcaagagagtgcagtgcgcgcaacagtaagcagactatcatcaaggcaattgggaggggtggtgcccttaaagcatgggagtgatctctggttttgctgtcgccgagctgggaaataggaagctgaatcgacctcgcaagcggggaatgtatccttttttgctgcaacag

SEQ ID NO: 56249 - DNA, 254 bp, Zea mays
gcaccaatcaatctttccgatcgtcttaatcaggttctccgttgggctcttgggtcagtggaaattctgcttagtagacattgtcctatctggtatggttacaatggacgattgaagcttttggagaggctggcttacatcaacactattgtatctccaatcacatccattccgcttattgcctattgtgtgcttcccgctatctgcctccttaccaataaatttatcattcctgagattagcaattatgctgg

SEQ ID NO: 56250 - DNA, 210 bp, Zea mays
ggttaacggcaacttctgcattgaacagtgatttctttgcaacagagccttatgcgtgtgaaccatcaagtctgccccaatacccaccaagtaaagagatggatgctaaacgaagagacgaagaagctagacgcttaagggctgctggtggtagaggtaacggagatggaacaaggcagacaaggacacgggatcggcctagggctgttt

SEQ ID NO: 56251 - DNA, 230 bp, Zea mays
tctacaggtatatctagaactgaaccctcagcagacattccattggaatattccccattaaatccagtatgtgatattatggatccatcctgaactgccgaagtatcccaacaaacaactgtgaaaatagaactctggtagagaagtcagaacattgtccggatgattataatttggaaatgaagaggaaaagaaacgatggtacaaaaggtacagttgttctaaatagc

SEQ ID NO: 56252 - DNA, 261 bp, Zea mays
agcgtagtcgtcgccggaaggaaaggcgcggagcaagatgtcgtggcaggcgtacgtcgatgagcacctgatgtgcgagatcgaaggacacatctcagcgccgccgccatcgtcggtcacgacggcagcgcttgggcgcagtccgagagcttccccgagttaaagcctgaggaggttgctggtatcataaaggactttgatgaacctggtactcttgcaccaactggtcttttcgttggaggtacaaagtacatggtgatc

SEQ ID NO: 56253 - DNA, 260 bp, Zea mays
ctgggatgggaagagcaccgctgaggatctggagaaggttgctaccgacctcagggccagtatctggaagcagatggctgatgctgggatcaagtacatccccagcaacactttctcgtactatgaccaggtccttgacaccactgccatgctcggcgctgtccccgaacgttactcatggactggaggagagattggatttgacacctacttctccatggccaggggcaacgccactgttcctgctatggagatgacca

SEQ ID NO: 56254 - DNA, 258 bp, Zea mays
ctcctggtcacagcagctcctcgacgccggcgtccgaatcatccaaggggacataagaaagaaggatgatgtgcggaaggctttccgtggagtggactgtgttttccaccttgcttcttatggcatgtcagggaaggagatggtgcagactgggagatctgatgaggttaatataaaatggacctgcaatgtactggacgcttgccatgagcaagatgtcagaaggcttgtgtatgtacgcacatacaatgtggtatt

SEQ ID NO: 56255 - DNA, 254 bp, Zea mays
gttctggaggtccttgggaaaaaactgtcgtttgagattgctgttggactcaatggtcgagtctgggtgaatgctcctgcagcaagtactgtcattcttgtatcaaatgcaataattaggtcagaatctttgagcggcataaaacaaagagctatggtagaaaatctattggagagattgtcatgatgataagtcagcaagcattagtctaaagtataatggaggagtttccattgtgtcagttcaaagtaaaa

SEQ ID NO: 56256 - DNA, 258 bp, Zea mays
ctcgagcgcgtagacagtccattattgccgtctcccttgtgcgtgagaaagagagagagcgagaagcagtcgccatgtctggcatcatccacaagatcgaggagaagctccacatggggggcgaccacaagaataaggaggaggagcaccacaagaaggccgaggagcaccacaagaaggaggagggggagcaccacaagaaggacggcggggagcacaaggaaggcatcgtggagaagatccaggacaagatcaccg

SEQ ID NO: 56257 - DNA, 250 bp, Zea mays
ctcgagcggaattgtgttcagaccagcactcaatctcaagggaggagcaggattcgtatgctatcctcagcaatgaacgtggctagcagctcgggatagcggtgcattttcttgggagattgttcctgttgaaatttcttctagttgagggaaaccaccagttgttgttgacaaggatgagagtcttgcaaagtttgatccagtaaagctgaagaaacttgggccaacttttaagacgaatggttctgta

SEQ ID NO: 56258 - DNA, 268 bp, Zea mays
gcttcgttgagtcctgacagaaaggtggttgttattgtgggtgatgatcctgatggtctacttattgatgcaaactctggaaagacagttcattccataaaaggacatcgggactactcatttgcatcggcttggagccctgatgggcgaacatttgctaccggcaaccaagacaagacatgccgaatctgggacgtgaggaacctttcaaaatccgtccatgtgttgaggggtaaccttggagccatccggtccatccgcttcacct

SEQ ID NO: 56259 - DNA, 265 bp, Zea mays
cgacggcgacggcaacgactggcgcgacagtcgctgccgccctacttgccggttgctcggatcttcttcggcccgttagccgtcgacgagcaccaccagggacaccagatacttcagtggcttcgcaaggatgtcctggtgcactattgagtctgatcctggtgtgttcactgagctgattcagcaaatgcaagtgaaaggtgtacaggtggaagagctttactctctcgatgtgggctctcttagtcaactgcggccagtatat

SEQ ID NO: 56260 - DNA, 261 bp, Zea mays
gcaaaatctatccaaatgttcatgttgttcaatcaacttttcagatccgaggaatgcatactcttatccgtgatagggacatcaccacacctgactttgtattttattcagatcgattgatccgtttggtagtggagcatggtcttggacatttgccatttacagaaaagcaggttattaccccaacaggatctgtttatatgggagttgacttttgtaagaagctctgtggagtctctattgtgcgaagtggtgagagta

SEQ ID NO: 56261 - DNA, 260 bp, Zea mays
gcaagaactagtgttgccagtaccacagtgctgtcttcaacttcaggactcttcactcttttcattggtgttttacttggccaagactccataaatgctgcgaaaattattgctgttttcattagcatggctggcgttgtaatgacaactgtgggccagacttgggcatctgatgaatcagaagcaggcaaatctggttttacacagaggactcttctaggtgatatgtttggtcttatgtcagcaatcgcctatggtct

SEQ ID NO: 56262 - DNA, 260 bp, Zea mays
cggcgcacctggttggcagcttgggtggacatgggcaaagaaggaggttatatggtcaatggttggggctcagaccactgaacagggcgactgctcaaagttcaagagcagcccaccccattgctgcaagaaagatccaacaattgtcgatttacttccaggcactccatacaacatgcaaatcgccaattgctgcaaggcaggagttgtaaatacctttaaccaggacccagcaaatgctgcttcctccttccagatca

SEQ ID NO: 56263 - DNA, 259 bp, Zea mays
gttaagggtggcactctcatctcttacgaaggaagagttcagcttttggagattgcccaagtacccgatgagcatgtgaatgaatttaaatcaatcgagaagtttaagatattcaacactaacaacttgtgggtgaaccttaaagctatcaagagactcgtagaggctgaggcacttaagatggaaattattccaaaccccaaggaagttgatggtgtgaaagtccttcaactcgaaaccgcagctggtgcagctattc

SEQ ID NO: 56264 - DNA, 261 bp, Zea mays
atttctcatttcttgagatgaatccgttcaccatggtcaatggggagccatatcctctggacatgagaggagaactagatgacacagcagctttcaagaacttcaagaagtggggaggtatagaatttcctctaccttttggaagagtactcagccctacagaaagtttcatccatgaactagatgagaagacaagtgcctctctgaagttcacggttttgaacccgaaaggtcgcatctggaccatggtcgctggtggtg

SEQ ID NO: 56265 - DNA, 264 bp, Zea mays
ccaaggagaagaataggaagttcactgagactgtggaacttcagattggtctgaagaattatgatccacagaaggacaagcgtttcagtggctctgttaagttgccccatatcactcgtcccaagatgaaggtgtgcatgcttggtgatgcccagcatgttgaggaggccgagaagatgggacttgactacatggatgttgaggctctcaagaaaatgaacaagaacaagaagcttgttaagaggcttgccaagaagtaccatg

SEQ ID NO: 56266 - DNA, 289 bp, Zea mays
ttctctagcgtagtacgtcggaattctgtcgagccgcaggaccttcgactcgagcggacaggcgaggcagagatggcgctgcgacgggcgctcctcagatcggtcgacttctcccccgacagcaaggctgcaattgagtacttttattctttctcaagggcacagtctgcttgttctctcaatggtgctggtctttgtcctgctagtagatcatttagcacccaggctgccactacgtcaagcacaccacagcctccacctccaccaccccctccagagaagactcact

SEQ ID NO: 56267 - DNA, 259 bp, Zea mays
acattttggatcaagcccttttgatgcctggccgcatagacaggaagattgagtttccaaatcctaacgaggactcacgtttcgatattctgaagatccattcaaggaaaatgaacttgatgcgtggtatcgatctgaaaaagatcgcagaaaagatgaatggggcctcaggagctgagctcaaggccgtctgtacagaggctggaatgtttgctctccgtgagagaagggtgcacgttacacaggaggacttcgagat

SEQ ID NO: 56268 - DNA, 260 bp, Zea mays
cgcctctcgagtctcgtccacccgtcatcctcctagctcctctactcgccagtcgccatgggcacagattaagatcggaatcaacggcttcggaaggatcggcaggctcgtggccagggtcgccctccagagcgaggatgtcgagctcgtcgccgtcaacgaccccttcatcaccacggactacatgacctacatgttcaagtacgacaccgtccacggccactggaagcacagcgacatcacactcaaggactccaaga

SEQ ID NO: 56269 - DNA, 256 bp, Zea mays
gccagaacgacatcttctacatcactggtgagagcaagaaggctgtggagaactccccgttccttgagaagctgaagaagaggggctatgaggtgctgttcatggtggatgccattgacgagtattctattggacagctgaaggagtttgagggcaagaagctcgtctctgccaccaaggagggcctgaagctggacgagagtgaggatgagaagaagcgcaaggaggagctcaaggagaagtttgagggcctctg

SEQ ID NO: 56270 - DNA, 255 bp, Zea mays
gaaatggtgggcctgctcctgaatctgttaccgacaagattttctctaatacaacgacaatctctgaatacctcatctctgaagacctaccagatattgatatttctgttgtcggtgtcaccagcttcagtggacctgaaggcccctttgatgtggatgtttttgactctagtgtagattacataaagttaatgaagtcaatttttgacttcgaagcaataaaaaagctgctgacctccccaaagtttacattct

SEQ ID NO: 56271 - DNA, 254 bp, Zea mays
cgtaaccgtacgccctcgttcccctcgtcgctctcccaagtcacaaccccggttcctttggtctgcgcgacgagcatggcgtcgccgtcgcccgccgtctcgtctctggagacggaggcgccccaggctaccgtcacgagggagcgcaggctcaaccctaacctgcaggagcaccttccaaagccatatctcgcgagggctatggtggcggtggacccggaccatccgaccggaaccgaggggcgcgaccccgc

SEQ ID NO: 56272 - DNA, 256 bp, Zea mays
tggcagagcaggcggacggtacgaggagatggtcgagttcatggagcgcgtcggcgctccgccggcggcgccggcgtaggggaggagctatccgtggaggagcgcaacctgctgtccgtcgcctacaagaacgtcatcggcgcccgcaggcctgcgtggcggatcatctcctccatcgagcagaaggaggagggccgcgggaacgaggcgcacgcgcctccatccgcgcctaccgctccaagatcgagaccgagct

SEQ ID NO: 56273 - DNA, 257 bp, Zea mays
gcgagcaagaaggtgttgtcagtagcagtttataatcactataaaaggatctattagtgaatcactcatcaacaggtctgctgcggattgcagtcagagtgattcttgcacgagtgacaccgacatggtagagcttgagaaaagcaatattcttgtcatgggaccaacgggctcggggaaaacattgctggcaaaaacactggcaagatttgtgaacgtgcccttcgttatagctgatgcgacaagcctcactcagg

SEQ ID NO: 56274 - DNA, 255 bp, Zea mays
catggatgaaggaggccaatccaaaggctttggttttgttcagtatgaaaaagaagaagcagcacagaacgctataagaagtcttaacggaatgcttataaatgataaacctgtttttgttggaccttttcttcgcaagcaagaaagggatcactcttttgacaagacaaaatttaacaatgtcttcgtgaaaaacttgtctgagtctaccacaaaagaagatttactcaaaatctttggtgaatatgggaatat

SEQ ID NO: 56275 - DNA, 252 bp, Zea mays
  unsure (1)..(252): unsure at all n locations
gaccccgagtttcaggagagatatgcggagactgtaatatacagaatcttttactccataaatagatctgggaatggccatctgactctcagagagctcaaacgtggaaatttaattgctgcacttcagcagttagatgaggaagaagatatcaacaaagtgttgagatacttctcatatgatcacttntatgtgatctattgcaaattctgggagctggatgcagaccacgattttttgattgataaggag

SEQ ID NO: 56276 - DNA, 256 bp, Zea mays
gaaagagcttacctctgaagatgaagtggctcgtttactgaactgcactgaccactattcagcattaggtttccgtcgatatgagaacatagatgtatcatctcttaagagagaatacaagaaaaaggctatgttagtccatcctgataagaatatgggcaatgataaagctgctgatgcatttaaaaagcttcaaaatgcatatgagattcttcttgattcactgaaacgcaagacatatgatgatgagttgagg

SEQ ID NO: 56277 - DNA, 253 bp, Zea mays
gagatatgcgtcatgctttgtgctgaccatggtccctgtgtatctggtgctcataactctatagttactgctagggccggaaaggaccttgtttccagcttggtgtctggattattgacgattggtccccgtttcggtggagcaattgatgatgcagcccgatacttcaaagatgcatgtgataggagcctcacgccatacgagtttgttgaaggcatgaaaaagaagggaatccgtgtgcctgggattggtc

SEQ ID NO: 56278 - DNA, 254 bp, Zea mays
gtcctgctcaggagctttttgagaagcctttcttccagtcggtggccagacctttgcgtccaggtggagttgtatgcacccaggcagagagcatatggctacatatgcacatcattgaagatattttcgtcaattgccgccaagttttcaaaggctcagttaactatgcttggacaacagtacctacataccctaccggagttattgggttcatgctttgctccaccgaagggcctgctgttgatttccagcac

SEQ ID NO: 56279 - DNA, 250 bp, Zea mays
gaaagagcttacctctgaagatgaagtggctcgtttactgaactgcactgaccactattcagcattaggtttccgtcgatatgagaacatagatgtatcatctcttaagagagaatacaagaaaaaggctatgttagtccatcctgataagaatatgggcaatgataaagctgctgatgcatttaaaaagcttcaaaatgcatatgagattcttcttgattcactgaaacgcaagacatatgatgatgag

SEQ ID NO: 56280 - DNA, 251 bp, Zea mays
ctcgagccgtggcgctgcaaaacattggtgcttcaaacagggatgatgccttctacaggtacaagatgcccagaatgattaccaagatagaaggccgtggtaatggtatcaagacaaatgttgtgaacatggttgacatagcaaaagcacttgccaggccagcttcctacacaaccaagtaccttggatgtgagcttggtgcacagtccaaatttgatgagaagacagggatttccttggttaacggggct

SEQ ID NO: 56281 - DNA, 252 bp, Zea mays
accgtatgaaccatcagagtacacacccagtaacatgcagtgatggtgaatggaaaatcgttcaaggcctcccgattgatgagttctcaaggaagaagatggatgccactgcccaagagctgacggaggagaagacgcttgcttactcatgcctacagtaaattctaccacatccagagagcaattgccaccccaatgttttgaataaaaaaagaaactccaactccattcatagattctcactcagaactg

SEQ ID NO: 56282 - DNA, 252 bp, Zea mays
acgctctctaccgtccgagaccccaagcaccagcgcggcggcgggggcggcggcgaccatggctgtcggaaagctcaagaggatctccaagggaaagaagggtggcaagaaaaataccgtcgaccctttctctaagaaggattggtatgacatcaaggcaccgtcggtgttcagtgtgcgcaacatcgggaagactctcgtatccaggacacagggtaccaggattgcttctgagggtctgaagcacagagt

SEQ ID NO: 56283 - DNA, 254 bp, Zea mays
ctcgatcccagcatccgagagagctccacaggccaggtccccatcgccgcggcgcttgctccacctctcccccgcccggtagtagcctcgccgccgttgccgagatggggttcgtgtccttcgtcgggacggtgctcttcgtcgccgctttcctcctctccgcctaccaggagtttaatgaattcggtgctgatggtggtatagcagctaaggcccttcggcccaaattcaacgtgtttgtcaaaaatgtatct

SEQ ID NO: 56284 - DNA, 257 bp, Zea mays
accgtatgaaccatcagagtacacacccagtaacatgcagtggtggtgaatggaaaatcgttcaaggcctcccgattgatgagttctcaaggaagaagatggatgccactgcccaagagctgacggaggagaagacgcttgcttactcatgcctcgagtaaattctaccacatccagagagcaattgccaccccaatgttttgaataaaaaaagaaactccaactccattcatagattctcactcagaactgctgca

SEQ ID NO: 56285 - DNA, 253 bp, Zea mays
tggagttgatggtcactgggcaagagactgtcaggctggtgactggaagaacaaatgctaccgttgtggcgaaaggggccatatagaaagaaattgccagaacagtccaaggaacctcaggcgtgagagaagctattcacggtctctatccccacgccgaggacggggccgcagccggagctacagcagaagccggagctatagccgatccagatccccgtctggatctcctaggggtggacgccgagaccgt

SEQ ID NO: 56286 - DNA, 253 bp, Zea mays
gaaggaacacggccctaactaaaccctagctaagggaagggaaacaagaccatggatgcctccaagctccgcgagcttcgcgacttcgtcgaggcgtgcaagaagaatccttcgctcctcgccgaccccaacctctccttcttccgggattacctccagagtttgggtgccaaaattcccgacaacgccccctctttcgaaagtcccaagagatcttccatggacgacattgatgacgacggtgatgacgacg

SEQ ID NO: 56287 - DNA, 250 bp, Zea mays
cttggacacccacgccaagtttgggatatttccttcctggggtctttcacagaagctttctcgcatcattgggccgaatagagcaagggaagtgtcactaacttgcatgcctgttactgctgaaatggcagagaggtgggggcttgttaaccacgtcgtggatgataatgaggtgctgagtaaggcgatagaggttgctgaggctattgtgaggaacaaccgcaacttagttgtattgtacaaatcggtt

SEQ ID NO: 56288 - DNA, 248 bp, Zea mays
gttctggaggtccttgggaaaaaactgtcgtttcagattgctgttggactcaatggtcgagtctgggtgaatgctcctgcagcaagtactgtcattcttgtatcaaatgcaataatgaggtcagaatctttgagcggcataaaacaaagagctatggtagaaaatctattggagagattgtcatgatgataagtcagcaagcattagtctaaagtaaaatggaggagtttccattgtgtcagttcaaa

SEQ ID NO: 56289 - DNA, 251 bp, Zea mays
ggaaggcggacccggacctcgaggccggcgggtcctcgctgctgtacccggggatgacggagagtcccgaactgcgatccggcgttcgtccgcaagatctacgtcatcctcacggtccagctcgccatgacggcagccgtctcggccttcgtcgtcaaggtgcccgccgtctccaattttttcgtctcctccaacgccgggatcgcgctctacatcttcctcatcgtcctgcccttcatcgtgctgtgccc

SEQ ID NO: 56290 - DNA, 249 bp, Zea mays
ctcgcctgcgctccctcgccgccccagttccccaccccctgctaccccacccgtcccctcctgctcgcccatggctcccatcgctgtcggcgacgccctccccgacggccagctcgggtggttcgacgagaacgaccagctgcagcaggtctccgtccacgcgctcgccgccggcaagaaggtcatcctcttcggcgtccccggcgccttcaccccgacctgcagcaaccagcatgtgccaggcttcat

SEQ ID NO: 56291 - DNA, 252 bp, Zea mays
ggctcaaataaggttagaaggagtttacatatggccttttagacaacttcgcatggtagcaaacagtggtgcagatggtgaaccactccaggaagaggattatttcttgtcaaatccataccatttattgcggattttctcctctcaagtgtttcaagaatcttctgaagagaagaaccgaaggaagaattctctcacatatgacatggagaaacattgcaacacagaaatagctgctaaggtggttcgtgt

SEQ ID NO: 56292 - DNA, 253 bp, Zea mays
ccgccgcctccgacatcgtctcttcgtccccacgagcaaccgataatccgccggcgctgagatgttggtttatcaagacctcctatctggcgacgagctcctgtcggattcattcacctacaaggagctcgagaacggcgtcctgtgggaggtcgagggaaagtgggtcacccaaggtcctgttgatgtagacattggtgccaatccatccgccgagggtggtgaggatgaaagcgttgatgacacagccgtg

SEQ ID NO: 56293 - DNA, 251 bp, Zea mays
tggatccgaaaggcttagttattctgaaattgcaacacaattaaacctgtcagatgatgatgtagtgcgtttgctccattcactttcttgtgcaaaatacaagatccttaacaaggaaccagcaaatagatccatctcgcccaatgatgtttttgagttcaattcaaaatttactgacagaatgagaagaattaagattccactgcctcccgttgatgagaagaaaaaggttgttgaagatgttgacaaag

SEQ ID NO: 56294 - DNA, 247 bp, Zea mays
gccgctcctctcacaacccagtcgctcaaaaccctagagctctcgcctgctcgcctccgccgccggagcgagctccccatcttcatccgtcaaccatggcgacccagatcagcaagaagaagaagttcgtcagcgacggtgttttctacgccgagctcaatgagatgctgacgcgggagctggcggaggatggctactctggcgtggaggtgcgcgtcacgccgatgcgcacggagatcatcatccg

SEQ ID NO: 56295 - DNA, 248 bp, Zea mays
tgttcatggtgcacctggccaccatccccatcaccggcaccggcatcaacccggcgaggagcctgggagccgcggtcatctacaacaaggacaaggcctgggacgaccaatggatcttctgggtgggcccactgattggcgccgccatcgccgccgcctaccaccagtacgtgctgagggccagcgccaccaagctcgggtcctaccggagcaacgcctaagttccggccggccgcccgcccgaacgc

SEQ ID NO: 56296 - DNA, 248 bp, Zea mays
aagcactacaccaaggactttggcatcgagtgccgcgtcggccgcttccacaacatctacggccctttcggaacatggaaaggtggccgcgagaaggcaccggctgccttctgcagaaaggctcagacatccacggagaggtttgagatgtggggcgatggtctccagaccaggtccttcaccttcatcgacgagtgcgtggagggtgttctgagattgaccaagtcagacttccgcgagccagtgaa

SEQ ID NO: 56297 - DNA, 141 bp, Zea mays
gctgatgcggctctatgtaacaattcacactgatcatgaaggcgggaatgtcagtgctcatactggtcatctggttgggagtgctctgtcagatccttatctttctttcgcagcggctctaaatgggctagctggtccact

SEQ ID NO: 56298 - DNA, 274 bp, Zea mays
ggcgcacagaatctggtgtctcttgctccgaccccgttggcgactgggacgcgatccccttctcctgcactgacgtcctccgtcgctgcgatgcctcggtattactgtgactactgcgacacctacctgacccatgactcgccatctgtccggaaacaacataatgctggatacaaacacaaggcgaatgttcgaacctactatcagcaatttgaggagcagcaaactcaaagtttaattgatcgaagaatcaaggagcatcttggacaagctg

SEQ ID NO: 56299 - DNA, 272 bp, Zea mays
aggcgcagagaatccccaagcaaacaaacagggtagaggtagagggagaggagaggagaggagaggagaggagaggttgggtctgggacaccaacgctccgatgaagctgtacggggcggtgatgtcgtggaacgtgacgaggtgcgcaacggcgctggaggaggctggctccgactacgagatcgtgcccatcaacttcgccaccgccgagcacaagagccccgagcacctcgtccgcaacccgtttggtcaggttccagctctgcaggat

SEQ ID NO: 56300 - DNA, 272 bp, Zea mays
ctcccctgttcggttttaggagacctgcgccgcccctccggccacgcgagctcgccgaaatggtcgcccacaggttccatcagtaccaggtggtgggtcgcgcgctgccgaccccgaccgatgagcaccccaagatctaccgcatgaagctctgggccactaacgaggttcgcgccaagtcgaagttctggtacttcctgagaaagctgaagaaggtgaagaagagcaatggccagatgctcgccatcaacgagatcttcgagcgcaaccca

SEQ ID NO: 56301 - DNA, 267 bp, Zea mays
gccacttgcaattcaacgacaaagcagaccggatccacaacgccatcctccagactattgctggggggaagtacaggactgctgatcttggtggaaaggcatcgacatccgagtttacaaatgcagtctgtgatcacatctgagaatcggatgtggttctttccttctgattgttctgtcttcctaatatctttttgtcgcatatggggaggagctttagctttaagaggttaactggcagcacctcgaacttctttgggtggttaa

SEQ ID NO: 56302 - DNA, 266 bp, Zea mays
accagtcgatcggcggcggcgatgtcgctgtcctcggtgaagatcggcgaggaggtttggctcacatgcctctcccacgccctcactaccgagaccgaggaggtcatgggcctcctcctcggcgacatcgagctttccagcaagggcgccaccgcccttaacatggggagcgtctccgcagatgaggtgcgagcggaagaaggaccgcgtcgaggtcaacccggagcttctcgccgccgcatccgcgcaagccgagaaaatgacgc

SEQ ID NO: 56303 - DNA, 274 bp, Zea mays
cgtaaccgtacgccctcgttcccctcgtcgctctcccaagtcccaaccccggttcctttggtctgcgcgaggagcatggcgtcgccgtcgcccgccgtctcgtctctggagacggaggcgccccaggctaccgtcacgagggagcgcaggctcaaccccgacctgcaggagcaccttccaaagccatatctcgcgagggctatggtggcggtggacccggaccatccgaccggaaccgaggggcgcgacccccgcggcatgagcgtgcttcagc

SEQ ID NO: 56304 - DNA, 272 bp, Zea mays
agccgtgagacacaagaatagggtgagcaacatcgacgtggtgtccaaggaggaggccctggacttcatcgagcgtgatcagacgtacaatgctagatgaggctgctgctgctgtgtattgattgatctgcaggcagatgctaacgcagacaggatagttcttgttgtgttatggatattctggcctattgttgtagctgtgactatgtgtgatgcagttaggtagctattggaccagcttgtttggcgcatcaacgttgtgaatgtagcag

SEQ ID NO: 56305 - DNA, 267 bp, Zea mays
gccgtgagacacaagaatagggttagcaacatcgacgtggtgtccaaggaggaggccctggacttcatcgagcgtgatcagacgtacaatgctagctgaggctgctgctgctgtgtattgattgatctgcaggcagatgctaacgcagacaggatagttcttgttgtgttatggatattctggcctattgttgtagctgtgtatatgtgtgatgcagttaggtagctattggaccagcttgtttggcgcatcaacgttgtgaatgta

SEQ ID NO: 56306 - DNA, 268 bp, Zea mays
gtccgacctgggcttcgaagcctggcgcctcgacttacccaagggctactcccccgaggtcgccaaggtctacgtcgacgccacggccccgaccttcgccgtcgccgaggtatggaacagcatggcgtacgacggggacaacaagcccgagtacgaccaggacccgcaccggcaggcgctggtggactgggtcgacagggtgggcggggcggcgtcgcggccaccgtcttcgacttcaccaccaagggcatcctcaacgacgccgtcg

SEQ ID NO: 56307 - DNA, 269 bp, Zea mays
gtccgacctgggcttcgacgcctggcgcctcgacttcgccaagggctactcccccgaggtcgccaaggtctacgtcgacgccacggccccgaccttcgccgtcgccgaggtatggaacagcatggcgtacgacggggacaacaagcccgagtacgaccaggacccgcaccggcaggcgctggtggactgggtcgacagggtgggcggggcggcgtcgcggccaccgtcttcgacttcaccaccaagggcatcctcaacgccgccgtcga

SEQ ID NO: 56308 - DNA, 267 bp, Zea mays
agtccgacctgggcttcgacgcctggcgcctcgacttcgccaagggctactcccccgaggtcgccaaggtctacgtcgacgccacggccccgaccttcgccgtcgccgaggtatggaacagcatggcgtacgacggggacaacaagcccgagtacgaccaggacccgcaccggcaggcgctggtggactgggtcgacagggtgggcggggcggcgtcgccgccaccgtcttcgacttcaccaccaagggcatcctcaacgccgccgt

SEQ ID NO: 56309 - DNA, 271 bp, Zea mays
aggttacctttcctttagtttggaccaatacctgctgcagtcaccctctgtaccgtgagtctgagcttatccaggagaactaccttggtgtgagaaatgcagcacagaggaagctactggatgagctgggcatcccagcagaagatgccccagttgaccaattcacccctctgggccgaatgctttacaaggcaccatctgatgggaaatggggggagcatgagctcgactacctgctgttcatcgtccgggacgtgaaggtgcagccgaa

SEQ ID NO: 56310 - DNA, 272 bp, Zea mays
agcggaggcggcggcgcaagacgaggaaggaaagggaggatgaggagagaaggcggaggaagaaggagaaggagaggagaaagaggaaggagaaggagaaggagagggagaggaggaagaagaggaaggaggggaagaagaatttggggaagaagggcgctgtgaccaactcgtggcggaaatatggcatcatccgtgagctcgatatgtggagcaagcggccagagttcactgcatggctatcagaagtcaagcaggttaatgtggaggca

SEQ ID NO: 56311 - DNA, 224 bp, Zea mays
agcgcacgcttgccgactacaacatccagaaggagagcaccctccactgtggtgctgcgcctcagaggtggtatgcaggtcttcgtgaagaccctgaccggcaagtctatcaccctcgaggtagagtcttcagacaccatcggcaacgtcaacgccaagatccaggacaaggagggcattcccccagaccaacagcggctcatctttgctgggaagcagcttgt

SEQ ID NO: 56312 - DNA, 273 bp, Zea mays
aggcgcagagaatccccaagcaaacaaacagggtagaggtagagggagaggagaggagaggagaggagaggagaggttgggtctgggacaccatggctccgatgaagctgtacggggcggtgatgtcgtggaacgtgacgaggtgcgcaacggcgctggaggaggctggctccgactacgagatcgtgcccatcaacttcgccaccgccgagcacaagagccccgagcacctcgtccgcaacccgtttggtcaggttccagctctgcaggatg

SEQ ID NO: 56313 - DNA, 265 bp, Zea mays
cacacactcgagaactccatttcgatctcatttgaaatcaacccatcctcgtttcctccgtctagcagcctctcaccctcatggccaagatcaagatcgggatcaatgggtttggcaggatcggaaggctggtggccagggtggccctgcagagcgacgacgtcgagctcgtcgccgtgaacgaccccttcatcagcaccgattacatgacctacatgttcaagtatgacactgtgcacggacagtggaagcaccatgaggtcaa

SEQ ID NO: 56314 - DNA, 266 bp, Zea mays
ctcgagcagctttctactcataaatcttgtggcaaaggcttctgatatggtccctggattaagctggctgaggctggatgagagtgttcgccagttcgcagtattcatgatgtctcaagttgatctttctagggaagctgctcatttgagtcgttttatctacaacttccgcagatggagacatgtgtctttccctaagcccttatatccatttgtgcatccatctgtcctagttgagacttttgagaatggagaaagtgtttctc

SEQ ID NO: 56315 - DNA, 252 bp, Zea mays
gtcgttgggacggtgctcggccctggttcccagcgtgcaaacgagtgcaggatagctgcgttgtttgctggcttccctgaaaccgtccctgttagaactgtcaaccgccagtgttcatctgggctacaggcagtagccgatgtcgcagctgctataaaggctggttactatgacatagggattggtgctggtttggaatccatgtccataaattccattgcttgggaaggacaagttaacccaaatatgcgc

SEQ ID NO: 56316 - DNA, 264 bp, Zea mays
cgcactttttgggtccttgatactgttggcgatgaaggcctacgtgctgtggctgatgcatgctctgatctccgtgagctgagagtttttactttggatgcctctgaggattctgagggttcggtctcagatgtcggtcttgaggcaatctcaaaaggctgccggaagctagaatcaatcctctacttttgccagcggatgacaaatgcagcagtaattgatatgtcgaagaactgtcccgagcttgtagtgttccgcctctgc

SEQ ID NO: 56317 - DNA, 268 bp, Zea mays
aagtctcccgtcatcgtcttcgacgacgccgacctcgacatggccgttaacctcgtcaacttcgccacctacaccaacaagggcgagatctgtgtggccggcacgcgcatctacgtgcaggaagggatctacgacgagttcgtgaagaaggccgccgagctcgccagcaagtccgtggtcggagcccgttcaacccgagtgtcagccaaggcccccaggttgacaaggaccagtacgagaacgtcctcaggtacattgacatcgggaa

SEQ ID NO: 56318 - DNA, 268 bp, Zea mays
gttcaagtacgacaccgtgcacggccaatggaggcacagcgacatcgccctcaaggactccaagacgcttctcttcggcgagaagccggtcaccgtctttggcatcaggaaccccgaggagatcccgtggggtgaggctggtgctgagtatgtcgtggagtccaccggtgtcttcactgacaaggacaaggctgctgcacatctgaagggtggtgccaagaaggttgttatctctgcgccaagcaaagatgcgcccatgtttgttgtt

SEQ ID NO: 56319 - DNA, 268 bp, Zea mays
agcatatcaaggacgctctgcacgtactattcatcttccattgttgctttgctttgctttgcttaccggcaaccatggccagcactcgtgcagcagcaactctccttgtgctcctcgcgctcgccggcacctcgtcgtcgcactgtccacgggcttctactcctactcgtgccccggcgtgtacggcgccgtcaagtcggtgatgcagtccgccatcgccagggagaatcgcatggtggcctccatcctccgcctcttcttccacgag

SEQ ID NO: 56320 - DNA, 266 bp, Zea mays
acgagcgcgcacacacgcaaccagatctcccccaaatccagccgtcggcacctccgcttcaagatgcagatctttgtgaaaaccctgactggcaagactatcaccctcgaggtggagtcgtctgacaccattgacaacgttaaggccaagatccatttcaaggagggcatccccccggaccagcagcggctcatcttcgctggcaaacagcttgaggatggtcgcacgcttgctgactacaacatccagaaggagagcaccctcca

SEQ ID NO: 56321 - DNA, 265 bp, Zea mays
gaagaagaggggaagaaatattcttcccgtcgaaagacggagagaggaaaagggacaagggcaaggcaagagagaggcgtcgtcgtttgatctgctgccggagtgcgaagaggaagaggaagaggagcgccggagttgtaaagatgttcctggtggactggttctatggggtgctggcatcgcttgggctgtggcagaaggaggctaagatcctcttccttggcctcgacaacgccggcaagaccaccctcctccacatgctgaa

SEQ ID NO: 56322 - DNA, 266 bp, Zea mays
aaatgcaccaaaatgtgcccaccacaataaccaccatgatgggttcatgaacttcatgcacagggacgaagaggtgaactacttcccttcgaggtttgatcccgcccgtcacgcggagaaggtccccattcctccccgtgttctaacaggctgtcgtgagaagtgcatcattcagaaggagaacaacttcaagcaggctggcgagagatatcgttccttcgaccctgcaaggcaagaccggttcatccagcgatgggttgacgcac

SEQ ID NO: 56323 - DNA, 265 bp, Zea mays
gaaatggtgggcctgctcctgaatctgttaccgacaagattttctctaatacaacgacaatctctgaatacctcatctctgaagacctaccagatgttgatatttctgttgtcggtgtcaccagcttcagtggacctgaaggcccctttgatgtggatgtttttgactctagtgtagattacataaagttaatgaagtcaatttttgacttcgaagcaataaaaaagctgctgacctccccaaagtttacattctgttatgatgc

SEQ ID NO: 56324 - DNA, 263 bp, Zea mays
cgtgccgctggattcaccgaagagagcggaaccttgggcgatatttgggaaaccgtctccggcagcgatcttgtgttgctgctgatatcggatgctgcacaggctgacaactatgagaagatcttctctcacatgaaaccaaacagtatccttggtttatctcatggatttcttctaggacatttgcaatcactcggactcgatttcccaaagaacatcagtgtgattgctgtatgccccaagggaatgggtccatccgtccg

SEQ ID NO: 56325 - DNA, 258 bp, Zea mays
agaaaacaacatcatggacattgctggtatcctgatcagtcatgttccaaagtcagacgcagagttcgcaagtgatcttcttggggctgttctagcagcatgtgggcataatgtgtatgagatggtggtggattttgattggtatgtttcactccttgtggatatggcaagaactctgcattgtgcccagggggatgagattggtcggcagtttgttgatttaggactgagagttcaggatgcgcggccagagcttgt

SEQ ID NO: 56326 - DNA, 259 bp, Zea mays
gcagctcagcatacccgcctcggtcttctccgctgggacggtcatggactcgggcacggtcatcacgcggctgccgccgaccgcctactcggcgctgtcgtcggcgttcaaggccgggatgaagcagtacccgccggcgcacgagtcgccatcctcgacacctgctttgacttcagcggccagtccagcgtcagataccgtccgtcgcgctagtcttctccgggggcgccgttgtcagcctcgacgccagcgtgatcat

SEQ ID NO: 56327 - DNA, 232 bp, Zea mays
atttcagtgctgcttaaaaaattttgtggagaggaaggagaaaaggttgatgtccaaaaactgtttggttatcttgggctttttacccttgttgctctatggtggattgtctggccattaaccgcactaggcgttgagccaaagttttcaatgccccactcagctaaagtggatgaagtggtggtggcaaatagcctaatcggaagtgtattatcagactatctgggctctt

SEQ ID NO: 56328 - DNA, 262 bp, Zea mays
atttcagtgctgcttaaaaaattttgtggagaggaaggagaaaaggttgatgtccaaaaactgtttggttatcttgggctttttacccttgttgctctatggtggattgtctggccattaaccgcactaggcgttgagccaaagttttcaatgccccactcagctaaagtggatgaagtggtggtggcaaatagcctaatcggaagtgtattatcagactacttctgggctctttctgttgtttggactactcccttggtgg

SEQ ID NO: 56329 - DNA, 265 bp, Zea mays
agaacctcaaacttttggaagtgatgaagcacaaaatccaggtgctgaacaggaagctttcctctgggaactttttgggtcattaagatacttcaccctaccaatttggatggtcttaattgtcactgcccttacttggatggcatggtttccttttaccctctttgatactgattggatgggccgagaaatctatcgaggaagcccagacaacccaggagagatccagaggtaccatgatggtgtgagaattggttcttttggt

SEQ ID NO: 56330 - DNA, 265 bp, Zea mays
agcgtagtcgtcgccggaaggaaaggcgcggacaagatgtcgtggcaggcgtacgtcgatgagcacctgatgtgcgagatcgaaggacaacatctcagcgccgccgccatcgtcggtcacgacggcagcgcttgggcgcagtccgagagcttccccgagttaaagcctgaggaggttgctggtatcataaaggactttgatgaacctggtactcttgcaccaactggtcttttcgttggaggtacaaagtacatggtgatccaag

SEQ ID NO: 56331 - DNA, 263 bp, Zea mays
ctggcaaggaaaggtctcagagtctcggcggtgcatgctaacgtggagcagattgttgtgtcatagtctatgatgttaattctatgagatcatttgacattctgaacaactggcgagaagagtttctaattcaggctagcacatcagatcctgataatttcacttgtgttctattgggtaacaaagttgatgtagatggtggcaacagccgcgtggtatctgagaataaggcaaaggcatggtgtgcttccaaagggaacatc

SEQ ID NO: 56332 - DNA, 266 bp, Zea mays
agggaagttcttcctcacatggtactcaaacaaactgatcaagcacggtgataagatcttggacgaagcaaacaaggtcttcctgggatgcaaggtgcagctggcaatcaaagtctctggcatacactggtggtacaacgttccaaaccatgcagctgagctcactgccggatactacaacttagatgacagagatggctacagaaccatagcacacatgctcacaaggcatcgtgctagcatgaacttcacttgtgctgagatga

SEQ ID NO: 56333 - DNA, 213 bp, Zea mays
ctcccaggctgactgtgctgtccttatcattgactccaccactggtggttttgaggctggtatctccaaggatggccagacccgtgaacatgctctccttgcgttcacccttggagtgaagcagatgatttgctgctgcaacaagatggatgcaaccactcccaaatactccaaggcacgttatgaagagattgtgaaggaagtctcatccta

SEQ ID NO: 56334 - DNA, 229 bp, Zea mays
gcaagaactagtgttgccagtaccacagtgctgtcttcaacttcaggactcttcactcttttcattggtgttttacttggccaagactccataaatgctgcgaaaattattgctgttttcattagcatggctggcgttgtaatgacaactgtgggccagacttgggcatctgatgaatcagaagcaggcaaatctggttttacacagaggactcttctaggtgatatgt

SEQ ID NO: 56335 - DNA, 256 bp, Zea mays
ttggacaccgtcgaaggtgatagcgcgccttggcaaagaaataaatgatgaaagctcctatctttattgggcatacaagaataacatccctgtatactgcccagcattgactgatggatcacttggagacatgctgttctgtcatgcagttcgtaatcctggccttattattgacatggtacaagatatacggctgatgattggggaagccatccatgcaacaccaaggaagacagggattatagttcttggtgga

SEQ ID NO: 56336 - DNA, 218 bp, Zea mays
cggacgaggaaggcatgccggcgttcgcgctcgtcaacaaggccacggggctcgccatcaagcactccctcggccagtcccacccggtcaagctcgcgcctttcaacccggaccacgaggacgcgtcggtgctgtggacggagagcaacgatctgggcaagggcttccgctgcatccgcatggtcaacaacatctacctcaacttcgacgccttccac

SEQ ID NO: 56337 - DNA, 257 bp, Zea mays
aacggacactatccacagataatgcaagatctcgtgaaggagaggctgcccaggttcactcctgagcaggctaaactggtgaagggctcggcagactacatcggtatcaacgagtacacatccagctacatgaaggggcagaagctggtccagctggcgcccagtagctactctgccgattggcaggttcaatatgtttttgcacgcaatggcaaaccgattggaccacaggcgaattctaagtggctctacatcgc

SEQ ID NO: 56338 - DNA, 189 bp, Zea mays
cgctgatgcagctgctctccgcccggctaggcgtggccacggggaagcacctcgccgagctctgccgccaggagtaccctccctgggccactcgcgcgctctgggccatgacggagctcgcgctcgtcggcgcagacatacaggaggtgattggcagcgcgattgccatcaagatcctctcggggggtg

SEQ ID NO: 56339 - DNA, 219 bp, Zea mays
cggatgtcagattgctgaaggaaatgggcatggacgcatataggttctctatctcttggcctagaatactgcctaagggaacggtcgaaggaggtattaaccaggatggcatcgattactacaaaaggctcatcaacttgttgctagagaatggcatagagccatatgtaacaattttccactgggatgtccctcaagcactagaagagagttacggcg

SEQ ID NO: 56340 - DNA, 214 bp, Zea mays
atccaggacaaggagggcatccctccggaccagcagcggctcatttttgccggcaagcagctcgaggacgggcgcacgctggccgactacaacattcagaaggagagcaccctccacttggtgctgcgtctcaggggtggcatgcagatcttcgtgaagacacttactggcaagacgatcacccttgaggtggagtcctcggacaccatcgaca

SEQ ID NO: 56341 - DNA, 191 bp, Zea mays
tgaggtttttacatgatccatcaaaggacactggctatgttggctgtgctttaacaagcaacatggtgagatttttcaagaccgcggatggatcgtggagccatgaggttgctatctctgtgaaaccactgaaggtccgcaactggattctgccggaaatgccaggattgataactgatttcgtcatctct

SEQ ID NO: 56342 - DNA, 229 bp, Zea mays
cgctcatcaaggccaacgacaccatcaagatcgatctggagaccaacaagatcatggatttcatcaagtttgatgtcggcaacgtggtcatggtgactggcgggaggaacaccgggcgtgtaggagtcatcaagaacagggagaagcacaagggcagctgagaccatccacgtgctgcttggagctttttgctatgtctagttttctccaagttgttgtacaggaaact

SEQ ID NO: 56343 - DNA, 187 bp, Zea mays
aggctgtggatgttgcagtgcaggacagggaaacgtacgggcaaaagtgccgtgatgatcgccgtggacatggttaacgagggccttgttgagccccgctcagcgatcaagatgggtagacccatgccacctggaccagcttctccatcctcagtttgagaacccgtcggcgtacaaggatcaggtc

SEQ ID NO: 56344 - DNA, 163 bp, Zea mays
gattaattgaggagtccaaggtttcaaggccattaccttggaggccagcgactaatgttttccgtgttaaagaggatgttcgacctatattctgggccaacagaccaaagagctatcttaaaaggacattaggttgggatcagtatccccatggacggtgggg

SEQ ID NO: 56345 - DNA, 174 bp, Zea mays
gctgcatcgaccccgcgccacctccgcctgcctcccccggcaccgatcgggtttgatcgatggcgtcgaagaggatcctgaaggagttgaaggacctgcagaaggacccgcccacctcctgcagcgcggtcctgttggtgaggacatgttccattggcaagcgaccatcagggg

SEQ ID NO: 56346 - DNA, 179 bp, Zea mays
gcaccaatcaatctttccgatcgtcttaatcaggttctccgttgggctcttgggtcagtggaaattctgcttagtagacattgtcctatctggtatggttaaatggacgattgaagcttttggagaggctggcttacatcaacactattgtatatccaatcacatccattccgcttatt

SEQ ID NO: 56347 - DNA, 217 bp, Zea mays
atcatgttcgccatgacctcaatcaagggtgtcgggcgccgcttctccaacatcgtctgcaagaaggccgacatcgacatgaacaagagggccggcgagctgacgcctgatgagctggagcgcctgatgacggtcgtggccaaccctaggcagttcaaggtgcaggactggttcctcaacaggaagaaggattacaaggacggcaggttctcgcagg

SEQ ID NO: 56348 - DNA, 254 bp, Zea mays
gccggcgcctccacttcgcgttctcgcctcatctcctcccgctcaggatccggcggcgaaggtaaggcaagatgtacaccgcgaggaagaagatccagaaggataagggccttgagccctccgagttcgaggactccgtcgcccaggctttcttcgacctggagaacggtaaccaggagctcaagagcgacctcaaggacctttacatcaacggtgctatccagctggatgttgccgggagcaggaaggctgtt

SEQ ID NO: 56349 - DNA, 249 bp, Zea mays
tgttcatggtgcacctggccaccatccccatcaccggcaccggcatcaacccggcgaggagcctgggagccgcggtcatctacaacaaggacaaggcctgggacgaccaatggatcttctgggtgggcccactgattggcgccgccatcgccgccgcctaccaccagtacgtgctgagggccagcgccaccaagctcgggtcctaccggagcaacgcctaagttccggccggccgcccgcccgaacgcg

SEQ ID NO: 56350 - DNA, 218 bp, Zea mays
cgaggatgagctacgtgatgctgtgctgcttgttttcgccaacaagcaagatcttcctaatgccatgaatgctgctgagatcactgacaagcttggattacactccctgcggcagcgacactggtacatccagagcacttgtgccacaactggcgagggtctgtacgagggcctggactggctgtccagcaacattgcgagcaaggcttgaatatcaa

SEQ ID NO: 56351 - DNA, 249 bp, Zea mays
ctcgagcgcgaccctgtcattgacctcgacgaggaaacctacgctagtgttagtaccgtctcagagcttgctggccactgctgcgctagggaagcacaccagaggcctgacatgggccatgctgtcaatgtgctctctaccctttcggaagtttggaagccagccgatccggactcggatgacagctacggtatcgacctctccatggccctgcctcaggctctgaagagatggcaggcgttcggggac

SEQ ID NO: 56352 - DNA, 177 bp, Zea mays
aatcagaagagcggcggcgcgggcggacaaggagcaggcggaggaggagttgtgccaagccacaatgggtatctcgcgtgactcgatgcacaagcgccagccaccggtggaaagcagaaggcctggaggaagaagcgaaagtatgagcttggtcgccagccagccaacaccaagttg

SEQ ID NO: 56353 - DNA, 170 bp, Zea mays
ctcatctcaaggtgctggaaggggctggggaaaggttgcagcttgtcaaggctgatttgttggactacagcagtgttgcatcagcaattgccggctgtgagggtgtcttccatgtagctagccctgtcccttccggtcggtactccaaccctgaggtggaggtcataggt

SEQ ID NO: 56354 - DNA, 78 bp, Zea mays
acgccgtcctcctcgggacacgcaacgtccgcgctttctccggcgacatgcccaccgatcctgccgagacgtcggcga

SEQ ID NO: 56355 - DNA, 97 bp, Zea mays
gctgatgcggctctatgtaacaattcacactgatcatgaaggcgggaatgtcagtgctcatactggtcatctggttgggagtgctctgtcagatcct

SEQ ID NO: 56356 - DNA, 235 bp, Zea mays
ctggccaggaaaggtttcagagtctcggcgttgcattctaccggggagcagattgttgtgtcctagtctatgatgttaattctatgaaatcatttgacaacctgaacaactggcgagaagagtttctaattcaggctagcccatcagatcctgataatttcccttttgttctattgggtaacaaagttgatgtagatggtggcaacagccgcgtggtatctgagaaaaaggcaaa

SEQ ID NO: 56357 - DNA, 261 bp, Zea mays
cacattctaaaaacctggggaaagcagaacagccttcacttgacttgaacttagaacatagcaaatatgcaaatttgaatgagcaacttgtggaagcaagccttcgactcaggcagatgagaggtgaagaacttgagggattgagtgttgaagaactccagcaattggagaagaatctggaatctggtctgcatagggtgcttcaaacaaaggatcaacaattcttggaacagatcagcgacctcaaacgaaagggtacac

SEQ ID NO: 56358 - DNA, 263 bp, Zea mays
ctgacatggatttattccttgggaacctgcaacatcaatgctaagtttgatgctaaacctattgagctcattgttacgacatatcaggctgcattactactactgttcaatggatccgaaaggcttagttattctgaaattgcaacacaattaaacctgtcagatgatgatgtagtgcgtttgctccattcacgtacttgtgcaaaatacaagatcctgcgcaaggaaccagcaaatagatccatctcgcccaatgatgtttt

SEQ ID NO: 56359 - DNA, 266 bp, Zea mays
gacacattcctcttcacctcggagtctgtgaacgagggacaccctgacaagctctgtgaccaggtctcagatgccgttcttgacgcttgccttgctgaggaccctgacagcaaggttgcttgtgagacctgcaccaagaccaacatggtcatggtctttggtgagatcaccaccacggccaatgttgactacgagacgattgtcagggagacctgccgcaacattggttttgtgtcaaacgatgttgggcttgacgccgaacactg

SEQ ID NO: 56360 - DNA, 261 bp, Zea mays
ccgtcactcaacacagcacaggcaactcgagagagagagagagagacagatgtcgtagttcgggcaccaccaccacaaccagccggctcccccggcgtcaggccccaaccaggtgttcaagatcttctgccgcgccaacgagaactactacctggccgtccgcgacgcgccgtcgtgctggccccggtcaaccccaaggacgaccaccagcactggtacaaggacatgcgcttcagcacccgggtcaaggacgaggaaggc

SEQ ID NO: 56361 - DNA, 268 bp, Zea mays
caatcaggttctgacgttcaatctaaccgagtccgggcttcactgtgtcttgccatggctgacaatggctgtcgtcgcgaatatcggtggatggcttgctgatactcttgttcaaagagggatctcagttacaaacgttcgtaagatcatgcaatcaattggtttccttggaccagccatgttcttaacactgctgagcaaagttcgtactccagccatggctgtattatgtatggcatgcagtccaggtagcgatgctttttcacag

SEQ ID NO: 56362 - DNA, 264 bp, Zea mays
ctgcaatgtcatcggtagtccagatgagcaatcttggcctcaaggattgtcgattgcagaagcaatgaagtatcagttcccacagatcaaaggcagtcaactggccgaggtgatgacaacagccagtagcgatgcaattgacctcatctcatcactatgctcatgggatcctagcaagagaccaaaggccgcagaagtcctccagcataccttttttcagggttgtacatgtgttccactccctgtccgtccaaaagcttcatc

SEQ ID NO: 56363 - DNA, 261 bp, Zea mays
cttgtgttgacgatgaccaaaggttgctggtctatgaattcatgcctacgtggcagtttggataaccactttttagaaggtctcttcctactcccatgggcaatcagaatgaaggttgcactcggagcagcaaagggtctggctttccttcatgaagcagcagaaagaccagtcatttatcgcgattttacaactggcaacatactgctggatgcggagtataacgcaaagctctctgattttgggcttgcgaaagacgga

SEQ ID NO: 56364 - DNA, 262 bp, Zea mays
cgggcaaagcagctccagggtgagaccaatataaagccattgtggggtactgcacagctctttatgcatcctcgttacatgcacggagctgctactagcccagaggttaaagtatatgcatatgcggctgcacaagttaagaacgctttggaggtcactcactacctaggtggtgaaaactatgtgttttggggtggaagagagggttaccaaactcttctgaacactgatcttaagagagaacttgaccatttggctaact

SEQ ID NO: 56365 - DNA, 242 bp, Zea mays
cttcaagccattggcttattggatgatcttgacaaggagcttaacacttatgccatgagagttcgtgaatggtctggctggcactttccagagctcaccaaaatagttacagataatatacagtatgccaaagttgtgaagatgataggcaacagagttaatgcggtcaaccttgacttctcagagatattgtcagatgaagagctagacacacagctaaaggaggcagcagtaatatccat

SEQ ID NO: 56366 - DNA, 255 bp, Zea mays
gcgaaggagtagcagcagcaggcggcgccgagtagcggctccccatctcgagcttgccaccatggctagaggattgacgaagcatttgaagaggctccatgcccccaagcattggatgctggaccacgttggcggacttttgctcccaagccatcttctggacctcacaagtctagggagtgcctgccactgatcctcatcatcaggcacaggctcaagtatgctcttacataccgtgaggtcatttccatcctg

SEQ ID NO: 56367 - DNA, 218 bp, Zea mays
cacccctacaggtcaggcagaggcggagggcaggatgtcgcaccgtaagttcgagcacccgaggcacggctccctacggcttccttcccaggaagcgctcctcccgtcaccgcggcaaggtgaagtcattccctagggatgaccccaagccgccttgccatctcactgccttccttggctaacaaggctggcacgcctcacattgtccgtgaggttga

SEQ ID NO: 56368 - DNA, 235 bp, Zea mays
gttcaagtcaggtgcagagaggaaggatgctgcggagagcaccatgaatgcctacaaagctgctcaggatattgctcttgctgatctggctccaacccaccccatcaggctcgggcttgctctcaacttctcagtgttctactacgagatcctcaactcccctgaccgtgcttgcaaccttgcaaagcaggctttgatgaggcactctccgaactagacagcctgggaaaggagt

SEQ ID NO: 56369 - DNA, 258 bp, Zea mays
cgagctgatgaacaaccgccacgtcctggccaagctccagaaggaggtgaggacggcgacgcccgacggccgcatggtgatggaggaggacctgagccggatgccatacctgaaggccaccatcaaggagtccatgcgcatccacccgccggcgccgatcctcctgccgcacttctccacccacgactgcgagatcaacggctacaccatccccgccggcacgcgcgtcatcgtcaacgcgtgggcgctcgccaggga

SEQ ID NO: 56370 - DNA, 253 bp, Zea mays
cagaataacaactgcacctcttcatgcctcagcaaattggtatttggagaatgtcaatcctatcctgcaaagctatgggattgttgcgatcgctcccttttctcaccgccttgcatttgatgatttgcctgtggatcttcaacgcttgcgttgtaaagttaacttccaagctctggtcttccgttctcacattatctcacttggagaaacacttgtgaagcgctgaggtctccggtccgggttcattccagta

SEQ ID NO: 56371 - DNA, 256 bp, Zea mays
cccagccatccctagccgaccccttccatcctcactcgctcgatggcccgcacgacgcagacggcgcggcagtccaccggcggtacggcgccgaggccgccgctggcgcctcaggcggcacgccagtctgcccctgcgaccggcggagttccgacgccccatcgcttccgccccggccccgtcgcgctccgggcactccgcccgtcacagacgcgtccggcgctgctgatccgccagctgccgttctcgcgcctgg

SEQ ID NO: 56372 - DNA, 252 bp, Zea mays
catgaacatcgacggcgacaacggcctcgcctgcctcaccaagatctccggcgcctcctccgcgtccacggtctcgccgctgccccacatgttcgtcgtcaaggacctggtggtggacatgaccaacttctacagccagtacaagagcgtcgagccatggctcaagcgcaaggaccagcccccgcagcagggcaaggagatcccgcagaccaaggccgaccgggccaagctcgacggcatgtacgagtgcat

SEQ ID NO: 56373 - DNA, 248 bp, Zea mays
cgaggtggcgccaagaagcgcaagacgaagacgtacaccaagcccaagaagatcaagcacaagcacaagacggtgaagctcgcagtgctgcagttctacaaggtggacgacgccaccggcaaggtgacccgcctccgcaaggagtgccccaacaccgagtgcggtgcgggtgtcttcatggccaaccacttcgaccgccactaatgcggcaagtgcggcctacacctacgtctaaaatccgaaggcgt

SEQ ID NO: 56374 - DNA, 256 bp, Zea mays
aagcgtcgtcgtcgctttgctccagcttcgcctccctgcggaccgcctccatcggccacccccgtggcatcgcctcctccacgcccaggaaggcattccatgtgagggcatcagctcgggttgacaaattctcaaagagtgacatcatcgtgtccccttcgattctgtctgcaaactttgcgaagcttggtgatcaggtaaaagctgtggaggtggcaggcggcgactggattcatgtcgatgtcatggacgggcg

SEQ ID NO: 56375 - DNA, 260 bp, Zea mays
cggccatgctgatgaagttgtggaggaaagaattgctgacgatgatgttattctggtgaaaggcacaaagaacaccagcgcggtctctataatacttaggggcgcaagctgatacatgcttgatgagattgaacggtccttgcatgatgccctgtgcattgtgaagagaaccctggaatcaaatatggttgttcgctaaggtggtgcagttgaagctgcgctgtcagtttatctggagaacctttgcacaaccctgggtt

SEQ ID NO: 56376 - DNA, 302 bp, Zea mays
gtcgtatgcttacgtttgcaggactaggcatcaggtgacaccttcagatctggtgctgttgagcagctgagaactcatgcaaggaggcttcagatacctatatttgagaagggttatgagaaagatccggcagttgtagcgagggaggctattcaggaagcaacccggaacaaatcagatgatgttctggttgacactgctggacgtatgcaggacaatgagccactcatgagggcactctccaagctaatcaatctcaatagcccagacctggttatatttgttggagaagcattggttgg

SEQ ID NO: 56377 - DNA, 270 bp, Zea mays
ctggcccgtcaccgccgacgagaacaacaagcccgtgccgtacgacatggaaggcgtctggcacgccatggaggagtgccaccgcatcggccttgctaggtccgtcagcgtcacaacttctctgcggccaagatgtcccggctgctcgccttcgccgccgtaccgccggactgtgaaccaggtggaggtgaacgtcggctggcgtcaagagaaggtcagggaggcctgcgccaagaacggcgtcgtcgtcaccgccttctcgacgatggg

SEQ ID NO: 56378 - DNA, 273 bp, Zea mays
cgcaagtaccagacgagcacggagctgctgatccgcaagctgccgttccagcgcctggtgcgtgagatcgcccaggacttcaagaccgaccttcgcttccagagctccgccgtcgtcgcgctgcaggaggcgtccgaggcctacctcgtcggtctcttcgaggacaccaacctctgcgccattcacgccaagcgcgtcaccatcatgcccaaggacatccagctcgcccgccgtatccgtgtggagagggcctaggcgtcgtggcggtggaag

SEQ ID NO: 56379 - DNA, 270 bp, Zea mays
ctcaattgacgacggtgtttggggaggacaagctcaagtttgcaatgttgtcacagaagatatctcagcatctgtctgccccaccacccatcaatttggagcacaagattaagctgtcagggaacggagcacatagcagtgcttgctatgatgtgctcgtggatgttcctttcccgctgcagaaagagatgatggcgttccttgccaacacagagaagcacaaggacattgaggcttgcgacgaggtgatatctgcttcgatcaagaaga

SEQ ID NO: 56380 - DNA, 270 bp, Zea mays
ctccaactctccgatctccaggaatccgcggctgacgcgccggcgatggcggctcccatggtcgacgccgaatacctgcgccaggtcgacagggcgcgccgccacctccgcgccctcatctccaacaagggatgcgccccgatcatgctccgcctcgcatggcatgatgctggaacttatgacctgaagacaaaaactggtggtgcaaatggttcgattagatatgacgatgagtacactcatggttcaaatgctggtttaaagattgct

SEQ ID NO: 56381 - DNA, 268 bp, Zea mays
caacaaactgctccgctttcagcacctgcccagcggaggaagagtgcggattgcggcggcgcggcggacgaaacaatggcgtcggcgagggacgagcatcttgctgggattcgcgcgctgatggcggcccactcgccgccgctccacgggctggtcgtcccctccgaggatgcccaccagagcgcgtacgtgtcggagcaggataaacggcgggagttcatctccgggttcacagggagcgctggcttggctcttatcaccatgaaag

SEQ ID NO: 56382 - DNA, 270 bp, Zea mays
ctccttccctccctctacccgtcgccgctgctgccatggacgcagtcgtcagccagattttggagaagcaagtgctgtctgccgcgaaggcggtggaggacaagctcgatgaggagatcgccgcgctcgatcgcctcgatccggacgacatcgaggcgctccgcgagcgccggatccagcagatgcgccgcgccgccgagcgccgcgccaagtggcgtgcgctggggcacggggagtacaccgaggtccccgagaaggagttcttctcca

SEQ ID NO: 56383 - DNA, 269 bp, Zea mays
cgctcctcctctcccggggccaatacgcggtccgcggcaccgtgcgcgaccctggtgctagcaagaatgcccatctcaaggtgctggaaggagctgaggaaaggttgcagcttctcaaggctgatctgatggactacgacagcattgcatcagcagttgccggctgtgagggtgtcttccatgtagctagccctgtcctttcccatcgaccctccaacctgaggtggaggtcatagctcccgctgtaataggtacaaccaatgtgttaa

SEQ ID NO: 56384 - DNA, 269 bp, Zea mays
tgaaccgagaccaccaccgctctgcctcgcctcgcctcacctcacctcacctcgccgactagggttttgtaccgccgtggatctcgccgtccccgccatggacgtctcgcacgcgggatcctccgtcgccggcgaggctccgacgaccggggagcaccggatggggactaccatcgtcggggtctgctacgagggcggcgtcgtcctgggcgccgattccaggaccagcactggaatgtatgtagccaaccgtgcttcagacaagatta

SEQ ID NO: 56385 - DNA, 266 bp, Zea mays
cgcttgacaaaacagaacgtgttcgaggcagccatcgagacctcatatctggtgctggagtccgccatggccgagctcatgaaccacaggcgcgtcatgaagaagctgcaagcggaggtacgggcgtacggagcggagaagaagctggacatgatcagggaggacgacctgagcagcctgccgtacctaaaggcgtccatgaaggaagcgctgcggctgcacccaccggggcccctgctgctgccgcactactccaccgacgactg

SEQ ID NO: 56386 - DNA, 268 bp, Zea mays
ctccatcccacgcgcgcgcaggccaaggccggatcggcggcctctcagatctcgccggccgccgtgagacagagaccgaagggggggttgaccggtgctcgggaggaagatgtttagcgggacgcagcagaagtgcaaggtgtgcaccacgacggtgtacccgatggaccagctctccaccgacggcgtcgtcttccaccgctcctgcttcaagtgccagcactgcaagtctaccctctcactgagcaactattcctcgttcgaagga

SEQ ID NO: 56387 - DNA, 272 bp, Zea mays
ccagaaacacagtgaagagactatcgagatcattctacggagaagaacacccagtcgcccaccagatcacttgttaaactttgttgaggggtgatggcggtttctttcgcaaacctcaactccgaggcagggcttaacacacttgatgagtaccttctcactacaagaaacatcactggctaccaagcttccaaggctgacttggctgtctacacttcgttttcggctgatccctcgtccaagtatatcaacgtagcaaggtcggtttacca

SEQ ID NO: 56388 - DNA, 265 bp, Zea mays
cgatgactttggaagtgaggttattcctggtgcaacagaaattggattaagggtgcaagcttacttatatgatggttactgggaagatattggtactattgacgcattttataatgcaaacttgggaataaccaagaagcctgtaccggattttagcttctatgatcgttctgctccaatttatacgcaacctagatatttgcctccttcaaaggttcttgatgctgatgtgacagacagtgttattggagaagggtgtgttatt

SEQ ID NO: 56389 - DNA, 268 bp, Zea mays
gggatagtttgttcatccattaatcgtgaaacaaatgagaaagtagcaataaagaagatacacaacgttttcgacaaccgtgtggatgcactacggaccttgcgggagctgaaactccttcgccatctccggcatgagaatgtcattgctttgaaggatataatgatgccaatacacaggagaagctttaaggatgtgtacttggtatacgaactcatggatactgatttgcaccagataatcaaatcacctcagggcctttccaatg

SEQ ID NO: 56390 - DNA, 152 bp, Zea mays
cttctgcgcctccatttcggcctctgtcccttgcaagttcaagctcacctccaaccatgggtaaagagaagtcccacatcaacattgtggttattggccacgttgactctggcaagtcgaccaccacaggacacctgatctacaagcttgga

SEQ ID NO: 56391 - DNA, 267 bp, Zea mays
cgccgctgggatctagcacgcgagcgagcgagagagccgcgcacctatctggcaagcgacgccgcggcctcgatcggcgtcggaagcgaacacccccatggcggcggctggcggcggcgcaggagggaaggtatccttcaagatcatcctcacctccgaccccaagctccctttcaaagtgttcagcgtgcccgaggcggcgcccttcaccgcggtgctcaagtacgccgcggaggagttcaagtcccgccccagaccagtgccatc

SEQ ID NO: 56392 - DNA, 267 bp, Zea mays
cacgatgtccaagtcgggagcgctggatcttgcttctggcctcggagggaagatcaacaaggtggaagtcaagtcggccgtcgatgagtatgagacatatcatggatactatggagggaaggaggaagcaaggcagtccaactatactgatatggttaataaatactatgatcttgccactagcttctatgagtatggttggggtgaatccttccactttgctcacagatggaatggagaatccttacgtgaaagcatcaagcgaca

SEQ ID NO: 56393 - DNA, 262 bp, Zea mays
cgcttggcgtccgcctcagcccgccgccaggagagttcaggagagtttcgagaagctgaaatggctcctaaagctgctcctgccaagaagggtgatgccaagacccaggccttgaaggttgccaaggctgtgaagtctgggtcagtaaagaagaccaagaagatccgcacgtccgtgacatttcaccgccccaagacccttaagccggctacggaccccaagtacccaagaatcagcactaccggaaggaacaagtttgatc

SEQ ID NO: 56394 - DNA, 261 bp, Zea mays
gcctacaagaacgtcatcggcgcccgccgcctccgtggcggatcatctcctccatcgagcagacggaggagagcacacaaacgaggcgcacgcgtctccatccgcgcctaccgctccaagatcgagaccgagctcgcccgcatctgcgatggcatcctcgccctgcacgactcccacctcgtcccatccgtcggcggcgccgagtccaaggtcttctacctcaagatgacgggtgactaccacaggtaccttgctgagttc

SEQ ID NO: 56395 - DNA, 267 bp, Zea mays
ctcgagccgcagctatcgggtttgagggctatgagacgcgccttgagatcacattctctagaggcacctgtctttgtggacccccatggcagcggtttgcgtgccctctccaggtcccagattgactctgttctggatcttgcacggtgcacgatcgtgtccgagctctccaacaaggattttgactcctatgttctctccgagtcaagcttgttcatctatcctctgaagattgtcatcaagacctgtggcactaccaagctcctg

SEQ ID NO: 56396 - DNA, 264 bp, Zea mays
cgtatataaaacagatgtgtggttccgatgataagtatcggtttgaaattaaggatattcttgaaatggaaatgaagctcctggaagctctcgactattatttggttgttttccatccatatcgtcctctcttacagttgttgcaggatgctggcataacagacctgacacaatttgcctggggccttgttaatgatacatacaagatggaccttatcctcatataccctccctacatgattgcactggcctgcatatacatag

SEQ ID NO: 56397 - DNA, 263 bp, Zea mays
ctccaactccaatccatggcctccacggatcgctccacgccagcggaggacgagcaacagcagaagcgcccgtctctcttctcgccgtaccagatgccccgcttccgcctcgcccaccgggtggtgctggcgccgatgaccaggtgcagggcgcccgacgcggtcccaggccccgcgctcgcggagtactacgcgcagcgtccacggagggcggcttgctcatctccgagggcaccatcatctcgccgtccggccctgggttc

SEQ ID NO: 56398 - DNA, 267 bp, Zea mays
cttatataaaacagatgtgtggttccgatgataagtatcggtttgacattaaggatattcttgaaatggaaatgaagctcctggaagctctcgactattatttggttgttttccatccatatcgtcctctcttacagttgttgcaggatgctggcataacagacctgacacaatttgcctggggccttgttaatgatacatacaagatggaccttatcctcatataccctccctacatgattgcactggcctgcatatacatagcga

SEQ ID NO: 56399 - DNA, 220 bp, Zea mays
gtaaacattgcagcaataaaggctgcggttgaaggtgcggacaaattgaatgctgttcagttggagtttgccaaagatcgtattatcatgggaaccgagaggagatcaatgttcatatctgatgaatcgagaaagcttactgcctaccatgaaagtggacatgctattgttgcactcaacacccagggtgctcaccccatacacaaggcaattatccttc

SEQ ID NO: 56400 - DNA, 258 bp, Zea mays
ccagacgacgctgcactgtccatagccaccgaggagactgagatcgggggttttgtcaagacccacaagagcaatgcatacttcaagacgtttccaggtgaagttcaagagaaggcgcgctggacagacagactacagggacaagataaggatgattaaccaagaaccaacccagtacaatacacccaaatacagatttgttgtgcgatttaccaacaaggcacatcacagcacaaatcatatctgctagtatagcag

SEQ ID NO: 56401 - DNA, 263 bp, Zea mays
ctcgagccgctcgcctcgggtcaaaccctaagcagggagttgacttatccgctgcagccatgagtaagttgcagtctgagtctgtcaaggatgccatctcccagattgttggggatgccaaggagaagaataggacgttcactgagactgtggaacttcagattggtctgaagaattatgatccacagaaggacaagcgtttcagtggctctgttaagttgccccatatccctcgtcccaagatgaaggtgtgcatgcttggt

SEQ ID NO: 56402 - DNA, 264 bp, Zea mays
gtgtaaacacactgaagaaggattggcatcctggccttggattaagacatgttcttctggttgtgagatgccttctgattgaaccatttcctgaatctgcacttaatgaacaagctgggaagatgttacttgaaaattatgaggaatatgcacgacatgcaaggttatacactggcatccatgcccttaaacctaagaatacgtccaagaccggagctatatctgagtcaaccacagctctgaatgtcgacaagtcaagtactg

SEQ ID NO: 56403 - DNA, 271 bp, Zea mays
cgggccgccagacactccgtagtctgtaccccaagcaccggcgcggcggcggcggctaccatggcagtcgggaagaacaagaggatctccaagggaaagaagggtggtaagacaaagaccgtcgatcccttctctaagaaggactggtatgacatcaaggccccatcggtacttcagtgttgccgcaacattgggaagactctcgatgtccaggcacacagaggtaccaggattgcctctgatggtctgaagcacagagtctttgaggttt

SEQ ID NO: 56404 - DNA, 265 bp, Zea mays
ccatccaagggcgccgccaaggccgatgccaagctggcggtgaagagcaagggggcggagaagcccgccaagggcaggaaagggaaggccggcaaggaccccaacaagcctaagagggctcccagcgctttcttcgtgttcatggaggaatttcgcaaggagttcaaggagaagaaccctaagaacaagtctgtcgctgcggtggggaaagctgctggcgacaggtggaaatccctgagcgagtcggacaaggctccctatgtag

SEQ ID NO: 56405 - DNA, 264 bp, Zea mays
ccgacactagttttgtttggtggtgaagatgcaaaacggtgtctcttgaatgacttgcacatccttgatcttgaaaccatgacatgggatgatgtggatgcaataggcaaccctccttctccaaggtcagatcatgctgctgcttgccatgctgaccgctatcttttaatttttggtggggggtctcatgcaacatgtttcaatgacctacatgtccttgatttgcagacgatggaatggtcaagacccaaacaacaaggcctg

SEQ ID NO: 56406 - DNA, 260 bp, Zea mays
cggctttgtacaatggcacatcaaagaagctctctctgtcccgcaatgtcctctgctccaagtgcaatggtaagggttccaagtctggagcttcgtcgaggtgtgctggttgtcaaggttctggcttcaaggtccaaatccggcagttgggacctggaatgattcagcaaatgcagaatccttgccaccagtgcaagggttctggagagaccatcagcgataaggatagatgcccacaatgcaaaggtgataaagttgtg

SEQ ID NO: 56407 - DNA, 262 bp, Zea mays
cgctctttctgtgtttgtgtcttatgctggtgataaaactagtagcctcatgctgatggctcaacatgatgtcgttttaacaacctatggtgtcctctcagctgcatgcaaaacggaatgcaacagcatttttcacaggatggattggtataggattgtgcttgatgaagctcacacaatcaaatctcctaaaactaaaagtgcccaagcagcttatcgattaaagtcggaatgcagatcgtgccttacaggcacaccattg

SEQ ID NO: 56408 - DNA, 183 bp, Zea mays
gccagcgcctgcaccaccatcatctggatcgcgtcggcgctccacgccggcatcaacttcggccagtacccgtacgcggggtacctcccgaacaggcccacggtgagccggcgccggatgccggagcccggcagcaaggagtacgaggagctggagcgcgacccggagcgcggcttcatccac

SEQ ID NO: 56409 - DNA, 272 bp, Zea mays
agttctcctgtcaatctgctcactgctcacggacccaaaccctgatgatcctcttgtccctgagattgctcacatgtacaagaccgacagggccaagtatgagtccaccgcacgctcctggacacagaagtatgccatgggctagaagcaaggctaaaagctggccaaactggtgaatgtgccggaccccaaatcgttatcacctaaataaccagtcaagtcacaagtatgaatggacttttgaggaccattgtgccctgttgaactcatgt

SEQ ID NO: 56410 - DNA, 264 bp, Zea mays
accggcctcggcgccgagatcatcggcaccttcgtgctcgtctacaccgtcttctccgccaccgaccccaagcgcaacgcccgcgactcccacgtcccggttctggctcccctccccatcggcttcgcgtgttcatggtgcacctggcgaccatccccgtcaccggcaccggcatcaacccggccaggagcctgggcgccgccgtcatctacaacaaggacaagccctgggacgaccactggatcttctgggtgggcccctcgt

SEQ ID NO: 56411 - DNA, 270 bp, Zea mays
catgctaaacctctagttatctcgcataatggtgcgagtggtgactacccagactgcactgaccaagcttatgaaaaggcagttgccgatggtgcggatgtcattgactgtcctgttcaagtgactaaagatggcatactgatatgcatgagctctgttgacctaatggatgttactactgttgcaaaatctcaatttgcttcgcaagtaactaccatcaacagtctgaaggctgggtctggagtcttcaccttcaaccttacttgggat

SEQ ID NO: 56412 - DNA, 269 bp, Zea mays
tcttcatccgcgacggcatcaagttcccggacatggtgcacgcgctcaagcccaacccgcggacgcacatccaggacaactggcgcatcctcgacttcttctcgcaccacccggagagcctccacatgttctccttcctcttcgacgacgtcggcatccccgccgactaccgccacatggacggatccggggtgcacacgtacacgctcgtcagccggccggcaccgtcacctacgtcaagttccactggcgccccacctgcggcgtgc

SEQ ID NO: 56413 - DNA, 270 bp, Zea mays
gcatgatcagcgccgtgcccgggatgaaggcgctcgacatgaacgccgccgaggacgagatcgtgcgcctcacgcgcgaggtcgtgcccggcatgatcgtcaccgggatggaggtcgcagagatcgacggcgcaccgaggatgggcccgacgttcggcgccatgatgatctccggccagaaggcggcgcacctggcgctgaaggcactgggcaggccaacgccgtggacgggaccatcccagaggtgtcgccggcgctgcgcgaggagtt

SEQ ID NO: 56414 - DNA, 270 bp, Zea mays
cctgaacctgaagctattgatatgcacaatgatgctggaaatggtcagacaccacaacagttgcggttgccacggacaaaggatgttatcgtaaatgggaccattgtgaaagtcaagtactgtgacacctgcatgctgtacagaccacctcgatgctcacactgttctatctgtaataactgtgtggagcactttgatcaccactgcccttgggtctggcagtgcataggattgcgcaattatcggttcttctatatgtgtgtattctct

SEQ ID NO: 56415 - DNA, 265 bp, Zea mays
atcaggtacaggctcaagtatgctctgaactaccgtgaggtcatttctatcctgatgcaacgccatgtacttgttgatggctaggtcaggactgacaagacctaccctgctgggttcatggatgtcatttccatccctaagacaatggagaactacaggctgctttatgacaccaagggccgcttccgtcttcacccaatcagggatgaggatgcaagttcaagctctgcaaggtgaggtccgttcagtttggccagaagggcat

SEQ ID NO: 56416 - DNA, 266 bp, Zea mays
attatggacatgcggcactccaaatgaccggactttgaatgatggagacatggcactaatggatatgggagctgaataccatttctatggatctgatatcacatgctcataccctataaatgggaaattcaacagaagtcagacaataatatacaatgctgtgcttaaggctcataatgctgttatatcagacatgcggcctggagttaattggatggatatgcacaaattagcagaacgggcaatacttgaatctctcaggaagg

SEQ ID NO: 56417 - DNA, 267 bp, Zea mays
agaggctcggcgattacctgatcgaacagggcttctaagtttgtcataatgctattttggtcattgggcacttaagtttgcacctcatttggttctgtaatatgtgggcttgtgcatgtgcttggcgtattgcatgcagtgaataatttatcttcgcgttgggttggtgacaatgttgggaacggatttgaattggggtttatgcttgccatctcctcatatctcgaactcagctgctgtttcactgagtaatgtacatttccctgg

SEQ ID NO: 56418 - DNA, 261 bp, Zea mays
ctcgagccgattcggctcaatcccatcccactaccacccatctcgtcgtccgccgattcgatccagttcttcgaacccaggggctgtgatggcgacgaagaggagcgtgggcaccctcggcgaagcggatctgaaggggaagaaggtgttcgtgcgcgccgacctcaacgtccctctcgacgacgcccagaagatcaccgacgacacccgcatccgcgcctccgtcaccaccatcaagttcctcctcgagaagggcgccaa

SEQ ID NO: 56419 - DNA, 270 bp, Zea mays
cgacggcgatggcaacgactgggtgcgacagtcgctgccgccctacttgccggttgctcggatcttcttcggcccgttagccgtcgacgagcaccaccagggcaaccagatacttcagtggcttcgcaaggatgtcctggtgcactattgagtctgatcctggtgtgttcactgagctgattcagcaaatgctagtgaaaggtgtacaggtggaagagctttactctctcgatgtgggctctcttagtcaactgcggccagtatatgggc

SEQ ID NO: 56420 - DNA, 271 bp, Zea mays
gtctcttgcaagttctatctcacctccaaccatgggtaaagagaagtcccacatcaacattgtggttattggccatgtcgactctggcaagtcgaccaccacaggacaccttatctacaagcttggaggcattgacaagcgtgtgatcgagaggtttgagaaggaggctgctgaaatgaataagcggtccttcaagtacgcgtgggtgctcgacaactcaaggctgagcgtgagagaggtatcaccattgatattgctctgtggaagtttg

SEQ ID NO: 56421 - DNA, 266 bp, Zea mays
ggcatcaaccagattgttacaggtgacttgatctccttgtctgaacaagagcttgtcgactgtgacacttcgtacaatcaggggtgcaatggaggtctgatggactatgcatttgagttcatcatcaacaatggcggaatcgacaccgagaaggattacccttacaagggcacggtcggacggtgtgatgtcaacaggtaaaacgcgaaggttgtcactattgacagctacgaagatgtaccagcgaacgatgagaagagtctgca

SEQ ID NO: 56422 - DNA, 265 bp, Zea mays
gcgctcatttctgcatccccctcccgccgcgccgcctcaccgccgccggagaagatgggtcgcgtgatccgcgcgcagctaagggtgcggggtccgtgttcaagtcccacacccaccaccgcaagggccccgcccgcttccgctccctcgacttcggcgagcgcaacgggtacctcaagggcgtcgtcaccgacgtcatccacgaccccggccgtggcgcgccgctcgccaaggtcactttccgccacccattcaggtacaagca

SEQ ID NO: 56423 - DNA, 266 bp, Zea mays
ccgcaacctccatagcactcccaaacgcccgcttccagaaccttctcgaagctccccgccgcctcctccactcgcaccgatggcgaagggaccaatgcgcgtgctcgtcactggtcccgcagacaaattggatatgccctggttcccatgattgctaggggtgttatgcttggtgcagaccagcctgttattctgcacatgcttgacattccgcagcagctgaagcccttaatggtgttaagatggagttggttgatgctgcgttt

SEQ ID NO: 56424 - DNA, 266 bp, Zea mays
tgcagatcttcgtgaagacacttactggcaagacgatcacccttgaggtggagtcctcagacaccattgacaacgtcaaggccaagatccaggacaaggagggcattccaccggaccagcagcggctgatcttcgccggcaagcagctggaggatggtcgcaccttggctgactacaacatccagaaggagagcaccctccacctggtgctcgcctcaggggtggtatgcagatttttgtgaagacattgactggcaagaccatca

SEQ ID NO: 56425 - DNA, 264 bp, Zea mays
ccttcttatagtcaccatctgcgtcactattgtgggtacttatttcttgctgaacgccgagaactaccattggcaatggacgtcgttttcttctgcagcctcaaccgctctgtacgtgtatctgtactccatctactactaccatgtgaagacaaagatgtcaggcttcttccagacaagtttctatttcggctacacgctgatgttctgccttggcctaggcatactttgtggagctattggctatctagggtcacccttttt

SEQ ID NO: 56426 - DNA, 264 bp, Zea mays
cgactgcccaacgccgatccggcgatccgtctccttcttttcctcctttctgctgtccccgatcactcgcaaccatggcggcggcagaggcggaggcgcggtgcgtgctctgtcccagaaggagcaggacatacagatgatgctcgccgccgacgtccaccttggcaccaagaactgcgatttccagacggagcgctatgtctttaagcgcgttccgacggcatctacatcatcaatcttggcaagacatgggataaactccag

SEQ ID NO: 56427 - DNA, 265 bp, Zea mays
tagacgaccttgatgcaccggctggtatgcgatacgcaagcatcaaataagaggggctacgtcgtaacctggaccctgcagtgatgaccctgccattcggtgccaacattgatattcgtgacactgtgcggtataaggatgtgatgaaggagtacagccttggtcccaatggcggcatcctcacctcgctgaccttatttgccaccaagttcgatgaggttgtatctgtcattgaaagacgtgcagaacaattggattatgtact

SEQ ID NO: 56428 - DNA, 263 bp, Zea mays
ggcaaggtgtatgacatccccaagggccacatcgtcgcgacatcaccatcctccgccaacaggctgccccacatctacaagaaccctgactcatatgaccctgaccggttcggtcccggaagggaggaggacaaggctgcaggtgccttctcgtacatctccttcggtggtggcaggcatgggtgcctcggtgagcccttcgcctaccttcagatcaaggcgatctggacgcacctactgaggaactttgagttcgagctggt

SEQ ID NO: 56429 - DNA, 267 bp, Zea mays
atctcctcgcctcctctccctagtctccacgacgcaagggagagtgacggaaagcgacgcgacgcgagctagtgagggccaaggcgaagaggggaagcaccgcaccaggacacttgttcgccgccgccgcctctgatctccgcgaggttgtcaggattcaatatgtcgaccagcacattcgctactacctgcacgctgttgggcaatgttagacaacgcaggcctcccagacagcggtgaagagcccttcgtctctaagcttcttca

SEQ ID NO: 56430 - DNA, 262 bp, Zea mays
gttcaagtcaggtgcagagaggaaggatgctgcggagagcaccatgaatgcctacaaagctgctcaggatattgctcttgctgatctggctccaacccagcccatcaggctcgggcttgctctcaacttctcagtgttctactacgagatcctcaactcccctgaccgtgcttgcaaccttgcaaagcaggcctttgatgaggcaatctccgagctagacagcctgggagaggagtcctacaaggacagcactctgatcatg

SEQ ID NO: 56431 - DNA, 265 bp, Zea mays
tcagctcccatatccgctcgcctacctctccagcatctcccgtctccgtcgtctcgtctctgctcctcacctcgccgccagccatgggcaagatcaagatcggaatcaacggtttcggaaggatcggcaggctcgtggccagggtcgccctgcagagcgaggatgtcgagctcgtcgccgtcaacgaccccttcatcaccacggattacatgacctacatgttcaagtacgacaccgtgcacggccaatggaagcacagcgacat

SEQ ID NO: 56432 - DNA, 265 bp, Zea mays
atctagaagccccctctccctcctctctctcttcgccgtccgaagctccgcaccccaatctaatcgacacctcaccgagatgggccgcaagttcttcgtcggtggcaactggaaatgcaatggaaccacagatcaggtcgagaagattgtcaaaaccctgaatgaaggacaggttcccccttcagatgttgtggaggtcgttgtcagccctccttatgtcttccttcctgtggtcaagagccagctgcgccaagagttccatgtt

SEQ ID NO: 56433 - DNA, 257 bp, Zea mays
tgcagagacaggcgtcttcgtactcgcctagctccgcgacccaaagcgttcccccgtgtcctcagcttcgctcattgcgcaccaccgccgccgctaccccctttcgacaacaccatgagggagtgcatcttgatccacatcggccaggctggtatccaggttggaaacgcgtgctgggagctgtactgcctcgagcatggcattcaggctgatggtcagatgcccggtgacaagaccattgggggaggtgatgatgc

SEQ ID NO: 56434 - DNA, 232 bp, Zea mays
cgctactttggcggcctgtaatctggtggtaatgcttatgtgattggagatccagcaagacctggacagatgtggcacgtcttctacgccactgagtacccagagcaaccaatggttaaccttgagatgtgcatgactggtctggactagtagaatgcttgtgtctttttcaagactaatgctgatgggaacactacatgtgccaatggaatgaccaagctctctggcatct

SEQ ID NO: 56435 - DNA, 260 bp, Zea mays
tgacaagccggtcaccgtctttggcatcaggaaccctgaggaaatcccgttgggtgatgctggcgctgagtatgtcgtggagtccaccggcgtcttcactgacaaggacaaggctgctgcacatctcaagggtggtgccaagaaggttgttatctctgccccaagcaaagatgcacccatgtccattgttggtgtcaatgaggacaatacacctcggatgttaacattgtttccaatgctagctgcaccacaaactgcct

SEQ ID NO: 56436 - DNA, 260 bp, Zea mays
aaccaatccgtcgcagcactcaaggtcgcaggatgcctccgctgcgtgagacaactagccccaggacgaagaggacgacgacaccgcaagcgtcgtcaagctcatcagcgccgagggcttcgaattcgttgttgacaggtaggccgccatggtctccaacaccctccgcaacatgctcacatccccaggcggcttctctgagacgcgcagggcgaggtccgcttcccagagatccccaccaacatcctcgagaagatctg

SEQ ID NO: 56437 - DNA, 239 bp, Zea mays
tgtagaagatgatctaggaggtttctcatgagtggcaattggttaacaagcagttgcctattggatgaggaagcctgaggatattaccaaggtagagtatgctgctttctacaagagcttgatcaacgattgggaggtgcatctcgccgtggtgcacttctctgttgatggtcagcttgagttcaaggctgtcctgtttagtgccgtagagggctccctgttgacctctttgacaccag

SEQ ID NO: 56438 - DNA, 263 bp, Zea mays
ggcaaatgctgaggactctggtgctggtcctggaacgaaggattatgtgcatgtgcgcatccagcagcgcaacggcagaaagagtctgactacagtccagggtctgaagaaggagttcagctataacaagatcctcaaggatctgaagaaggaattctgctgcaatggtactgtagttcaggacccagagctaggccaggtcattcagctcaaggtgaccagcgcaagaatgttgctactttcctagttcaggctgggattgc

SEQ ID NO: 56439 - DNA, 267 bp, Zea mays
gcaggaattacgatactacgactcctttcacaggtgaatccttcctgctcattcacctcagaagaggtgacatacctcacttctcgcatacagaatggtgggacagaagtagtcgaggctaaagctggagcaggatcagcaactctttcaatggcttatgcagctgccaaatttgcagatgcttgcctgagaggattgcgtggtgatgctgggataatagagtgctcttatgtggcttctcaggtcacagagttgcctttctttgca

SEQ ID NO: 56440 - DNA, 188 bp, Zea mays
cgaacttcttgtacatgctggactctttgggtgacagcacatataaaccaaatacctacgacttgctcagctctagatattctttttattactgcatgctgaaacatgaaatgaaactgctccactgctgctgttaggcaccttgcttcaagtggtgtggatgtatttactgctctttctggtggtgt

SEQ ID NO: 56441 - DNA, 185 bp, Zea mays
acaatcaggttctgaagttcaatctaaccgagtaccgggcttcactgtgtactgccatggctgagcatggctgtacttcgcgaatattggtggatggattgctgatactcttgttcaaagagggatctcagttacaaacgttcgtaagatcatgcaatcaattggtttccttggaccagccttgt

SEQ ID NO: 56442 - DNA, 183 bp, Zea mays
cgctgcttgatcttgcacagcaacagcatggtggatgggtgccagttgcagcaatggatgctgttgctaaaatcgtcgaagttgcaccaatcagggtttatgaagttgcaaccttttataccatgtttaacaggactacggttggtaaataccaccttctggtgtgtggaactacaccttgta

SEQ ID NO: 56443 - DNA, 186 bp, Zea mays
acatgttctccgcctcaggggaggcatgcagatcttcgtcaagaccctcactggaaagactatcacccacgaggtggagtacttctgacaccatcgacaacgtcaaggccaagatccaggacaaggagggcatccctccggaaccagcagcggctacatttttgctggcaagcgctcgaggacggg

SEQ ID NO: 56444 - DNA, 183 bp, Zea mays
atcatgttcgccatgacctcaatcaagggtgtacgggcgccgcttctccaacatacgtctgcaagaaggccgacatcgacatgaacaagagggccggcgagctgacgactgatgagctggagagcctgatgacggtcgtggccaaccctaggcagttcaaggtgccggactggttcctcaaca

SEQ ID NO: 56445 - DNA, 205 bp, Zea mays
acaagaatctccctagcagcagatcctcgtgcaagcaaagcgctagccatacctaactgtacccagatagacccgacacgaagacagaacggacgaggacagtaccaactggacggacaaggagaccaagagaagacagctggaccaccaaggcggcgcgcaagtctaacccggcgaccgaggagtgaagaaaccccaccgattc

SEQ ID NO: 56446 - DNA, 179 bp, Zea mays
gacatgttccactggcaggcaacaataatgggtccatctgatagcccatattctggtggagttttacctagttacaatccttttcctcctgattatcctttacaaaccaccaaagggcaatttcgcactaaggtgttccatccaaacatcaacagcaacgggagcatttgcctcgacat

SEQ ID NO: 56447 - DNA, 188 bp, Zea mays
cgtttctagcatgaacaccatactgaacaggttgttcagtactacccataccatggactagacgaggagtgcaggccatcacgtttacgagagcggcagcatacagagccacctcttagctgggaacaagaagacggattgcactgggatctgcaaaggactttcttacttgcatgatcactgcgatc

SEQ ID NO: 56448 - DNA, 182 bp, Zea mays
acgcgcctctacatttcttctctctctcctcctccgcctccgcctccgcctgatccatccaagacagggatacaccatgtcagactcggaggagcaccacttcgaatcgaaggccgacgctgggaggtccaagacctacccgcagcaggactggcaccgtccgtaagaacggcttcatcgtc

SEQ ID NO: 56449 - DNA, 177 bp, Zea mays
ctaacacacatggaaccggttgcacattagcatcatgtattgctgctgaattagcaaaaggtgcaaaatgctgcacgctgttcaggttgcaagcatttgtggagtctgctctttatcacagcaaagatcttgtgattggacatggacctacagggaccttttgaccaccacttcgaa

SEQ ID NO: 56450 - DNA, 180 bp, Zea mays
tgaacgactacctcgctgtgaacgcgacgacgcacgcgctgtacctgccgcacaccgcggaggacgactactccaagaagcggttacgcaaagacgcagtgcccgatcgttgagcgccttacaaactccctcatgatgcacgggcgcaacaacggcaagaaggtcatggctgtccgcatc

SEQ ID NO: 56451 - DNA, 175 bp, Zea mays
actaggacttgcaaagagagttggagctaggattttgttgacatcaacctctgaagtttatggtgatccacttgacgatccacaaactgaggcctactggggcaatgttaacccgattgttgttaggagttgttatgatgagggtaagcgtgtagcagagacgctgatgttcgac

SEQ ID NO: 56452 - DNA, 179 bp, Zea mays
gggttttgctgctctccgaccccgagatccgaagccgcagcatcaggcgcggcccccacgcgtgtgaccgagatggcgctgccgaatcaggggaccgttgattaccccagcttcaaactcgtcatcgtcggcgatggtggaactggtaaaactacatttgtgaagaggcatctacactg

SEQ ID NO: 56453 - DNA, 150 bp, Zea mays
gtgatgggcgttatttcatctccaattgcaaggatcagagaatcaaactttgggacatcaggaaaatgtcttccgtcgtgagatctcgcccagtgagtctagtggactgggactataggtggatgccatttccatcagaagctcataatc

SEQ ID NO: 56454 - DNA, 279 bp, Zea mays
aagcaagaaaactagaaaaggctcctcccgaccgcaacgcccctcatctccctcgaccccgacatccccgacccgatggcgcccaaggcggagaagaagccagcggagaagaagccggcggccgaggagaaggcggagaagacgaccgcagggaagaagcccaaggccgagaagcggctgcccgcgtccaagtcctccggcaaggagggcggcgagaagaaggggaagaagaaggccaagaagagcgtggagacctacaagatctacatcttcaaggtg

SEQ ID NO: 56455 - DNA, 185 bp, Zea mays
ctcacccgccgcagccaaaccctctccagcagccgtcgtcgccaccgctgcagcgcggaggcgacccccatcgccgccaagatgcaaatcttcgtgaagaccctgacggggaaaaccatcacgttggaggtggagtcctcggacacaatcgacaacgtgaaggccaagatacaggacaaggaggg

SEQ ID NO: 56456 - DNA, 251 bp, Zea mays
  unsure (1)..(251): unsure at all n locations
ctgctgtagaacatctagttactggtgaaactatgcagatctcaacaagcagagagcaacggcgaacatnggagtactacctgcagaagacatactacaaaacggcatcattgatatcaaatagttgcaaggctgttgctattcttgcagggcacacagctgaggtctcggtgcttgcatatgaatatggtcgatacctgggtctagccttccagttaattgaagatgttcttgatttcaaggggacctct

SEQ ID NO: 56457 - DNA, 270 bp, Zea mays
cggctacatccggatgcagcgcggcaccggcaacggcggcctctgcggcatcgccatggaggcgtcctttcccatcaagacctcgcccaacccgtcgcgcaagccccgccgcgcgctcatcaccagggacgcctcttcccagtgacaggctgatccatctcggcgtcgaactcgtactactggcacgtaagtaggagtacgttgacaggatgacatcctgctgctgctgtttgcttgtactattttcgattgtgttcgtaggtttgattg

SEQ ID NO: 56458 - DNA, 274 bp, Zea mays
aaagaaagtggtaaatcctccgtccttatggatgtcaaaccatgggacgatgagactgatatgaagaagctggaggaggctgtccgcagtgacaagatggagggtctgacttggggagcatcaaagcttgtgcctgttggatacggcatcaagaagatgactatcatgttgacaattgtcgacgatcttgtgtccatcgacactctaattgaggaccacttacgcaagagcccatcaatgagtacgtccagagttgcgacattgtggctttcaa

SEQ ID NO: 56459 - DNA, 267 bp, Zea mays
ctcgagccgcgagtcaccatctcatcccaactccggaacgaacaagttaccatctcatccacactccgcctcgaccggatctcgtcggactcggatccgcccgaccaccccgcgccgccgcagatcagagaagatggcagctgtcgacacattcctcttcacctcggagtctgtgaacgagggacaccctgacaagtcctgtgaccaggtctcagatgccgttcttgacgcttgccttgctgaggaccctgacagcaaggttgcttg

SEQ ID NO: 56460 - DNA, 270 bp, Zea mays
gccagccactccaaacacttgcgccgccactgcctcacaggtaaggccgccatggtctccggttcgggcgtgtgcgcgaagcatccgtggtggacgcgcgccaccacatgctgggccgtctctcctcgatcatagccaaggagctgctcaatgggcagaaggtggtcgtcgtccgctgcgaggagatctgcatgtcgggcggcctcgtccgtcagagaatgaagtacctccgcttcctccgcaagcggatgaacaccaagccggtccacg

SEQ ID NO: 56461 - DNA, 201 bp, Zea mays
tgtccatgaggaatttggcatcgtggagggccttatgacaactgttcatgcaacaacagctacccagaagaccgtcgatggtccttcgatgaaggattggagaggaagacgtggtgctggccagaacataattcccagctccactggtgcagcagaagctgttggaaaagtcctgcctgagctgaatggaaactcactggt

SEQ ID NO: 56462 - DNA, 200 bp, Zea mays
ccccaacgtcgcgccgctctccaagtgccgactccgcctcctcaagctcgaccgggtcaaggactacctcctcatggaggaggagttcgtacgccgttcaggagcgcctccgcccccaggaggacaaggccgaggaggaccgatccaaggtcgacgacctccgaggcacccccatgagcgtcggatccctcgaggagatc

SEQ ID NO: 56463 - DNA, 264 bp, Zea mays
tagaaaatgtagtggacttcagcatggtctcccactgatcctatcatatctctgttcgtgcctgaaatgggtggtggaaatcagcctgcgagggtgagtctagtgcaaatccctggcaaagaggagctgcgacagaaaaaccttttcagtgtcagtgattgtaagatgtattggcaaaacagtggagaatatcttgctgttcaagttgatagatacacaaaaacaataaagagcacctacactggggttgagctgtttagaatt

SEQ ID NO: 56464 - DNA, 274 bp, Zea mays
cgcgtttccaacaggccagtcccctcccactcccagtcccatctcgacgacatggccgcagccgcagggccatcaagcgctgtgaaggagacgctcccgccgggcctcggctccacctcccagccacctcccgtcttcgatggaaccaccaggctgtacatctgctacttctgcccgttcgctcagcgcgcctgggtcaccaggaacgtgaagggtttgcaggacaagatggaggtttgtggccatcgatctgcaggacaaaccggcttggtac

SEQ ID NO: 56465 - DNA, 269 bp, Zea mays
tcatttcctcacaatactgatcactgcctgacatgggctagatctgagtctgagggctctacttgagaagactcccactgaagtagatgcttttctgtcgaaccctggtggatatgcaacctcagcaagaactgctggtgatgcacaggctagagagcaacttgagcgagttatagaatgccttgagacacacaagtgtgagacattccaagattgtactacctgggcccggttgaagtttgaggattatttctccaaccgtttaaagc

SEQ ID NO: 56466 - DNA, 272 bp, Zea mays
gcgaccgtatctgttgtgcactcgcggacccctgatcctgaaagcattgtacgcgaagcgacatagtcatcgcggcagctgggcaggctatgatgatcaaaggtgactggatcaagccaggtgctgcggtcatcgatgtcgggacgaactccgtcgacgaccctacccggaagtcccggtaccggctcgtcggcgatgtggatttcgcagcggcgagcaaaggttgctgggtacctgactccggttcccggaggcgttggcccaatgacggt

SEQ ID NO: 56467 - DNA, 271 bp, Zea mays
atgaagagtgcaaggacatgcctttgatcctccgcaacaaggccccaaggtggcacgagcagcttcagtgctggtgcctcaacttccggggccgggtgactgtcgcctcggtcaagaacttccagctagtcgcggcgacacagcctgccgccggagccctgaccccatcacaggcagccccgcagccagctccgcctcctccgccggaccaagagaaggtcatactgcagtttgggaaggtcggcaaggacatcttcaccatggactactg

SEQ ID NO: 56468 - DNA, 253 bp, Zea mays
  unsure (1)..(253): unsure at all n locations
cgcattcgttccaactcctgagcactttctcctcgtccccgacaagccaatcgaagccgagatacggccatggactccaccggcaccggagcagggggtaaggggaagaagggagcggccgggcgcaaggtcggcgggccaaggaagaagtcggtgtcgaggtccgtgaaggccgggctccagttccccgtcggccgcatcgggccgctattgaagaagggccgctacgcgcagcgngtcgggtccggcgccc

SEQ ID NO: 56469 - DNA, 205 bp, Zea mays
gtgaagatgggtatggctgatgctattgtggatctcgtgagtagcggaacgaccttgcgtgatgataacctaaaggaaattgatggtggagtagttctggaaagccaggccactcttgtagcaaataagaaatctctgcacaagcgtaaaggtgtgctggaggttactcatgaattggttgaaggattagaagctcacctaagag

SEQ ID NO: 56470 - DNA, 270 bp, Zea mays
ggccgagcaggcgatggccgcagcggcgtcaatggggcacccttacgcgccagccgagctggaccttccgggtttcgtgccgctgaagctgtcccaggtcgagatcctcgtgtcctacctcggcgcctccgtcttcgttttcctcgccgtctggctcgtctccggaagatgtgttagattatccaagaccgaccgtctgctcatgtgctggttgcgcattcacagggttgagcccaataatgatcgatgggcccttcgtcttcactcctg

SEQ ID NO: 56471 - DNA, 266 bp, Zea mays
  unsure (1)..(266): unsure at all n locations
caagtatcagaagagcacggagctgctgatccgctagctgccgttccagcgcctggttcgtgagatcgcccaggacttcaagatccgccttcgnttccagagctccgncgtcgctgcgctgcaggaggcgtccgaggcctacctcgtcgggctcttcgaggacaccaacctctgcgccattcacgccaagcgcgtcaccattatgcccaaggacatccagctcgcccgtcgcatccgtggggcagagggcctaggcttcgtcgcgg

SEQ ID NO: 56472 - DNA, 219 bp, Zea mays
ctctgtctctggctctctcgcctcgccgcccctttttatcgcccaatctcacacattgtggaaagaggagagagatagggagagattagagggagctcccagcccaagcaaagagacaccgcggcgcgacaagagggaggaagggcagacgggcgagcaggatgagagagatcatcagcatccacatcggccaggccgggatccaggtcggcaacgcct

SEQ ID NO: 56473 - DNA, 264 bp, Zea mays
ctcgagccgttgaggtgcttattgattgtgtacgcaaccctgcttttcttgattgggaggtaaaggaacagattttgaggctacaggcagagcttgcaaaatcatcaagttatcctgaaaattttcttttggaggctcttcattctactggctattctggtgctttagcaaacccactaattgttccagaatattcagttagcagattgaatgcagatgtcctggagcaatttataactgaggactacactgcttcccgaattg

SEQ ID NO: 56474 - DNA, 267 bp, Zea mays
ctcgagtcgctcaagttccccagggcgaacgcggaggcgttcgcgcggagcggtggtaccactcgggcgacctcggcgtgaacaccccgacgggtacgtcgaggtgagggaccggatgaaggacgtgatcatctccggaggggagaacatcagcagcctctaggtggagaaggtgctttgcgcgaacccggcggtgctcaaggtctcggtggtcgccaggtctgacgagcggtggtgcgagtcgccgtgcgcattcgtgacgctcaa

SEQ ID NO: 56475 - DNA, 123 bp, Zea mays
gagcttaagcacatggcgaacaggggcttgcatcgggctctgttcctcgtccttctcgtgctgctgtccaatttggcagccgggcagatcccgttccagggcttcaactgggagtcgtgtgaa

SEQ ID NO: 56476 - DNA, 257 bp, Zea mays
ggcccagctgctgggcaccaccgtggaatgcctgctcctcgggttcgtcacccacggcaaggccatcccgacgcacgccgtcgcgggcatcagcgagctggaaggcgtcgtgttcgaggtcgtcatcaccttcgcgctcgtctacaccgtgtacgccaccgccgccgaccccaagaagggctcgctcagcaccatcgcggccatcccatcggcttcatcgtcagcggcaacatcctcgccgtcgccgcgggcacttc

SEQ ID NO: 56477 - DNA, 259 bp, Zea mays
cagatcccaagctcaccctagagggggaagagggcgaccgaaggcggcgatgggtttcatcatggacttcgcggagaatctgatcctccgtctgatggaggacccggacaagcgcgaccaggttcggcgggagcatgtctacaagatgaaggagcggtgcgagcgcactaaggcggcgtggagcctccctctgcgcccctacggcttctggaccttcgaccgcttcaactcgcagctctcctgggatccccagatcagc

SEQ ID NO: 56478 - DNA, 248 bp, Zea mays
agtccgcagcggcgcctacgtggccaggcaggccgccaagagcatcatggccagcggcgtcgcccgccgctgcctcgtgcaggtgtcgtacgccatcaggtggccggagcccctgtccgtgttcgtcaactcgtacggcaccggcacgatcgccgacaaggagatcctcaagatcgtgaaggagaacttcgacttcaggcccgggatgatcagcatcaacctcgacctgaagaatggcggcaagaggt

SEQ ID NO: 56479 - DNA, 205 bp, Zea mays
gggtgttctacaaggccggggagtatgccgactagaaccccaacttcgtcggctgcgtcgagggtgcactcggcatccgcggctggctcgagtcgcagggccatcagtacattgtcaccgatgacaaggaaggccccaactgtgaactggagaagcacattgaagacatgcatgtcctgattaccaccccattcgacccagctta

SEQ ID NO: 56480 - DNA, 267 bp, Zea mays
caggcttcatcaacacatagagaagggtaatgaagatggattgttcattagttcagtagcatcttcagccaatctttgggctctcattatggatgcagggactggtttcacatcccaagtatatgaactgtcacccatattccttcataaggattggattatggagcagtgggaaaataactactacatcagtgcaatagctggtgcaatgaatgggagttccttggtggtcatgtcaaaaggcactccttacactcagcagtctta

SEQ ID NO: 56481 - DNA, 192 bp, Zea mays
ggcaagcagctggaagatggacgtactttgtctgactacaatattcaaaaggagtctactcttcatctggtgtagtctcttcatggtggtgataagttaaggtggaagaagtcttacaccgctcccatgaagtataatctcaagagagagtaggttaagtctggctgtcctgaagtattatagaggtgtatg

SEQ ID NO: 56482 - DNA, 205 bp, Zea mays
gtccgctgggttcttcctgattcatacttggatgtcaaaaacaaggactatggaggcgaacccttcataaatgggcaagctgttccttatgatcctaaatatcatgaggagtgggtgagaaacaatgcccgtgccaatgacagaaaccggcgcaatgataggccccgcaactttgacaggtcaaggatctctgacaggagaaggg

SEQ ID NO: 56483 - DNA, 197 bp, Zea mays
gtgctccaaacagagggttcctttcccgctttggtgaaccgtctgccagttatcaaatctgaatctctggagttctctcctgtcgagaatgcgattggaatgatcgaaacaaggacagctgcattgagaaatgagctagaagaaccaggagttctgaaggtgatcaactcccaaggcttcagagctgaaaaaggata

SEQ ID NO: 56484 - DNA, 262 bp, Zea mays
gtgaagatgggtatggctgatgctattgtggatctcgtgagtagcggaacgaccttgcgtgagaataacctaaaggaaattgatggtggagtagttctggaaagccaggccactcttgtagcaagtaggaaatctctgcacaacgtaaaggtgtgctggaaggttactcatgagttgcttgaaagattagaatctcatataagagcaactgcagaattaatggtcaccgcaaacatgaggggcaacagcgcagaagaagtgg

SEQ ID NO: 56485 - DNA, 262 bp, Zea mays
agcttactggaattctcagtttaggggccttgatgcctggggaatcgaggaaatatggcacaactattgcccctggtctgtatgcaccagttcatcagcatttctttgttgcccgtatggacatggctgttgattgcaaacctaatgaagctcataaccaggtggttgaggttaatgttaaagtggaaagtgcaggcacacataatgtgcataataatgctttctatgctgaagagaagttgctcaaatctgagttgcaagc

SEQ ID NO: 56486 - DNA, 272 bp, Zea mays
acctctgccacctcgccgtcggcatgacaacagggtcgaccccgggttcggccccctctcagagaaaacgaaattctaccaaggattccgttgccttgtacgcggtgcaatgctataagtgctacaaatggagtacggttccaaaagaagaattgagacgcttcgtgagatattcactaaggatccatggttctgcagcagacgaccagacagctcttgtgaagacgatgctgacattgagtacgacagcagccgcatctgggttttggaca

SEQ ID NO: 56487 - DNA, 254 bp, Zea mays
cgggaggcgatgaggctgatccacgcggtagacaagaacctcaaggccgaggactcagcgtgggagctgaagaagaagttcggcaacggcgtgagcaccatggtcctcgtatacaacgccaccggggccagcctgagcctggtggacgacgggaaagactggatgggctccgtctacagctcgccgatcccggacaccttccacaacgggcagtggatcgccttcctccaagtcaagcccggctcgctggcgca

SEQ ID NO: 56488 - DNA, 255 bp, Zea mays
  unsure (1)..(255): unsure at all n locations
caggtattagcagtcgaccggttcctcggagcacgatgaagtttgttgctgcctacctgcttgctgtcctcgctgggaacgccagcccctccgctgacgatttgactgccattctggagtcagttggctgtgaagttgccaatgaaaagatggaactcctgctgtcccaactgagcgatatcccgatcanngancttattcncgnggggagggaaattttttcttcagtcccatgtggtggcgggggtgtcgttg

SEQ ID NO: 56489 - DNA, 215 bp, Zea mays
actcgagccgattcggcttaggtctcgtactgctgttgctccaattgaacgattgaaaatattgcttcaggttcaaaatccgcacagcatcaagtacaatggtactgttcagggtctcaagtatatctggagaacagagggcctcctctggacttttcaagggcaatggtaccaattgtgcaaggtttgtcccaaattctgccgtaaagtttttt

SEQ ID NO: 56490 - DNA, 279 bp, Zea mays
gacgagaggcagcgaaggaaacagtagttcttcagttaggcaggagggcacaggaggaggaagatggcgtcgaagaggatccagaaggagctcaaggatcttcagaaggaccctcccacctcgtgcagtgcaggtcctgttggtgaagattattccactggcaggcaacaataatgggtccatctgatagcccatattctggtggagttttcctagttacaatccattttcctcccgattatcctttcaaaccaccaaaggtggcattccgcacaaggt

SEQ ID NO: 56491 - DNA, 270 bp, Zea mays
gtgccggggctcaatgacgaggtgatgaagatcacgcccgttcagaagcagacccgcgccggacagcgcacgcgcttcaaggcctttgtcgtcgtgggcgactgcgacggccacgtcggcctgggagtcaagtgcgccaaggaggtggccaccgccatccgcggcgccatcatcctcgccaagctcttcgttgttcccgtcaggagaggctactggggaaacaagatcgggcagccgcacaccgtgccctgcaaggtcaccggcaagtgc

SEQ ID NO: 56492 - DNA, 257 bp, Zea mays
ctaagttatgtgatttatatgaaaatgactcaatttttgacaaatttgagtgttgtcaaagtggtgatggattaagagtagcaactggttcctacagcaacattttccgtgtgtttggttgcggtactggtaacagtgaggcgacaacacttgaagcaacccgaaaccctacaaggaggcagctccagaatcccactagagctaccagatccctaagttctctgacaaggacagttagacgaggtggagacaccact

SEQ ID NO: 56493 - DNA, 256 bp, Zea mays
gcgacgccgccgccgcaagccgtccgccttgcccctcgaaggcttggtcctcctccttgtatcccgacctcccacgcgacagacccgtttccccgctaggctagagttatcgttcctctgcagcgatggcgatcaagcggaccaaggcggagaagaagatcgcgtacgacaagaagctgtgcagtccgcttcctgagtacaccaaggtgctcatcgccctcgccgacaacgtggcgtcaaagcagttccaagacat

SEQ ID NO: 56494 - DNA, 247 bp, Zea mays
ggagaatgaagcaacatgagaaggttcttgaggaaggtgtcctcaacccagaatcaactgttgttgcgatcttcccctctcctatgcattatgctgggccaactgaggttcaatggcatgctaaggctcgtattaatgctggtgcaaatttctatatcgttggaagggatcctgctggtatgagccaccccaaagagagaagggacctctatgatgctgatcagggaaagacgtttttgacaaggcc

SEQ ID NO: 56495 - DNA, 162 bp, Zea mays
cgactggtgaggtgatccttgggaagcagccgctttccccaccagcccttagtggtgatctgggaactttcatggcctgggtggatgatgttagaaagctcaaggtcctggataacgccgatacccctgataatgcattgactccgcgaaacaatggggaca

SEQ ID NO: 56496 - DNA, 263 bp, Zea mays
acgaggtggcctccgaactgaaatcaagagggctacgtgttgaagtctgtcatggagagcgcctaccaaagctaataaggaatgctgaaacacaaaaggtgccactcatggcagttgttggtcctaaagaagttcaagccaggaccctgactatcaggtccaggcacaacggggagatcggcacgatgcccgtcgatgaattcatcaccaggcttcaacttgctgtcgcaaacaaatcatcactatagatccgttggtccgca

SEQ ID NO: 56497 - DNA, 242 bp, Zea mays
agagaccacgactcagatggccagccgctgggtccggcccgaggtgtacccgctgttcgcggcaacgggcgtggccgtcggcatctgcggatttcagctcttccggaacatcaccggcaacccggaagtcagggtaaacaaggcagggagggcagctggtgtgcttgagaaccatgaggatgtgaggcgttacgccatgcatggcctaagaagctttgtgcacgacaagactcctgagatca

SEQ ID NO: 56498 - DNA, 165 bp, Zea mays
gcagcctccaaagccactcgcaaacccccgcttccaaaaccttctcgaagctcaccggcgcctcctccactcgcaccgatggcgaaggatccaatgcgcgtgcccgtcactggcgccgcaggacaactgggatatcccctggttcccatgattgctacgggtgtt

SEQ ID NO: 56499 - DNA, 257 bp, Zea mays
tagacaatgtagtggacttcagctggtctcccactgatcctatcatatctctgctcgtgcctgaactgggtggtggaaatcagcctgcgagggtgagtctagtgcaaatccctggcaaagaggagctgcgacagaaaaaccttttcagtgtcagtgattgtaagatgtattggcaaaacagtggagaatatcttgctgttcaagttgatagatacacaaaaacaaaaaagagcgcctacactgggtttgagctcttt

SEQ ID NO: 56500 - DNA, 256 bp, Zea mays
ctttggatgatcagctcccaagaaatgatggcataacaactacggatggtgaactctaatggcaccaaccttcatctatgttaagcaggtgcttgagcatattagcaaaggtggtgtgaaaggactagcccacatcactggtggtggctttactgacaatatcccaagagaattcccctccggatgcggggcaaaaatttttactgggtcatgggaaatacctccaatcttcagttgccttcaacaggctggaaac

SEQ ID NO: 56501 - DNA, 247 bp, Zea mays
ggtagataaagatgtgactcttgggtggactgcatacagcacacttgcttctatctatgtaaatgctggagcatttggaaaagcaaaatctgctctgaagaaacttgagggccttatcagtgctcatgatgacagacagccttttgatttcctactgagcctatacgcttcactaggaaattcgagcgaggtcaatagggtatggaatgtgataaagtccaaattctcgaaggtaactaaaacaagc

SEQ ID NO: 56502 - DNA, 258 bp, Zea mays
acagagcattacaaagatttcacagagaggttaactggaacagaagacacggtacgagcagcctcaaagcgactaactcaggggatggcagatttcaacaaggcaatatcttcagcaaaaactgacgaggaaaagactaaaattaaaggcgatcagcaaacttcaacaaggacaatgaggtcatataacaatatattggcaatgacacagtcattgcattcaaaatcccctttattaatcggggataagaaaatcact

SEQ ID NO: 56503 - DNA, 270 bp, Zea mays
cactgcctcgtgtggccgtcgtctcccgttcggaacgccaagcccccctccggcgaaatggcccccaagcgaggtggcagggcgccggtgccggccaagaagaagacggataaagtgacgaaccctctgtttgagaagaggccgaagcagttcggcatcggcggcgcgttgccgcccaagaaggacctgcaccggttcgtcaagtggcccaaggtcgtgcgtatccagcgccacgccgcatcctcaagcagcgcctcaaggtaccaccgg

SEQ ID NO: 56504 - DNA, 269 bp, Zea mays
ataccctgccatcgtcctcgtcaacaaagccactggagatgctatcaagcattcccttggccagtcacaccctgttcttctgacccgccataatccagactccctggacgagtctgtcctgtggacagagagcagggacgttggggatgggttccgctgcattaggatggtcaacaacatctacctgaactttgatgctttacatggagacaaggaccatggtggtgtgcgcgacgggacggccctagtgctgtggagagtggtgcgag

SEQ ID NO: 56505 - DNA, 260 bp, Zea mays
aaacgacatctactatatcactggtgagagcaagaaggcagtggagaactcccctttcctggagaagctgaagaagaggggctacgaggtcctgtacatggttgatgccattgatgagtatgctgttggtcagctcaaggagtttgagggcaagaagcttgtctcggccaccaaggagggtctgaagcttgatgagaccgaggatgagaagaagaggaaggaggagctgaaggagaagtttgagggtctgtgcaagatca

SEQ ID NO: 56506 - DNA, 262 bp, Zea mays
tgcagcgccgcctggatcgagcagccgagcgactaagcgaagactcccttttccccgagcacaagagaaccatggcggcggcggcagtttacggcggcttcaaagggaagcttggcgtcgaggatgcccccgagctgcagctcaaccgcatccgcatcacactctcatccaagaacgtcaagaacttggagaaagtttgtgcggatttggtaaagggagccaaggacaagcatttgagggttaagggacctgtccggatccc

SEQ ID NO: 56507 - DNA, 257 bp, Zea mays
aatggccctcctggaacaggaaagtcttacttggcaaaagccgtcgcaaccgaggctgattcaacatttttcagtatatcttctacagatctggtttcaaagtggatgggtgaaagcgagaaattagtcgcaaatcttttccaaatggctcgtgaaaatgccccttccattatctttattgatgaaattgattctttatgcggtcaacgtggagaaggtaatgaaagtgaagcatctaggaggattaagactgaact

SEQ ID NO: 56508 - DNA, 256 bp, Zea mays
cagcagcatagggaactcatcataaacgagagatgtcttggtcttgatcctccggacacagcccacagttatggtaacatggccttgttctatcatgggctcaatcaaactgaattggcactgcggcacatgtcccgtacactgctgctgctaagtttggcgtcaggacctgatcatccagatgttgcagcaactctcataaatgttgcaatgatgtaccaggatgccagtactatgaatactgctcttaggtatc

SEQ ID NO: 56509 - DNA, 261 bp, Zea mays
accactcgctgcagttaaatactcccgtggaacgttcatattccctgaagcacagccttccccacacaagaacttcgctgacgaggttgccttcctgaatcgcttcttcggtggcctcaagtccggtggcaatgcttatgtgattggtgactctgcgaacccgggcagaagtggcacgtctactacgccgctgagcaccctgaggagcctgttgttactctagagatgtgcatgactgggctggacaagaagaaagcttct

SEQ ID NO: 56510 - DNA, 258 bp, Zea mays
caaatttgagactcagttacgtgactttgtggtgaagaacacgattcatgaccgtgtccattttgtgaacaagacattggcagtggccccttacttggcagcaattgatgtgcttgttcagaattctcagggccgtggagaatgctttggaaggataacaattgaagcaatggcattcaagttgccagtattgggcacggctgctggagggaccacggagatcgtcctggacggctcgactggccttctgcatcctgc

SEQ ID NO: 56511 - DNA, 261 bp, Zea mays
gcaagggcattgaagactgcgtgagggcaggttgctatgccgcaaacgttatcatccagcgcccgggctgtacttacccggagaagcctgacttcaactagtgcaaaaactgaggcacgtcatgagagggactgttataggcacacttaattgttaaccagtgcgtggttcggtgtctacacaccctgtattcttccgaggcttctcttctgatccggccaatatttttgccgtgaaatttgtgttctgcgactatggacg

SEQ ID NO: 56512 - DNA, 244 bp, Zea mays
  unsure (1)..(244): unsure at all n locations
gcctacaagaacgtcatcggcgcccgcagcntcgtggcggatcatctcctccatcgagcagaaggaggagggccgcgggaactaggcgcacgccgcctccatccgcgcctaccgctccaagatcgagaccgagctcgcccgcatctgcgatggcatcctcgccctgctcgactcccacctcgtcccatccgccggcggcgccgagtccaaggtcttctacctcaagatgaagggtgactaccac

SEQ ID NO: 56513 - DNA, 254 bp, Zea mays
cctgacaacaagttggttggacgggaagcatgtggtgtttggcaaggtgttgtctggaatggatgttgtgtacaaggtcgaagctgaaggccggcagagtggggagccgaagagcaaggttgtgatagcagatagcggcgagctgccgatgtgacggcgagctgaacttatgttccatcccgaagcatgatgataagaatttgctggtggccgtctgtcgttctagaactgttaggccctgtttggaatcttag

SEQ ID NO: 56514 - DNA, 264 bp, Zea mays
  unsure (1)..(264): unsure at all n locations
ctcgagccgcaacattattggaccagcgattgttggaaaggaccccactgagcaggttgacattgacaacttcatggtccaacagcttgatggaacctccaatgagtggggctggtgcaaacagaagcttggagcaaatgccatccttgcggtttcacttgctgtgtgcaaagctggagctatggtgaagaagattcctctttaccagcacatcgcaaatctctcgngggaacaaaactctggtgctccctgtacctgccttta

SEQ ID NO: 56515 - DNA, 246 bp, Zea mays
ggctcgagctgatggctcattggtagcagtacaaagactaaaagaagagcgtacacctggtggtgagcttcagttccaaacagaggttgagatgattagcatggcggtgcacaagaaccttctccgacttcgtggtttctgcatgacacctactgaaaggttgttagtctacccatacatggctaacgggagtgtggcatcacgtttacgagagcggcaccatctgagccacctcttagctgggaa

SEQ ID NO: 56516 - DNA, 262 bp, Zea mays
agcgtgacgcgcgcaggacgtggacgtggcgtggttccggaacccgctggtgcacatcacgatggcggcggacatcacgacgtcgagcgacttctacttcggcaacccggacgacctgggcaacttccccaacacgggcttcatctacttcaaggcgacgccccggaacgcccgcgccatggcctactggcatgcggcgcggcggcggttcccggagaaccacgatcagttcgtgttcaacgagatcaagcgggagcacgcg

SEQ ID NO: 56517 - DNA, 254 bp, Zea mays
tggtgagcaatacgtgaatagttcaacactttcagatgttactttcttggtagaaggaaagcgcttttatgcacacagaattgctttgcttgcttcttcggatgcatttcgtgcaatgtttgatggtgggtaacgggaaaaggatgcaagatacattgaaattccaaatatcagatgggaggtctttgaactcatgatgagatttatctatacagggtcagtgcagattaacagtgaaatttcacaggatcttc

SEQ ID NO: 56518 - DNA, 252 bp, Zea mays
ctcacccgccgcagccaaaccctctccagcagccgtcgtcgccaccgctgcagcgcggaggcgacccccatcgccgccaagatgcagatcttcgtgaagaccctgacggggaaaaccatcacgttggaggtggagtcctcggacaccatcgacaacgtgaaggccaagatacaggacaaggagggcatcccgccggaccagcagcggctcatcttcgccggcaagcagctcgaggacggccgcaccctcgcc

SEQ ID NO: 56519 - DNA, 253 bp, Zea mays
gttggatctcagatcggtgatcacataaacaatggtgaaggctgttgctgtgcttggtagcagcgatggtgtcaagggcaccatcttcttcacccaagagggagatggccctaccactgtcaccggaagtgtctctggcctcaagcctggcctccatgggttccatgtgcatgcacttggtgacaccaccaatggctgcatgtcaactggaccacactacaatcctgcgagcaaggaacatggagcaccagaa

SEQ ID NO: 56520 - DNA, 248 bp, Zea mays
acacgccgcggcatgctggcctacgtggagaggatccagagggaggagaggatcaacggcgtggagacgctggagcatcagaagtggtcgggcgccaatttctacgacagggtgctcaaggctgtgcagggtggcatctcctcgactgcagccatgggcaaaggagttactgaagagcagttcaaggatccacggcccgcaactgggagcagtggcctgcaagttatggccaaatccaggatttgatg

SEQ ID NO: 56521 - DNA, 248 bp, Zea mays
cgccgccgccgctataatggaggcaatggaggctgagctcgaccttgccgtctgcattacagaaggaatacctcagcatgacatggtgaaagtgaaggctgcactaaacagccagtctaaaactcgattgattgggccaaattgccctggtatcattaagcctggtgagtgtaaaattggaatcatgccaggttacatccacaagcctgggcgaacttccgtcgtatctcgttctggtactttgacat

SEQ ID NO: 56522 - DNA, 263 bp, Zea mays
cgagctcctgtcggattcattcacctataaggagctcgagaacggagtcctgtgggaggtcgagggaaagtgtgtcacccaaggtcctgttgatgtagacattggtgccaatccatccgccgagggtggtgaggacgaaagcgttgatgacacagccgtgaaggtggttgatattgttgacacattcgagctacaggagcaacctccttttgacaagagatcatttgtctcttacattaaaaaatacatcaagaatctcactg

SEQ ID NO: 56523 - DNA, 261 bp, Zea mays
atggtttcattagctgctcctgccaagaagggtgatgccaagacccaggccttgaaggttgccaaggctgtgaagtctggggcagccaagaagaagaccaagaagatccgcacgtctgtgacatttcaccgccccacgaccctgaagaaggctagggaccccaagtacccacgaatcagcactaccggaaggaacaagcttgatcagtaccaaattctcaagtacccccttaccacagaatcagcgatgaagaagattgaa

SEQ ID NO: 56524 - DNA, 260 bp, Zea mays
tctagctcctgtcggattcattcacctacaaggagctcgagaacggcgtcctgtgggaggtcgagggaaagtgggtcacccaaggtcctgttgatgtagacattggtgccaatccatccgccgagggtggtgaggacgaaagcgttgatgacacagccgtgaaggtggttgatattgttgacacattccgtctacaggagcaacctccttttgacaagaaatcatttgtctcttacattaaaaaatacatcaagaatctc

SEQ ID NO: 56525 - DNA, 255 bp, Zea mays
atgccgtctcccttttgcgtgacaaagaaagagagcgagaagcagtcgccatgtctggcatcatccacaagatcgaggagaagctccacatggggggcgaccacaagaataaggaggaggagcaccacaagaaggccgaggagcaccacaagaaggaggagggggagcaccacaagaaggacggcggggagcacaaggaaggcatcgtggagaagatcaaggacaagaagaagaaggataagaagaagcacggcg

SEQ ID NO: 56526 - DNA, 256 bp, Zea mays
atcgtgggatcccagccaccgccgctagaagaagagctcggcgattcccaggtcccgcgagaatatgccgaagcagatccatgagattaaggacttcctcctcaccgcgaggaggaaggatgcccgctcagtgaagatcaagaggagtaaggatgttgtcaagttcaaggtgcgctgctccaagtacttgtacacgctctgcgtcttcgatgctgagaaggcaaacaagttgaagcaatctcttcccccaggtttg

SEQ ID NO: 56527 - DNA, 253 bp, Zea mays
agccgcgtcgcgtcgcatcctacgatccaaagctctctctgctcgcagccctggcgaagaactacccgaccgtgagcgccgagtacagcgaggctgtggagaaggccaggcgcaagtaccgagccctcatcgccgagaagagctgcgccccgatcatgctccgcgtcgcgtggcactccgcggggacgttcgacgtgtcgtcgaggaccggcggtcaattcggcacgatgaagcatcagtcggaattggctca

SEQ ID NO: 56528 - DNA, 250 bp, Zea mays
agccgcagagggagaggaggctcggtgacaggtacctggccggcgacaacgaggacctgccggactccgtcgactggcgggccaagggcgccgtcgcggagatcaaggaccagggcagctgcgggagttgctgggctttctcaacaatagcggctgtggaaggcatcaaccagattgttactggcgacatgatctccttgtctgagcaggagcttgttgactgtgacacttcatacaaccaggggtgcaa

SEQ ID NO: 56529 - DNA, 251 bp, Zea mays
gcgagctaggtacccggggcggaagaagagagagaagacgtctctctcctctcggcgtccccgttccccaacctctcgtctgctgcctgcctgcctgcctgcctgcaaaaaggagtttgtcatggcgtctaagcgcatcctcaaggagctgaaggacctgcagaaggacccccccacatcatgcagtgcaggtcctgctggtgaggacatgtttcattggcaagcaacaattatgggaccacctgacagtc

SEQ ID NO: 56530 - DNA, 243 bp, Zea mays
atacaatcaaccagcaacactcttctcgtataacataatacagcgaaggtaactcacatggcaacttccatgggttgtctcgtcttgctctgccttgtttcttctctccttcccagtgccgtcctttgccacccatggggtggcttgttcccacagttctatgaccattcgtgccccaaggcgaaggtcattgtgcagtccattgtggcacaggctgtggccaaggagaccaggatggcggca

SEQ ID NO: 56531 - DNA, 276 bp, Zea mays
gtcggctagtttggacgcatggctgctgcaggagagtagagaccacagcgcgcgaggcgaggagaataagctatgggcgcgccgaagcagaaatggacgtcggaagaggaggatgcgctccgcgccggcgtgcgcaagcacgcgccggcaaatggcggaccatccagaaggaccccgagttcagcccggtcctctcctcccgctccaacatcgacctcaaggacaaatggaggaatttaagtttcagtgcaagtggactgggatcaagtaaactgc

SEQ ID NO: 56532 - DNA, 271 bp, Zea mays
agaaccagctgtgattgctgataatgtcggtgacaatgttggtgacattgctggaatgggatctgatctctttgggtcatatgcagagtcttcctgtgctgcccttgttgttgcgtctatttcatctttcggaatcaaccatgatttcactgggatgtgctacccactccttgttagctctgttggtatcattgtctgcttgatcaccaccctttttgctactgatttctttgaagtcaaggctgtgaaagaaattgagcctgcacttaag

SEQ ID NO: 56533 - DNA, 272 bp, Zea mays
gtgagtgcaagaacgaggccctatgccacgcctgcaacaagacaggtcacttggcacgtgactgccctacttcaggtgctaacgtcaagctatgcaacaaatgctttaaatcaggccacatcgccgttgactgcaccaacgaacgggcctgcaacaactgccgtcagccagggcacatagctcgggagtgcaagaacgatccggtctgcaacctgtgcaatgtctccggccacgtcgcacgcgtctgcccaaagacgactctggcttcagtg

SEQ ID NO: 56534 - DNA, 269 bp, Zea mays
tcccgtcgcatcccatcccactaccacccatctcgtcgtccgccgattcgatccggttcttccaacccaggggctgtgatggcgacgaagaggagcgtgggcaccctcggcgaggcggatctgaaggggaagaaggtgttcgtgcgcgccgacctcaacgtccctctcgacgacgcccagaagatcacagacgacacccgcatccgcgcctccgtccccaccatcaagttcctcctcgagaagggcgccaaggtcatactcgccagcca

SEQ ID NO: 56535 - DNA, 245 bp, Zea mays
cccgccgctcctcaagccccaagctccggcgatatgtcacgcttcggtcgatccggtccgccgccgccgatccgcgacacatattcactcctcgtcctcaacatcaccttccgcacgactgctgatgacctcttcccgctcttcgacaagtacggcgagattgtcgacatctacatcccaagggaccgcaggactggcgactcgcgcggattcgcgttcgtgaggtacaagtacgaggacgaggc

SEQ ID NO: 56536 - DNA, 253 bp, Zea mays
cagacaaccagctgtttgttgcaacatgcggcccagctcaagataccagtgcaggatatgttgcttggggacactccactcttgttggaccttttggagaggtgattgcaacaactgagcatgaggaggcaactataatagcagaaattgactactcactgattgagcagaggaggcaatttcttcctctgcaacaccaacgccgtggcgatctctatcagctggttgatgtccagaggctgggttctcatta

SEQ ID NO: 56537 - DNA, 266 bp, Zea mays
atcacacgaggttgctttgggtgatccatttcatgttgacatcaccaaactcactgtaggctacctcgatgacgctgagatggaggttgtcgatgttctttcctctataggtgtcaagctggtccccttcaagctgaactacactgtggaatcagtccagtccatcctgaacataacgatggacactgatatgctgcgggcattcgataactggcagcgggaaggacatgatgatgactatgaggcgcaagaccagtggccggtag

SEQ ID NO: 56538 - DNA, 275 bp, Zea mays
tatgatggacatcggcatgatgaccatgacaaaaggacggcagagagatgaaaaagaatggagcgagctcttcaccaaagcaggggtcagcgaatacaagatcctgaaggaatttggagctcgtgttgccttcgaagtctatccgtgagattgcacctggactatacatatatatttacatacatatatgtatgtgtgtgggtgccttgcgtggcttggcgtgatgatgtcataaataaagagggtgggtgtgcttgcggtatccatggatggcc

SEQ ID NO: 56539 - DNA, 289 bp, Zea mays
ggaagagcacagaagaagtctgaaagagagatggagtggaaggagcaagttgatgagtatgttcaagaggtagctgaaaagttccaaaacacaaacttgtatttgaagaacttagaggagaacattgatgatgagaaattgcgtgaactctttgctgagtatggcaatattacttcctgcaaggttatgcgggattcgaatggtgtcagcagaggttctggatttgttgctttcaaatctgctgaagatgctaaccgagctcttacggagatgaatggcaaaatggttg

SEQ ID NO: 56540 - DNA, 292 bp, Zea mays
gctcgggcgctcggctccgtcctcccccacatccacctgcccgtttctcgctccgaagcttctcctctcgcgtctcgtaccaggtcaggagggagggagggagacgggagaaccagggagcggaggcgtgcgtgctgcggcctgcggcctgcaggaccagagatcggggactgagctagggtctgggactgggaggcggaagtgtcgacgccggcgaggaagcgcctgatgcgggacttcaagcggttgcagcaggacccgcccgccggcatcagcggcgcgccgcacgaca

SEQ ID NO: 56541 - DNA, 289 bp, Zea mays
tgcttcccagagacccagccatggcgatctcccagatctcacgcatattcctggccatccttctcctggccgccgccttcgccgccgccccagctgcgcttgcggacggcgacgacgtggtggcccttaccgaatccacgttcgagaaggaggtcggaaaggaccgcggcgccctcgtcgagttctacggcccctggtgtggtcactgcaagaagcttgctcctgagtatgaaagacttagtgcaagttttaagaaagctaaatctgtcttgattgctaaggttgattg

SEQ ID NO: 56542 - DNA, 288 bp, Zea mays
tgcttcccagagacccagccatggcgatctcccagatctcacgcatattcctggccatccttctcctggccgccgccttcgccgccgccccagctgcgcttgcggacggcgacgacgtggtggcccttaccgaatccacgttcgagaaggaggtcggaaaggaccgcggcgccctcgtcgagttctacgcccactggtgtggtcactgcaagaagcttgctcctgagtatgaaagacttggtgcaagttttaagaaagctaaatctgtcttgattgctaaggttgatt

SEQ ID NO: 56543 - DNA, 290 bp, Zea mays
atcgcaccccgcgagcggtgacttccctagggtttagtcgcgcaggcgccgccgccgaaacagcacatcgctcactcgagctcagccatggcggaggtggagcagccccaggacgcggtgaagctcttcaaccgctggaccttcgacgatgtccaggtgaacgatatctcgctgaacgactacctggctgtgactgcggcgaacacgcgacattcctgccgcactccgcggggcgctactccaagaagcggttccgcaaggcgcagtgcgccatcgtcgagcgcctcacc

SEQ ID NO: 56544 - DNA, 287 bp, Zea mays
aagaaaggtaacaaccaaattggtgatgcagagaaaaaggaagatgctcctgatcctcccgagagcaaggcctccaagaagaagaaaaagaaggacaagagttcaaaggagggaaaagaaacacaagaagcacttgatgggtcagaggagactgccagtgcaggacctgatgaagatacttctgctgtggatgtgaaggagcgcttgaagaagatggcatcaatgaagaagaagaaatcgagcagagagacggacacagctgccaaaattgccgctgcggaggctgc

SEQ ID NO: 56545 - DNA, 285 bp, Zea mays
aagaaaggtaccaaccaaattggtgatgcagagaaaaaggaagatgctcctgctcctcccgagagcaaggcctccaagaagaagaaaaagaaggacaagagttcaaaggagggaaaagaaacacaagaagcacttgatgggtcagaggagactgccagtgcaggacctgatgaagatacttctgctgtggatgtgaaggagcgcttgaagaagatggcatcaatgaagaagaagaaatcgagcagagagacggacacagctgccaaaattgccgctgccgaggct

SEQ ID NO: 56546 - DNA, 294 bp, Zea mays
ccaagccataattatttcagacataataacttcttcagataaactgcctactccttcaaatccgtatccatcttgtggtccttctgcaaaaagtatttctgcagatgtatctcagattgcatctccacaggatgctgaagttaaagtcgcaattctgactgtaagtgacactgtttcatcaggtgtcttccctgataggagtggcccaagagctgtatctgtagtgaattcttcatcagagaaactgggtggtgcaactgtggttgccatgcagttgttctgatgaagtggaca

SEQ ID NO: 56547 - DNA, 213 bp, Zea mays
actcgatctcgcacctagggtttcgtctcgccgctctcgtcctccgcgaagatgccgaagaacaagggtaagggaggcaagaaccggaagcgaggaaagaacgaggctgacgacgacaagcgcgagctcgtcttcaaggaagacgggcaggagtacgcgcaggtgacccggatgctcggcaacgggcggtgcgaggccatctgcgtcgatggc

SEQ ID NO: 56548 - DNA, 276 bp, Zea mays
gctccgcaaaccagcgcaagcccttccctgacagcggcggcgacatggtgctcgaggcgacgatgatctgcatagacaactcggagtggatgcggaacggcgactacgccccgtcgcggttccaggcgcaggccgatgccgtcaacctcatatgcggtgccaagacccagtcgaacccggagaacacagtaggcgtgatgacgatggccgggaagggcgtccgcgtgcttgtcactcccaccagcgacctcgggaagattctcgcctgtatgcacg

SEQ ID NO: 56549 - DNA, 81 bp, Zea mays
gaaaatcggatggcaagcgtaactttctggggttcaccaaattcttgcacggtgtcacgatacggggttcaaatactagac

SEQ ID NO: 56550 - DNA, 252 bp, Zea mays
cgcattcgttccaactcctgagcactttctcctcgtccccgacaagccaatcgaagccgagatacggccatggactccaccggcaccggagcagggggtaaggggaagaagggagcggccgggcgcaaggtcggcgggccaaggaagaagtcggtgtcgaggtccgtgaaggccgggctccagttccccgtcggccgcatcgggcgctacttgaagaagggccgctacgcgcagcatgtcggcaccggcgcc

SEQ ID NO: 56551 - DNA, 283 bp, Zea mays
ccgccggcgacgccagcacgatggcccgctacgaccgcgcgatcaccgtcttctcccccgacggccacctcttccaggtcgagtacgccctggaggccgtccgcaagggcaacgccgccgtcggcgtccgcggcacggacaccgtcgtcctcggtgtggagaagaagtcaacccccaagctccaggactccaggtccgtgcgcaagatcgcgtgactggacacccacatcgctctggcatgcgcggtgctgaaggcggacgcacgcgtgctcatcaaccgcgc

SEQ ID NO: 56552 - DNA, 267 bp, Zea mays
aatggttcttgcttctgcttactcgcatgagttgccacgatatggtcttgaagttggtctgaccaactatgcagctgcctactgcactggccttctgttggctcgccgtgtgctcaagacccgtggtttagataaggtatatgagggcaatgttgaggccactggtgaggacttctctgttgagccagctgatgagaggaggcctttccgtgctctcttggatgttggccttattaggactacaactgggaaccgtgtctttggtgc

SEQ ID NO: 56553 - DNA, 282 bp, Zea mays
gacgcgcgccaccacatgctgggccgtctctcctcgatcatagccaatgagctgctcaatgggcagaaggtggtcgtcgtccgctgcgaggagatctgcatgtcgggcggcctcgtccgtcagaagatgaagtacctccgcttcctccgcaatcggatgaacaccaagccgtcccacgggcccatccacttccgcgcccccgccaagatcctgtggcgcaccatccgcgggatgattccgcacaagaccaagaggtgggaggcggctctggcgaggctcaat

SEQ ID NO: 56554 - DNA, 283 bp, Zea mays
cgcacacacacaattaggtcacatacacacatcccggctgcctccctaggtagcagcttctacaatggaggcatccaacaagctcgcagtcttgctcctgtggctggtcatggcagctaccactgccgtgcacccttcctactccgagaactcgcctcaagactacctcactccccaaaacagcgcccgtgccgccgtcggtgttggcccggtgatctggagcacgaagctgcagcagttcgcggagaagtacgccgcacagagggccagcgactgccgtctc

SEQ ID NO: 56555 - DNA, 279 bp, Zea mays
  unsure (1)..(279): unsure at all n locations
ctaggtatgaagagcttgacaaggaagcgcaagctcagatgaatgaggaactatctggttggaagcttgtcgtcggtgatgtattcagagagccatcttgctccaagctgttatgcataatgattggtgatggggttcagattttgggtatggcagtcgtaacaatcgtttttgccacacttgggttcatgtcgccagcctcaagaggaatgctccttactgggatgattgttctatatcttttccttgggggggggtgcccggtnagtcagtgttcgg

SEQ ID NO: 56556 - DNA, 285 bp, Zea mays
cgccgccgtcgcactccgtctccacccaaggttacatgcctggccgtctgtacgacctggacgcgtccaagtacgggacggcagcggagctcaagtccctgatcgccgcgttccacggcaagggcgtgcaggtggtggcggacatcgtcatcaaccaccggtgcgccgactacaaggacgcctgtcgcatctactgcatcttcgagggcggcacgctcgacggccgcctggactggggcccccacatgatctgccgcgacgacaccatatactcggacggcacgg

SEQ ID NO: 56557 - DNA, 276 bp, Zea mays
ctggcctcagttgaggacaagatattcagaaaaatacgggataaagaggcggaagtggaaaccatcaacaaaaggaactctgaactagaggaccagattaagcatttgggagtggaagttggtgcttggcagcaaagggccaagtacaatgagagcctgatcaatgcactcaagtacaacttggaacaagtatgtgctcaccagagcaaggacttcaaggaaggctgcggtgatagcgaggtagatgacacggcgtcctcgtcctatggtggtgct

SEQ ID NO: 56558 - DNA, 260 bp, Zea mays
caatgggcagggtcgctggcctgttaagtcagccaggttcatattggatttgctgaagaatgctgagagtaacgctgatgtgaaaggcttggacgtggacaacctctatgtgacacacatccaggtgaaccaagcccagaagcagaggcgccgcacctaccgtgctcacggacgcattaacccttacatgtcctccccttgccacattgagctgattctgtcagagaaggaagagcctgtgaagaaagaggctgacaaca

SEQ ID NO: 56559 - DNA, 274 bp, Zea mays
caatgggcagggtcgctggcctgttaagtcagccaggttcatattggatttgctgaagaatgctgagagtaacgctgatgtgaaaggcttggacgtggacaacctctatgtttcacacatccaggtgaaccaagcccagaagcagaggcgccgcacctaccgtgctcacggacgcattaacccttacatgtcctccccttgccacattgagctgattctgtcagagaaggaagagcctgtgaagaaagaggctgacaacattgtcgcggcaagg

SEQ ID NO: 56560 - DNA, 198 bp, Zea mays
gcagtgtaacattttccttcagccatgggcaaggagaagactcacatcaacattgtggtcattggacatgtcgactctggcaagtcgaccaccactggccacctgatctacaagctcggcggtattgacaagcgtgtgattgagaggttcgagaaagaggccgcggagatgaacaagcggtcattcaagtatgcctgg

SEQ ID NO: 56561 - DNA, 263 bp, Zea mays
caggagcattcgagaagccgaagaaaattcgaagacgaggagcagctacactgcggacggacttcgggcatggagggccagttccaggttggcaaggaggaggtcatccaagcatggtacatggacgacagtgaagaggaccagaggcttcctcatcatcgcgagcccaaagaattcatccctctcgacaaactttccgaactaggaatattaagctggcgcctaaatgctgatgattgggagattgatgagaccctcaagaa

SEQ ID NO: 56562 - DNA, 146 bp, Zea mays
atcggcagggtgtggcataccatggagagctcgtcgccgtcagtgccgttctcgctgctgcaggcgccggtcgagagcacctaccgagcctgcaccatcccctaccgtttcccctccgacaacccgcgcaaggccacccctgtcga

SEQ ID NO: 56563 - DNA, 253 bp, Zea mays
gctccccatcttcatccgtcaaccatggcgacccagatcagcaagaagaagaagttcgtcagcgacggtgttttctacgccgaactcaatgagatgctgacgcgggagctggcggaggatggctactctggcgtggaggtgcgcgtcacgccgatgcgcacggagatcatcatccgcgccacgccacgcagaacgtgctcggcgagaagggccgcaggatcagggagcttacctccgtcgtccagaagaggtt

SEQ ID NO: 56564 - DNA, 259 bp, Zea mays
tagggttttgcacgactgagtgctgtttatggtggtacttacatgttaaacaagccagattgcaaggttgaattcgatatggaggggaaagtgtgtggtgtcacatctgaaggtgaaactgcaaagtgcaagaaggtggtgtgtgatccttcgtatttacaaaacaaggtcaggaagattggtagagttgttcgtgcaattgctatcatgagccacccaatccctaatacaagcgagtcacactcggttcaaattattt

SEQ ID NO: 56565 - DNA, 126 bp, Zea mays
aagcaagataactagaaaaggctcctcccgaccgcaacgcccctcatctccctcgaccccgacatccccgacccgatggcgcccaaggcggagtaaaagccagcggagaagaagccggcggccgag

SEQ ID NO: 56566 - DNA, 261 bp, Zea mays
cgctcgagcgcatcggctcgagatcacgggggagttacccactggctgggttgatgctattcctaaatacactccagagagcccaggagctgccacaggaccctctcccagcagtgcctgaacgcccttgctaatgttgtgcctggtcttatcggaggcagtgctgatcttgcatcctccaacatgactctgctgaagatgtttggtgacttccagaaggatacagctgaagagcgccatgtccgcttcggagtcagagag

SEQ ID NO: 56567 - DNA, 155 bp, Zea mays
ctcgagcgaattcggctcgaggcgtcaagatcctcttcaccaggctctgccacaccgaggtctacttctgggaggccaaggggcagactcccgtgttccctcggatctttggccacgaggctggaggtatcatagagagtgttggagagggtgtg

SEQ ID NO: 56568 - DNA, 265 bp, Zea mays
ctcaaccataccagcggcgccgcaggtcgacgaggaggcggagtagagtggccggactacctcgacacctccactgtaaccatgggtatctcacgtgattcgatgcacaagcgccgggccaccggtggaaagcagaagacgtggcgcaagaagcgaaagtatgagcttggccgccagcctgctaacaccaaactgtctagcaataagacagtgcggagggtccgtgtacgtggaggcaacgtgaagtggagggctctccgattgg

SEQ ID NO: 56569 - DNA, 225 bp, Zea mays
ctcgagccgctgcagcaccgacgggaacaacgggtgcagcggcggcgtcatggacaacggtttctcgttatcgccaccggcgccgggctccgctccgaggaggcggttccgtacctcatggaggaaggggactgcgacgacagggcccgcgacggagaggtgctcgtcactatatccgggtacgaggacgtgccggccaacgacgagcaggcgctcgtcaaggcc

SEQ ID NO: 56570 - DNA, 143 bp, Zea mays
taagatcaggccactgtggaggcattacttccagaacacgcagggtctcatctttgttgtggacagcaatgatagggaccgtgttgttgaagcaagggatgagctccaccgaatgctgaatgaggatgagttacgtgatgctg

SEQ ID NO: 56571 - DNA, 253 bp, Zea mays
ctcagtgtagagaggggcagaggaacaggagcaggaacagagagagagagagagcactggggaacaggcacctctgctgcctgtgcttgctcttctcctgggactggcgtccggccaggtcctgttccaggcgttcaactgggagtcgtagcagcagcagcgccggatagtataacctcctaatggggaaggtcgacgacatcgcctccgcaggcgtcacgtacgtctggctccgccgccgtcgcattcgtct

SEQ ID NO: 56572 - DNA, 262 bp, Zea mays
cggctcgagggaccgagaaagataagaaaggcggtggtcaacttgtgtcctgaggtgcccgtagaagcccaaggacaagaaacaaggagaagagtagatctacatctactccaccgatgagcgcgtctcggttcatcaagtgcgtcaccgtgggggacggtgccgtcggaaagacctgcatgctcatctcctacacatccaacactttccccactgactatgttccaactgtgtccgacacttcagtgccaatgttgtggta

SEQ ID NO: 56573 - DNA, 256 bp, Zea mays
gcaatgcgtaccctgcccccatcctcgggcctcgacgccccctccccttcaccacctcgtcctcggcgcaggcacgcagccccacctcgctgcctcttggtgtctctccagccgtcggcgtacctgcagtccagccgcctccaaccgtcgtggcgcagacgccccaccccgtcgcggaggaagaacaagaagggcatcatcggcaaccccagggcgctctggtggttgaggaccgcctgtgcgcgggccaaaagaa

SEQ ID NO: 56574 - DNA, 142 bp, Zea mays
ggacttctacacgggcttcgagggcgtgtcgacgcaggtggacgtgggcggcggcgtgggcgccacgctgcacgccatcacgtcccgccacgcgcacatctccggggtcaacttcgacctgccgcacgtcatctccgaggcg

SEQ ID NO: 56575 - DNA, 263 bp, Zea mays
ggggaacaggcacctctgctgcctgtgcttgctccttctcctgggactggcgtccggccaggtcctgttccaggcgttcaactgggagtcgtggaagcagagcggcggatggtataacctcctgatggggaaggtcgacgacatcgcctccgccggcgtcacgcacgtctggctcccgccgccgtcgcactccgtctccacccaaggttacatgcctggccgtctgtacgacctggacgcgtccaagtacgggacggcagcgg

SEQ ID NO: 56576 - DNA, 100 bp, Zea mays
gccgaagccaactgccaagaaggccggccgccccgccaaggcggccaagacgtcggtcaaggccacgccaagaaagaaggcgccggtggccaagaagccc

SEQ ID NO: 56577 - DNA, 173 bp, Zea mays
ggggaggcgccgacgccgagtttttgctccatcccgcatccaccgccagaatgtttctcacgaggacggagtacgaccgcggggttaacaccttctcgccggaggggcggctgttccaggtcgagtacgccatcgaggccatcaagttgggatccactgcgatcgggttgaaa

SEQ ID NO: 56578 - DNA, 203 bp, Zea mays
gcaatacttggtgcagattgcgagatgtttgtaattttgccactctcagttttggcttcctgttattatgccatcatgtgtctatgactggtgggaccatatgtgtctatgactggtggacctgatggtatattggcgaaacccattaatcataatggcaaaattaccaatgtctcataaaaaaagatagcaaaatgaaaggg

SEQ ID NO: 56579 - DNA, 251 bp, Zea mays
gctgcatgcacctgcaaacctaggcacaccattcacggtggatgcatttcggtatggacaagttgaggggtgctcggcctatttccttagccactttcatcatgaccattacggtggattaaccaagatatggtgccatggccccatctattgttctgcactcactgtacgcctagtgaagatgtgcttgtcagtaaattccgagtatatctgtcctttggagcttgataccgagtatgtcatagagggag

SEQ ID NO: 56580 - DNA, 132 bp, Zea mays
actgcgcagaccagacttcgctcgtaatcgtgcgcctcgcttcgcttttcctccgcaaccatgtctgacaaacccgatatggctgagatcgagaaattcgataagtcgaaactgaagaagacagagacgcaa

SEQ ID NO: 56581 - DNA, 279 bp, Zea mays
gggttttgctgctctccgaccccgagctccgaaggccgcagcatcaggcgcggcccccctcgcgtgtgaccgagatggcgctgcagaatcaggggaccgttgattaccccagcttcaagctcgtcatcgtcggcgatggtggaactggtaaaactacatttgtgaagaggcatctcactggagagtttgagaagaaatatgaaccaaccattggtgtggaagttcatccgttggatttcaccactaactgtggtaagatcaggttctactgctgggata

SEQ ID NO: 56582 - DNA, 276 bp, Zea mays
caaatccccaaagcctccgacccccttcctctctccctccgccgccgctgcgcacgcagggaacaagcgacatgggcgtctacacctttgtgtgccgcaacaacggcggcgagtggaccgccaagcagcactccggcgagatcgaggcttccgccgctaccccatacgagctgcagcgccgcctcgtcgctgccgcctccgcggccgactctgcctacggcgtccagtcgtccttctccatggtcacccccagctccgccgtgttccaggtgatcg

SEQ ID NO: 56583 - DNA, 268 bp, Zea mays
gtgccagcgagcacgcgaggaacctcggtcccaagggatccgactgccacaaggccgctgtgatcggtgacaccattggtgaccacgtgaaggacacctccggcccgtccctcaacatcctcatcaagctcatggagatggagtccctcgtgtttgcccccttctttgccacccagggtggcctgctcttcaagtacctgtaaaagggacaacaccaagcacacagcagaagtatacgatctcccgaccgaccgtggacaatatcgaa

SEQ ID NO: 56584 - DNA, 100 bp, Zea mays
gccgaagccagctgccaagaaggccggccgctccgccaaggcggccaagacgtcggccaaggccacgccaggtaagaaggcgccggtggccaagaagccc

SEQ ID NO: 56585 - DNA, 272 bp, Zea mays
tggagaattgcttgcacaaggtgtgcaacaaagcagataccatgaaaaaactcctgaacaggaaagacttgagaggaggaggcaaatgccttaccatatgcatataaacctggagcttttggaagcgacacacttgatctgtgcgatgctgattgaagtccccaatatggctgccagcacctatgacaagcggaggcctatgagcataacattccgaaggcttctcgaagtgagtgaaaggcagacatttgttgggccgccgagaatgtgag

SEQ ID NO: 56586 - DNA, 258 bp, Zea mays
gaataataaaggaggacccagaaactaaaaagccacgggtgaagatttatactgataaggaaaccggcaggaagaagggtgatgccttggtaacatatttcaaggaaccttctgtagctttagcggttcaattgttggatggaacatcattccgttctggtggtaagactcctatgtctgtaagtccagccaaatttgagcagaaaggcgatgtgttcatttcaaagaaaagtgacaagcaaaagaaaaggaagataa

SEQ ID NO: 56587 - DNA, 269 bp, Zea mays
atccacccctcgaaagagaacctcaatcaacaccagaagctctcgatcccaccgaggaagaagaagagagaggaatggcgtccgaggagggagtcgtgatcgcctgccacaccaaggccgacttcgacgcccacatggccaaggccaaggaggccggcaagctggtgatcattgacttcacggcctcctggtgcggcccctgcagcttcatcgcgccactgttcgtcgagcacgccaagaagttcacccaggctgtgttcctgaaggtg

SEQ ID NO: 56588 - DNA, 267 bp, Zea mays
gggacgacgagatgggcgacttcggcggcgacgagggccggtgatgaaggtgggcgaggagaaggaggtcggcaaggaggggctcaagaagaagctgctcaaggagggcgagggctgggagactcccgaggtcggcgacgaggttgaagtgcattacacgggcacgctccttgatgggacaaaattcgactcaagccgtgatcgtggagaacccttcaagttcaagcttggacaaggtcaagtgataaagggttgggatcaaggaat

SEQ ID NO: 56589 - DNA, 259 bp, Zea mays
gccgtgttctgcaacatgagccaatacctctgcatcgggcggttctcagcgacctcgttccaggtcctgggccacatgaagaccgtgtgcgtgctgatcctgggctggatcctgtttgactcggccctcaccgtgaagaacatcctcgggatgctgctcgccgtgatgggcatggtggtctacagctgggccgtggaagcggagaagaaggcggcagccccgatcccccggaacaagggcggcatgctcgacggcgagg

SEQ ID NO: 56590 - DNA, 271 bp, Zea mays
gcaggatggcactcctccttggcttgctgctgctagtagtagcttcgcccgcgatcgctgatgacgactccggtatctactaccagctggctcttatgtggccaggagcatactgcgagcagaccagcgctgggtgctgcaagccgaccaccggcgtctcgccggcgcgcgacttctacataacgggcttcaccgtccttaacgcgaccaccgacgctgcagtgacgggaacgcagcacaaagttccttacgaccctaacctgattaccgg

SEQ ID NO: 56591 - DNA, 226 bp, Zea mays
ggcgtggcaaacggattccctcttctttcccttctgagcagcatgctcccagtctagaacgaggtcattgctgagttgaaggcagctggggcttcatggattcagtttgatgagtccactcttgtcctcgaccttgattctgacaaattggctgcattctctgctgcatacgcagaacttgaatctgtactttctggattgaatgtgcgtgtagagactcactttg

SEQ ID NO: 56592 - DNA, 267 bp, Zea mays
ggagagggaatcctttgcggagaaacttagcaaggttgtttaaaactaagcttgctcttagtcttatgggctgtgtgtttaccccatggattatataatctggattatttttggaggattatataatctggattatataatctgagtagtcctgtttgtttacccagattatttgagttgttaataggattcttttgtatgaggaagacaagaatgccctctatatttgtactaggttgaaactcatatatatacaaaaaataattc

SEQ ID NO: 56593 - DNA, 259 bp, Zea mays
tccaactctccgatctccaggaatccgcggctgatgcgccggcgatggcggctcccatggtcgacgccgaatacctgcgccaggtcgacagggcgcgccgccacctccgcgccctcatctccaacaagggatgcgccccgatcatgctccgcctcgcatggcatgatgctggaacttatgacctgaagacaaaaactggtggtgcaaatggttcgattagatatgaagaagagtacactcatggttcaaatgctggttt

SEQ ID NO: 56594 - DNA, 263 bp, Zea mays
ctggagacatacactgaggatgtttccagtgaaataatgaaagaaatgcaggccaagcctgaccttatcattggcaactacagcgatggcaagctagtcgccactctgctcgcacacaagttgggagtcactcagtgtaccatcgctcatgccttggagaaaaccaaataccccaactcggacatctacttggacaagttcgacagccagtaccacttctcttgccagttcacagctgaccttattgccatgaaccacactga

SEQ ID NO: 56595 - DNA, 124 bp, Zea mays
gggagtctcactgacaagagcaagctcgatgcgcagctgagcttttcatccaccttgtctcagacaaggccacgaacacgctctccatcatcgacagcggcatcggcatgaccaagtccgacct

SEQ ID NO: 56596 - DNA, 267 bp, Zea mays
cgccgctgcgcggggtcctccgctcccgtcgtccggaaagatggcgtcccacattgttggataccctcgcatggggcccaagagggagctcaagtttgcacttgagtctttctgggatgggaagagcaccgctgaggatctggagaaggttgctaccgacctcagggccagtatctggaagcagatggctgatgctgggatcaagtacatccccagcaacaccttctcgtactatgaccaggtccttgacaccactgccatgctcgg

SEQ ID NO: 56597 - DNA, 253 bp, Zea mays
gtgaaaccatatatggttgcagttcagagtaacaatgtctctgctgtgaatgaagccttgaacgaactttatgttgaagaggaagactacgagagactccgtgaatcagttgatatgcatgacaactttgaccaaataggtcttgcccagaagcttgagaagcatgaattgctggagatgaggaggattgctgcctacatttacaagaaggctggcaggtggaagcaatccattgctctatcaaagaaagata

SEQ ID NO: 56598 - DNA, 268 bp, Zea mays
cgaagactggaagctggacacactgtgtgacctgtacgagacccttgccatcacccagagtgtcatctttgtcaacacccgccgcaaggtggactggctcactgacaagatgaggagcagggaccacactgtgtctgccactcatggtgacatggaccagaacactagagacatcatcatgagggagttccggtctggctcctcccgtgtgctcatcaccaccgacctgcttgctcgtggtattgatgttcagcaggtgtccctggtc

SEQ ID NO: 56599 - DNA, 261 bp, Zea mays
ctcgccgtctgccttctgcacctccatttcggcctctggccctagcaagttcaatctcacctccaaccattggtaaagagaagtcccacatcaacattgtggttattggccatgtcgactctggcaactcgaccaccacaggacaccttagctacaagcttggaggcattgacaagcgtgtgatcgagaggtttgagaacgaggctgctgaaatgaacaagcggtccttcaagtacgcgtgggtgctcgacaagctcaagg

SEQ ID NO: 56600 - DNA, 266 bp, Zea mays
gctgcgcacctgcaagcctcgagtggagctcttccacggccgcggtggagatggcggcgaatctggaggacgtgcagtcactggatctgatgcacgaactgctccgccgcatgaagtgcagctccaagcccgacaagcgcctcatcctcatcggtccacctggctctggaaagggaactcagtctcctattatcaaggatgaatattgcttgtgccatttagccactggtgacatgctgagggctgctgtggcggccaagacacct

SEQ ID NO: 56601 - DNA, 265 bp, Zea mays
ggaggtgcaggttttccttctggtctcaaatggtcctttatgcccaaggtttcagatggacgcccttctcatcttgtcgttaatgctgatgagagtgagcctggaacttgcaaagatagagaaatcatgcgccatgacccccacaagcttctggaaggatgccttattgctggagttggaatgagggcatcagctgcttacatctacattagaggtgaatacgtgaatgagcgtctcaaccttgagaaagctcggcaggaagcgt

SEQ ID NO: 56602 - DNA, 265 bp, Zea mays
cgcattcgttccaactcctgagcactttctcctcgtccccgacaagccaatcgaagccgagatacggccatggactccaccggcaccggagcagggggtaaggggaagaagggagcggccgggcgcaaggtcggcgggccaagaagaagtcggtgtcgaggtccgtgaaggccgggctccagttccccgtcggccgcatcgggcgctacttgaagaagggccgctacgcgcaggtgtcggcaccggcgcccccgtctacctcgcc

SEQ ID NO: 56603 - DNA, 263 bp, Zea mays
cttgcccttcacgaaggcttcgtcctcctccttgtatctccactccccccttcacagatccgttcctccagctagggttagcgttcctctgcagcgatggcgatcaagctgaccaaggcggagaagaagatcgcgtacgacaagaagctgtgcagcctgctcgatgagtacaccaaggtgctcatcgccctcgccgacaacgtcggttccaagcagctccaggacatccgccggggcctcaggggcgactcggttgtgctcat

SEQ ID NO: 56604 - DNA, 263 bp, Zea mays
gcagctgctcctgccgcatggttacccgtgcaccgagcacaccgttcaaacctatgatggctttcttttgtctcttcagcatattccacatggcagaaatggaattgcagataatactggacctccagtttttcttcagcacggtcttttccagggtggagatacatggttcataaactccaatgaacaatcacttggatatatccttgctgacaatggttttgatgtttgggtcggaaatgttcgtggcacacgttggagta

SEQ ID NO: 56605 - DNA, 256 bp, Zea mays
gccgtgttctgcaacatgagccaatacctctgcatcgggcggttctcagcgacctcgttccaggtcctgggccacatgaagaccgtgtgcgtgctgatcctgggctggatcctgtttgactcggccctcaccgtgaagaacatcctcgggatgctgctcgccgtgatgggcatggtggtctacagctgggccgtggaagcggagaagaaggcggcagcccgatcccccggaacaagggcggcatgctcgacggcga

SEQ ID NO: 56606 - DNA, 258 bp, Zea mays
cgcaaatgatgatttggtatttcttcgcattgtttctctacccaagggccgggggctactttcacgctatatcaacctcatggtacctggtagcgatcttgcaaggatagtttgcatggcagtattcatgcacctgaggtctgtgtttggaaatctgccctccgatgacggcgcagctgagacagtaactacactggctagcgctgtagcatcatgcattcgtgggatggacttaagtggcctcagtgcttgtctcgc

SEQ ID NO: 56607 - DNA, 272 bp, Zea mays
cggctcgagagctcagctccaacatggcacaaatctctagccctacagagactgagcggtgcactcagtccctgattgctgtcttccagaagtatgctggaaaggatggtgataactacactctctccaagacagagttccaagcttcatgaatacagatactagctgccttcacaaagaatcagaaggaccctggtgtccttgaccgcatgatgaagaaactggacaccaacagtgatggtcagttagatttctcagaatttcttaatctg

SEQ ID NO: 56608 - DNA, 264 bp, Zea mays
ttccatcctgtcgtgggatcccagccaccgccgctagaagaagagctcggcgattcccaggtcccgcgagaatatgccgaagcagatccatgagattaaggacttcctcctcaccgcgaggaggaaggatgcccgctcagtgaagatcaagaggagtaaggatgttgtcaagttcaaggtgcgctgctccaagtacttgtacacgctctgcgtcttcgatgctgagaaggcaaacaagttgaagcaatctcttcccccaggttt

SEQ ID NO: 56609 - DNA, 260 bp, Zea mays
gcgattgcggcggcggaagtaagaggcgatggggcactccaacgtgtggaactcgcaccccaagaactacgggcccggatcccgcgtctgccgggtctgtgcgaaccctcatggactgatcaggaagtacgggctgatgtgctgcaggcagtgcttccgcagcaacgccaaggacattggcttcatcaagtaccgctgaagtcagctgggcgggctatctgaatgccatctcttggacagtgtagtagaggcgatgccac

SEQ ID NO: 56610 - DNA, 259 bp, Zea mays
gctcgcgggagttgtggccgtggaggtcaccggtgggcctgagattcccttccaccccggtagggaggacaagcctcaacccacacctgagggccgccttcctgacgccactaagggttctgaccacctgaggcaatttttggcaagcagatgggcttgagcgatcaggacattgttgccctctctggtggccacaccttgggaaggtgccacaaagagcggtctggtttcgagggggcctggactacaaaccctttgg

SEQ ID NO: 56611 - DNA, 260 bp, Zea mays
gagcggccacagcctcgcgtcgtcgccccacagccacgcgagccttcgccgatccgcgagcgcagatcgccgaagccaggcggcggagagggagctcgaggcggcggaggaaagcgttcgccacagtcgctgatttccctggggaagagatgggtctctcctttgggaagctgttcagccgcctcttcgccaagaaggagatgaggattctcatggtcgggctcgatgccgccggtaagaccaccatcctctacaagctc

SEQ ID NO: 56612 - DNA, 258 bp, Zea mays
gctgctgctgttttgtcgggtaaccgtaacttcgagggtcgtgtgcaccctttaactcgggctaactatcttgcttcaccacctcttgttgttgcttatgcacttgccggaactgttgatattgattttgagaaagagcccattggatttggaaaggatggcaaggaagtctacttcagggatatatggccctcaacagaagaaattgcgcaggttgtccaatccagtgtgctgcctgacatgttcaagggcacctat

SEQ ID NO: 56613 - DNA, 255 bp, Zea mays
ctcgagccgaatcggctcgaggggagggtctttttgagtctatacctggctatggccttagtgggtcgtccatggctctctttggaagagttggtggaggcatctacacaaaggctgctgacgttggtgctgatcttgttggaaaggtcgagaggaacattcctgaggatgatcctaggaacccagctgtgattgctgataatgtcggtgacaatgttggtgacattgctggaatgggatctgatctctttgggt

SEQ ID NO: 56614 - DNA, 261 bp, Zea mays
ggcgagctgtggcggctcatcgacccgcaggtgaaggcgccgggagtcatcggctggtggcctgccaaggcgtcacctttgtcgacaaccacgacaccggctccacgcaggccatgtggccgttcccctccgacaaggtcatgcagggctacgcctacatcctcacgcaccccggcaacccgtgcattttctacgaccacttcttcgactgggggtttaaggacgaaatcgccgccctggtggcggtgcgcaacgcaatgg

SEQ ID NO: 56615 - DNA, 261 bp, Zea mays
ctccggtcgtctcctcgcgcttgctggttccccgtccccaccccacgccgggggcaagagatggagaacgcggtggtgctccgggagtggtttgaccgcgtcgacgccggccgcaccggcaacatcaccgctgcccagctccagggcgcgctcgctgtcggcaacctcaacttccccatctccgtcgtgcagcagatgattaggatgtatgacttcgatcggaatggcaccatgaacttcgaagagtttctggcgcttaac

SEQ ID NO: 56616 - DNA, 256 bp, Zea mays
gcacacctccctcgctctcccacaccactggcaccaggccccggacacccgctctgctgcaggagaatggctactcatcacacgctgtggatgggactggccctgctgggggtgctgggcgacctgcaggcagcaccggatgcccaggtctccgtgcagcccaacttccagcaggacaagttcctggggcgctggttcagcgcgggcctcgcctccaactcgagctggctccgggagaagaaggcggcgttgtcca

SEQ ID NO: 56617 - DNA, 255 bp, Zea mays
gccttctgcgcctccatttcggcctctgtcccttgcaagttcaatctcacctccaaccatgggtaaagagaagtcccacatcaacattgtggttattggccatgtcgactctggcaagtcgaccaccacaggacaccttatctacaagcttggaggcattgacaagcgtgtgatcgagaggtttgagaaggaggctgctgaaatgaacaagcggtccttcaagtacgcgtgggtgctcgacaagctcaaggctga

SEQ ID NO: 56618 - DNA, 256 bp, Zea mays
ccgccacctacgcaacaccagacgctccagcagtccagcactcggagctcgcgcgcccgacggcccaccatgatcatccccaagaagaaccgcaatgagatctgcaagtacctcttcaaggagggcgtgctgtatgccaagaaggactacaacctggcgaagacccacagattgatgtgcccaacctccaggtgatcaagctcatgcagagcttcaagtccaaggagtatgtcagagagaccttctcctggcagta

SEQ ID NO: 56619 - DNA, 256 bp, Zea mays
gtgacaacaagttggttggacgggaagcatgtggtgtttggcaaggtgttgtctggaatggatgttgtgtacaaggtcgaagctgaaggccggcagagtggggagccgaagagcaaggttgtgatagcagatagcggcgagctgccgatgtgacggcgagctgaacttatgttccatcccgaagcatgatgataagactttgctggtggccgtctgtcgttctagaactgttaggccctgtttggaatcttagggg

SEQ ID NO: 56620 - DNA, 265 bp, Zea mays
gctgtctccccggctggctggctcgctctctgcctggggacacagaggggggcatgcagcacacagagggacctacgggcagctgttccttcccccgactcaagaatccccggaggcccggaggactgcagcaggagcggccatgaagaagctgatggtggtgctgagtctgattgctgcagcctgggcataggagcagaataagttggagcatggcggacccggcgacaagacatctcacccctaccaagctgccctctacacc

SEQ ID NO: 56621 - DNA, 261 bp, Zea mays
ctccctccggcatcgagaggcgaacccagcgcccgagtcgctctgcctgctcccacgacccatggcggcggatatggcgtacgagccgccgatgaaggcgggcaaggccgggttcgaggcctgcatgatggatcgcagcacaggatccgcatcacgctctcctccaagagcgtcaagaacctcgagaaagtctgcggggatctggtgaagggcgccaagggtaaggagctcaaggtcaagggccccgtgcggatgcctacc

SEQ ID NO: 56622 - DNA, 238 bp, Zea mays
cacgctcagccttgagcttgtcaagcacccaagcgtgagagaggtatcaccattgatatcgctctgtggaagtttgagaccaccaagtactactgcactgtcattgatgcccctggacatcgcgacttcatcaagaacatgatcacgggtacctcccaggctgactgtgctgtcctgatcattgactccaccactgggtgttttgaggccggtatctctaaggatgccagacccgtga

SEQ ID NO: 56623 - DNA, 249 bp, Zea mays
gcgcaccgcacacctcactgccgctcccttctcgtctcctctcctctcctctcctcggcggatccggcaccgacccaccgcccctctgctcgctccttccgccggaatcgctgctcctctctgtgctgtcgatttgtgcggcgactgttagtttggttcggtcccatccttctgttgatcaatggctgacggtgaggatatccagccacttgtgtgtgacaatggcactggaatggtcaaggctggctt

SEQ ID NO: 56624 - DNA, 254 bp, Zea mays
ggcccccaagcgaggtggcagggcgccggtgccggccaagaagaagacggataaagtgacgaaccctctgtttgagaagaggccgaagcagttcggcatcggcggcgcgttgccgcccaagaaggacctgcaccggttcgtcaagtggcccaaggtcgtgcgtatccagcgccacgccgcatcctcaagcagcgcctcaaggtaccaccggcgctcaaccagttcacccgcaccctcgacaagaacctcgctac

SEQ ID NO: 56625 - DNA, 255 bp, Zea mays
tgataagtaaaaactgcaaccatttctgtgaggatatctgcaaaaggttgacaggaaattttattccaaaatgggtgaatcgacttgctagaatgggtgctgtttgcaactgcattctaccagagtccctcaagatcaacgcggccggtcatgacccagcttctcgagctgaagatagcgagagaaaaatgctgacaagttccttcagttgcttctgttcaatctctctatgccaaagacatttctcaacatctt

SEQ ID NO: 56626 - DNA, 252 bp, Zea mays
ggcgcacagcacacgaacacacaccgcgcccagctccgaggtgatcttccggcggccggcgagatgagccgtggcacaggcgcgggctatgaccgccacatcaccatcttctcccccgagggacgcctgtacaagtcgagtacgcgttcaaggcggtgaagtcggcgggtgtcacgtcgatcggcgtccgcggcgcgactccgtctgcgttgttacgcagaagaaagtcccggataagttgctggatcagac

SEQ ID NO: 56627 - DNA, 254 bp, Zea mays
gcccgggagtagtcgacgcgccgtcactgaatcctcagatcacgggtagccgtaatcacgccactctgctgactcccggcgagcagtgtaacattttccttcagccatgggcaaggagaagactcacatcaacattgtggtcattggacatgtcgactctggcaagtcgaccaccactggccactcgatctagaagctcggcggtattgacaagcgtgtgattgagcggttcgagaaagaggccgcggagatga

SEQ ID NO: 56628 - DNA, 252 bp, Zea mays
ccgggattccctccgccaagcgcggatctgaacgctgcgctccgtgtcgccgctcgaatccgccatgaagggggccaaatccaagggcgccgccaaggccgatgccaagctggcggtgaagagcaagggggcggagaagcccgccaagggcaggaaagggaaggccggcaaggaccccaacaagcctaagagggctcccagcgctttcttcgtgttcatggaggaatttcgcaaggagttcaaggagaagaa

SEQ ID NO: 56629 - DNA, 255 bp, Zea mays
gtccgtgttcgtggaggtaatgtgaaatggagggctcttcgccttgatactggtaactactcatggggaagtgaagctgttacccgcaagacccgtatcctcgacgtggtctacaatgcatcaaacaatgagcgtgtgaggacacaaacccttgtgaagagtgccattgtgcaagttgatgctgccccattcaagcagtggtacctcactcactatggagttgacattggtaggaagaagaaaacccctgctgca

SEQ ID NO: 56630 - DNA, 263 bp, Zea mays
cttgccatctcactgccttccttggctacaaggctggcatgactcacattgtccgtgaggttgagaagccaggatccaaactccataagaaggaaacttgtgaggctgttaccatcattgaaacccctcctcttgtcattgttgggctcgtggcatatgtgaagactcctcgtggcctccgcacactcaactctgtttgggtccaacatcttagcgaagaattgaggagaaggtctacaagactggtgcaagagcaagaagaa

SEQ ID NO: 56631 - DNA, 249 bp, Zea mays
gcagtgtaacattttccttcagccatgggcaaggagaagactcacatcaacattgtggtcattggacatgtcgactctggcaagtcgaccaccactggccacctgatctacaagctcggcggtattgacaagcgtgtgattgagaggttcgagaaagacgccgcggagatgaacaagcggtcattcaagtatgcctgggtgcttgacaagctcaaggccgagcgtgagagcggtatcacaattgatatt

SEQ ID NO: 56632 - DNA, 250 bp, Zea mays
gtggaaaccagatcctcctccacgtagcccataatacccttgagtgggccctcagaagcagccttaatagctttcttgatttcctcgtaagaggcccccttctcgattctgacagtgaggtcaacaactgacacatccacggtgggaacccggaaggacatgccagtgagcttgccattcaattcaggcagaaccttaccgacagccttggcagcaccggtgctgctgggaatgatgttaaagctggcag

SEQ ID NO: 56633 - DNA, 252 bp, Zea mays
cggctcgaggtgaccagtaagcgtgcacaagatttgaccactttaaagtttgttccacgggatcaactctttgtaactggatcagcagataagactgttcgcatttggcaagagaacgagaatggaaactataactgcgtccatacattgaaagatcatactgctgaggttgaagctgttacagtacatgcgactcagaagtattttgtgagtgcttccaaggataattcgtggtgcttctatgatatttca

SEQ ID NO: 56634 - DNA, 248 bp, Zea mays
cgtcactgccatcaaggaggaaatcaacaaggtcgttaagctccaagaagagcttgacattgatgtgcttgtgcatggcgagcctgagagaaacgatatggttgagtacttcggtgagcagctctccggttttgcgttcactgccaatggctgggtgcagtcttatgggtcaaggtgcgtcaagcctccgatcatctacggtgacgtgagctgccccaaccccatgaccgttttctggtcgaaacggc

SEQ ID NO: 56635 - DNA, 308 bp, Zea mays
ctcaagctttccacaccaacctttggtgatctcaaccacctcatctctgcaacaatgagtggtgttacatgctgccttcgtttccctggtcagctgaattctgaccttcggaaacttgcagtgaacctgatccccttcccgcggctccactttttttggttggattcgctccactgacctcacggggctcccagcagtaccgtgccctcactgtgccagagctgacccagcagatgtgggactccaagaacctgatggtgtgctgctgaccctcgccacggtcgctacctcacggcatctgctatgtt

SEQ ID NO: 56636 - DNA, 298 bp, Zea mays
gtggaggatacaaccgtggcagtggtgattatggttctggaggcggtggtttcgaccgagatggtggagactataattctggtggacgtggtggtggaagcaggggtggaggaggatacaatcgaagtggtggcagtgaccgtggttttgataccaccgtggtggcagaggtggcagctatgggggacgagatcaggagaaccaaaggggtagtgaaggtggctacagtgctggtggctatgggcaagctcctccacaagctcctccttcgtatggtggtcctgcgggtgattatgca

SEQ ID NO: 56637 - DNA, 209 bp, Zea mays
gaaagacctctcagatgatgatgtggagatgagagatgacacacctgggtacggttcatcccacactgaagatgatgcacatggttttgttgttctcgataatggtgttgactccggagaagattttgatgaaaaatcaggccacccttcagatctgcagacagcaggtgctgtgataccggcgcctcatgcaaatgttggaagaaaaa

SEQ ID NO: 56638 - DNA, 301 bp, Zea mays
cttggtcttgcattcaaagggaaccagaagttggttgttgagtcattggaagccatgaccgagaccgaggcactggacatgaaagccgcgttggaatccagaggggaattcgagttcaaggtgtgtacccttgggaagaatgtcaccataagaaaaacatggtttcaatcaacatcgagaagaaaaaggagcaccagaggaaatttactccttccgtcatagagccatcctttgggatggggcggatccaaatactgcctttttgagcactgcttctaccaaaggcctggcaagaccgagg

SEQ ID NO: 56639 - DNA, 254 bp, Zea mays
gccgcagccgaagtcgggcctcttcgtgggcatcaacaagggccatgtcgtcaccaagcgcgactgcctctgcgcccgtcccaccgcaaggggaaagcaacgaagagggtgtccatggtcaggggcctgatcagagaggttgctggctttgtccttatgagaagcgtatcaccgagcttctgaaggttggcaaggacaagcgcgctctgaagcttgccaagagaaagcttggatctcacaagagggcaaagtag

SEQ ID NO: 56640 - DNA, 300 bp, Zea mays
tgagggtgcttttttcgctgtgaaggaagtatctttgcttgaccaaggaagcaacgcacaacaatctattgttgcacttgagcaggaaattgcactcctcggtcagtttgaacatgaaaatatagtccagtattatggaactgacaaggaaaatccaaactctatatttttattgagcttgtcacacaaggatctctttcatccctctatcaaaagtataaactacgagaatcacaagtctctgcatacacaaggcagattcttaacggattggtttacctgcatgagagaaatgtggtc

SEQ ID NO: 56641 - DNA, 300 bp, Zea mays
cgaagagatcttcctctaagaggttttgatgatgagatgagagctattgttgcaagcaaccttgaaggaaggggaatcaagttgcatccagggacaaatctctctgagttgagtaaaacggctgacggaataaaagttgtaactgataaagagaagagctcattgcagatgttgtcctatttgcgacagggcgcacaccaaactcccagagactgaacttgcaagctgcaggcgttcagattgaccgggttggagccatcaaggttgacgaatatgctcgtacttctgctcctagtgtat

SEQ ID NO: 56642 - DNA, 339 bp, Zea mays
cgtcacgtacactcggatcttcggctcgagggcatacgcaactcataaattctttcaagacaatggatttgtttgggtttcgagcccaattattactgcctcagattgtgaaggagctggggagcagttttacgtgactactttgctttcaaacagcgctgaaggtggttctctactcaaagatatcctgctaccaaggatggaagggttgattggtcacaggatttcttctgcaaaccagcatttctgacagtgtctggacagcttaatggtgaaacatatgcttcagctctatctgatatttacacatttggtccaacgtttagggctgaaaattca

SEQ ID NO: 56643 - DNA, 295 bp, Zea mays
gtgttgtgattgccaatattgatgctgacaagcacactgacttggctgaaaaatatggtgtttctggtttccctacattgaagttcttccctaagggaaacaaagccggtgaagattatgatggtggccgggacttggatgactttgcaagttcattaatgagaagtgtggcaccagccgggatccaaagggccacctgaatcaagaggctgggcttgtgccaagcttgaatcctcttgtgaaggagtttctcaatgctgctgatgacaagcggaaggaagtcctctctaaaata

SEQ ID NO: 56644 - DNA, 195 bp, Zea mays
acacctaccctgacagatacttcgagaaagtcattcgactggctcttggagacatgggcactgatgaggatgacctcaccagagtcgtaactactcacgccgaagacgacctgaagctgataaaggagacttatcagaagagaaacagtgtgcgctggaacgtgctgtggccaaagatacaactagagtttatga

SEQ ID NO: 56645 - DNA, 307 bp, Zea mays
caaggagcatacgacacacggaacatcttccagtcactagatcttgcatggacattgcttcggatcttccctcgcgaacttctccaccgtatcccggcgaagaccttggaccagtactatagcagagatgcctcccactgaatcactgatcgttatcagtgttccaatagtttggcaagtgttgaataaattgaacagattggcttcatggccttttccctgtatttatgtgtagtcaggtccaattcttttctgttgatgagcgcaagtttttcgtagatgactcgcggtcacggcaatatttgtg

SEQ ID NO: 56646 - DNA, 301 bp, Zea mays
gcactgagcaggatccgtaatgctgcaaggcacttgctcacccttgacgagaagaacccccgtcgtatctttgagggtgaggcgcttcttcgccgcatgaaccgctatgggctgcttgctgagggtcagaacaagcttgattatgttcttccctcaccgctgagaacttcctcgcaaggcggcttcaaacacttgtcttcaaggctggcatggccaagtccattcagcatgctcgtgtcttgatcaagcagcgtcacatcagggttggcaggcaaattgtcaacgtcccatcattcatggt

SEQ ID NO: 56647 - DNA, 296 bp, Zea mays
tggaggtacacatatcacaaacacaagagatgctaaagcatttgcactcttatctgaggagggtattgcaaaaggagttaggaggataacagccgtgactgctggatgtgccacccaggctatggagttggcgtcatctatcgattctatatcaataaagcatctcagttggagggagctttgttggaaaagaaaattgcttccatcaagagtgggctggatgcagctgctatccctgctgcgagaaaagctgatttgagaggcaaggtttcaaagttagaggacgaacttaggaa

SEQ ID NO: 56648 - DNA, 195 bp, Zea mays
ctccgcgctgttcttggaatcgaaaggtgggtagcgcaatgagcaacgagttcgattacctgttcaagcttctcctgatcggcgactcctcggtgggcaagtcctgcttcctcctccgcttcgctgacgactcctacgtggacagctcatcagcacgatcggcgtcgactttaaaatccgcatggtcgaggtgga

SEQ ID NO: 56649 - DNA, 299 bp, Zea mays
gtcaacgagttctacaacaacgggctcacctccaacctggccggcagccgcaaccccagcctggactacggcttcaagggcaccgagatcgccatggcctcctactgctccgagctccagtacctgggcaacccgatcaccaaccacggcaaagcgcggagcagcacaaccaggaggtgaactccctgggcttcgtctcggccaggaagaccgccgaggcgatcgacatcctgaagctcatgtcgtccacctacatcgtggcgctgtgccaggccgtggacctgcgccacctcgaggaa

SEQ ID NO: 56650 - DNA, 296 bp, Zea mays
ctctctcctctcggcgtccccgttccccaacctctcgtctgctgcctgcctgcctgcctgcctgcaaaaaggagtttgtcatggcgtctaagcgcatcctcaaggagctgaaggacctgcagaaagacccccccacatcatgcagtgaggtcctgctggtgaggacatgtttcattggcaagcaacaattatgggaccacctgacagtccctatgctggtggtgttttcttagtgaacattcatttcccgccagattaccccttcaaacctccaaaggtttctttcaagacaaagg

SEQ ID NO: 56651 - DNA, 146 bp, Zea mays
atccttcccttgctccagcgtgccacgctggtccagaccttcggacagaagaaccatgtctgcctcaaggacgggtccatcacaatcccgccgttcgcgcctccccagagatgcaggctcaccttatcctgggaacccggtcactc

SEQ ID NO: 56652 - DNA, 292 bp, Zea mays
caaagccatttgaaccccccacgtctcctcgcctcgttccccatttgctgcgtctccttgcccgcgccgccgctcgccgtttgcccctcgtctccgcaccgcgcgctgttgtccatccttgtgcagcaaaaatgacggctggctaattgttggctcactggtcggatcctttgccattgcatacctgtgtgacacatttacctctgacaagaaggcatttggaggtagccccccaagactgtttctgagaaggagtggtggcaagccacagacaccaagttccaggcctggc

SEQ ID NO: 56653 - DNA, 276 bp, Zea mays
agaccgtggatcgcttgcagacattgttaagcaagtgaagactattctggagccataccttgcagtactttgtaagcaggtcttggagggtttattgtatcttcatcatcaaaggcacgtgattcacagggacataaaaccatctacttgttggtcaaccgtaaaggtgaagtcaagattaccgacttcggagtgagtgctgtgctagcaagctcaataggtcagcgagatacatttgttggaacctacaactatatggcgcctgagcggattagt

SEQ ID NO: 56654 - DNA, 297 bp, Zea mays
agctcactttgtagagtgtagcggtacggctttctttctcctcttggcaggccgctcacgcttctgctcttctgatgtgagcttcgaatccaaccagcgatgggcgatggctactcttttagcccgaagctcctcgctacatggccaggtaccctccacaactgaaggatgagatcgaaaaacaaattggtgacatgttgatgcaaggtgtcattcagaagagtcatagccccttcgcttccccagttctattggttcggaaaaagacaatacatggcgcttttgcgtggattacag

SEQ ID NO: 56655 - DNA, 294 bp, Zea mays
tgggcggcttcgtgatgggcctgcgggtcaaccacgcgtcggcggacggtatgggcgcggcgcagttcatcaacgcggtgggggtcatggtgcgggggctggcggagccgagggtgctgcccgtgtggcaccgggtgaagttcccggcccgagcatcaagccaggcccgctcccggagctgcccgtgctggcgctggactacgtcgtgctcgacttccccacggcctacatcgacgggctcaagcgggagtacaaggcgcactagggcaggttctgctccggcgtcgacgtgct

SEQ ID NO: 56656 - DNA, 148 bp, Zea mays
ctgacacggttgttgttgtccaatgcaatcctccctcaaagtggataaccccaaagttggcatcaaaatatggaaaagatgaagctttacagcatgttcgggacctttatcgcgagtcactgaaaaaatatagaacggaacagaaagt

SEQ ID NO: 56657 - DNA, 177 bp, Zea mays
caacctcaacaggcttgtctcccaggtcatctcatccctgacggcttccctgaggttcgatggtgctctgaacgttgatgtgaacgagttccagaccaacctggtgccctacccgaggatccacttcatgctttcgtcctagctccagtcatttctgctgagtaggcctaccacgag

SEQ ID NO: 56658 - DNA, 176 bp, Zea mays
aaacagcgagctgcatcaggtgttctctgagtggaacaagggtgagctcctcagtttcttgattgagatcacggccgacatctttggtatcaaggatgacaagggtgaaggctacctggtcgacaaggtcctggacaagccgggatgaagggaactgggaaatggacactccaaca

SEQ ID NO: 56659 - DNA, 286 bp, Zea mays
ttggaaagaacccattgaagatgagctacgttgtgggtttcggaaacaagtacccgaagcgccctcaccacagaggtgcgtcgatacctcataacggcgtcaagtatggatgctaaggaggttacaaatcgagggacacaagaaggcaaaccctaacatccttgttggagcaatggtggctggccctgacaggcgtgacggctacaaagatgtccgcacgaactacaactacacagagcctacccttgcggcaaacgctggtctggttgcagcactgatttctata

SEQ ID NO: 56660 - DNA, 163 bp, Zea mays
aaagtacattgctggacacaacgatgttattggaggatgcgtcagtggctgagtgtttggttccaagccgtatttacacatgtgtgtgtgtcaaccgatgtggactatcttcgacagaacatcactcgtgtgatgtcgaaacctgtcttcggtggccatttta

SEQ ID NO: 56661 - DNA, 290 bp, Zea mays
agaagttcgccgacgacgagaggaagctggtggacgcggtgaacgggacggagtacgtacccacgtacgaggacaaggatggcgactggatgctcgtcggcgacgtcccctggaagatgttcgtggaaacctgccagcgcctcgtctgatgaaaggttcagaggccgtgaacttggcaccaagagccgcccgatgaggcacactccgttgggcgttggcacgcacgcacgcactggcgtcttgaaggaaagggggaactctgctggtcttgatgaggatcttcacgtgag

SEQ ID NO: 56662 - DNA, 236 bp, Zea mays
cggaagtgcgggcggttcatctaataacatcagtgacgctgaaaggacattctttgttgagctttgggatgtctcaggacacgaacggtacaaggcatgccggtcgattttctatacacaaatacatggtgtcatatttgtttacgatctctcccagaggcagaccaagacgaatctgaatcactgggcagtgaaatgctgaaactggcaccttttcagctccattgggatctggt

SEQ ID NO: 56663 - DNA, 285 bp, Zea mays
  unsure (1)..(285): unsure at all n locations
gcgccaactaaccccagtctcggaagagaactatccagaagcgcaagactccaaagccgtcgccttcctatccatcccttcctcgccgcgggggtcgcctgagatcacataaacaatggtgaaggctgttgctgtgcttggtagccgcgatggtgtcacnggcaccatcttcttcacccaagagggagttggcctaacactgtcaccggacatgtctctggcttcaagcctggcctccatgggtccatgtgcatgcacttggtgacaccaccaatggctgcatgt

SEQ ID NO: 56664 - DNA, 218 bp, Zea mays
acgccaagcgcgtcaccatcatgcccaaggacatccagctcgcccgccgcatccgtggcgagcgcgcgtcagcatcatctccgaggatctgatgaatgtctagttaccaaacaaatagggcgtattagcgtcgttgttctgtattcgttcattttggatatcggtgcagggcacaacgctttactgatcgtatttgtgtctctggtggtcgcttcgct

SEQ ID NO: 56665 - DNA, 274 bp, Zea mays
caccaattgaagacaagatcgattttgcatttaggttgtatgacttgagacaaactgggtttattgagcgtgaagaggttaagcaaatggtaattgctattttgatggaatctgatttaaaattatcagatgacttactcgaggccatcatagatcagacatttgcggatgctgatgcggataaggatggaaatcaataaggaggagtggacggcatttgcgttacgccaccctaacctgttagagcatatgacactgccttatctgaggttca

SEQ ID NO: 56666 - DNA, 203 bp, Zea mays
ccgcacctctctccatctccctgctcctccgcctccttcttgatccagccaagccagggatcgccatgtcggactcggaggagcaccacttcgaatcgaaggccgacgccggagcgtccaagacctacccgcagcaggctggcaccgtccgtcagaacggcttcatcgtcatccaagaacgcccctgcaagttgtgaggttct

SEQ ID NO: 56667 - DNA, 170 bp, Zea mays
atcttctggcgtcctaaattatggacagggattgtttgagggcctaaaggcgtataagacaactgatggatccatcctattatttcgcccagaggaaaatgctgagaggatgcggacaggtgctgagaggatgtgcatgcctgcaccctctgtcgagcagtttattgatg

SEQ ID NO: 56668 - DNA, 204 bp, Zea mays
  unsure (1)..(204): unsure at all n locations
agccaacatatctcctcgcatttccttgcaaccgattgccttcccccctcccaacccaagaccgatggcgcccaaggccgagaagaagcccgcggcgaagaagccggcggaggaagaagccgcggcggagaagacgacgacgggaagaagccaaggcggagagcggatcccgctggcaagtccgccgcacaanggcgcgagggc

SEQ ID NO: 56669 - DNA, 286 bp, Zea mays
gtgcacaaatgacaatcgcaccttccccaggttgtgaaggacacaattgacccaatggcaaccattgaattcaaacccaacacagctgatgatccccatatgagacagccagatatcaccaaggctaagcaactgctacattgggagccacaggtctctctcaaagaaggccttccgctaatggttcaagcttccgtcaaaggatctcggatgagtaatcacagcaattcttttttccccgaatgtgccatgcacgtgtttgtcatcagagcaatcgtatgatact

SEQ ID NO: 56670 - DNA, 166 bp, Zea mays
  unsure (1)..(166): unsure at all n locations
acggctttgattntcgccgccgccgctgctcatctcacatccctcgagaagacgcctgctcctcgccgatcgatacgatggccgtcttctccgacctccacaccgccgacggcctcaagtcnctcgaggctcacttcgccggcaaaacctatgtgtctggtgactc

SEQ ID NO: 56671 - DNA, 194 bp, Zea mays
gagagatcagcaacttaacaacaataatggccaccgccatagttcccacggacgccgagctgctgcaggcgcaggccgacctgtggcgccacagcctctactacctgacatccatggcgctcaagtgcgcggtggaactccacatcccgaccgccatccacaacctaagcggtgctgccacgctgccggacctc

SEQ ID NO: 56672 - DNA, 191 bp, Zea mays
cgcgtccatccgcatggtcatgtccggcgccgcgcccatgggcaaggagctccaggacgccttcatggccaagattcccaatgccgtgctcgggcaggggtacgggatgacggaggcaggccccgtgctggcgatgtgcctggccttcgacaagagagcgtaaccggtcaagtccgggtcgtgcggcaccg

SEQ ID NO: 56673 - DNA, 176 bp, Zea mays
ccgatcttcaccaagttattaaggctaacgatgacttgacgaaggaacaccaccagttctttctctatcagatgctgcgtgcattgaaatatattcatactgctaacgtttatcatcgtgatttaaagcccaaagatatcatagcaaatgctaactgcagactccagatatgtgat

SEQ ID NO: 56674 - DNA, 269 bp, Zea mays
  unsure (1)..(269): unsure at all n locations
tgcacaaaccctgctaacgctgacaacacgttcatcgcagacaactcgttgccatcattctcaaaggctgttaatcagcgcgacgctgaccttgtctacttctggcagaagtaccggacattggcagacagctcacctgagaaaactgaagctcgganggagttgcttgacgtgatggctcacaggtccatgttgacagcagcgttgagctcattggaagccttctctttggctctaaggacggtccaagggttctgaaagccgtccgt

SEQ ID NO: 56675 - DNA, 275 bp, Zea mays
gcgaccatctcagagagtgcgttcagaagatccttgctgcctcaaaggcaaagaagcgcggatttgtggagtcgattgaactccaggtttcattgaagaactacgacccgcagaaggacaagcgtttctcaggaacataacgtcttccgccaccgactcgcaagatgagatgtgcattctgggcgacgtttcacgttgacatggcgaagaaggaaggattggcatggatggatgtggagatgctcaagaagctcaacaaggacaagaagctggtc

SEQ ID NO: 56676 - DNA, 156 bp, Zea mays
cactactgagtaccagctgattgatatatcagaggatggatttgtgagccgtcttacttcagctggcaatactaaggatgatcttagactcgcaactgatgagactcttgtggctcagatccatgcagggtttgcaagcggcaacgctcttgttgt

SEQ ID NO: 56677 - DNA, 229 bp, Zea mays
caggactacaacagggaaccgtgtctttggtgccctcaagggagctttggatgggggcctggatattcctcacagcgagaagaggtttgctggattcaagaaggatgacaagcagttggatgctgatacccaccgcaggtacatctatggtggccatgttgctgactacatgaagaaccttgctgaagggaaccagacaagtaccagagccacttcagtgcgtacatta

SEQ ID NO: 56678 - DNA, 229 bp, Zea mays
tatgctgctgccagaggagtaagatcagatcaaattgtattcacagacgttgccatgaaaaatgagcatatacgacgcagtgccctggcagaccttttcctggacactcccctctgcaatgcacacacaacaggcactgacatactgtgggctggtctgccaatgatcacacttccatagagaaatggcaccaagtagctggtcctctgcgtactactgggcttgggga

SEQ ID NO: 56679 - DNA, 276 bp, Zea mays
ccagtgtccgccgtcgtgcgctcgctactcctctccctcgaggcctttgccggcgaagagcgcccagtcgcccaccaggatgaagtttgttgctgcctatctgcttgctgtcctcgctgggaactccagcccctctgccgaggacttgacatccatctggagtcagttggctgtgaagttgactgacaagatggaactccttctgtcccagctgagcggtaaggacattaccgagctcattgccgccggccgggagaagtttgcttcagtcccatt

SEQ ID NO: 56680 - DNA, 208 bp, Zea mays
cgcaccatgatggtgacaaagcagctgcagatgatgatgacgatgatgtccagtggcagactgacacttcaattgacgctgcgaacacgacatgccagagcagctgagtgcagcaactgctgaaatggtgatgctgtcgactgaggagactgagaagaagatgaaaacaggcaacccacacagatgaagcactacatggttcagcaaa

SEQ ID NO: 56681 - DNA, 156 bp, Zea mays
  unsure (1)..(156): unsure at all n locations
gatccatccaagacagggatcgccatgtcggactcggaggcgcaccacttcgaatcgaaggccgacgctggggcgtccaagacctacccgcagcaggctggcaccgtccgtaagaccggcttcatcgtcatcaagaancgtccctgcaatgttgtg

SEQ ID NO: 56682 - DNA, 277 bp, Zea mays
ggcggtctggcaaggagcttgagaaggagcccaagttcctgaagaatggtgatgccggtatggtgaagatgattcccactaagcccatggtggttgagaccttctctcagtatcctcctctgggtcgttttgctgtccgtgacatgaggcagaggttgctgttggagtcatcaagagcgtggagaagaaggacccaactggtgccaaggtgaccaaggctgcaataaagaagaaatgatgcgtcctcccatgtgccctcgtttattttgtacttgtg

SEQ ID NO: 56683 - DNA, 275 bp, Zea mays
attcatcctacttatggattgagcccttggctcatatcaggaattgggtggcaacgctatatggattgattgtttccttgctcgatttatggcgtttttttactacttcatgactgttgcgatgtacatgttgagcccacgaatggcatatcattctctgaatgtgtggagagacatgcgtactccacctatgataagttcctcaagctccatgaagaggaattgaaaacactaccagctccagaggcagcattgaactattacctgaatgagga

SEQ ID NO: 56684 - DNA, 275 bp, Zea mays
caaccagttgcatatgcattttgtgcctactctacctttaaggcattcatttataaatggagtattctaatttgcagcagcaggcagcgtccttgaaaaagaacctctttgatcagggatacttggatgagcaattttgtcagattgaggacttcaggatgaagcaagccctaattttacagaagaagttgtttccctgttcttcaagaactcaaccaggctaatgacaaatattgagcaagctatggacaggaatcccagagatttcagtagat

SEQ ID NO: 56685 - DNA, 277 bp, Zea mays
acagtatccatctcttgttgaggaatggagtaatggcagacttgaaaatgaaatggacatcgtcttggatgctgtgaacaaaataaggtctctgaagccaccaacagattcaaatgaaagacgtcctgcttttgcactttgccgaggccagagatcgctgccacaatccagtgctatcaatctctaatcgtgtatctttcttccatatcacatctcaagatcctgacagagaatgatgaaactccagccgattgtgcaactgctgttgtcaacaaag

SEQ ID NO: 56686 - DNA, 237 bp, Zea mays
gttagagatcagcattcgaaaacgcccagcttgatctttgaatatgttaacaacacagatttcaaagtgctgtacccaacattaacagattatgacattcggtattacatctacgagttactcaaggcattagattactgccattcacaaggattatgcaccgagatgtgaagccccacaatgttatgatagatcatgagcttcggaaactccggctgatagactggggtcttgctg

SEQ ID NO: 56687 - DNA, 275 bp, Zea mays
gccgtcaaggaggccgcgtgggggctcgcacgctacgccgccatctcacaggacaacgggcttgtgccgatcgtggagccggagatcctgctggacggcgagcacggcatcgagcgcacgtacgaggtggcgcagaaggtgtgggccgaaccttctacgccatggcggagaacaacgtcatgttcgagggcatcctgctgaagccgtccatggtgacgcccggcgcggatgccaaggacagggccaccccggagcaggtggccgcgtacaccctc

SEQ ID NO: 56688 - DNA, 268 bp, Zea mays
gcgagaggctgccgtgtagggaccgtagactcagcgactgcgaaggagggataaggggatggccgggatcggaccgatcaggcaggactgggagccggtcgttgtgcggaagaaggcacccaccgccgccgccaagaaggatgagaaggcgtcaacgccgcgcgccgcgccggtgcggagatcgataccatgaagaagtacaacgctggtacgaacaaggcggcatccagcggtacatccctcaacaccaagcgcctcgacgacgaca

SEQ ID NO: 56689 - DNA, 277 bp, Zea mays
aatggattctagccactacaagggcgatcacacgtttgtcccagtcactcggaagggatactggcagttcaacatgggtgatgtcctggttgatggaaagtccactgggttttgtgccggtggctgtgcagccatcgcagattctggaattccttgcttgctggccccacagccataattactgaaatcaatgaaaagattggtgctgctggtgtagtcagccaggagtgctagactgttgtttctcaatatggacagcagatcctagatcttttgc

SEQ ID NO: 56690 - DNA, 278 bp, Zea mays
cgacaatgaggtgcagcgtacaatgttggaaatagtaaaccagcttgatgggtttgatgcaagagggaacatcaaagttctcatggccactaataggcctgatacattggatcctgcacttctgcgtcctggtcgtctggacagaaaggagaattcgggctacctgacctggagggccgtacccaaatctttaagatccatacacgcaccatgaactgcgagcgggatattcgtttcgagcttctggcacggctctgccccaactctactggaacgga

SEQ ID NO: 56691 - DNA, 271 bp, Zea mays
ctagggttcgaggaacgtccgtccgtccgtccggggaaggagcaggagggaggcggagatgatcgaggtggtgctcaacgaccgcctggggaagaaggtgcgggtcaagtgcaacgaggacgacaccatcagcgacctcaagaagcggtggcggcgcagacggggacgcgccccgagaagatccgcatccagaagtggtacaacatctacaaggaccacatcaccctcaaggactacgaggtccacgacggcatgggcctcgagctctact

SEQ ID NO: 56692 - DNA, 274 bp, Zea mays
gtccgctactccgctccccctcagtcctcagttcctcacctagcggtagcgtgcgcgcgggagacgtagagggcggcttcggaggcggcagcagcggcggcaacaccggtgacgccgacagaggggacggtgatcgcgatccacagctggaggagtggagcatcgagatcgaggaggccaacagcgccaagaagctggtggtgattgacttcactgcaacatggtgtcctccgtgccgcgccatggctcgaatttttgctgagatggccaagaa

SEQ ID NO: 56693 - DNA, 272 bp, Zea mays
aattgacagagatgcaagcccgggccatttttgaagctgctatagcaatgaccaaccagggtgttcaagtgttcccagagataatggttcctcttgttggaacaccacaggaactggggcatcaagtgactcttatccgccaagttctgagaaagtgttcgccaatgtgggcaagactatcgggtacaaagttggaacaatgattgagatccccagggcagctctggtggctgatgagatagcggacaggctgaattcttctccttcggaag

SEQ ID NO: 56694 - DNA, 268 bp, Zea mays
cgggaccacgggcccagcctacaacattgacaatctggtcaagtctctcaaatttgtcaccaacaaacgtacttacggaccgtacggcagggacgagggcaccccgttccgtgtcaaggtgatgaacaacggccacgtcgctggctttttggccgctctggagattgcctggacgcgatcgggctctacgtgaaccccaactaataactaaaacgatggatcggatcatctgcatgcatgcatatgcagtatgctgcttgcctgcctg

SEQ ID NO: 56695 - DNA, 275 bp, Zea mays
atctacacacatacatagtttcttctactacacgacgacaaacatggggaagcctgcgaagatcggagagtggggtggatacgccggcgatcgtcgggatctgagggctactccggaccggctgatcgaggtgaaggtcacggcggacacagcagctgcatccgctccatctccttcatctacatcggagccgatggcaaaccgtacgaggaggggccatggggtttcggccatgctggcacggagtacaagattgatctgtgcaggttcgacga

SEQ ID NO: 56696 - DNA, 270 bp, Zea mays
gcgcccgttcaggatccacatcttcccgagcgagttcttggttgacctcttcctcttcggaccacctccaaggctcttggtgtagcttgccactctcaccaatcaagttttcatgtctgatctcgacattcagatcccaactgcttcgatcccttcgctgaggccaatgctggggactctggtgcggcacagggtcaaaggactacgtacacgtgcgcatccagcagcgtaatggtcgcaagagcctgactaccgtccagggattgaaga

SEQ ID NO: 56697 - DNA, 269 bp, Zea mays
ttgagaacaagctgaaccagtacttattgccagtaattcaaggcagttttcaaaatatccaagcagaagttggatcagagatggtaaatgtgaccctgattgcacgtaggtgcacacgaaggataggtactcgaatgtggagagaggagctgatgcagagggttatgctgcaaacttcgttgaatcggagcagataatgcagtcaaaagggtttacagcatcctatgtacaagtccgaggttctatgccattcttgtgggagcagattg

SEQ ID NO: 56698 - DNA, 270 bp, Zea mays
ctcgtcgatctacacacatacatagtttcttctactacacgacgacaaacatggggaagcctgcgaagatcggagagtggggtggatacgccggcgatcgtcgggatctgagggctactccggaccggctgaccgaggtgaagtcacggcggacaacagcagctgcatccgctccatctccttcatctacatcggagccgatggcaagccgtacgaggaggggttatggggtttcggccatgctggcacggagtacaagattgatctgtg

SEQ ID NO: 56699 - DNA, 272 bp, Zea mays
tgcctctctgcctccctccctcagatcctccctaagattgccatggcggaccagctcaccgacgaccagatcgccgagttcaaggaagcattcagcctcttcgacaaggacggcgacggctgcatcaccaccaaggaacttggaactgtgatgcgctcgttggggcagaaccctactgaggctgagcttcaggacatgatcaacgaggttgatgctgatggcaatggaaccatcgacttccctgagtttctcaacctgatggcacgcaagat

SEQ ID NO: 56700 - DNA, 241 bp, Zea mays
ccagtgccggactaatctgctcccgtttacataacggtcggtgatggaggctaccaggatggtcttgcttcaaggtttcacaacccccagccggattactcagcgttcagggtagccagctatggtcactcagttttacagtgtaaaacaggaccatgctatctaccagtggtatagaaacgatgatgggaatcctgttccagcagacactgcaatgttccataaccaacattggtcgtgc

SEQ ID NO: 56701 - DNA, 269 bp, Zea mays
ggtgatcactggtttcaggctgtacaagagcggagtttacactagcgaccattgtggaactacaccgatggatgtgaaccacgctgttctggctgttggctacggtgtcgaagatggtgtcccctactggctcatcaagaatcatggggcgctgactggggcgatgagggttacttcaagatggaaatgggcaagaacatgtgcggtgttgctaacgtgtgcatcctaccctattgtcgcatgaggcccttacgaagtgttacatggtc

SEQ ID NO: 56702 - DNA, 263 bp, Zea mays
gtggcgaacaggtgcccgagcagaacggcaagacgcacttcgacgccggcgacgagcgcgccaaggagttctcgggcctgctcaagtccaacgaccccgtgggcttcaacctcgtcgacgtcctcgcctggggctcgctcgccacatcgtcgcctactacatcctcgccagctcaagcaacggatacggaccccaacttcttctgagcggccggctgcgggcatgttcttgagcctgcctgtattctactccgtgtgtggtga

SEQ ID NO: 56703 - DNA, 117 bp, Zea mays
gaggttctttaaccagggacaatgctgctgcgctggatctcgcacgtgtggacatgagcaggttgaggatgagtttgtggagaaggccaaggctcgtgcattgaagcacgtcgttgg

SEQ ID NO: 56704 - DNA, 107 bp, Zea mays
ctgcattggggcatgtttgttcctgctataaaaggtcaaggtactgaggagcagcagaaaaagtggttaccaatggcttacaagttccaaataatgtgggtgctatg

SEQ ID NO: 56705 - DNA, 188 bp, Zea mays
cgggcccatgttcccggaggccaagcccgcctcggcggcggcggcggcgatcaggagtatggtcttggttgacagggactacctgtcctacgacgagccaaagacggtgttcccgggcgaggcgtgcgatgacctttgcggcgagttctgcgaggcgccgtaccaggacggcgtctccaatgagctgg

SEQ ID NO: 56706 - DNA, 187 bp, Zea mays
gctggttgtcaaggttctggcttcaaggtccaaatccggcagttgggacctggaatgattcagcaaatgcagcatccttgcaatgagtgcaagggttctggagagaccatcagcgataaggatagatgcccacaatgcaaaggtgataaagttgtgccggagaagaaagttcttgaagtggtagttg

SEQ ID NO: 56707 - DNA, 123 bp, Zea mays
aagagactgggacatcaagtgactcttatccgccgagttgcggataaagtgttgcgccaaggtgtgcaatactatcgggtacaaagtttggtctatgattgagctccccagggcaactctggt

SEQ ID NO: 56708 - DNA, 180 bp, Zea mays
gattgcaaaagaacacgaaggccccgggatggagttctctgatcttattcaggatggaatgcaaggcctgataagatgcgcggaaaagttcgacgcttccaagggttttagattctccacttactctcactggtggatcaaacaagcaatacgcaagtccgttttagaacaaacccagat

SEQ ID NO: 56709 - DNA, 183 bp, Zea mays
ccatcctcgccctcgaagctatagctgcggctactgtctcaatgaaccaagcgggaatgttggcactgtccccttcagtcagacctgcggatcaacggcggtggctccaaatctccaatactactacatatgaacggacactatttttgtgcgtttctgttgacgggaacctgtgtagttctt

SEQ ID NO: 56710 - DNA, 101 bp, Zea mays
ctttacattctactgagtggtgtgcctccagtttgggcagaaacacaacaagtaatatttgatgctgtattgaagggtgccattgatttggatgtctgatc

SEQ ID NO: 56711 - DNA, 109 bp, Zea mays
aagaggcgcgccatgctgggttcttgaacaaggggctgtctgactgtcaacttggcgctggacctggggttcctgaccaaggctaggaagtacaccttcttcaagccca

SEQ ID NO: 56712 - DNA, 103 bp, Zea mays
attcaagttatctgtgttactgatggtgagcgaatctttggacttggagagtttggttgtcacggaatgggaattcctgtaggcaaacttgctctatacactg

SEQ ID NO: 56713 - DNA, 291 bp, Zea mays
aaagactacactgatcaaggcaatggaggaagctgatgtgaaaagcaagtgggagaatagctcatggggcaagaagctgattgttcagaagaggagagcatcactcaatgactttgacaggttcaaggtcatgttggcgaagatcaagaggggcggtgccattaggcaagagcttgctaagcttaaaaaggtggctgctgctgcttagattgctttggtggttcctctattcgatctcttgaaatgtaatgcacgaattactttgacagttagcttgtcaagatgtcaatt

SEQ ID NO: 56714 - DNA, 292 bp, Zea mays
atgaacagcaagatgctgagctgcagaaagcagatgctaaagcccgtgaagcgatgaaccttgccaccgaggaagcatccaaactgaagacggcgaaggatgtcataaattcactaacagcccagctaaaagaaatgtctgaaaggcttcctcctggagcatgtgacgtgaagaacaatggacgcgttatgggcgatttagcgcccgaaatggggagagagaagcagatgcgatatggtgatcggttcagtggattgcctgctcaagtttaccaaacaagcaactacagtga

SEQ ID NO: 56715 - DNA, 289 bp, Zea mays
acgagacctccagccgtccgcccctgaaccctcagccttctccgtcccgcctcggcactcgacggccgccggcacacaccgcgcagtctcgagacaggaaccggaggaacgaggatggaggatgactcgccgctgacgaagacgatgaagggtgcggtgacaggactcgccgcggggaccatctggggcaccgtcgtcgccacctggtacgacgtgccccgtgtggagcgccacgtcgcgctccctggccttatccggacgctcaagatgtgcggcacctacggggcca

SEQ ID NO: 56716 - DNA, 286 bp, Zea mays
aagaaatgtaggcagctaagacaccaggaatccagaggagaaagccaaatgagtattgacaaaacccgtgctgttgtgaaggatttgcactccagaattttagtggccattcagagaatcgacatgatttcgaagaacatagaggatcttagagacaaagagcttcaaccacaactagaggaattaattggaagtttgactcgcatgtgggcaacaatgcttgagtgtcaccggcatcaacacgatatcattaaactagtatccagcactcgcaacatgaagacct

SEQ ID NO: 56717 - DNA, 287 bp, Zea mays
  unsure (1)..(287): unsure at all n locations
cttcgccctcttgccggtcccgaataaagagcagcagcgcaagaggtcggtagagcgagaagaaggcaatggcggccgagagcttccttttcacctcggagtccgtgaacgaggggcaccccgacaagctgtgcgaccaggtgtcggacgccgtgcttgacgcatgcctcgcgcaggaccccgacagcaangtggcctgcgagacctgcaccaagaccaacatggtgatggtgttcggcgagatcacgaccaaggcgaccgtggactacgagaagatcgtgcgcgac

SEQ ID NO: 56718 - DNA, 289 bp, Zea mays
acgaccccgacaaccccgagtcccgacccgatggcgcccaacgccgagaagaagccagcggagaagaagccggcggccgaggagaaggcggagaagacgaccgaagcaagaagcccaagtccgagaagcgcctgcccgcctcgaagtcctccggcaaggagggcggcgagaagaaggggaagaagaaggccaagaagagcgtggagacctacaaaatctacatcttcaaggtcctaaagcaggtgcaccccgacatcggcatctcctccaaggccatgtccatcatgaa

SEQ ID NO: 56719 - DNA, 294 bp, Zea mays
caaatcgaccgagcgaattcaccacagcttctcaccaccgctaccttcgatggcacccaaggcggacaagaagccggcggcgaagaagcctgcagaggaggagcccgcgacagagaaggcggagaaggctccggcggggaagaagcccaaggccgagaagcgcctcccggcgggcaagtccgccggtaaggagggcggcgagggcaagaaggggaaaaagaaagcgaagaagtccgtggagacctacaagatctacatcttcaaggtgctgaagcaggtgcaccccgacatcgg

SEQ ID NO: 56720 - DNA, 232 bp, Zea mays
caccaggtccctgcccttgcaacgcagctgccggcggtgtctactactgaggaaactatgtactgtagtaataatgtaatggagccgctgactagctacctatagggctatagctagttcactcgtttagcggcgatgagtaacggagtgtcacccatcaccatgggtggcagtgtgagcaatgacctgaatgaaccattgacatggaaaggaataatatatagggaaaaag

SEQ ID NO: 56721 - DNA, 284 bp, Zea mays
caggtcgccggcaagatgggcagcactgactcgctgcagcgggtggcgagcctggagcacctccagaagaggatgtgcggaggcccggcttcatcggggtcgacctcctaggttcctactccatcggatatgataaaggccctgatgcagtgatgcccacggcaaagaatatgataaattaacagtttcacatactttgtagtggacattgctaatgctgcgatgcgcattcgttcgttgtggacttacgggtctactgctattgatttattgttcgttctcca

SEQ ID NO: 56722 - DNA, 290 bp, Zea mays
cgcagtcctcccatctcccaagacctcctcagacccgagaagcgcactgcggccatggacgccaccggcactggagctggagggaaggcgaagaagggagcagccggtcgcaaggccggcgggccgaggaagaagtcggtgacgaggtccgtgaaggccgggctccagttccccgtcggccgcatcgggcgctacctcaagaagggccgctacgcgcagcgcgtcggcagcggtgcccccgtctacctcgcggccgtcctggagtacctcgccgctgaggtcctggagct

SEQ ID NO: 56723 - DNA, 288 bp, Zea mays
acttgctgcggatacacctcttctgacagggcagcgtgtactggatgcactattcccctcggatctgggaggcacttgtgctattccaggagcatttggctgtggtaaaactgtcattagtcaggcactttccaagtactccaattccgaagctgtggtttatgtgggctgtggtgaacgaggaaacgagatggctgacgttctcatggactttccccagttgacgatgacattgcctgatggccgtgaggagtctgtcatgaagagaacaacactggtggctaacac

SEQ ID NO: 56724 - DNA, 276 bp, Zea mays
atctgaaggtcagcgttcactgcaccggctacgggaaggatcgtgatctgtccaggaaattttggagcaccaaggaccctgggcagcaggcattcagtttcagcattggtcagggttcagtgatcaaaggatgggacgagggagttatgaccatgcaagtgggtgaagttgatcgtatccagtgcacgcctgattatgcttatggagccggcgggttcccagcctggggaattcaaccaaactcagtgcttgtgttcgagattgaagtcctcagtg

SEQ ID NO: 56725 - DNA, 286 bp, Zea mays
caccagagcttaccaatgtggccagtatctggttcatggcgcttttcatctgcatctcagtgaccggcatcctggaaatgagatggagcggcgtggccatcgacgactggtggagaaacgagcagttctgggtcatcgggggcgtttccgcgcacctcttcgcggtgttccaaggccttctcaaggtcctcgctggcatcgacacgagcttcacggtgacatccaagggcggggacgacgaggagttctcggagctgtacacgttcagatggaccaccctgttgat

SEQ ID NO: 56726 - DNA, 284 bp, Zea mays
acttcaatgggcttcgaacacccagctgtgcaagcctataggctacaacaagcaattgcggcgagcgtcttacaacaaccaatttcccagttgcaacaacaatccttggcacatctaacaatacaaaccatcgcaacgcaacagcaacaacaattcctaccagcactgagccacctagccatggtgaaccctgccgcctacttgcaacagcagttgcttgcatcaaacccacttgctctggcaaacgtagttgcaaaccagccacaacaacagctgcaacagtt

SEQ ID NO: 56727 - DNA, 283 bp, Zea mays
acacactccgtagtctgtaccccaagcaccggcgcggcggcggcggctaccatggcagtcgggaagaacaagaggatctccaagggaaagaagggtggtaagaacaagaccgtcgatcccttctctaagaaggactggtatgacatcaaggccccatcggtcttcagtgtgcgcaacattgggaagactctcgtgtccaggacacagggtaccaggattgcctctgatggtctgaagcacagagtctttgaggtttgtctagctgatcttcagggtgacgagg

SEQ ID NO: 56728 - DNA, 267 bp, Zea mays
  unsure (1)..(267): unsure at all n locations
atgcccggtgcaagtagagtctctctgctagcgacggacttcaagcgaggctcggcggctctagaagacgatgggcaaggacgacgtgatcgagagcagcgctggcggcggcgagttcgctgccaaggactacacggacgctcccccggcaccgctgatcgacgcggcggagctggggtcctngtcgctgtaccgcgccgtgatcgccgaggtcatcgccacgctgctgttcctgtacagcacggtggccaccgtgatggggtacaa

SEQ ID NO: 56729 - DNA, 283 bp, Zea mays
cagggaggcaacaacgggtccacgctgacggctggggtcattgccaacagggaggggatctcatgggcgaccaaggacaaggtgcagcaagccaactactacggctccctcacccaggcttccaccatcagagtaggcagctacaacggggaggagatatatgcgccgttcaagagcctcctacccatggtgaacccagacgaccttgtgtttggaggctgggacatcagcagcatgaacctggcagatgccatgaccaggtccaaggtgctggacattgact

SEQ ID NO: 56730 - DNA, 284 bp, Zea mays
aatcctcttcctcgagttctcctcaaccaaattcaaggtcacagcggcgaacctctcggctatcatgtctgaccgcggcaagggcgggaagggtctgggcaagggcggcgccaagcgccaccgcaaggagctgcgcgacaacatccagggcatcaccaagccggcgattcgcaggttggcgaggaggggcggcgtcaagcgcatctccgggctcatctacgaggagacccgcggcgtgctcaagatcttcctcgagaacgtcatccgcgacgccgtcacctaca

SEQ ID NO: 56731 - DNA, 283 bp, Zea mays
acggcggcgcggacggacaaggagcaggcggaagaggagttgtgccaaggcacaatgggtatctcgcgtgactcgatgcacaagcgccgagccaccggtggaaagcagaaggcctggaggaagaagcgaaagtatgagcttggtcgccagccagccaacaccaagttgtcaagcaataagacagttaggagggtccgtgttcgtggaggtaatgtgaaatggacggctcttcgccttgatactggtaactactcatggggaagtgaagctgttacccgcaaga

SEQ ID NO: 56732 - DNA, 280 bp, Zea mays
agcaggatcaagttcaaggcgttcgaccttgggggccaccagatcgcccgccgcgtctggaaggactactacgccaaggttgatgctgttgtgtacttggtggatgctgttgacaaggaacgttttgccgagtcgaagaaggagcttgatgcgcttcttgcagatgactcccttgcaaacgttcctttcctcatactgggcaacaagattgacatcccatacgcggcttcagaggaggagctgaggtactacctcggcctgagcaacttcacaaccgggg

SEQ ID NO: 56733 - DNA, 281 bp, Zea mays
agaaagcacaatagtgtaccaacaatggcagccaaaatattttgcttccttatgctccttggtctttctgcaagtgctgctaccgcaaccagtttcccacaatgctcacaagctcctatagcttcctttcttcccccatacctctcaccagcggtgtcttcagtatgtgagaacccaattcttcaaccctacaggatccaacaggcaatcgcagcaggcatcttacctttatcacccttgttcctccaacaaccgtcagccctattacagcagttaccttt

SEQ ID NO: 56734 - DNA, 223 bp, Zea mays
ccaccccactcgccgccgccgctgccaccgccgcttgctgccgcagccgccatgggggcgtacaagtacgtgtcggaactatggaggaggaagcagtcggacgtgatgcgcttcgtgcagcgcgtgcgctgctgggagtacaggcagcagccgtccatcgtccgcctcaccaggcccacccgccccgacaaggcccgtcgtctcggctacaaggccaagcagg

SEQ ID NO: 56735 - DNA, 283 bp, Zea mays
attgatgcgcaccccactcagatcctaacaccatcaagcagattttagctcagcaggtaacctctccggtgcaatgggaaaccactgttaagaatcttatgggcaaggggcttgagaaaagttatgaactcggacctggaaaggttatagcaggtattctcaagaggatcaacaaaggcactagcattgagaacatcggggcttaaacgtctgggatctgaagaactcttgatggaaccaagttacacagcagaagattgaaacatgccattattgtggaacg

SEQ ID NO: 56736 - DNA, 281 bp, Zea mays
cgacatcgtctcttcgtccccacgagcaaccgataatccgccggcgctgagatgttggtttatcaagacctcgtatctggcgacgagctcctgtcggattcattcacctactaggagctcgagaacggcgtcctgtgggaggtctagggaaagtgaggtcacccaaggtcctgttgatgtagacattggtgccaatccatccgccgatggatagataggatgatagcgttgatgacacagccgtgaaggtggttgatattgttgacacattccgtctacag

SEQ ID NO: 56737 - DNA, 283 bp, Zea mays
cgcaaagcgctagccttcctactgtctcgatggcccgcacgaagcagacggcgaggaagtccactggcggcaaggcgccaaggaagcagctggccaccaaggcggcgcgcaagtctgccccggcgaccggcggagtgaagaagccccaccgtttccgccccggcaccgtcgcgctccgggagatccgcaagtaccagaagagcacggagctgctgatccgcaagctgccgttccagcgcctggtgcgtgagatacgccaggacttcaagaccgaccttcgctt

SEQ ID NO: 56738 - DNA, 263 bp, Zea mays
aagcaccaaatcaagaccataccaatttagtgagtccggacagatggcaatggccgcagttctggccaatggtgattcacagggtcgtcctcagaggaactatcaagttgttgttgctggcactcgtgacatgggcattaggaaggatggggtcttgccatggaagcttcctggtgatcttaaattctttaaagagcttacactaactacatctgatcctgtcaaaaagaatgcagttataatgggaaggaaaacatgggaga

SEQ ID NO: 56739 - DNA, 279 bp, Zea mays
cacggcggcgcgggcggacaaggagcaggcggaggaggagttgtgccaagccacaatgggtatctcgcgtgactcgatgcacaagcgccgagccaccggtggaaagcagaaggcctggaggaagaagcgaaagtatgagcttggtcgccagccagccaacaccaagttgtcaagcaataagacggtgaggagggtccgtgttcggggaggtaatgtgaaatggagggctcttcgccttgatactggtaactactcatggggaagtgaagctgttacccg

SEQ ID NO: 56740 - DNA, 279 bp, Zea mays
cattgtgttccggatgcaaaccaagggttcataaccgttgtccaacttgtaggcatgaactgggtaacataaggtgtcgtgctcctgagaaggtggctgcatctcttgaacttccatgcaagtaccagtgctttgggtgcccaggcatttatccttactacagcaagctgaagcatgagtcgcagtgccaatatagaccttatagttgtccatatgctggatctgaatgcacagttgctggtgacatcccatatttggtgaatcacttgaaagatgacc

SEQ ID NO: 56741 - DNA, 271 bp, Zea mays
  unsure (1)..(271): unsure at all n locations
ctctgatgagcttaccagcatcgaagttttctgcccggcgtttggctcggcacaacaacagccanacaagcaggactccgtctctgtcaccaagattggggtatggggtggaggtggagggtcggcgcaggacatcacgacgacggagccaccacagcgtctgcacagcctctccgttcgaactggttttgccgtcgactccatcgagttcacgtatactgatagaggtggccagaggcgcactgctgggcgatggggtggacttggcggc

SEQ ID NO: 56742 - DNA, 285 bp, Zea mays
aatgaggcctggtggtccaatgccgaactttatgatgcctatggttcagcaaggacagcaaccacagcgtcctgctggtagacgtgctggtggaatgcagcagcccatgccaatgggtggtcagcaacaggtgttccctagaggtggtcgtggctatcgctatcctactggacgtggaatgcctgatcctggcatgcacagtgttggtgctgtgatgccaccttcatatgagatgggagggatgccaatgagagaagctgccccccaacctgttccaattggggg

SEQ ID NO: 56743 - DNA, 277 bp, Zea mays
gggtcttcagaccattagctttatctactccagagcgcagaagaacccgatcgacaccatgagggtgttgctcgttgccctcgctctcctggctctcgctgcgagcgccacctccacgcatacaatctgcggctgcggctgccagccaccgccgccggttcatctaccgccgccggtgcatctgccacctccggttcacctgccacctccggtgcatctcccaccgtcggtccacctgccgccgccggtccatctgtcagcgccggtccatgtgccg

SEQ ID NO: 56744 - DNA, 278 bp, Zea mays
aaacgtcatcgtccgccagcgcaagcgtagcgtcgcaaggacggtgtctacatgtacttcgaagataatgctggagtgattgtaaatcccaagggtgagatgaaaggttctgcaatcactggacctatcggcaaggagtgtgctgacctttggcctaggatcgccagtgcagcaaatgccatcgtttgagagcttgttggaatgtgtttagacttgagtatgatcatctcaattgtgtgttgcaggtgttgtaagggtgctattggacttgatggctc

SEQ ID NO: 56745 - DNA, 283 bp, Zea mays
aggatttttcatggtagtagtagctataacacaagtctcacgatgagtggtggcaacaatggaatggacaagccattttcactgccatcatatggtgcaatgtgcacaaatgggttgaatggctcaaccactaatgatgccagacaactggtggggcctcagcaggataacaaggccatcatgaagagcagtaataacaacaatggtgtatcattgttgaacctctactggaacaagcacgactacaacaacaactacaacaactacgacatcaacaacaact

SEQ ID NO: 56746 - DNA, 278 bp, Zea mays
tctcctcgcatttcttcccatccgatccccccttcgcaaccaaaaccccaactcgccccgcatcgatggcgcccaaggccgagaagaaacccgcggcgaagaagccggcggaggaggagcccgcggccgagaaggcgcccgccgggaagaagccgaagcggatgaagcgggtccccgctggcaagtccgctgccaaggaaggcggcgagggcaagaggggcaagaagaagggcaagaagagcgtggagacctacaagatctacatcttcaaggtgctg

SEQ ID NO: 56747 - DNA, 201 bp, Zea mays
attgaagaccgagagggaaaagaagcgtgagaagtatttccccatgacgaagtacgctatcaaggcctagattagtgaaagaacatttatcctgtcaagttttgctcagaagttacttgaatttgagacaaatctatctccatccaagtactatgtagctgatcaactgcatgatgaaaaacgagtactttttgcttgttt

SEQ ID NO: 56748 - DNA, 270 bp, Zea mays
taaaaccctaaccctccgccgcccctcggacccccaaccagcagctgccgcagccatccgccggcgagatggcgctgtacctgctgttcgagtcggcgtccggctacggtctattccacgcgtacggcatcgatgagatcgggcagagcgtggaggccgttcgctcctccgtgctggacctcgatcgcttcggcaaggccgtcaagctcaccgccttcaaccctttctcctctgccgtcgatgcactcaatcagtgcaacgctatatccg

SEQ ID NO: 56749 - DNA, 276 bp, Zea mays
caattggtggtccatgggatgttgctgctggtgctgtaattcttcaggaaaccggtggccttgtttttgacccaagcggcggaaagtttgatttgatgtcgcgaagaatggcaggatcaaacagcttgctgaaggataagttcgtcaaggaactgggggatactaattgaaacaaatgttagtattattcgtggaacagattaagacaataaggttgccccgccgcatggtgattaacttattgtttgggcaacaaaattccatgtaattctgcac

SEQ ID NO: 56750 - DNA, 276 bp, Zea mays
ccagactacactgatcaaggcaatggaggcagctgatgtgaaaagcaagtgggagaatagctcatggggcaagaagctgattgttcagaagaggagagcatcactcaatgactttgacaggctccaggtcatgttggcgaagatcaagaggggcggtgccattaggcaagagcttgctaagcttaaaaaggtggctgctgctgcttagattgctttggtggttcctctattcgatctcttgaaatgtaatgcacgaattactttgacagtcagctt

SEQ ID NO: 56751 - DNA, 269 bp, Zea mays
gtgaacagcaagatgctgagctgcagaaagcagatgctaaagcccgtgaagcgatgaaccttgccaccgaggaagcatccaaactgaagacggcgaaggatgtcataaattcactaacagcccagctaaaagaaatgtctgacaggcttcctcctggagcatgtgacgtgaagaacaatggacgcgttatgggcgatttagcgcccgaaatggggagagagaagcagatgcgatatggtgatcggttcagtggattgcctgctcaagtt

SEQ ID NO: 56752 - DNA, 308 bp, Zea mays
ccccaccgcgtcgtacgtcggccttcggctcgcgccgagacctcccgccgtccgaccctgacccctcagccttctccgtcccgcctcggccctcgacggccgccggtatacaccgcgccgtctcgagacaggcaccggcggcccgcggctggcggctgactcgccgctgacgcagacgatgacgggtgcggtgacaggcctcgccgcggggcacctctggcagcaccgtcgtcgctacctggtccgacgtgccccgtgtggcgcgagacgtcgcgctccctggccttctccggccgctccagctgtgc

SEQ ID NO: 56753 - DNA, 274 bp, Zea mays
ccaatcgaccgagcgaattcaccacagcttctcaccaccgctaccttcgatggcacccaaggcggacaagcagccggcggcgaagaagcctgcagaggaggagcccgcgacagagaaggcggagaaggctccggcggggaagaagcccaaggccgagaagcgcctcccggcgggcaagtccgccggtaaggagggcggcgagggcaagacggggaaaaagaaagcgaagcagtccgtggagacctacaagatctacatcttcaaggtgctgaag

SEQ ID NO: 56754 - DNA, 94 bp, Zea mays
cccaggcctctgcccttgcaacgcagctgccggcggtgtctactactgaggcaactatgtactgtcgtaataatgtcctggcgccgctgactag

SEQ ID NO: 56755 - DNA, 266 bp, Zea mays
ggctactctggcgtggaggtgcgcgtcacgccgatgcgcacggagatcatcatccgcgacacgcgcacgcagaacgtgctcggcgagaagggccgcagatgcgggagcttacctccgtcgtccagaagaggttcaacttccctgagcatggcgtcgagctttacgccgagaaggtcgtcaaccgtgggctctgtgccatcgcgcaggccgagtccctccgttcaaagctcctcggaggccttgccgtccgcaggcttgctatggtg

SEQ ID NO: 56756 - DNA, 269 bp, Zea mays
atcgattgccgcctcagcaatccacagtccatggtgacagcggccaaacaagttcttccgagaggttcttgccgttgtgcaaccatccccatcttctagaacagagcggaactaattccttgttcagctctggtgcgatagcaagggcacgggagattctagacctctttcccgggagagcaacaggaggatatagccactctcaaggcactgaaggattgcgcgacataatcgccgctggaatagccgctcgagataatttcccctgc

SEQ ID NO: 56757 - DNA, 270 bp, Zea mays
ccggtcgccggcaagatgggcagcactgactcgctgcagcgggtggcgagcctggagcacctccagaagaggatgtgcggaggcccggcttcatcggggtcgacctcctaggttcctactccatcggatatgataaaggccctgatgcagtgatgcccacggcaaagaatatgataaattaacagtttcacatactttgtagtggacattgctaatgctgcgatgcgcattcgttcgttgtggacttacgggtctactgctattgattta

SEQ ID NO: 56758 - DNA, 292 bp, Zea mays
gcgcgtgtgcgaggtggctcagaattcggctcaagcgcattccacccatcacccaagacctcctcagacccgagagacgactgcggccatggacgccaccggcactggagctggagggacggcgaagaagggaacggccggtcgcaaagccggcgggccggggaagaagtcggtgacgaggtccgtgaaggccgagcgccaattccccgtcggacacatacgggcgctacctcaagaaaggccgctacgcgcacgcgtacagcagcggtgcccccgtctacctcgcggccgt

SEQ ID NO: 56759 - DNA, 267 bp, Zea mays
ccttgccgcggatacacctcttctgacagggcagcgtgtactggatgcactattcccctcggttctgggaggcacttgtgctattccaggagcatttggctgtggtaaaactgtcattagtcaggcactttccaagtactccaattccgaagctgtggtttatgtgggctgtggtgaacgaggaaacgagatggctgacgttctcatggactttccccagttgacgatgacattgcctgatggccgtgaggagtctgtcatgaagag

SEQ ID NO: 56760 - DNA, 264 bp, Zea mays
ccctgaaggtcaccgttcactgcaccggctacgggaaggatcgtgatctgtccaagacattttggagcaccaaggaccctgggcagcagccattcagtttcagcattggtcatggttcagtgatcaaaggatgggacgagggagttatgaccatgcaagtgggtgaagttactcgtatccagtgcacgcctgattatgcttatggagccggcgggttcccagcctggggaattcgaccaaactcagtgcttgtgttcgagattg

SEQ ID NO: 56761 - DNA, 264 bp, Zea mays
ccccagagcttaccaatgtggccagtatctggttcatggcgcttttcatctgcatctcagtgaccggcatcctggaaatgagatggagcggcgtagccatcgacgactggtggagaaacgagcagttctgggtcatcgggggcgtttccgcgcacctcttcgcggtgttaccaggccttctcaaggtcctcgctggcatcgacacgagcttcacggtgacatccaagggcggggacgacgaggagttctcggagctgtacacgt

SEQ ID NO: 56762 - DNA, 266 bp, Zea mays
ccttcaatgggcttcgaacacccagctgtgcaagcctataggctacaacaagcaattgcggcgagcgtcttacaacaaccaatttcccagttgcaacaacaatccttggcacatctaacaatacaaaccatcgcaacgcaacagcgacaacaattcctaccagcactgagccacctagccatggtgaaccctgccgcctacttgcaacagcagttgcttgcatcaaacccacttgctctggcaaacgtattgcaaaccagccacaa

SEQ ID NO: 56763 - DNA, 295 bp, Zea mays
cgcgcacgtcgtcactcggaatcggctcagccacatcctatctgtacccaagcctcggcgcggcgaccgcggctaccatggcagtcgggaataacgagaggatctccaagggaaagaagggtggtacgagcaagaccgtcgatcccttctctaagaaggactggtatgacatccaggccccatcggtcttcagtgtgcgcaacattgggaagactctcgtgtccaggacacagggtaccaggattgcctctgatcgtctgaagcacagagtctttaaagtctgtctagcggatct

SEQ ID NO: 56764 - DNA, 259 bp, Zea mays
cgcggaggcaacaacgggtccacgctgacggctggtggtcattgccaacagggaggggatctcatgggcgaccaaggacaaggtgccgcaagccaactactacggctccctcacccaggcttccaccatcagagtaggcagctacaacggggatgagatatatgcgccgttcaagagcctcctacccatggtgaacccagacgaccttgtgtttggaggctgggacatcagcagcatgaacctggcagatgccatgacc

SEQ ID NO: 56765 - DNA, 268 bp, Zea mays
cctcctcttcctcgagttctcctcaaccaaattcaaggtcacagcggcgaacctctcggctatcatgtctggccgcggcacgcgcgggacgggtctgggcaagggcggcgccaagcgccaccgcaaggcgctgcgcgacaacatccagggcatcaccaagccggcgattcgcaggttggcgaggaggggcggcgtccagcgcatctccgggctcatctacgaggagacccgcggcgtgctcaagatcttcctcgagaacgtcatccgc

SEQ ID NO: 56766 - DNA, 266 bp, Zea mays
gcggcggcgcggacggcacaggcgcaggcggaagaggagttgtgccaaggcacaatgggtatctcgcgtgactcgatgcacaagcgccgagccatcggtggaaagcacaaggcctggaggccgaagcgaaagtatgagcttggtcgccagccagccaacacccagttgtcaagcaataagacagttcggagggtccgtgttcgtggaggtaatgtgcaatggagggctcttcgccttgatactggtaactactcatggggaagtgc

SEQ ID NO: 56767 - DNA, 268 bp, Zea mays
cgacacacaatagtgtaccaacaatggcagccaaaatattttgcttccttatgctccttggtacttctgcaagtgctgctaccgcaaccattttcccacaatgctcacaagctcctatagcttcctttcttcccccatacctctcaccagcggtgtcttcagtatgtgaaaacccaattcttcaaccctacaggatccaacaggccatcgcagcaggcatcttacctttatcgaccttgttcctccaacaaccgtcagccctattaca

SEQ ID NO: 56768 - DNA, 268 bp, Zea mays
cgtgcatattattgatgttcctggtcatgctaggctcaaacccaaacttgatgaagtcctgcctaaagctgctgcggttgtctttgttgttgatgctcaagatttcttgtctagcatgcaagctgctgcagagtacctttatgacattctgacaaaggcaactgtagtgaagaaaaaggtccctgtgcttatattctgcaacaagacagataaagttaccgcccactcgaaggaattcatcaagaagcagttggagaaagaattgaac

SEQ ID NO: 56769 - DNA, 266 bp, Zea mays
gttgccaaagaattccctcacctagccgccgccgccgctcgtctccctgagaggtgccgggaccgaggaactggccgagttctaggtagagaatcggttttgcttgtctcagcacggggtctgctgcgtctggtggtggtgaaggggagaaattcgtgagatctgttccggatcaggcgtgcgagctcgggaatcaggggtttcacacatagcttcgtcgatttgaatttgatgtactaatggagtctaatggtggcaaaaagtct

SEQ ID NO: 56770 - DNA, 260 bp, Zea mays
gctgatgcgcagcccactcagatcctaacaccatcaagcagattttagctcagcaggtaacctctccggtgcaatgggaaaccactgttaagaatcttatgggcaaggggcttgagaaaagttatgaactcggacctggaaaggttatagcaggtattctcaagaggatcaacaaaggcactagcattgagaacatcggggcttaaacgtctgggatctgaagaactcttgatggaaccgagttacacagcagaggattg

SEQ ID NO: 56771 - DNA, 260 bp, Zea mays
gcggcggcgccggcggacaaggagcaggcggaggaggagttgtgcccagccacaatgggtatctcgcgtgactcgatgcacaagcgccgagccaccggtggaaagcagaaggcctggaggaagaagcgaaagtatgagcttggtcgccagccagccaacaccaagttgtcaagcaataagacggtgaggagggtccgtgttcggggaggtaatgtgaaatggagggctcttcgccttgatactggtaactactcatgggg

SEQ ID NO: 56772 - DNA, 257 bp, Zea mays
ccttgtgttccggatgcaaaccaagggttcataaccgttgtccaacttgtaggcatgaactgggtaacataaggtgtcttgctcttgagaaggtggctgcatctcttgaacttccatgcaagtaccagtgctttgggtgcccaggcatttatccttactacagcaagctgaagcatgagtcgcagtgccaatatagaccttatagttgtccatatgctggatctgcatgcacagatgctggtgacatcccatctttg

SEQ ID NO: 56773 - DNA, 269 bp, Zea mays
cctgaggcctggtggtccaatgccgaactttatgatgcctatggttcagcaaggacagcaaccacagcgtcctgctggtagacgtgctggtggaatgcagcagtccatgccaatgggtggtcagcaacaggtgttccctagaggtggtcgtggctatcgctatcctactggacgtggaatgcctgatcctggcatgcacagtgttggtgctgtgatgccaccttcatatgagatgggagggatgccaatgagagaagctgccccccaac

SEQ ID NO: 56774 - DNA, 265 bp, Zea mays
tatgggtcttcagaccattaactttatctactccataacgcataagaacccgatcgacaccattatggtgttgctcgttgccctcgctctcctcgctctcgcttcgagcgccatctccacgcatacaatcggcggctgcggctgccaacgaccgccgccggttcgtctatggtcgccggtgcgtctgcgacctccggttcacctgcgacctccggtgcatctcccaccgtcggtccaccttcgctcgccggtccacctgtcggcg

SEQ ID NO: 56775 - DNA, 252 bp, Zea mays
ccgcgtcatcgtccgccagcgcaagcgcgtagcgtcgcaaggccggtgtctacatgtacttcgaagataatgctggagtgattgtgcatcccaagggtgagatgaaaagctctgcgatcactggacctatcggcaaggcgtgtgctgacctttggcctaagatcgccagtgcagcaaatgccatcgtttgagcgctattggaatgtgtttacactaagtatgatcatctcaattgtgtgttgcaggcgttgt

SEQ ID NO: 56776 - DNA, 248 bp, Zea mays
ccgatttttcatggtagtcgtagctataacacaagtctcacgatgagtggtggcaacaatggcatggacaagccattttccctgccatcatatggcgcacatgtgcacaactgggttgagtggctcaaccactaatgatgccagacaactggtggggcctcagcaggataacaaggccatcatgaagagcagtcctaaccacaatggtgtatcattgttgaacctctactggaaccagcacaacaact

SEQ ID NO: 56777 - DNA, 252 bp, Zea mays
tctcctcgcatttcttcccatccgatccccccttcgtaaccaaaaccccaactcgtcccgcatcgatggcgcccaaggccgagaagaaacccgcggcgaagaagccggcggatgatgagcccgcggccgagaaggcgcccgccgggaagaagctcgaagcgtagtagcgggtctccgctggcaagtccgctgccaatgaaggcggctatggcaatatgggcgagatcaagggcaagtcgatcgtggagacct

SEQ ID NO: 56778 - DNA, 231 bp, Zea mays
gctttggtggtccatgggatgttgctgctggtgctgtaattcttcaggaagccggtggccttgtttttgacccaagcggcggagagtttgatttgatgtcgcgaagaatggcaggatcaaacagcttgctgaaggataagttcgtcaaggaactgggggatactaattgacacaaatgttagtattattcgtggaacagattaagacaataaggttgccccaccgcatggt

SEQ ID NO: 56779 - DNA, 213 bp, Zea mays
gagggccaagagaactctgtcttccactgcccagaccacatatgagattgactcgctgtacgagggcattgacttctactccaccatcacccgtgccaggtttgaggagctcaacatggacctgttcaggaagtgcatggagcctgttgagaaatgcctgagggatgccaagatggacaagagcagcgtccatgatgttgtccttgttggtgg

SEQ ID NO: 56780 - DNA, 297 bp, Zea mays
ggcggctcaggcaccccagtggacgacttagacaggtgctgccagactcatgaccactgctacaatcaggccaagaagctggaaagctgtaaattcctcatcgacaacccctacaccaacacgtactcatacaagtgctccgggaacgtgatcacctgcagcgaaaaaaacaacgactgtgagagcttcatctgcaactgtgaccggcaggccgccatctgtttctccaaggtcccctacaacaaggaatacaaagaccttgacaccaagatacactgttaggctgtcaccccactt

SEQ ID NO: 56781 - DNA, 297 bp, Zea mays
tcttgctccgcaaaccagcgcaacccttccctgacagcggcggcgacatggtgctcgaggcgacgatgatctgcatagacaactcggagtggatgcggaacggcgactacgccccgtcgcggttccaggcgcaggccgatgccgtcaacctcatatgcggtgccaagacccagtcgaacccggagaacacagtaggcgtgatgacgatggccgggaagggcgtccgcgtgcttgtcactcccaccagcgacctcgggaagattctcgcctgtatgcacgggttggaagttggtgctg

SEQ ID NO: 56782 - DNA, 296 bp, Zea mays
gaggcatcttgctgggtgctgtccatggtatcgtggaggctctgtttaggaggtacacagaacaaggaatggatgaagagtcggcctacaaaaacactgtcgagggcataactgggatcatctcgaaaaccatctcaaagaaagggatgcttgaagtgtacaactctttgagcgaggaaggcaaaaaggagttcaacaaggcttatagcgcatcgttttacccatgcatggatatactctacgaatgctatgaagatgtggcctctggaagtgaaatccggagcgtggtgttggct

SEQ ID NO: 56783 - DNA, 290 bp, Zea mays
ctcgagcgcttcacgtttgctactactttggaacaggagtacaagagtgatatctttggagagcgaggcatcttgctgggtgctgtccatggtatcgtggaggctctgtttaggaggtacacagaacaaggaatggatgaagagtcggcctacaaaaacactgtcgagggcataactgggatcatctcgaaaaccatctcaaagaaagggatgcttgaagtgtacaactctttgagcgaggaaggcaaaaaggagttcaacaaggcttatagcgcatcgttttacccatg

SEQ ID NO: 56784 - DNA, 288 bp, Zea mays
gtaacattttccttcagccatgggcaaggagaagactcatatcaacattgtggtcattggacatgtcgactctggcaagtcgaccaccactggccacctgatctacaagctcggcggtattgacaagcgtgtgattgagaggttcgagaaagaggccgcggagatgaacaagcggtcattcaagtatgccagggtgcttgacaagctcaaggccgagcgtgagagaggtatcacaattgatattgctttgtggaagttcgagaccaccaagtactatgcactgtcatt

SEQ ID NO: 56785 - DNA, 294 bp, Zea mays
gatatgtgctgactgtggtgcacctgatcccaaatgggcatctgctaatattggagtgtttctttgcttaaaatgtggagatgttcatagggcacttggacctgacatctcaaaggttttatctgtaactttggatgattggtctgatagtgatatcgactccatggttgaggttggtggaaactcatatgcaaattcaatttatgaggcatttcttccaaaagatcacccaaaacccaaaccagattcaacgatggaatataggacaaaatttataagagctaagtatgagac

SEQ ID NO: 56786 - DNA, 291 bp, Zea mays
ggcatgggtaccggtgtacgttctatggtctttcacccagatggtaaaacccttttctgtggattagaccaaagcttaaaggtattctcttgggaaccagtaaggtgccatgatgttgttgacatgggttggagtaatttggctgaccttagtatttatgaagggaaactcttgggatgctcctaccatgagtgccgtgttggtctatgggctgctgatatatcactcattggaccctgatgctcttggtgtattgcccaaagcgaatttttttgctgagcttgtgcagtc

SEQ ID NO: 56787 - DNA, 288 bp, Zea mays
tccaccaaatgtttgttgtgaacgctgggagtggatttaagtggatctggaacagcgtgaagggcttccttgacccaaagacttcatccaagattcatgtgcttggttcgaactaccagagcaggcttcttgaagtaatggattcgagtgagctgccagaattccttggcggttcatgcacatgtagtgacaagggtggttgtcttggatcgaacaaagggccgtggaatgatccttatatattgaagctgatccacaatttggaagctggatgcgtgagggaaatca

SEQ ID NO: 56788 - DNA, 284 bp, Zea mays
gatctcctctatggttcttatcaagatgcgtgagattgctgaagcttaccttggtagcacgatcaagaatgctgtggtcacagtccctgcctacttcaatgactcacagaggcaggccacaaaggatgctggggtgattgctggccttaatgtgctgcgtatcatcaacgagccaacagctgcagctatcgcctatggtcttgacaagaaggctaccagtgtcggtgagaagaatgtcctcatctttgatcttggaggtggtacctttgatgtctccctcctca

SEQ ID NO: 56789 - DNA, 162 bp, Zea mays
cgacatgtcggggatgaaggtgctgtcccacggcttcgatgcagacctcgggggcagggatttcgacgaggtgctgttcgagcatttcgccgaggagttcagggacaggtataggattgatgtcgtgacaaatgtgaaggccagtatgaggttgagggcagc

SEQ ID NO: 56790 - DNA, 286 bp, Zea mays
ggcggttcctcctccagactctagagaaagaaggcgcatcgtgagcgagagagagagaggcaatggcgtcggcgacgttcctggaggtgctcctcgccatcttcctcccgccggtcggcgtcttccttcgctacggctgcggcgtggagttctggatcgacctcttgctgaccgtgctggggtacattccggggatcatctacgccgtgtacgtgctggtggcttaagttgtgcgaagaggaggacatgaagactctcgatctgtccagaagtacgtagtgatgtg

SEQ ID NO: 56791 - DNA, 198 bp, Zea mays
atggctgctagaatctccgccttccttaagaatgcctgggcaaaggagccggtgctggtggtgtccttcactgtctggggcctcgctataattatgcccatgattagcccctacacccagtatgctagcatgatcatcaaggcgacaccctacaactacccagtgcctgtgagagataatgggaacatgcctgatgtg

SEQ ID NO: 56792 - DNA, 290 bp, Zea mays
gcaaaaacgcaaaatcaagaagacagaacgtgctcttaaagtcgctgaggaggaattgatgaggttgcagttagaagcaactgctaaatcaaaacagctgactgaggttcatggagcatggttaccaccttggttagcgacacactatgctcgttacatggaggttgtctcaggtcactggaattatcatggaaaacctgctgtgcagaatgttttgcataaggcatcagaaaaatcagcacatgcaaagaaatgggctgaaccacatattgagactgctaagatgaaat

SEQ ID NO: 56793 - DNA, 291 bp, Zea mays
ctcgagcgcgcggtctgctcgttcgatctgtgcagcagatctgaggtcccgggcgagcgtgaagcagcttcaatcgtcggcatggcgctcgtagtgcatagtggggctggaaacaagaatgccttcaaagcacttattgctgcagaatacagtgggatcaaggttgagttgaccaaggattttgagattcgtgtctccaacaagacccctgagtttcttaagatgaacccccttgggaaggttcctgttctggagactcctgatggccctgtttttgagagtaatgctatc

SEQ ID NO: 56794 - DNA, 168 bp, Zea mays
ggtcaatccatggaatatagaggcaacagcagaggcgatgaatgaggccatttcaatgccagaacaggaaaaacagttgaggcatgagaaacattaccgttatgtcagcagccatgatgttgcttattggtcaaagagcttcatcctagacttggaaagggcttgtag

SEQ ID NO: 56795 - DNA, 283 bp, Zea mays
ctccaatccagaaaccctagccgccgtagcttgcgcgtcttgctctgtcttccccaatccagaaacgaggaacctagccgccatctctcctcctctcccgagagatctcctctgccgatggatgttcgtccgagccaattggtttgtgatgctgtagaagcggcgcgtgctgctgccgtcgctgcttcggaggcgagatgcgcggcagttattgcagagaaggaggccaaggctgcggtggagttcgccgccgttgccgtcaacaaggtcgaagcagtaaagg

SEQ ID NO: 56796 - DNA, 197 bp, Zea mays
attggtcaatctcatgaaagttgagaaggttccggattctacctatgatatgattggaggccttgaccagcaaattaaagagatcacagaggtcattgagcttccaatcaaacatccggaactgtttgagagccttggaattgcgcaaccaaagggtgtccttctttatggacctccgggcacccgaaagacattgt

SEQ ID NO: 56797 - DNA, 286 bp, Zea mays
ctagtcccctgctccattctcagccgccgccaatcccttcccgtgctccgcaaccgctgagtgagaagaagagatggccggcaagggcgatggcccggctatcggcatcgatctcggcacgacgtactcttgcgtcggcgtgtggcagcacgaccgcgtcgagatcattgccaaccacaagggtaaccgcaccacgccctcgtacgtcgccttcaccgactccgagcgcctcatcggagatgcggccaagaaccaggtcgccatgaaccccatcaacaccgtcttt

SEQ ID NO: 56798 - DNA, 202 bp, Zea mays
ctgctctcgtccctagaaataaagcagctcctccgcggggcgacgaactactacccatcgccaaaaccctagccccgatccggtcgcggagcactacttcttggcatggcgggcacccctagccaggcaagcctcctgctccagaagcagctcaaggatcttgcgaagaaccccgtggatgggttctccgcaggtcttgtag

SEQ ID NO: 56799 - DNA, 210 bp, Zea mays
cagctggcgacacccatcttgggggtgaggactttgacaacaggatggtcaaccactttgtccaggagttcaagaggaagaacaagaaggatatcactggcaacccgagggctctccggaggctgaggacctcttgtgagagggccaagagaactctgtcttccactgcccagaccaccattgagattgactcgctgtacgagggcattg

SEQ ID NO: 56800 - DNA, 175 bp, Zea mays
cccagaccgtgaacgcgcggcaacagacggagcgcgacccctccaagccggcgttcaaggacggcgccgctcgccagttgtatctggttgtgaagaacgaggggacggagcgcctgtatggcgcgcttatgccctctctcgtcggcaccgctgcctcccagggtgtctactacta

SEQ ID NO: 56801 - DNA, 168 bp, Zea mays
ctatcaccctcgaggtggagtcttcagacaccatcgacaatgtcaaggccaagatccaggacaaggacggcatcccaccggaccagcagcgtttgatcttcgctggcaagcagctggaggatggccgcacccttgcggattacaacatccagaaggagagcaccctcc

SEQ ID NO: 56802 - DNA, 200 bp, Zea mays
ccacaccacacctcctcgcttccactccgctcgtctgacatctcgtcccgtcctttcgtttcgaagcctcgcgagccccgacgatggccaccgccgcggtgtcggtcgacgagaagctcgacaagcttcgcgccgaggtcgccaagctcgaccagatcagcgagaacgagaagtccgggttcatcagcctcgtgtcacgc

SEQ ID NO: 56803 - DNA, 200 bp, Zea mays
atcaaccagcttggcattgacaaggctgttccaaagaaaatattggatcttatgaatgttgagaacatcacaagggagaacgttgcaagtcatctgcagaagtatcggctgtatctgaaaagactcagcgcagatgcaagcaggcaggctaacctaactgctgcatttggacgaagaaaccctgcttatgtgaacatggg

SEQ ID NO: 56804 - DNA, 202 bp, Zea mays
acctcgggtcaaaccctaagcagggagttgatttatccgctgcagccatgagtaagttgcagtctgagtctgtcaaggatgccatctcccagattgttggggatgccaaggagaagaataggaagttcactgagactgtggaacttcagattggtctgaagaatgctgatccacagaaggacaagcgtttcagtggctctgt

SEQ ID NO: 56805 - DNA, 163 bp, Zea mays
caaggaccagggcagctgcgggagttgctgggcttcctcaacaatagcggctgtggaaggcatcaaccagattgttactggcgacatgatctccttgtctgagcaggagcttgttgactgtgacacttcatacaaccaggggtgcaatggaggtctgatggac

SEQ ID NO: 56806 - DNA, 175 bp, Zea mays
catactttaaagggctagccaaggttgagagagagccatcttgtcaaccaatcacaaagatggagtttgagtttgaaaggagaagagtgacaaaagaagacattagggagctgatattccgtgagatattggaatatcatccacaactgctcaaagactatatcaatggcacgga

SEQ ID NO: 56807 - DNA, 211 bp, Zea mays
caacgcagagctctgtgctcccggcctctgtcttctgccgtcccggccgtttaatttatagtctctactgtgtgttcgtcccatgtgtttagcagcagcagcaggtgtattgtgcgggtatgtaatggtattgcaactatattgggtgtaaaaccataataaatgtggaaaaaatgcaaggaaaaattaatgaaaaaagggggggccgccg

SEQ ID NO: 56808 - DNA, 136 bp, Zea mays
cttcgccaagcccttggtgagaggattaggcccgttctcacggtcaacaagatggacaggtgcttccttgagcttcaggttgagggtgaggaagcgtatcagactttctcccgtggtcattgataatgccaatgtc

SEQ ID NO: 56809 - DNA, 277 bp, Zea mays
aagcactggaagttatagggttggtgatgttatgaccaaaagggaagagctccatgttgtgaaaccaacaacttcagttgatgacgcccttgagatgctggtgaagcataggatctctggctttcctgttattgatgatgactggaatttggttggcgttgtgtcagattatgatttattggcactggatacaatatcaggagctggaccggctgaagcagacatatttcctgaggtggatagcacttggaagacatttcatgagatacagaagctt

SEQ ID NO: 56810 - DNA, 314 bp, Zea mays
agttgccaaagaattccctcccctagccgccgccgccgccgctcgtctccctgagaggtgccgggaccgaggaactggccgagtactaggtagagaatcggtttttcttgtctcagcccggggtctgctgcgtctggtggtggtgaaggggagaaattcgtgagatctgttccggatcaggcgtgcgagctcgggaatcaggggtttcacacatagcttcgtcgatttgaatttgatgtactaatggagtctaagggtggcaaaaagtctagcagtagtcgttctatgatgtatgaagctccccttggctacag

SEQ ID NO: 56811 - DNA, 313 bp, Zea mays
agcatgatgggtgctcattccatggctcgtataaggagctttgcaagcatgtgaaatcgaagcaccctacagcaaaacctcgtgaagttgatcctgctactgcagatgagtggaaaaggtttgaatgtgagagagagcggcaggatgccatcagcactatcagggacatgaacccaggatctgtgatcatgggggattatgtccttgagttgaatggtggtggcaacaaccatttgctctcagatggagataactttgacttaggggaaaggctcaacttcttcacatccttagatcgtactttgaatgagag

SEQ ID NO: 56812 - DNA, 306 bp, Zea mays
agctcgaagatattgttccttcgtcacacaactgtgatattccgcatgtgaaccgtaagaagtatcagctgattgatatatcagaggatggatttgtgagccttcttacttcagatggcaacactaaggatgatcttagactcccaactgatgagactcttgtggcccagatcaaggaagggtttgaaagtggcaaggatcttgttgtgactgtccagtctgctatgggggaggagcagatctgcgcgctgaaggatgttggccccaagtaacttccctgccttggaatactgtatctcaaaacct

SEQ ID NO: 56813 - DNA, 304 bp, Zea mays
aaatgccttgacgccaaatgccacaggattcagggactcccctgatggttaatttcgagttggggccaggtgttctacaccccgttcttgagacagatttggacatggcttggcttggtacctgcgacaaggaagaatttctactgctaccttggagttggttatagttgtatcgtagtccctggtggtgtacgggaaatgcttcatatgaacaatgattcagaggttgcttttcttaaatcaagagaagggtttgtcaagatagctatacagtctggatgtcctttagtcccagttttctgct

SEQ ID NO: 56814 - DNA, 222 bp, Zea mays
agcaaaagcagtggcacatgaggcaggggctaactttattcacatcaaggggcctgagctactgaacaagtatgttggggagagtgaatcggaagttaggaaaatattcactcgtgcgcggactaactccccatgcatcctgttttttgatgaggttgatgctttgatagcaaaaagagggaaagagggaggatgaggttgttgaacgtctcttaaatcagt

SEQ ID NO: 56815 - DNA, 306 bp, Zea mays
gccaagcgtctcattggcaggaggtttagtgatgcctctgtccagagtgatattaagctgtggcccttcaaggtcattcctgggcccggtgagaagccaatgatagttgttcagcacaagggggaggagaaacagtttgcagccgaagcgatctcctccatggttctcatcaagatgcgtgagatcgctgaagcttaccttggcagcacgatcaagaatgctgttgtcacggtccctgcctacttcaacgactcacagaggcaggccacgaaggatgctggggtgattgctggcctcaatgtgctg

SEQ ID NO: 56816 - DNA, 145 bp, Zea mays
cgacacgagtaattgttgagaagcccttcggccgagactcagaatcctctgctgcattaacaagcggtctgaagcagtaccttgtagaggaccaaattttcaggattgaccattatttcggataagaactggtggagaatttgtc

SEQ ID NO: 56817 - DNA, 306 bp, Zea mays
actttttcttattaagaacttattcacttccacttttacaggaaaacggacatgatgagattagtatcaaggccatgggacgggccataaataagacagttatggttgttgaattgatcaagagaagggttggaggtcttcatcagaacactgctactgaatctgttgatatcacagacacatgggaacctttggaagaaggccttctcccactagagacaactcgccatgtgtcgatgatcactgtgacactgtcaaagaaccctctggatacatcatctccaggataccagccacctatcccag

SEQ ID NO: 56818 - DNA, 231 bp, Zea mays
agccctttcaatcctcgtgagaagattgacaaaaaagtggacttccaatcaattcttgatttgaaaccatttgttagtgactctaaaggaacagattttaaatacagctcttatggtgtcctagtccatacaggctggagcactcaatcaggccattactattgctacgttcgtacatccagcgggatgtggcacaatcttgatgataaagaggtgcgccaagttcgtgaa

SEQ ID NO: 56819 - DNA, 253 bp, Zea mays
actgaggtacttttacgaaaccctagtacctctctacgctgcactctctgcttgtagggctttgtttatagactatagatgatgatacatatctctccttttccttttttttacagatgaatgtctattcgagcatattgttcatagctctatttgtctccatagtagctaccagcatcctagagatgcagtggggaggagtcggaatcgacgattggtggagaaacgagcagttctgggtcattggcggtgt

SEQ ID NO: 56820 - DNA, 104 bp, Zea mays
ctggtggagagctctttgagaggatttgcagtgctggaagattcagcgaagatgaggctcgatatatcttccagcagctcatctcaggagttagctactgtcat

SEQ ID NO: 56821 - DNA, 308 bp, Zea mays
agcagaagaggaagcaccaaggccaaagccaaagaatcctcttgacttgctgccaccaagcaagatggtccttgatgactggaagaggctatactcaaacacaaagactaacttccgggaggttgccatcaaaggtttctgggacatgtacgacccagagggctactctttgtggttctgtgactacaagtacaatgatgagaacaccgtctcctttgtgaccctgaacaaggttggtggattcctgcagcggatggacctgtgccgcaagtacgcctttgggaagatgctcgtgataggctctgagc

SEQ ID NO: 56822 - DNA, 308 bp, Zea mays
atagagtttgtcgagtcgaccaacgctcgcttctcggaggcagccatcgcggcctgctctaggatgtgtgccatcaacctgttccgggcgttccctccgagttgcagatctggctcatcaggtggtggtgagggcgacgaggaagagccaatgttcgaccccgcgtggtgccacctgcagcttgtttatgagctgctgctgaaatttatcggatcctcgtccttggacgcgaaggtagggaagaagcactttgatcactcattcatcgtgaagctccttaatcttcttgactccgaggatccaagaga

SEQ ID NO: 56823 - DNA, 305 bp, Zea mays
accggtcagattgcaggtgttgcgatggattgcggtccccccatcccccactagcataatagctagccaagtactgtactacggattgctgatttccctgccccgtcatgataccttgcagcatggagtactggcctgacccactgcgggggatagaggaagcatacagggtcttgaggctcgttgggctagctagcttacgtgattggcccaatgtacccagccttctggctatcccgcttcttcgccgacatgtgggcgctctttcccaaggaggaagagtacattgagtcgttgaagaaggc

SEQ ID NO: 56824 - DNA, 231 bp, Zea mays
cggaaacttcagctagagctagcaaatggcacaggacatgaagaccccactttcagaagcatcgccaaggatatgcatgagaggtttgacaagtactggaaagattgcagcctcgtgttggccgtcgccgttgtcatggatccacgtttcaagatgaagcttgttgagttcagttacacaaaaatttatggggctgaagcagcaaagcatgttaaggtggttaatgatgct

SEQ ID NO: 56825 - DNA, 209 bp, Zea mays
caagatccctgtttgttggccacacagattacaagtacctgcgctaccaagtgattgacacaccaggtatacttgaccggccttttgaagataggaacatcatagatatgtgtagcatcactgcgctggcacacttgagggctgcggtgttgttcgtgctagacatttctggatcttgtgggtacagtatcgctcagcaagctgcactc

SEQ ID NO: 56826 - DNA, 235 bp, Zea mays
cctaccccacacagaagcggcggcggcggacaaacgcaggcgaaggcgagggtgtgagggaaggagcaccagccatggtgcacgtcaacttctaccgcaaatatggtaagacgttcaagaaaccaatgcgtccttatgagaaggagcgtcttgatgctgaactgaagctggtcggtgagtatgggctgaggtgcaagcgtgagctttggagggtccagtatgcactgagcaggat

SEQ ID NO: 56827 - DNA, 290 bp, Zea mays
acccaatctggaaagatgaaaagacgcatcctagtgatcacagactttgctctataccttgttgaccccgaggccaacatattgaagaggaggatagcacttgcagctgtggataagctatgcattagcaacctcagtgataactactttgcgatcattgtgccgactgagtacgattgtttaatggccagcactagaaagaaggaaattgttgatgtcattgctaaggctatcaagagcacatctgagtatgaacctgaggtggcttcctctaacaggtttgagtatca

SEQ ID NO: 56828 - DNA, 321 bp, Zea mays
gtgcacaagaccttggtccaatgagcttgggattgtcccacagcttgtctaggtataagctgaagttcagccctgagaaggttgatacaatgatcattcaagccattggattattggatgatcttgacaaggagcttaacacttatgccatgagagttcgtgaatggtatgctggcactttccagagctcaccaaaatagttacagataatatacagtatgccaaagttgtgaagatgatgggcaacagagttaatgcagtcaaccttgacttctctgagatattgtcagatgaagagctagaaacacagctaaaggaggc

SEQ ID NO: 56829 - DNA, 312 bp, Zea mays
ctgcttaccaagaagctcagtcaaagggatctgcatgccctatattcttgttcttctcagtgaatacaagtgggcagtttgtacgtgttgctgaaatgactggcgccgttgattttgagaaaaccctagagtattggcaacaggacaagtggaacggcaccttctctgtcggtggcacattgtgaaggacgtgcccaacaatattctcaagcacatcatcctggagaacaatgagaacaagcctgtcacaaacagccgcgacactcaggagatacgcctcgaacaaggccttcagatgctcaagatattcaa

SEQ ID NO: 56830 - DNA, 315 bp, Zea mays
agcagcgtttgatcttcgctggcaagcagctggaggatggccgcacccttgcggattacaacatccagaaggagagcaccctccacctggtgctccgtctcaggggtggtatgcagatctttgtgaagacactcactggcaagacaatcacccttgaggtggagtcttcgataccattgacaatgtcaaggccaagatccaggacaaggagggcatcccacccgaccagcagcgcctcatcttcgccggcaagcagctggaggatggccgcaccctggcggattacaacatccagaaggagagcactctccacct

SEQ ID NO: 56831 - DNA, 313 bp, Zea mays
agagtacatcgagtggttcaagaaggctgggtttagggatgtcaagctgaagaggattggaccgaagtggtaccgcggtgtccgaaggcatggcctcatcatgggctgctccgtcacaggcgtcaagagagagcgcggtgactctcccttggagcttggtcccaaggggaggatgtcagcaagccagtgaatccgatcaccttcctcttccgcttcctcgtaggaacgatatgtgctgcctactatgttctggtgcctatttacatgtggataaaggaccagatcgtgccaaaaggcatgccaatctgagtga

SEQ ID NO: 56832 - DNA, 313 bp, Zea mays
gtgtggccgtcgtctcccgttcggaacgccaagcccctcctccggcgaaatggcccccaagcgatgtagcacggcgccggtgccggccaagaagaagacggataaagtgacgaaccctctattcgagaagaggccgaagcagttcggcatcggcggcgcgttgccgccaagaaggacctgcaccggttcgtcaagtggcccaaggtcgtgcgtatccagcggcagcgccgcatcctcaagcagcgcctcaaggtaccaccggcgctcaaccagttcacccgcaccctcgacaagaacctcgctacgaacctgt

SEQ ID NO: 56833 - DNA, 311 bp, Zea mays
ctaagactggttttcttggttgtattggtacgaaggtggatgccattgaatactacacatcagaaattgagaggatagaacatgaagaagcagaagagcgtgaaaaaattgtaaaggatcccaaatccattgtaccagcagcatttgtttccttccgatcacgttgggtgcagcagtttgtgctcagacacagcaaaccagtaacccaactgtttggttgacagaatgggctccagaacctcgtgatgtgtactgggataatttgtctattccatttgtctcccttacagttcgaaggctgataattgcag

SEQ ID NO: 56834 - DNA, 316 bp, Zea mays
tgctcgctcatgcacaccgctgtggatcttgtgaacgagactaagcttgacagcgagattaagtcttggcttgcgtgtactgcccagaaggttgttgaggttgatgctcgtgctaaggcattggctggtcaaaaggatgaggcttacttcgcagcaaatgctgctgtcaggcctcgaggaaatcctcaccccgtgtgaccaatgaagaagtccagaaggctgctgctgctctcaagggctctgaccaccgccgtgggaccaacgttagtgctagattggatgcccagcaggagaagcttaacctctccatccttcc

SEQ ID NO: 56835 - DNA, 310 bp, Zea mays
ctatatggacctcctggtactggcaagactctaatggccagacaaattggaaagttactgaatgggaaagatcccaagattgtgaatggacctgaagttctgagcaagtttgttggagaaactgagaagaatgtgagagatattgtttgctgatgctgaaaatggcagagaacacgaggtgatcagagtgacctccatatgatcatattcgatgaaattgatgccatctgcaagtctagaggatctacccgtgatagtacaggtgtacatgatagcattgtaaaccagctgcttacaacgatagatggtg

SEQ ID NO: 56836 - DNA, 304 bp, Zea mays
gcaaaagcagtggcacatgaggcaggggctaactttattcacatcaaggggcctgagctactgaacaagtatgttggggagagtgaatcggaagttaggaaaatattcactcgtgcgcggactaactccccatgcatcctgttttttgatgaggttgatctttgacaacaaaaagagggaaagagggaggatgggttgttgaacgtctcttaaatcagttacttatagaacttgatggtgctgatcaaagacaaggtgtctatgtgataggagctacaaacaggattgatgtgatagatgatgc

SEQ ID NO: 56837 - DNA, 305 bp, Zea mays
gggctgaggaacaagctaggcatgaggcattgctcagaaagagatccaaagtgttgcagaggagtctgcctaggtcaccggctgtttcagtagagattatccggcaatctcttattagaagtggagaaagcagaagcagaagcacctttatgcctcctaatcacttgaacaagctgatgaactaataaatgaggaactccttaggcttcttgagcatgataatgcaaaatatcctcttgatgaaaaaactcaaaaagagaaaaagaaaggaagcaagcgtcagcaaaatggaggacctcttgtcc

SEQ ID NO: 56838 - DNA, 300 bp, Zea mays
atacaatgcacaatttcagggaagattctatggtcgttgacgttggagaaccagccgactgggtgaagatcaatgtgcggcagactgtaagttcagtttgtattgttttgttagtcatgttgtgcagattattatgttttgattatagcctgtaccatgaatggtttttttacaaggtagctttgctagggaacttccactgagatttgaagttacactatttggttattgctttcctgcagaaagattgctttgaagtttatgcactagttccgggacttctaagagaggaggtgagga

SEQ ID NO: 56839 - DNA, 306 bp, Zea mays
actgcccagaccaccattgagatggactcgctgtacgagggcattgacttctactccaccatcacccgtgccaggtttgaggagctcaacatggacctgttcaggaagtgcatggagcctgttgagaaatgcctgagggatgccaagatggacaagagcgcgtccatgatgttgtccttgttggtggctccactaggatccccagggtgcagcagctgctccaggacttcttcaacggcaaggagctgtgcaagaacatcaatcctgatgaggccgttgcctatggtgctgctgtccaggctgcta

SEQ ID NO: 56840 - DNA, 300 bp, Zea mays
ctaactccacacatcaccgatttacctggggtctcaggtcaatggagcgtcatgcagtggacttctacatctccgatttccagtctgggctgagagcgttggtcaggacagggtccggtgcacgagtatccccatatgtggacgagtctgttgttatgacataaacccagacaacaaggacatgtcgcctgagttcctgaggtggctccgcggaaggaatctctcgagcgatgaccggattatgcgcctcaaagaagggtatatcaaggagggcagcaccgtgagcgtgatgggtgttgt

SEQ ID NO: 56841 - DNA, 302 bp, Zea mays
tgtggacgcgattatcaacagtggaccacgtgaggatgccacccgtattggttccgctggtgttgtgagaaggcaggctgtggatatctcacccctgagaagggtgaaccaggccatctacctcctgaccactggtgccacggagagcgccttcaggacatcaaaaccattgctgagtgccttgcagatgagttgatcaacgctgccaagggctcttccaacagctacgccatcaagaagaaggacgagattgagcgtgttgccaaggccaaccgttgagtggagcttgtatcctggtgcac

SEQ ID NO: 56842 - DNA, 298 bp, Zea mays
gtggacgcgattatcaacagtggaccacgtgaggatgccacccgtattggttccgcttttgttgtgagaaggcaggctgtggatatctcacccctgagaagggtgaaccaggccatctacctcctgaccactggtgccagggagagcgccttcaggacatcaaaaccattgctgagtgccttgcagatgagttgatcaacgctgccaagggctcttccaacagctacgccatcaagaagaaggacgagattgagcgtgttgccaaggccaaccgttgagtggagcttgtatcctggtg

SEQ ID NO: 56843 - DNA, 301 bp, Zea mays
acagtttcttttcgatgcaccggatagcctctcgctcgggtttgcttggtaggagatgttacagctctgccatgaaagggggcacttcgatcgccggagtaggcgacatcattgctgtcgcatcagggaaaggaggcgtaggcaaatccaccactcagttaacattgctgtagcacttgccaaggagtttaagcttcaggttggtttgctagatgctgacatatatgggccatccattcctacaatgatgaacctccatgctaagcctgaagtaaatgaagacatgaagatgattccagtt

SEQ ID NO: 56844 - DNA, 300 bp, Zea mays
ctcggaacgcacacaccgcccggtctccgatctccgatccccggtcccctcgtcgatccaagagtgcagatcttcgtcaagactctcactggaaagactatcaccctcgaggtggagtcctctgacaccattgacaacgtcaaggccaagatccaggcaaggaaggcattcccccggaccagcagcggctcatcttcgctggcaagcagctcgaggacgggcgcacacttgccgactacaacatccagaaggagagcaccctccacctggtgctccgcctcaggggtggcatgcagatct

SEQ ID NO: 56845 - DNA, 297 bp, Zea mays
gacaagaatgatccccacttatgtgacttcattgagacgcattacctgaatgatcaggtgaaattcattaaagagctgagtgaccacgtgaccaacttacgcaagatgggagcccctgaatctggcatggcagaatatctctttgacaagcaaacctgccacacggtgatgagagctaagctgacgtccccaaggccatgtgactttactggtcaatgaggcaatgcatgcatgtcaggctgcctttatctaagctataagttgcaccacaacatctgcttaaaagttctttaattt

SEQ ID NO: 56846 - DNA, 296 bp, Zea mays
cgtgttacgattgatccaactagcctttttgatatacagattaagcgcatacatgagtacaagagacagctcctaaacatattgggagctgtttacagatacaaaaaattaaagggaatgagtgcagaagagaagcagaaggtcacaccgcgcactgtcatgataggagggaaagcgtttgcaacatacactaatgccacaagaatagtgaaattggtgaatgatgttggtgctgttgtgaacaatgatcccgaagttaacaaatatctgaaggttgtctttatcccaaattacaa

SEQ ID NO: 56847 - DNA, 299 bp, Zea mays
cacgagaaggtgcaggacctgcttctgcttgacgtcactcctctctctctgggtctggagactgccggaggagtgatgaccgtccttatcccgaggaacaccaccatccccaccaagaaggagcaggtgttctccacctactcggacaaccagcctggtgtgttgattcaggtgtacgagggcgagaggacccggacccgcgacaacaacctgcttgggaagttcgagctctccggcatcccaccggctccccgtggtgtcccccagatcacggtctgcttcgacatcgacgccaacgg

SEQ ID NO: 56848 - DNA, 291 bp, Zea mays
cacagcccaacaaaggagcgcggcggcccctccttccttcctcccacttctctcgcgcggcgctcgcttacctcgcctcgcattccgttcgagcaggggagcggcagtgagaagggagggaattaaggcaagatgttcatcgagagcttccgcgtcgagagcccccacgtgcggtacggcccgacggagatcgagtcggagtaccggtacgacacgacggagctggtgcacgaggccaaggacggcgcctcccgctgggtcgtccgccccaagtccgtcaagtacaacttc

SEQ ID NO: 56849 - DNA, 291 bp, Zea mays
gcctgaggggaggaaagaaagtcctggtggtccatggcacttcgttggtctcatgccactttttgaccctccaagacatgacagtgctgaaacaattagaagggcactcaaccttggtgttaatgttaagatgatcacaggggatcagttggcaatcggaaaggaattaggacgtcgtctaggaatgggtacaaatatgtacccctcttctgctttattaggacagaacaaggatgagtctattgctgctttaccagttgatgatctcattgagaaagccgatggttttgc

SEQ ID NO: 56850 - DNA, 290 bp, Zea mays
gcttacagaaggctcctctagtggtaatgtctcaagagacttcaccaatagcatggatgggcagattatgcttgatgattctgaggatgatgatgatggggatgagaaggaatttgattctgctgccttggcggcccttctgaaagcggcaactggtggatcctcatatgggaatgtcacagttgcttcacaagatggttctagaatattcaccatggatcgacctgctggtcttggttcatcagccccttctctcaggccgactgcacctcgccaacctgccaggtcaa

SEQ ID NO: 56851 - DNA, 293 bp, Zea mays
cactttataagcttgtgtcagataagcacttgtggtcacaatgtcgccagaatggtctgaaaaacatccataaattttcatggcctgaacattgccagaactatttggcacgtgtagtcactctcaagcctagacatccccgctggcaaaagaatgatgttgcagctgaaatatctgaagcagattcacccgaggactctctgagggatattcatgacatatcacttaacttaaagctttccttggacagtgaaaaatcaggcagcaaagaagggaattcaaatgctttgaga

SEQ ID NO: 56852 - DNA, 280 bp, Zea mays
tcaggaagtgcatggagcctgttgagaaatgcctgagggatgccaagatggacaagagcagcgtccatgatgttgtccttgttggtggctccactaggatccccagggtgcagcagctgctccaggacttcttcaacggcaaggagctgtgcagaaacatcaatcctgatgaggccgttgcctatggtgctgctgtccaggctgctatcctcagtggtgagggcaacgagaaggtgcaggacctgcttctgcttgacgtcactcctctctctctgggtct

SEQ ID NO: 56853 - DNA, 289 bp, Zea mays
gaaaatctggcatcacactttctacaatgagctccgtgttgccccggaggagcaccctgtgttgcttactgaggctcctttgaacccaaaggccaacagggagaagatgacccagattatgttcgagactttcaatgttcctgccatgtacgttgcaattcaagcagtcctgtcactctatgctagtggccgtactactggtattgttctcgattctggtgatggtgtgagccatactgtgcccatttatgaaggatatgcccttcctcatgctattctacgtctggat

SEQ ID NO: 56854 - DNA, 290 bp, Zea mays
ccaaaatcgtcttagtggtcaagctctggagttcaagcaactcaacatccatgcatgggaagcttttgaaaaggggcaggatatccatatgcaagcagccccatctcaagcagaactgttgtataagagtttcaagatcaagaaagaaatgttgaagtctgaacctaaggataaaattatggagaagtatgggaatgctgcgtccgaagatgcaattcctcgggagctgctgcttgggcaaagtgaaaaagagattgagtatgaccgtactggtcgaataatcaaaggac

SEQ ID NO: 56855 - DNA, 291 bp, Zea mays
caaagttttgtctccaccctgctggggacactccttcctcatgccgcctgtttgatgccatagtcagtcattgtgttcctgtgatagtcagcagtcgaatcgagctcccttttgaagatgagattgattacagtgagttctcccttttcttctccgttgaagaggctctaagacctgattacttgctgaacgagctcagacaggtccccaaaaggaagtgggttgatatgtggttgaagcttaagaatgtctcccatcattatgaattccagtatccccccaggaagggcg

SEQ ID NO: 56856 - DNA, 285 bp, Zea mays
caaaccctagccgcctcctgcaagtttcagagctcaggaatctgcgccatggcgagtgagacggagaccttcgcatttcaggctgagatcaaccagctgctctcactcatcatcaacaccttctactccaacaaggagatcttcctccgcgagcttatctccaactcttccgatgcgctggacaagatcaggttcgagagtctcactgacaagagcaagctcgatgcgcacctgagcttttcatccaccttgtcccagacaaggccacgaacacgctctccatca

SEQ ID NO: 56857 - DNA, 281 bp, Zea mays
agctgtcgacacattcctcttcacctcggagtctgtgaacgagggacaccctgacaagctctgtgaccaggtctcagatgccgttcttgacgcttgccttgctgaggaccctgacagcaaggttgcttgtgagacctgcaccaagaccaacattgggatggtctttggtgagatcaccaccaaggccaatgttgactacgagaagattgtcagggagacctgccgcaacattggttttgtgtcaaacgatgttgggcttgacgccgaccactgcaaggtgc

SEQ ID NO: 56858 - DNA, 302 bp, Zea mays
cggagatgaacaagcggtcattcaagtatgcctgggtgcttgacaagctcaaggccgagcgtgagagaggtatcacaattgatattgctttgtggaagttcgagaccaccaagtactactgcactgtcattgatgcccctggacaccgtgacttcatcaagaatatgattactggcacttcccaagctgactgcgctgttcttatcattgactccactactggtggttttgaggctggtatctccaaggatggacagacccgcgagcatgctctccttgctttcacgcttggagtgaagcag

SEQ ID NO: 56859 - DNA, 293 bp, Zea mays
agtatatttgagggattaatgccagaagaccttaatatttatgtcacgactgcatccaatgcagaagaaagtagctggggtacatactgtccaggaatggaaccaccgcctccttctgagtacattacctgcctaggtgatctatatagtgtctcttggatggaagacagtgagactaacaatctgaaggaggaaacaataaaggaacaatatgaagtggtgaagaagcgtacttcagacttcaatagctatggtgcaggctctcacgtcatggaatatggtgacaagacctt

SEQ ID NO: 56860 - DNA, 283 bp, Zea mays
ctcgagcgcacacacacaaccagatctcccccaaatccacccgtcggcacctctgctatcaagatgcagatctttgtgaaaaccctgactggcaagactatcaccctcgaggtggagtcgtctgacaccattgacaacgttaaggccaagatccaggacaaggagggcatccccccagaccagcagcggctcatctttgctggcaaacagcttgaggacgggcgcacgcttgctgactacaacatccagaaggagagcacctccaccttgtgctccgtctcag

SEQ ID NO: 56861 - DNA, 281 bp, Zea mays
gttgttcagggtatgaatgcttctgaggcaaactctgatgtcaggcttgcagctacacgggcattgtataatgctttgggctttgctcaggttaatttctcgaatgacatggagcgtgactatatcatgagagtagtttgtgaagcgacacagtctccagatgtgaagataaggcaggctgcttttgagtgtttggtggctatctcgtctacttattatgataagctggcaacatacatgcgggatatatttaatataactgcagaagctgtgaggagggc

SEQ ID NO: 56862 - DNA, 288 bp, Zea mays
gaagaaggcatgatcatcatgccctattggatgatgcaaaacatgctgcttcaagagggtgacactgtccatgtaaaaaatgcgactcttcccaagggcacatatgtgaaattgcaacctcacacaactgattttctggatatttcaaacccgaaagccatcttggaaaaaactttaagaaatttctcctgcttaaccacgggagacagcatcatggtagcctacaacaacaaacaatattatattgatattgttgaaacaaagcctgcttctgcggttagcattatt

SEQ ID NO: 56863 - DNA, 273 bp, Zea mays
gccgcccgtagtgtctacagctgcacggcgcggacggctgacttcatcgtcaagcctgaagatgccgccaagctaattaacatgtgggtcaaacaatccacaaaagatactgttacctcgctccttccggatggactaattgacaaatagtacaggacttgttattggcagcgcactgtattttaggggaagatggcttgacaggactgatacgaggagtgacgcggtacaaaaattctgctgtctggatcgaacttgtgttgacgttccttt

SEQ ID NO: 56864 - DNA, 281 bp, Zea mays
aacaagttttacgaggctttctccaagaacctcaagcttggcatccacgaggactcgcagaacaggaccaagatcgccgagcttctgagataccactccaccaagagtggtgatgagctgaccagcctcaaggactacgtgaccaggatgaaggagggacagaatgacatatactatatcactggtgagagcaagaaggcagtggagaactcccccttccttgagaagctgaagaagaggggctacgaggttctgtacatggttgatgccattgacgagta

SEQ ID NO: 56865 - DNA, 276 bp, Zea mays
agcggcctcaaggtcaaggagtacgagctgctcaggaggaacttcagcgacaccggctgcttcgggttcggcatccaggagcacatcgaccttggtatcaagtatgatccatcaacaggcatctatgggatggacttctacgtcgtgcttgactctgctggctatcgcgtcgcgcgccgcaggaggtgcaagtcccgtgttgggattcagcatagggtgaccaaggaggactccatgaagtggttccaggtcaagtatgaaggtgtcatcctcaac

SEQ ID NO: 56866 - DNA, 282 bp, Zea mays
ggaatggcgtacgcggcggggcggaagaagcgggtgggccgctacgacgtgggccggaccatcggccagggcaccttcgccaaggtcaagttcgccgtcgacgccgacaccggcgcgcccgtcgccatgaaggtgctcgacaaggagaccatcttcgcccaccgcatgctccaccagatcaaaagggaaatatcaatcatgaagatcgtaagacatcccaacatagtcaggcttaatgaggtgttggcagggaagacgaagatatacataatcttggaactt

SEQ ID NO: 56867 - DNA, 277 bp, Zea mays
ccgagaaatggaactgaaggctcaaattacggccattattgacaagagcaaggaaatgattaaagcagagactgaatctggtgatgtcggtcctcttgttactgaggcagatattcaacatattgtctcctcttggactggaattcctgtggagaaagtgtcgtctgatgagtctgaccgtctcctaaagatggaagagacactgcatacacgtatcattggccaggacgaggctgtcaaagctattagccgtgctatccgccgtgctcgtgttggc

SEQ ID NO: 56868 - DNA, 276 bp, Zea mays
tttgatactgtattgaaacctctgtggaagggtatcagatctcaccgtgggaaggtccttgctgccttcctaaaggccattggtttcatcatccctcttatggatgctctgtatgctagctactacacaaaggaggtgatgcaggtcctcattagggagttccagtctccagatgaagaaatgaagaaaattgttctcaaggtggtgaaacagtgtgtcagtacagagggtgtggaggctgattatatccggaatgacatccttccagatttcttc

SEQ ID NO: 56869 - DNA, 285 bp, Zea mays
ccttcccgtgctccgcaaccgctgagtgagaagaagagatggccggcaagggcgatggcccggctatcggcatcgatctcggcacgacgtactcttgcgtcggcgtgtggcagcacgaccgcgtcgagatcattgccaacgaccagggtaaccgcaccacgccctcgtacgtcgccttcaccgactccgagcgcctcatcggagatgcggccaagaaccaggtcgccatgaaccccatcaacaccgtctttgatgccaagcgtctcatcggcaggaggttcagtg

SEQ ID NO: 56870 - DNA, 284 bp, Zea mays
ggaaacctctcaaaccctagccgcctcctgcaagtttcagagctcaggaatctgcgccatggcgagtgagacggagaccttcgcatttcaggctgagatcaaccagctgctctcactcatcatcaacaccttctactccaacaaggagatcttcctccgcgagcttatctccaactcttccgatgcgctggacaagatcaggttcgagagtctcactgacaagagcaagctcgatgcgcagctgagcttttcatccaccttgtcccagacaaggccacgaacac

SEQ ID NO: 56871 - DNA, 274 bp, Zea mays
agacagtgaggaagttggtgaaccagttgccgactactttggtattactggacaagagaccacagttcttgcttacactggtaatgaagatgctaggaaattttttcttgatggtgaggtgtcacttgaagctataaaggacttcgctgaaggtttcttggaagacaagcttacaccattctacaaatcggaaccagtgcctgaatctaatgatggggatgtgaaaattgttgttgggaagaatctggatctaatagtttttgatgaaacaaaa

SEQ ID NO: 56872 - DNA, 275 bp, Zea mays
ctagtcctctgttacttctcccgccgccgccaatcccctcccgttctccgccaccgccaatcccctcccgtcctccgccacctctgctgagagcgagaagagatggccggcaagggtgatgggccggcaatcggcatcgatctcggcacgacctactctcgcgtcggtgtgtggcagcacgaccgtgtcgagatcatcgccaacgaccagggtaaccgcaccacaccctcgtacgtcgccttcaccgactccgagcgcctcatcggagatgcggc

SEQ ID NO: 56873 - DNA, 277 bp, Zea mays
agcagcagccgcattagcagatgaagctaggtccatggatcttgctgatcgttatttaaacagcgagtgtgttatgcagatgcttcaggctgaccaggttggccttgccgagaagactgctgtcttgtttacaaaagatggtgatcaacacaataatcttactgacatgcagtgcatgtggtatgagcttgcttctggggagagctattaccgtcaaggtgatcttggccgggccctaaaaaatttcttggcagttgaaaagcattacgctgatatg

SEQ ID NO: 56874 - DNA, 286 bp, Zea mays
cccgtgctccgcaaccgctgagtgagaagaagagatggccggcaagggcgatggcccggctatcggcatcgatctcggcacgacgtactcttgcgtcggcgtgtggcagcacgaccgcgtcgagatcattgccaacgaccagggtaaccgcaccacgccctcgtacgtcgccttcaccgactccgagcgcctcatcggagatgcggccaagaaccaggtcgccatgaaccccatcaacaccgtctttgatgccaagcgtctcatcggcaggaggttcagtgatgcg

SEQ ID NO: 56875 - DNA, 290 bp, Zea mays
ttcaaatctcaaaaggttaagaaaccagagagggttcttccaccaatgtcacctgagaaatctggaagtaaagcaactcagagaacatcattgctgtcttctaaagggttggataaattaaggttttctgttgtaggacaatcaaaagaagcagcaaatgagtggattgagaagctcaaacttgctggtgccaacttctatgccagggttgtcaaagatattgattgtttaattgcatgtggtgagctcgacaatgaaaatgctgaagtcaggaaagcaaggaggctgaa

SEQ ID NO: 56876 - DNA, 287 bp, Zea mays
aaataaacttgctgatctggttgaaaagaagaagaagatgcgaaattggcttgactattacctactaaagtatgagcgaaattcatcattgaggcctaccacaaagactggctttcttggatgttttggttccaaggtggatgctattgactattacaaatcagagatcgagaaaatcgggaaacaggaagctgaagagcgtaagaatgtcatgaaggatccaaaatcagttgtgccggcagcctttgtgtcatttcgctcccgatggggtgcagcagtctgtgctc

SEQ ID NO: 56877 - DNA, 282 bp, Zea mays
gaggctttctccaagaacctcaagcttggcatccacgaggactcgcagaacaggaccaagatcgccgagcttctgagataccactccaccaagagtggtgatgagctgaccagcctacaagactacgtgaccaggatgaaggagggacagaatgacatatactatatcactggtgagagcaagaaggcagtggagaactcccccttccttgagaagctgaagaagaggggctatgaggttctgtacatggttgatgccattgacgagtatgctgttggtcag

SEQ ID NO: 56878 - DNA, 273 bp, Zea mays
agttgctctactagagggcgggtatagagctgcctgcaatccgccgctgagaagggaggatcggaagcgacgatgaggtcgtttgctcctgtctttctgtcggcggtcgtggcctggctggagctggcgggcaccgcgcagggcggcaacttctaccaggacacagagatgacctggggcgatggccgcggcaaggtagtggacggcgggcgcgggctggacctgacgctggaccgcacgtccggctccgggttccagtccaagagcgagtac

SEQ ID NO: 56879 - DNA, 274 bp, Zea mays
ctgcctcccaccacaaaccctcctccagtgctcttctcttctagccgccgccgcaaccgcttgctagcgctctgcgctctcatcctcgcgtccgtggaaggtcgtctcgccatggcctccgagacggagacgttcgccttccaggcggagatcaaccagctgctatcgctcatcatcaacaccttctactccaacaaggagatcttccttagggagctcatttcaaactcctccgatgccttggataagatcaggttcgagagtttgacggaca

SEQ ID NO: 56880 - DNA, 273 bp, Zea mays
caccaaggcaaccagcgtcggtgagaagaatgtccgcatctttgatcttgtaggcggtaccttcgatgtctccctccttactatcgacgcaggtatctttagatgtcaatgccacagctggcgacacccatcttatgtgttatgacctggactacaggatggtctgtcactctgtccaggagttcaagaggatgagcaatcaggatatcattggcaacccgatggcacacctgaggctgacgacctcttgtgagatggtcaagagaactctgt

SEQ ID NO: 56881 - DNA, 277 bp, Zea mays
gagaatggttactaaagccacctttgttggagctggatttacaaggaaaccaccaaagtatgaacggttcattcggccaactggtctgcgtttcaccaaagctcatgtgactcaaccagagctgaagtgcactttcaaccttgacataatttctgtgaagaaaaacccaaatggtccaatgtacacttctcttggtgttatgacaaggggaacgatcattgaggtaaatgtcagtgagcttggtctggtaactcccgctggaaaagttgtttggggg

SEQ ID NO: 56882 - DNA, 267 bp, Zea mays
cttctctccttttgctcggaacgcacacaccgcccggtctccgatctccgatccccgatcccctcgtcgatccaagatgcagatcttcgtcaagactctcactggaaagactatcaccctcgaggtggagtcctctgacaccattgacaacgtcaaggccaagatccaggacaaggaaggcattcccccggaccagcagcggctcatcttcgctggcaagcagctcgaggacgggagaacacttgccgactacaacatccagaagga

SEQ ID NO: 56883 - DNA, 272 bp, Zea mays
ggagataagaccgcgggacatcacgatgatgccttcagcaccttcttcagccagactggtgctgggaagcacgttccccgtgcaatcttcgttgatctagaacccactgtgatcgatgaggtgcgcactggcacgtaccgccagctcttccaccctgagcagctcatcagtggcaaggaggatgccgctaacaatttcgcccgtggccactacacaattggcaaggagattgttgatctgtgccttgaccgtatccgcaagcttgctgacaa

SEQ ID NO: 56884 - DNA, 273 bp, Zea mays
ccgattgcgttcagaaaggagttggatggtataacagtggatgtctcccttcaatggtcctctgattcctactctgatacagtgctaggatacgcaaacagtatccgcactattgatggtggtactcatattgatggtctaaaggcttcattgacgctaaccattaataaccttgcaaagaagtcgaagactattaaggataaggatattaccttgagtggggagcatgtaagagaaggaatgacatgcatcatttcagtgaaggtccctagt

SEQ ID NO: 56885 - DNA, 274 bp, Zea mays
gggatgcgattgcttgggctacataaaatattttgatgcacatttcacaaacttcactggtggtgtggagacaattgagaactgtgtttgtttgcatgaggaggatcatgggatcctttggaaacatcaagactggagaactggtttagcacaagtaaggcggtcaaggaggctcactgtttcatttatctgtacagttgcaaactatgagtatggtttttactggcacttctatcaggatgggaaaatagaggcagaagtaaagcttactgga

SEQ ID NO: 56886 - DNA, 282 bp, Zea mays
atgagcttctgttgctgaagagaggaggtcgtgtcatatatgctggccagcttggtgttcagtctcgcgtactagttgaatatttcgaggcaattccaggtgttccaaaaatcacagaaggatacaatcccgcaacatggatgctggaagttagctctcctctagctgaggctcgcttggatgttgattttgctgaaatttatgcaaattctgccctgtaccggcacaatcaagaacttatcaaggagttgagcattccaccaccaggctaccaggatctct

SEQ ID NO: 56887 - DNA, 279 bp, Zea mays
gccacagtgacaaatgttaagagtccagtgaacaagtggcgatgtggtgcggctcctatttcgtctatgatgactgtgcagcgatggtcgcgtggcccttcagccacccaaatcggaaagcctgctgttcacatggctagcgttgacttgaaaggaaaagcatacgatgtattgaggcagaattcttccaggtttttgttggaagatgtctacaggaacccaggtccgctccagtttgaaggaccaggtgccgattcaaagcctatctcactgtgcgtc

SEQ ID NO: 56888 - DNA, 270 bp, Zea mays
ctcgtggccacgactgcagctgccgccctacgccaggtgtccaggtcatctccggcccattcgccggcgacgagcaccccactagatcgaccgagatatggacggcctgtggcatctgggggacgagctccgcgggcagcccaaggtggtggaggaccgccagtggtcgctcatgacgtccaagctggcagagatcaccaggtccaggggcgagaggatgaacgatctcgactacgccaggatgaacgccgcccccgacgccaagcagtg

SEQ ID NO: 56889 - DNA, 267 bp, Zea mays
gatgtgtttgcatcaccagtgtctcaggataaaactggaaacagtggagctattgtaaaatcaagcaatgagctagcaaaaactacacctgctggggagtaccttacgtctgcactaatggattttgatcctgaccagtttgagggatttgcagcaatagctgatggtgctaataagcttttgatgctggtcttggctgcagttatcaaagctggtgcagctagggagcatgagatacttgccgagatccgtgatgctgtgttttca

SEQ ID NO: 56890 - DNA, 270 bp, Zea mays
ctgagtaccaatatgttggtatcttcatgtccatctttgctgttgtgatcttcctcttccttggttcggttgagggattcagcacgaagagccagccctgcacctatagcaaggacaagtactgcaagcctgcactgttcactgcactctttagcactgtgtccttcttgcttggagccatcacctctctggtctccggtttccttggcatgaagattgccacatatgcgaatgccagaactaccctggaagctaggaagggtgttgggc

SEQ ID NO: 56891 - DNA, 276 bp, Zea mays
cccggggctccgccgccaggacgagatcgcggccatcgccaaggaggccggcttcgaggtgctcaaggagcaggacctggcgctgccccccgcgctgccctggtggacgcgcctcaagatgggccgcatcgcctactggcgcaactccatcgactctcccgtgctcaccctgctccggatcgcgcccaagggcgtctccgaggtgcacgagatgctgtacgagaccgcgcagacctcacccgctgcggcgagaccggcatcttcacgcccatgcac

SEQ ID NO: 56892 - DNA, 235 bp, Zea mays
agcaccggctcaacatggaggcaaacatgtgatgcttctgctggatagaataataatgaagacgcatgcatgtcgtcgccaggaacaagagaaataatacaagaccactatgcatgggcatactccatatatatatgtatagcccgtgcccgtgtccgcctttgtaccaatacaagccaagactagtggatgtattattattgttattattgcgctaaaaaaaaaaaaagaggag

SEQ ID NO: 56893 - DNA, 267 bp, Zea mays
ctgatgttcatggcaaagaccaagaaatatactgcattaaattgcctgggaaccccaagcttggtgaaggcaaacctgagaaccaaaaccatgccataatcttcactcgaggagatgcagttcagacgatcgatatgaatcaggataactacttggaggaagcaatgaaaatgagaaatttacttgaagaatttcataatgctcatggaaaacatggcatacggaagcccacaatcctaggtgtgagggagcatgtattcacgggga

SEQ ID NO: 56894 - DNA, 266 bp, Zea mays
cggcatcgagctggacgatgtgacgacggagaaggctattatcaggaaggagaagcacctcgaggacgacagtgaggtggacgaagatgacgaggtcatctacaagatagaggttgccgccaacagatatgatttgctatgtcttgaaggactagcaacagctcttcgtgttttcactgggactgaagcaagccctgtattccaagtttcatcaatccctcggggttcaatgcttcagatgcatgttaaaccagagacttcacaaa

SEQ ID NO: 56895 - DNA, 313 bp, Zea mays
ggcagctccaacctctgggtgccgtcctccaagtgctatttctcgatcgcttgctacttccactcgcgctacaagtcagggcagtcaagtacttataagaagaacggaaaacctgctgccattcaatatggaaccggtgcaattgctggttttttcagtgaggatagcgttaaattaggtgatctggatgtgaatgatcaggaatttattgaagctacaaaggagccaggccttaccttcatggttgcaaaatttgatggcattcttgggctaggctttcaggaaatatctgttgggaatgcgacacctgtgt

SEQ ID NO: 56896 - DNA, 315 bp, Zea mays
cttggaacagggaggcaatttacatggagatccataagtattttggatatttatgggtttgagtgtttcaataagaatggttttgagcaattttgtataaattatgccaatgagaggctgcagcagcacttcaacagacatcttctcaaactacaacaggaggaatacttggaagacggaattgattggacccccatggaatttgtggataacactaattgcttatctctctttgagaagagacatctagggctattgtcattattggatgaagagtctactttcccaaaggcatccgatttttcctttgctaac

SEQ ID NO: 56897 - DNA, 298 bp, Zea mays
ccagttcaccacccacctcccactcccagttcaccccgtcgtcctcggcgccaccactcctcgtcccccggcgctactcccccgctccacggtccaaggaaagatggcgtcccatattgttggataccctcgcatgggccccaagagggagctcaagtttgccttggagtctttctgggatgggaagagcagcgccgaggatttggagaaagttgccactgacctgaggtctagcatctggaagcaaatgtcagaagctgggatcaagtacattcccagcaataccttctcgtactac

SEQ ID NO: 56898 - DNA, 288 bp, Zea mays
cgacgacgcacgcggagatccggcgtactgcaaattttgaaaactgaactgtaagatggcatcagcagagctttcccgtgaggaaaatgtgtacatggcgaactcgctgagcaggcggagaggtacgaggagatggttgagttcatggagaaggtagccaagactgttgactcggaggagctcactgtggaggagcgaaacctcttgtctgttgcatacaagaacgtcattggagcccgccgcgcctcatggcgcatcatctcctccatcgagcagaaggaggagggc

SEQ ID NO: 56899 - DNA, 310 bp, Zea mays
ggcattgagcctggtgtggagcactatgttgggatcattgaggtcttggggaagtcagggcatctcaacgaggctctggagttcattgagaagctgcctttcgagcccaatgccatggtgtgggagtcactcttgaacctggcccggatgaatggagatattgaccttgaggaccgggcagaggagttgttggtgtcgcttgatccatccaaggcaaatcctaagaagctcccaaccccacctcccaagaggcgcctgggaattaacatgcttgatgggaggaacaagctagtagagtacaggctgccac

SEQ ID NO: 56900 - DNA, 305 bp, Zea mays
ctctcccatgcggtacgtcgatatcggcatcccagcgaacaaggggaggaacagcattggatgtctgttctggcttctgtccaggatggttctgcaaatgaggggcactatccttcctgggcacaagtgggaagtcatggtcgatctgttcttctatagagacccagactaagcaaaggagcaggaggaggaagttgccgcggcccctgagtttgccgcaatcactgattaccaaggagctgatcagtggggtggtgaccagtggacctctgatgtggctgcacacctgttgctcctactggtgc

SEQ ID NO: 56901 - DNA, 295 bp, Zea mays
taacagcagagtttagcagaaaatgcagtgctatcagagcttaggatttagctggcaatcaaatatcaggaatgatgcctgataacgttggtttgttaggagcccttgtcaagatggacatgagcagaaattttttggagggtcaaatacctgccagtttcaaagatttcaagagcttgaagtttctctcattagctgggaacaacattagtggcagaataccatcctgtttgggtcagttgagatcactgagggttttagatctctcatctaattctcttgctggtgagatccc

SEQ ID NO: 56902 - DNA, 303 bp, Zea mays
cccctcccgttctccgccaccgccaatcccctcccgtcctccgccacctctgctgagagcgagaagagatggccggcaagggtgatgggccggcaatcggcatcgatctcggcacgacctactcttgcgtcggtgtgtggcagcacgaccgtgtcgagatcatcgccaacgaccagggtaaccgcaccacaccctcgtacgtcgccttcaccgactccgagcgcctcatcggagatgcggccaagaaccaggtcgccatgaaccccatcaacaccgtctttgatcgcaagcgtctcattggca

SEQ ID NO: 56903 - DNA, 311 bp, Zea mays
taacagcagagtttagcagaaaatgcagtgctatcagagctttggatttagctggcaatcaaatatcaggaatgatgcctgataacgttggtttgttaggagcccttgtcaagatggacatgagcagaaattttttggagggtcaaatacctgccagtttcaaagatttcaactgcttgaagtttctctcattagctgggaacaacattagtggcagaataccatcctgtttgggtcagttgagatcactgagggttttagatctctcatctaattctcttgctggtgagatcccaaataaccttgtgaca

SEQ ID NO: 56904 - DNA, 309 bp, Zea mays
ctgagagatcgagagaaataataaaaaaaaatccgtcttcttgtggtcttctccaaaccctagcgcccccggccccggtctccgcccccccgccttcgccgtcacggtcgcgccccatggcggggaagtcgcgaccgcccaagcggatcctcgagtcctataccataaagggttcggacagagtcatcaagcctggcgattgcgtgctaatgagggcatctgatgcttcaaagccaccttatgtggcaagagttgacgcaattgaagcagcaggatctcgaggcaccaatgtgagagtacgagtgcggt

SEQ ID NO: 56905 - DNA, 305 bp, Zea mays
tggtactactgggccaacccggtgtcgtggacgctctacgggctcctgacctctcagttcggcgacctggaccagcccctgcttatggccgacggcgtcacctccaccaccgtggtggctttcctggaggagcacttcgggtttcgccacgacttcctcggcgccgttgcggccatggtggccggcttctgcgtcctcttcgccgtcgtcttcgccctggccatcaagtacctcaacttccagcggcgatgagagagcaagtggttcagctagctagctagtatagtagccaccgccgacacaga

SEQ ID NO: 56906 - DNA, 304 bp, Zea mays
tgcagatccaaccagacaaggacatcgtagtcgagttcatcaagaacgaggattacaagtatgttcgtgttctcggggccttctacctgcgtctcactggcacaattgctgacgtctaccagtatcttgagccgctctacaacgactaccgcaagatcaggcacaagctcagcgatggacagttcacacttacccatgttgatgagttcattgatgagttgctgaccaaggattactcctgtgatacagccatgcctcgcatccagaaaagatgggttcttgaagcgtctggaactctggaacc

SEQ ID NO: 56907 - DNA, 305 bp, Zea mays
tatcgagccgaatcggctcgaggcataatttcaagcgttcttggccaaagtatcgccctagatcactatattcggcagatcgatgatatggttgaggaattcactgaaattaatcgtgtcatggagaaaaccggtaactttaccatgcaaagaaaaaaactctttcaacttgtgggtaaggccaattctaatcttgcggatgttatcatcagacttggtctttttgacaggtcagaaattgcttggaaaaatgcaaattatgcacaaattctagaatatcttcgggaggaatatgaactgaatca

SEQ ID NO: 56908 - DNA, 244 bp, Zea mays
gagcaagtaaaaaaactaattgctaagatgataatagttcatgagtatccatttaggatggttgagcatacttggtttaacattgtcatgaggtatttgaatccttcatatgagtttattggtaggaagactataagagctgaatgtttaaagatctatgagtctgaaaaagaatcactagcaaaagtccttaaaggtgttgagtatatttccctaaaccactgatttgtggacatccaatcaa

SEQ ID NO: 56909 - DNA, 301 bp, Zea mays
gtgcctttgggccatttctaagtattttggtgatttagtgtccaacacaagtgcctaagtgttgatctatgcaaagtggtggacaaagagcaaatcaagtcaaaaggtatgtttctagacttagtacattgttttatggactgatgtattgtgtctaagtgctggaaacaggagaaatcaaattgaaaaagagatggctttattcagccaaagtcagctctgtctgggtgcaccggactgtccggtggcgcaccggacagtgtccggtgcgcagagctggctcaggcgaacttgctgctct

SEQ ID NO: 56910 - DNA, 298 bp, Zea mays
ctggaagatctttacaatggcacctcaaagaagctctctctttcgcgcaatgtcatctgctccaagtgcaagggcaagggctcgaagtctggtgcctcaatgaggtgccctggttgccagggctcaggcatgaaagtcactattcgtcagctgggcccttccatgatacagcagatgcagcagccttgcaatgagtgcaaggggactggagagagcatcaatgagaaggaccgctgtccagggtgcaagggtgagaaggtcattcaagagaagtaggttcttgaggttcatgttgaga

SEQ ID NO: 56911 - DNA, 303 bp, Zea mays
ctgatctgtccactccttttatcatgattggtcctgagacagggctggctccttttagaggcttcttgcaggaaaggttagcattgaaacaatctggggcagaactgggcacttcaatccttttctttggatgcaggaaccgtaatatggactacatatatgaagatgagttgcaaactttccttgaggagggggcgctttctgagctaattgttgcattctctcggtaagggccaacgaaagaatatgtgatgcataagatggtggaaaaggccatagaaatttggaacatcatctcaaatg

SEQ ID NO: 56912 - DNA, 300 bp, Zea mays
cccaccacccccgcatcgcccccactcccgtctgctgccccgccagtcatcgtgggctcggtcaagcacctcacgcctgcgtgggtcagccgtcgttcccgctaatctccttcgctcaggcaccagagtcacaccatcctcgctgtcaatctcgtcgcaaaccctccgcccctctccggtctggcactaccacgagcttccagaccccccgcacgagaaatgttgtagcgtctcatgctgggatgggcggcgtcacgccgtctctcgccctgctgtggtcctcctcctctgggtggagtc

SEQ ID NO: 56913 - DNA, 298 bp, Zea mays
gctcccctctccctccctccctctctctctctctcttcgccgtccgaagctccgcacccaatctaatcgacacctcaccgagatgggccgcaagttcttcgtcggtggcaactggaaatgcaatggaaccacagatcaggtcgagaagattgtcaaaaccctgaatgaaggacaggttcccccttcagatgttgttgaggtcgttgtcagccctccttatgtcttccttcctgtggtcaagagccagctgcgccaagagttccatgttgctgctcagaactgctgggtgaagaaggga

SEQ ID NO: 56914 - DNA, 296 bp, Zea mays
atcatccgcgcctctacatttcttctctctctgctcctccgcctccgcctgatccatccaagacagggatcgccatgtcggactcggaggagcaccacttcgaatcgaaggccgacgctggggcgtccaagacctacccgcagcaggctggcaccgtccgtaagaacggcttcatcgtcatcaagaaccgtccctgcaaggttgtggaggtttctacctccaagactggtaagcatggccacgccaaatgccactttgtcgccatagacatattcaatgggaaatagcttgaagat

SEQ ID NO: 56915 - DNA, 259 bp, Zea mays
gctctccatcatgaggctggtgatcaagacgaagagcgtggagttcatgccgttcctgctctccctggccgtgttcctgtgcggcacctcctggttcatctacggcctcctcggccgcgaccccttcattattatcccgaacgggtgcgggagcttcctgggcctgatgcagctcatcctgtacggcatctaccggggggctagggttcccgtgcgcctctgcaatctgacgcgaggctaggctgggccatggaggaac

SEQ ID NO: 56916 - DNA, 269 bp, Zea mays
ctgatctgtccactccttttatcatgattggtcctgagacagggctggctccttttagaggcttcttgcaggaaaggttagcattgaaacaatctggggcagaactgggcacttcaatccttttctttggatgcaggaaccgtattttggactacatatatgaagatgagttgcaaactttccttgaggagggggcgctttctgagctaattgttgcattctctcagtaagggccaacgaaagaatatgtgatgcataagatggtggaa

SEQ ID NO: 56917 - DNA, 273 bp, Zea mays
gaagggttggggtgacactgcgaacgtgtactcgacacactccacttgcttctcgaccttctggaggcccctgatcctgccaacttggagaagttccttggaactataccaatgatgttcaacgttgttatcctgtctcctcatggctacttcgcccagtccaatgtgcttggataccctgacactggcggtcaggttgtgtacattctggatcaggtccgtgccttggagaatgagatgcttctgaggattaagcagcagggcctgatatca

SEQ ID NO: 56918 - DNA, 290 bp, Zea mays
aaacgctaccatgcttgaggaagggcttgcccggctcgaaagaagcaagagatgggacactagggagaggaagacggctctccagaacctggaacagttccaggacaaggcaaagaaggaaaggctgcggatttggcagtacggagatgttgaatcggacgaggacgagcaggccccgcctgcaaggaagcctggaggtcgtcggtagagactgggcagtgtaaggctgcagtctggcatgctatgaaagttttggacaaccacaaatgttggactctgccgggagttat

SEQ ID NO: 56919 - DNA, 290 bp, Zea mays
gtcgtcgctgcctacaggacgccgatatgcaaggccaagcgaggaggcttcaaggacacctacccagaggacctcctcactgttgttctcaaggctgttctggacaacactagaatcaatccagctgacatcggtgacatcgtcgttgggacggtgcttagccctggttcccagcgtgcaaacgagtgcaggatggctgcgttgtttgctggattccctgaaaccgtccctgttagaactgtcaaccgccagtgttcatctgggctacaggcagtagctgatgtcgcagc

SEQ ID NO: 56920 - DNA, 294 bp, Zea mays
agcccatggaatttctgtccaaagtttcaatggtgatttactttacgagccgtgggatgtttatgatgagaatgggcaggcatttacaacctttaacaagtactgggagaaatgtatgaacctacctattgagatatcacaatatcttgcacctacaaggctggtggcagcgccaggtctagcaaatgttcgctgttgttcgattgatgatctaggtcttgaatctagtaaggatgtggaatcaagcaatgctttgctaagcagggcctggtctcctggctggcgcaatgcaga

SEQ ID NO: 56921 - DNA, 291 bp, Zea mays
ctcaagaactccaaattaagaagatcatgcacaacctgcggcagtaccaggtccctttgcagcgctatatggccatgatggaccttcaggagaggaacgagaggcttttctacaagcttttaattgataacgtggaggagctgcttcctgtggtttatacaccaactgtaggtgaggcctgccagaagtatgggtccatctttcgacaaccacagggtctgtatgtcagcttgagggacaaagggaaggtcctagaagttctaaggaactggccacataggaacattcaag

SEQ ID NO: 56922 - DNA, 124 bp, Zea mays
ctcaagaactccagattaagaagatcatgcacaacctgcggcagtaccaggtccctttgcagcgctatatggccatgatggaccttcaggagaggaacgagaggcttttctacaagctgttaat

SEQ ID NO: 56923 - DNA, 303 bp, Zea mays
atcaagatgcgtgagatcgctgaagcttaccttggcagcacgatcaagaatgctgttgtcacggtccctgcctacttcaacgactcacagaggcaggccacgaaggatgctggggtgattgctggcctcaatgtgctgcgtatcatcaatgagccaaccgctgctgctattgcctatggtcttgacaagaaggcaaccagcgtcggtgagaagaatgtcctcatctttgaccttggaggtggtaccttcgatgtctccctccttactattgaggaaggtatctttgaggtcaaggccacagct

SEQ ID NO: 56924 - DNA, 290 bp, Zea mays
gcgcggccaagggcggcggagggaagaagaaggaggtgaagaaggagacgaagctcgggatggcctataagaaggacgacaacttcggggagtggtactccgaggttgttgttaacagtgaaatgattgagtactatgacatttctggttgttatatattgaggccatgggcgatggaaatctgggagctactgaaagaattctttgatgcagaaattaaaaagctgaagctcaaaccatattatttccctttgtttgttactgagaatgttctacagaaggaaaaggac

SEQ ID NO: 56925 - DNA, 301 bp, Zea mays
ccaagttttaagcatgaggtctaaccgtttgagtggaagccttccgaacgatgttgtctcacttccttctttacaagccatatttgttcagcacaacgaactgtcaggagacttgcctccatttctctctccaaaccttaatacccttgatctctcttacaactcctttacaggacaaatcccatcaggtttgcagaatcttaccaaattgtctgtcttgaatttagcagaaaattccctgtccgggccgattccggatctcaaacttcctagcttaagacagctaaatctgagcaacaat

SEQ ID NO: 56926 - DNA, 292 bp, Zea mays
atctgaagccagagaacagtagatatgatgcacaaattagtgtctttggggctcagcttcaaaagaaactggagcagtcaaaaatcttcatggttggttctggggctcttggatgtgaattcttgaagaaccttgcgttaatgggtatttcttgcagtcaaaacgggaagctgactgtgacagatgatgatgttatagagaaaagcaatctcagtcgccagtttctcttccgtgactggaacattggacagcccaagtccacagttgctgcaactgctgctatgacaattaa

SEQ ID NO: 56927 - DNA, 291 bp, Zea mays
tgcctaatttcttacgctccataaggcagtgatgtttgaacttattgtacctttgcggctggagtttattttaatgaagatatatacaaggattttaagaaactcgcactggaggatgctgcagcgagctacagatatggtctcgagtgtctattcagattttatagttatggtttggagaaaaaattccaacccaatgtatatgaagatttcgagaagcttactttcgaattctaccgtaatggtgatctttatggactcgaaaaatactgggcatttcaccattaccga

SEQ ID NO: 56928 - DNA, 288 bp, Zea mays
caaatattagcggtgggtactcactgaaggaaaatcttgaggttgacagaaattatttaccaatacactcaagacaagaaatggttttcggtgatgaatacaagccagttggcaagccgatcaagaaagtcggggcagagctccaagcttctggggaggctgtgtacgttgatgatatccctgttcccaagggttgcttgtatggagcatttatctacagcacacgccctcatgctcatgtgaagggcatcaacttcaaatcatctttggcttcacagaaggtcatca

SEQ ID NO: 56929 - DNA, 290 bp, Zea mays
ctagtcccctgctccattctcagccgccgccaatcccttcccgagctccgcaaccgctgagtgagaagaagagatggccggcaagggcgatggcccggctatcggcatcgatctcggcacgacgtactcttgcgtcggcgtgtggcagcacgaccgcgtcgagatcattgccaacgaccagggtaaccgcaccacgccctcgtacgtcgccttcaccgactccgagcgcctcatcggagatgcggccaagaaccaggtcgccatgaaccccatcaacaccgtctttgatg

SEQ ID NO: 56930 - DNA, 293 bp, Zea mays
aacgcctccgccgctccttccattagctcagacatggttctcggcctctacaccttcgccgacatcgacgccgacggagcaccccgcctcgaggttgccgatggcgaggagttcgtccgtgtcgatcgcgttgtcgagcttgccctcggtccccgggtgctgaaggcccctggaaccctttacctcaccaccaggagggtgatttgggtcagcgatggcggcgagggctacgctgtggacttcgttgccatctcgctccacgccgtgtcgcgtgatcccgaggcgtatccata

SEQ ID NO: 56931 - DNA, 291 bp, Zea mays
caaacatgttcaaaacgcatgtcacaagtgagggtacagccttggtcaagcaagcagaagattctgctagtaataagaagccagagaagaaggatatggttggcatgcaggaacaggtctttgtgtggaaaatcatcgagctgcatgacaaatatgtagcttatgtgacagaatgtttccagggacatacactcttccataaggcacttaaagaagcctttgaggtcttctgtaacaaaggtgtctctggcagttcgaatgctgagttgttggctaccttctgcgacaata

SEQ ID NO: 56932 - DNA, 276 bp, Zea mays
  unsure (1)..(276): unsure at all n locations
cgtcgcttccgctccacaggatcctctgcgccacccacaaccgtgcgaccgtccgtgctgccggcgaccccgatccgccgacccgtcccgtcccaccacaccctaccgccgctcgcagctatgtcgccgtcggagccgacgcgggaggagagcgtgtacatggccaagctggcagagcaggcggagcggtacgaggagatggtcgagttcatggagcgcgtcgcgcgctccgccggcggcccggcgnaggggaggagctaccgtggaggagcgcaa

SEQ ID NO: 56933 - DNA, 286 bp, Zea mays
gtcgatccatctccgagcaccaagttgaacacgcgatcccattcccattctcttgctcaatacaacctccggctccagcaagccgcagcgccaagcctagaagcggacgcggaacacacgaggccaggaagaggaggtgctgccgtccccgcgccgccgctgtgggagtgcggggaatggggcggcacggcgtggaccagatcggcgctgtggcagcgttcgtctgggtcaccctccttcccttgctgcttgtgtgcgtcgtgtggccgggcgcccaggccggaca

SEQ ID NO: 56934 - DNA, 293 bp, Zea mays
  unsure (1)..(293): unsure at all n locations
ctcgagccgaatcggctcgaggccgccaccgtcgcaggccaagggcaaggacttcaagaatggcgccaacttcgccatcaacggcgcgacggccctggagtactccttcttcaaggcgcacggcatcgaccagcgcatctggaacaccggctccatcaacacccagatcggctggctccaggacatgaagccgtccctctgtaaatcggagcaagactgcaaggattacttcagcanatccctgttcgtcgtcggggagttcgggggcaacgactacaacgcgccgctcttct

SEQ ID NO: 56935 - DNA, 300 bp, Zea mays
caaaaccttgtcctggtgctcctcccttttctccacctcctccatacaaccctacaacccctgtgcaatcaccaggaagtagctcttccagtactggagcaattgctggtggagtggctgctggtgcagccttgctatttgctattcctgtaattagttttgcctattggcggcgcaggaaaccacaagaacatttctttgatgtacctgccgaggaagatccagaggtgcatcttggccagcttaaaagattttcactacgagaattacaagttgcaacagatggcttctgcaataaga

SEQ ID NO: 56936 - DNA, 280 bp, Zea mays
cgtcctctgttacttctcccgccgccgccaatcccctcccgttctccgccaccgccaatcccctcccgtcctccgccacctctgctgagagcgagaagagatggccggcaagggtgatgggccggcaatcggcatcgatctcggcacgacctactcttgcgtcggtgtgtggcagcacgaccgtgtcgagatcatcgccaacgaccagggtaaccgcaccacaccctcgtacgtcgccttcaccgactccgagcgcctcatcggagatgcggctaagaac

SEQ ID NO: 56937 - DNA, 286 bp, Zea mays
gccgccaccaggtgcagagtctttcgtcatctcttctccggcgaagaacccccagtcgcccaccagatcacttgttaaactttgttgaggggtgatggcggtttctttcgcaaacctcaacaccgaggcagggcttaaaaagcttgatgagtaccttctcactcgcagctacatcactggctaccaagcttccaaggatgacttggctgtctacacttcgttttcgtctgctccctcgtccaagtatatcaacgtagcaaggtggtttaatcacattgatgcgctc

SEQ ID NO: 56938 - DNA, 282 bp, Zea mays
ctctgaggaccttcccctcaatatctcccgtgagactcttcagcagaacaagatcctgaaggtgatccggaagaaccttgtgaagaagtgtgttgagctcttctttgagattgctaaaaacaaggaggactacaacaagttttatgaggctttctccaagaacctcaagcttggcatccatgaggactcgcagaacaggggcaagattgctgagcttctgagataccactccacgaagagcggtgatgagctgaccagcctcaaggattatgtgacgaggat

SEQ ID NO: 56939 - DNA, 282 bp, Zea mays
gatagttgttcagcacaagggggaggagaaacagtttgcagccgaagagatctcctccatggttctcatcaagatgcgtgagatcgctgaagcttaccttggcagcacgatcaagaatgctgttgtcacggtccctgcctacttcaacgactcacagaggcaggccacgaaggatgctggggtgattgctggcctcaatgtgctgcgtatcatcaatgagccaaccgctgctgctattgcctatggtcttgacaagaaggcaaccagcgtcggtgagaagaa

SEQ ID NO: 56940 - DNA, 283 bp, Zea mays
cttcaaggtcatttctgggcctggtgagaagccaatgattgttgtccagcacaagggtgaggagaagcagtttgcagctgaagagatctcctctatggttcttatcaagatgcgtgagattgctgaagcttaccttggtagcacgatcaagaatgctgtggtcacagtccctgcctacttcaatgactcacagaggcaggccacaaaggatgctggggtgattgctggccttaatgtgctgcgtatcatcaacgagccaacagctgcagctatcgcctatggt

SEQ ID NO: 56941 - DNA, 276 bp, Zea mays
ggttgatgagaggggcatacgctggttctacactggtgatattggtcagttccatcctgatgggtgccttgagattattgacaggaaaaaagatatagtaaagcttcagcatggagaatatgtgtctcttggcaaggttgaatcggctctagcaacaagcaactatgtggagaacatcatggtttatgccgatccatttcataactactgtgttgccctggttgttccagcgcaccaggccttggagaagtgggctcaaattcgggataactatga

SEQ ID NO: 56942 - DNA, 292 bp, Zea mays
cattgggaatcctcaatcccttggtcagcaacctgtgacgttcttcagggaggtatgcaactttacctgcagattccacctttgtttcttcgatatttacatggtaccttgcaggttcttgctctttgtgatcatccatgcctcttggaaaaagaggaaaccaaatcattgttcagtgctgatgctatttctcgagcaaagcagattcttgcaactattcctggacgggcaacaggtgcatatagtcacagtcagggtatcaaaggattgcgtgatgcaattgctgctggga

SEQ ID NO: 56943 - DNA, 287 bp, Zea mays
tgtgaagacaaaatactgtgacacttgcatgttgtacaggcctcctcgttgctcccattgctctatctgcaacaactgcgtagaacgttttgaccatcactgcccctgggttggacaatgcataggacttaggaattacaggttcttctatatgtttgtattctcaacaactttgctctgcctgtatgtctttgggttctgctgggtgttcattattaagatcagaaatgccgagcagataacaatttggaaggcaatgacaaagacccctgcatctattgccttaa

SEQ ID NO: 56944 - DNA, 287 bp, Zea mays
ccttcccctcctccaagcaaatccgaggcccacccacgggccgctcgaacatctgtcaccgccaagtggccccacccacccctcccctccgctgccccttcttctacaaataccccggccggccgcggccgttcccgaatcgagcggtgactggcgaggcaaaagcattgcgaccacagacagcgcgcgcttcaaggcctttttttttgagataacaaggaggagaggaggagatggcggtcacgatcacgtgggtgaaggcgaggcagatcttcgacagccgcggc

SEQ ID NO: 56945 - DNA, 283 bp, Zea mays
ctcttgaggatcacctcacatcagatctccaagctaaagttgctacgatgctcactgaaacatttggagatcttcttttcgtccctaatccagacccgatgaaagagtttccttctccagcatctctaatgaagagaataatcatatcaaccaaacctccacaagaatataaggagtttctcaaagccgagaataatcgcagtggcagcggaaacatagctgagttgccagaccaaggaagcctgagaagaatagattcaaatgccgatgaatctgatgggaa

SEQ ID NO: 56946 - DNA, 295 bp, Zea mays
cacctgatttgatggcggcatctgactgcatgcttgggaaaatcggatatggcactgtgagtgaggctttggcttacaatctgccatttgtatttgttcgaagagattatttcaatgaggaaccatttttgcggaatatgcttgagcattatcaatgtggcattgagatgatacggagggatttacttactggccattggaaaccttatcttcaacgtgctatcacacttcaaccctgctatgatggtcccataaatggtggcaaggtagctgcacatatcctccaagatactgc

SEQ ID NO: 56947 - DNA, 287 bp, Zea mays
tagtgattgctttactgattggatacatagttcatgctaccgcaaaacggattgccagagttgaagatgactttcaggagatgagtttgctcaagaagcgcgcagaggatgcagatattgccaagtcacagttcttggctactgtttctcatgagatcagaactccaatgaatggtgtcctagggatgctccaaatgctcatggatactgatttggacacaacacaacaagactatgttagaaccgcacaagccagtggcaaaactctggtatccctcatcaatgag

SEQ ID NO: 56948 - DNA, 283 bp, Zea mays
ggccacttcaccaagcgccccgaggagattggagctggtgaccagggacacatgttcgggtatgcgaccgatgagacccctgagttgatgcccctcagccatgtccttgccaccaagctaggtgctcgtctcaccgaggtccgcaagaacggaacctgcccctggctcaggcctgatgggaagacccaggtgacagtcgagtaccgcaatgagggtggtgccatggtccccatccgtgtccacaccgtcctcatctccacccagcacgacgagacagtgacca

SEQ ID NO: 56949 - DNA, 280 bp, Zea mays
caacctcaacaggcttgtctcccaggtcatctcatccctgacggcttccctgaggttcgatggtgctctgaacgttgatgtgaacgagttccagaccaacctggtgccctacccgaggatccacttcatgctttcgtcctacgctccagtcatttctgctgagaaggcctaccacgagcagctgtccgtggctgaaatcaccaacagcgccttcgagccatcctccatgatggccaagtgcgacccccgccatggcaagtacatggcatgctgcctcatg

SEQ ID NO: 56950 - DNA, 286 bp, Zea mays
agaagcactctgagttcatcagctaccccatctccctgtggactgaaaagacaacagagaaggaaatttctgacgacgaagacgaggaagagaagaaagatgctgaggaaggaaaggttgaggatgttgatgagaaggaagagaaagaaaagaagaaaaagaagatcaaggaggtttctcatgagtggtcattggtcaacaagcagaagcccatatggatgaggaagccagaagaaatcacaaaagaagaatatgctgccttctataagagcttgacaaatgactg

SEQ ID NO: 56951 - DNA, 285 bp, Zea mays
gtgacgatgaaagcactcaaaatgccatgatggaagagatcatgcagtccgtggttactttaacggaggaccagtatggtaattatgtaatccagcatgtcctgcaatatgggaaaccagaagagcgttctactataattgcacaactcgctggacagatagtgaagatgagccagcagaaatttgcatccaatgttgttgagaagtgtcttacttttggttctcctgagcaacggcagattctaatcaatgaaatgcttggcacaactgatgagaacgagccgt

SEQ ID NO: 56952 - DNA, 289 bp, Zea mays
ggcaagaactccaagctgggcttcattgtgtacccatctccccaggtgtcaacctctgttgtggagccttacaacagcgtgctctccactcactcactcctggagcacactgaccagcccatcctgctcgacaacgaggccatctatgacacctgcaggcgctccctcgacattgagaggcccaactactccaacttgaatcgccttgtgtctcaggtgatctcatcgctgactgcttctctgaggttcgatggtgccctcaatgtggacgtgaacgagttccagacca

SEQ ID NO: 56953 - DNA, 282 bp, Zea mays
gctgaggtgctttggtccaactgagttctctgttgccgtgaccatcttcggtgatcgggacaatgcgaagacctgggggacgacactggatgctgaggcctatgcttgcagcaacatggttgagcaggtgctgccgtttggtggcttgctcatctatcagagcttcactgttacggccgaaacgacccatgggtcgccgaggtcagtcctgcatgacttcgctggtgacattgtcaagaatcgctcagagagtgatgctccctgggaagctgatgctgtgga

SEQ ID NO: 56954 - DNA, 297 bp, Zea mays
ggcatacagtcatgcgagctgtgttattcagtcgctgggagaagaagacataaatgtgaaatttttggttcagttagataaattgatccgtctcttagagactccagtatttgcttacttgcgtttgcagcttcttgagcctggaaagcacacctggcttctgaaaactctttatggtctcctgatgctgttgcctcagcaaagtgcggccttcaagatcttgaggactcgactgaaaactgtgccattcagtgaaaatattaagcgcacatcttcagcaaatccatactcccagat

SEQ ID NO: 56955 - DNA, 286 bp, Zea mays
cgcgggaacaaccccgcccagatcaacggcgccctcgagtgcaacgcgaacaaccccgcccagatgaacgcgcgcgtcggctactacaagcagtactgccagcagctccgcgtcgacccagggcccaacctcacttgctaggcgacggcgtccacgttgtacccatggctcctgctagtgctagctcatccacaataaatgctcggcgtcgcaccctcgcgaaaagtaaaccaagagtttactgactagtacgagctagctagcatgcagtaataataatcatcgt

SEQ ID NO: 56956 - DNA, 281 bp, Zea mays
catccttggagtgaagcagatgatttgctgttccaacaagatggatgccaccacacccaagtactccaaggcccgttatgatgagattgtgaaggaagtctcttcctacctgaagaaggttggatacaaccctgacaagatccactttgttcccatctctggtttcgaaggtgacaacatgattgagaggtccaccaaccttgactggtacaagggcccaaccctacttgaggctttggacttgatcaatgagccgaagaggccttcagacaagcccctgc

SEQ ID NO: 56957 - DNA, 279 bp, Zea mays
cagggatcacctcggaatggcccttcacttgatccatcagaaattttaattgcaattcatgtaatagctcctgataaggaaggaataccactcaaaaaggttatggatgcatgctcttcttgctttgagcaaagaacaatatttacccagcaagttctggcaaaagcactaaatcaactggttgaacagattcctctacctttgctattcatgaggactgtcatgcaagcaataggtgtttttcctgcattggtgggatttgtgatggagatcatgtca

SEQ ID NO: 56958 - DNA, 279 bp, Zea mays
  unsure (1)..(279): unsure at all n locations
cctgcagcgccgccagacactccgtagtctgtaccccaagcaccggcgcggcggcggcggctaccatggcagtcgggaagaacaagaggatctccaagggaaagaagggtggtaagaaaaagaccgtcgatcccttctctaagaaggactggtatgacatcaaggccccatcggtcttcagtgtgcgcaacattgggaagactctcgtgtccaggacacagggtaccaggattgcctctgatggtctgaagcacagagtctttgaggtntgtctagctg

SEQ ID NO: 56959 - DNA, 278 bp, Zea mays
gccagctgatgagaggaggcctttccgtgctctcttggatgttggccttatcaggactacaacagggaaccgtgtctttggtgccctcaagggagcattggatggaggcctggatattcctcacagcgagaagaggtttgctggattcaagaaggacgacaagcagttggatgctgatacccaccgcaggtacatctatggtggccatgttgctgactacatgaagaaccttgctgaagaggagccagaaaagtaccagagccacttcagtgcgtaca

SEQ ID NO: 56960 - DNA, 280 bp, Zea mays
ggaaattggcagatgaggtgttctcaattgttggacgggatccacttattgaggtggccattgccctagaaaaggcagcgctgtcagacgaatattttatcaagaggaagctgtatccaaatgtggatttctactctgggctaatttatagggcattgggattccctacagaattttttcctgtgctgtgtgctattcctcgcatgggtggctggctagcgcattggaaagagtcactcgatgatcctgacactaagattataaggccccaacaggtata

SEQ ID NO: 56961 - DNA, 279 bp, Zea mays
cggcgatcctggagaggaagaagtcgccgaaccggctggtggtcgacgaggccaccaatgatgacaactccgtcgtcgctctgcacccggacaccatggagaggctccagctctttcgcggtgacacggtcctgctcaagggtaagaagagacaggacactatctgcattgtgctcgcagacgagacgtgtgaggagccaaaggtccggatgaacaaggtcgtcaggaagaacttgagggttcggcttagtgatgtggtatctgtccatcaatgcccag

SEQ ID NO: 56962 - DNA, 277 bp, Zea mays
gagaaattgtgctgaggattacaagagccctgtatcaatatggcttccaaggccaccggggggatacgtagctcttgggtgtgttgctgtcccttcattcaaggagcccactcttgactgtgctttctgtgtggatgagagactcgcggaggatgccgcgtatgaggagcaaatcatatgggcctcatcggatgcttacccatggggatgctatatctaccaagttcagagcgcctcaatgcagttcatggcacttcgtgtcccaaaagaacaatct

SEQ ID NO: 56963 - DNA, 267 bp, Zea mays
  unsure (1)..(267): unsure at all n locations
tggtggtgtggagacaattgagaactgtgtttgtttgcatgaggagtatcatgggatcctttggaaacatcaagactggagaactggtttagcagaagtaaggcggtcaaggaggctcactgttgcatttatctgtacagtgtcaaactatgagtatggtttttactggcacttatatcangatgggagaatagaggcagaagtaaagcttactggaattctcagtttaggggccttgatgttaggggaatcgaggaaatatggcac

SEQ ID NO: 56964 - DNA, 268 bp, Zea mays
gtcgagcaccacgtcggtgaccgcggtgtcttcgccagggcctctggggactacgccattgtgatcagccacaaccctgacaacggcacatcgaggattaagctgccctctggcgccaagaagattgtccccagcagctgccgtgctatgattgggcaggttgctggtggaggcaggactgagaagccgatgctcaaggctggtaacgcgtaccacaagtaccgtgtgaagaggaacagctggcccaaggtgcgtggtgtggccatga

SEQ ID NO: 56965 - DNA, 279 bp, Zea mays
tgaagacactgtgaaggaagtctcatcctacccaagaaagttgcgtacaaccctgataagattgcctttgttcccatttctgcttttgacggtgacaacatgattgagaggtccaccaaccttgactagtcaaaaggcccaaccctgcttgaggctcttgaccagatcaccgagcccaagaggccttcagacaagcccctgcgtctgcccctccaggatgtgtaaaagattggtggtattggaactgtaccggttggtcgtgtggagactggtgtcatc

SEQ ID NO: 56966 - DNA, 310 bp, Zea mays
ctattcgtttggaattgtcatgtgggagttgcttactggggaagagcatactctggcatgcgtgctgctgaaattattgggggcattgtaaacgattccctacgtcctcaaattccttcatggtgtgatcctgagtggaagggattgatggaaagctgttggtccagtgatccagctgagagaccgtccttcacggatatatctcaaaggttgaggaaaatggccgccgcaatgaatgtgaagtaaaggtccggaagccatatttgtcttgtatgtgtgttccccgcatccaatattatagcgatataca

SEQ ID NO: 56967 - DNA, 261 bp, Zea mays
tgacacatcgtccaaatttgggcacggtcgcttccagctaccgatgagaagcagaggttctttggtaagctcaaggcgtaaggtgctgcggtgcagcgaaagtcccatttgtcaaaatcatcaaactgtgaaacctttgtttgttaccttgctgtaccaatgttttgtagcaggatgatttgggagcatgttccggtcttcaatggattgttctacgcttcagaactgcaaaaaaaaaaaaaaaaaaggggggcccgcgaa

SEQ ID NO: 56968 - DNA, 292 bp, Zea mays
aaagctcgaagatattgttccttcgtcacaaactgtgatattccgcatgtgaaccgtactgagtaccagctgattgatatatcagaggatggatttgtgagccttcttacttcagatggcaacactaaggatgatcttagactcccaactgatgagactcttgtggcccagatcaaggaagggtttgaaagcggcaaggatcttgttgtgactgtccagtctgctatgggggaggagcagatctgcgcgctgaaggatgttggccccaagtaacttcctgccttggaatact

SEQ ID NO: 56969 - DNA, 113 bp, Zea mays
tgcaaatgtgaccagcaatgtcaaaaactgacactgtgtctgtgtgcgaacgtgtgaaattgacattgagttcaattagctagttggctcgagatttcagttttcatctccat

SEQ ID NO: 56970 - DNA, 293 bp, Zea mays
  unsure (1)..(293): unsure at all n locations
cggctcgacgaagctggaaagttctccctcagcctacgactttctctatgggcagaacaccttggtcttcttccaggagaggttagttgcattatggatcctgtggatgattcagcgtacaaaaacatctggatggcgactgctaaggagaataccgtgatctaccatcaagtattctcatgtgttcccaacgatcacatccattctaggtatcaatttcgccaaagttttgctcatcgtaaggagaaaattggccacacaaccatagacttnggtgttcttagaaacctgga

SEQ ID NO: 56971 - DNA, 291 bp, Zea mays
gagaggatcatgaaggcacaggccctgagggactcgagcatggcgggctacatgtcgagcaaaaagacaatggagatcaacccagagaaccctatcatggatgagctccgcaagcgtgccgaggctgacaagaatgacaagtcagtcaaggaatgacgtgatgctgctgttcgagactgctctcctgacctccggcttcagcctggatgaccccaacaccttcggcaaccggatccaccgcatgctcaaactcggtctgagcatcgatgaggacgagttgttgaggcagag

SEQ ID NO: 56972 - DNA, 103 bp, Zea mays
atagttagttgtctagtattaatatgtggactagagtcatcccactaaatttgatgaatggacccatgatgcaccccttcattttggataaagtgattcatta

SEQ ID NO: 56973 - DNA, 285 bp, Zea mays
ggagaccctttatcaatcaactacaacggcaagaagtttgatgactgcttgaaggatcagaatatcatgcctggcatcaaggttgacaagggtttagttccattgcctggatccaacaatgaatcatggtgccaaggtcttgatggtttttattcaaggtgtgctgagtactataagcagggggcgcgcttcgcaaagtggaggactgttgttagcatcccttgtggtccatctgcattagcagtcaaggaagcagcatggggacttgctcgattgctgctattg

SEQ ID NO: 56974 - DNA, 280 bp, Zea mays
cagctacccaatctctctctggatgagaagaccactgagaaggaagtatctgatgatgaggacgaggaagataagaaggacgaggagggcaaggttgaggatgttgatgagaagagagaaaaggaaaagaagaagaagaagatcaaggaggtttctcatgagtggcaattggttaacaagcagaagcctatctggatgagaaagcctgaggagattaccagagaagagtatgctgctttctacaagagcttgaccaacgactgggaggagcatcgccgtt

SEQ ID NO: 56975 - DNA, 288 bp, Zea mays
cccatctctggtttcgaaggtgcaacatgattgagaggtccaccaaccttgactggtacaagggcccaaccctacttgaggctttggacttgatcaatgagccgaagaggccttcagacaagcccctgcgtctccccctacaggatgtgtacaagattggtggtattggaactgttcctggtgggcgtgttgagactggtatcatcaagcctggtatggttgttacctttggtcctagtggccttactactgaggtgaagtctgttgagatgcacatgaggctctcca

SEQ ID NO: 56976 - DNA, 294 bp, Zea mays
gaccctgcaaggcaagaccggttcatcagcgatgggttgacgcactgacagaccctcgcgtgacccatgaacaccggaccatttggatctcctactggtcccagtgcgacgccgctcttggccagaagctggcttctaggctgaacctatagccgagcatgtaagatcgacgaggaagaaagcaggcacgggtggccaagatgctacgcaacatggagcgtgtgatgtctacaccaatataattgaataaacaggggatgtgcgcgttgtcgtacttatgcgatgctgatggtc

SEQ ID NO: 56977 - DNA, 281 bp, Zea mays
ctactttgtaacagacagtgagaaaatactgcagagtacgagaactgcaagctgcttttcgttgataagaaaatcaccaatgcaagggatcttatcaacgttttggaagaagccatcagaggtgcatacccaatcctgataattgcagaggatattgagcaggaggctcttgctacccctgtcgtcaacaagctcagaggatcactgaagatcgctgcaatcaaagcccctgttttggagagcgcaagactcagtacttggatgatatggccatccttact

SEQ ID NO: 56978 - DNA, 280 bp, Zea mays
acgagacccttcgacctcgcaacagagccccaatccccagcaaccactgctccgccgcctccgggaccgcggagcccgtggtggaggaggacgtggagagggaagatctcgccagatccaaggtgagtggggacaagatggtgagctcctcgtcgtcggtggttaacgtgtacccgctcgccaactacacgttcggcaccaaggagcccaagatggagaaggacacctccgtcgccgaccgcctcgcccgcatgaaggtcaactacatatagaaggaatg

SEQ ID NO: 56979 - DNA, 248 bp, Zea mays
  unsure (1)..(248): unsure at all n locations
catggagcttgttctgatcaatttcccggtctttcagctgaaaatacattagtacagtaccatgcctcttgactgctgattctgagctgaaaatacattaattatctcctcgcgtaagaaggggcaagcagtctagttgatgctcatactgacngaagtaagccagcttgatggttcatagcaaaagtatacagcgatgacattttgatcgcgactggtagccgtgctcaacgtgtcaacatacctgg

SEQ ID NO: 56980 - DNA, 286 bp, Zea mays
agatcatcaagatcttcttggcccaaaggagaggaacaacaccgaatacaagctggacacctacactacggtctaccgcagctgtgtgggaaagatgtggtctttgagtaccctatggccgaaaatgcataaatatgacgcccggatatccccattttattttgttgaatctggatgtttctttggggtctcaactagactgctccgtatgtacttcaaaaaccatagttttgatgccaaagttgttgcctaggaatttggactcgggaattgagcggacgtgaca

SEQ ID NO: 56981 - DNA, 270 bp, Zea mays
  unsure (1)..(270): unsure at all n locations
ctcctgcgacgccacaaccacacgtcacggtagcgagagcttatcgtcgtcggcggtgaagatggtgtcgctgaagctgcagaagcggctcgccgctagcgtcctcaagtgtgggaaaggcaaagtctggcttgaccccaatgaagtcagcgagatctccatggctaactttccgcaagacatccggaagttgttaaggatgggttatcatcangaagctcagaaggtcactctaggtccgtgcagaaggcacatgagccagcagaggga

SEQ ID NO: 56982 - DNA, 309 bp, Zea mays
ctcgagccgctctcctcactttaaccctcctccgctcgacgacaccacacgaaaatatacttcagaataaaccgcagcaaatcttctccggcaccggcagcgcccaaatccggcaatccgctgctccgaatggactcaggttacaatccccggacggtggaggaggtgttccgggacttcaagggccgtcgtgccgggataatccgcgcgctcaccactgatgcggaggatttcttcaagcaatgcgacccggaaaaagaaaacttgtgcctgtatgggtttcctaatgagagctggaagtaaatttgc

SEQ ID NO: 56983 - DNA, 155 bp, Zea mays
tgacacatcgtccaaatttgggcacggtcgcttccagactaccgatgagaagcagaggttctttggtaagctcaaggcgtaaggtgctgcggtgcagcgacagtcccatttgtcaaaatcatcaaactgtgaaacctttgtttgttaccttgctg

SEQ ID NO: 56984 - DNA, 313 bp, Zea mays
  unsure (1)..(313): unsure at all n locations
tgttcatggtccatcttgccacgatccccatcaccggcacctgcatcaacccggccaggtctctgggcgctgctgtcatctacaacaacgacaaggcctgggatgaccactggatcttctgggtgggtccattcatcggcgccgccatcgccgcgctctaccaccagtacgtgctgagggccagcgccgccaagctgggatcgtctgcctccttcagccgctagatcgatggcctcccgccggacaaggacagccggagggntgaactgtagatataccagaggctggacaaggacagcgtgcgtcgttggtt

SEQ ID NO: 56985 - DNA, 333 bp, Zea mays
tattgctgcagcgaagtagctcggaagtggctcgagatccgctggccaccagctttgaccgcgtcccctccccttcgctcctgtttctccataccccatccctccgcaagagcggcgcggcggcggcggcggcaaagccaaaggcaagatgttcgggcgcgcgccgaagaagagcgacaacaccaagtactgtcagatcctcgaggtgcccaagtcggcgtcccaggacgacctcaagaaggcctaccgcaaggcagctatcaagaaccaccccgacaagggcggtgaccccgagaagttcaaggagctcgcacaagcctatgaggtgtgagt

SEQ ID NO: 56986 - DNA, 302 bp, Zea mays
ggagaagatgtagtccactcacttaaagtttctctggaagatctttacaatggaatctcaaagaagctctctctttcgcgcaatgtcatctgctccatgtgcaagggcaagggctcgaagtctggtgcttcaatgaggtgccctgggtgccagggctcaggtatgaaagtcaccattcgtcagctggggccttccatgatacagcagatgcagcagccttgcaacgagtgcaaggggactggggagagcatcaacgagaaggaccgctgcccagggtgcaagggtgagaagtcgttcaggag

SEQ ID NO: 56987 - DNA, 300 bp, Zea mays
gttggctgttcctcccccaccggttcgtgttcaggttctggttcgtgggcgagagggaagagatggcggcgtcggacgttgagtaccgttgcttcgttggcggcctcgcctgggccaccgacgaccactccctcaacaacgccttcagcacctacggcgaggtcctcgagtcgaagatcatcctggatcgggagacgcagaggtcccgcggcttcggcttcgtcaccttctccacggaggacgcgatgcgcaggccatcgagggcatgaacggcaacaacgacgggaactgaggaactga

SEQ ID NO: 56988 - DNA, 152 bp, Zea mays
cagctacccaatctctctctggatcgagaagaccactgagaaggaaatatctgatgatgaggacgaggaagataagaaggacgaggagggcaaggttgacgatgttgatgagaaggaagataaggacaagaagaagaagaagatcaaggagg

SEQ ID NO: 56989 - DNA, 297 bp, Zea mays
ctaccgttcagatcctgaatggaagatcattttacttaggtacttcaatccagttggtgctcatcctagtggatatcttggcgaggacccacgaggaattcccaacaatcttatgccctatgttcagcaagttgcggttggtaggaggccagctattgcagttttaggaaatgactatgcaacaagagatgggactggggtccgagattacatccatgtggttgaccttgctgacggacatattgctgcattgcagaagctttttgagaactctagcatagggtgtgaagcgtacaa

SEQ ID NO: 56990 - DNA, 286 bp, Zea mays
tccagaaggagagcgtgcgcccgtcctcaagctgcttcccagcaaagatgagcttctgctggtctggagggatgccctccctgaccggcaagactatcaccctcgaggtggagtcctctgacaccatcgacaatgtcaaggccaagatccaggacaaggagggcatcccatcggaccagcagcgtctgatcttcgctggcaagcagctggaggatggccgcacccttgcggactacaacatccagaaggagagcaccctccacctggtgctccgtctcaggggtgg

SEQ ID NO: 56991 - DNA, 294 bp, Zea mays
tcttgtgagagggccaagagaactctgtcttccactgcccagaccaccattgagattgactcgctgtacgagggcattgacttctactccaccatcacccgtgccaggtttgaggagctcaacagggacctgttcaggaagtgcatggagcctgtcgagaaatgcctgatggatgccaagatggacaagagcatcgtccatgatgttgtccttgttggtggctccactaggatccccagggtgcagcagctgctccaggacttcttcaacggcaaggagctgtcaagaacatca

SEQ ID NO: 56992 - DNA, 299 bp, Zea mays
agctgctctcgtccctagaaataaagcagctcctccgcggggcggcgaactactacccatcgccaaaaccctagccccgatccggtcgaggagcactacttcttggcatggcgggcacccctagccaggcaagcctcctgctccagaagcagctcaaggatcttgcgaagaaccccgtggatgggttctccgcagggcttgtagacgatagcaacgtcttcgagtggcaggtcaccatcatcggcccgcccgacaccctatatgatggaggctacttcaatgcaataagaccttccccc

SEQ ID NO: 56993 - DNA, 118 bp, Zea mays
attggttgaaaagtatctcatcatacacagcattctctcgcattgtgcttatcctacgtgcacttcatgtgaataatgagaaggcgacgatgttgctctaacctgacacaacaattgt

SEQ ID NO: 56994 - DNA, 229 bp, Zea mays
gtcgatccaagatgcagatcttcgtcaagactctcactggaaagactatcaccctcgaggtggagtcctctgacaccattgacaacgtcaaggccaagatccaggacaaggaaggcattcccccggaccagcagcggctcatcttcgctggcaagcagctcgaggatggccgcacactagccgactacaacatccagaaggagagcactctccacctggtgctccgcct

SEQ ID NO: 56995 - DNA, 198 bp, Zea mays
tgctcgccgccgccccgccgtgttgctcgccgacaccgccccgccggcagccaaaatgccgttcaagaggttcgtggagatcgggcgagtggcccttgtaaactacggcaaggagtatggccgcctcgtcgtcatcgtcgacgtcgtcgaccagaacagggctcttgttgatgcccccgacatggttcgttgccaaat

SEQ ID NO: 56996 - DNA, 294 bp, Zea mays
tgcaattactagagtgtctgcagtttcatatgttggaagctatctgtcccgggcaaggttcatttccgtaaatatagttgtttctgtactcaaaaggctagtggactggtgtgattattattatggccatcagctggacaatggggtgacagcaaatcctataaagcaccagctattttatgctagctgccaggctgtgatgtatgtcctatgctttcggttaagatctattatggactacccaaatcttaaacaacaactttttcgaatgcgaatccgggatatcttggtcca

SEQ ID NO: 56997 - DNA, 200 bp, Zea mays
  unsure (1)..(200): unsure at all n locations
aaagtactgtccacttgaccatgttgcaatggatcaaaatgaggagctatttactgttagcaacagttcactttcagtgnttgctgttcttgggtttgaattgggttactccatggagaaccctaattcattggtactttgggaagcacaatttggcgattttgccaatggtgcacaagtgatgttcgaccaatttttga

SEQ ID NO: 56998 - DNA, 145 bp, Zea mays
caggggaggcatgcagatctttgtgaaaaccctgaccggcaagactatcaccctcgaggtggagtcctctgacaccattgacaacgtcaaggccaagatccaggacaaggagggcatccctccagaccagcagcggctcatcttt

SEQ ID NO: 56999 - DNA, 294 bp, Zea mays
  unsure (1)..(294): unsure at all n locations
ggcttcactgtgtacccatctccccaggtgtcaacctctgttgtggagccttacaacagcgtgctctccactcactcactcctggagcacactgatgtctccatcctgctcgacaacgaggccatctatgacatctgcaggcgctccctcgacaactgnaggcccaactactccaacttgaatcgccttgtgtctcaggtgatctcatcgctgactgcttctctgaggttcgatggtgccctcaatgtggatgtgaacgagttccagaccaacctggttccttacccgaggatc

SEQ ID NO: 57000 - DNA, 146 bp, Zea mays
cgccgccctcagctccggtcagaccctcccccttcgaagatgccgaacctcgagtgccggatgtatgagcagcggttctcggaggtggatgccgcggtgatgatccaggtgaagcacatcgctgacatgggcgcgtacgtctccct

SEQ ID NO: 57001 - DNA, 243 bp, Zea mays
tggcaatattgatctaataaatgtgctaagagagtttgaatcaaaacaggaggcacatggtgaccaaattttgatcaaggcctcagtcctggctgagttacagaggcggatactaaaagccgaggccacagtacgtgaaaaggatgaagagaacgagatgcttcatcagcggcttcagcaatatgaaaaccgctggttagagtacgaacagaaaatgaaagctatggaggaaatgtggcagaa

SEQ ID NO: 57002 - DNA, 291 bp, Zea mays
gactctaaaggatattttgacctactgatcaaggtttaccctgatggaaaaatgagtcagtattttgcaagtttgaacgcaggagatgttgttgaagtcaaagggcccattgaaaagctcagatacaacccgaacatgaaaaaacaaattggcatgatcgctggtggttctggtataacaccaatgctgcatgttgtcagggctatcctcaaaaaccctaatgacaacactcaggtctccttaatttacgccaatgtgtcaccagatgatatattgctcaaaagagaactg

SEQ ID NO: 57003 - DNA, 274 bp, Zea mays
cctgcacatgtccacgctgtgtaaaggcatttgatgaggatgcactacttgaggggttcaggtgcaagaaccaagcatgtgatggctttttgctgcccaactcaggtaaaaaggcttatacatgccaaaaatgtggtgcttctagagatgtggaagagataaaaaatatgagaagcgaaatactacagttatcggataaagcatcttcatttctttcatcaggaaataaggctgaagcaggttctatctacaagataatcgaacagttagagag

SEQ ID NO: 57004 - DNA, 301 bp, Zea mays
ggcaagaaatccacgctgggcttcactgtgtacccatctccccaggtgtcaacctctgttgtggagccttacaacagcgtgctctccactcactcactcctggagcacactgatgtctccatcctgctcgacaacgaggccatctatgacatctgcaggcgctccctcgacattgagaggcccaactactccaacttgaatcgccttgtgtctcagccgatctcatcgctgactgcttctctgaggttcgatggtgccctcaatgtggatgtgaacgagttccagaccaacctggttcctt

SEQ ID NO: 57005 - DNA, 108 bp, Zea mays
gctgaggtgctttggtccaactgagttctctgttaccgtgaccatcttcggtgatcgggacaatgcgaagacctgggggacagaactggatgctgaggcctatgctta

SEQ ID NO: 57006 - DNA, 289 bp, Zea mays
cgcgggaacaaccccgcccagatcaacggcgccctcgagtgcaacgtgaacaaccccgcccagatgaacgcgcgcgtcggctactacaagcagtactgccagcagctccgcgtcgacccagggcccaacctcacttgctaggcgacggcgtccacgttgtacccatggctcctgctagtgctagctcgtccacaataaatgctcggcgtcgcaccctcgcgaaaagtacaccaagagtttactgactagtacgagctagctagcatgcagtaataataatcatcgtaat

SEQ ID NO: 57007 - DNA, 283 bp, Zea mays
cgtcaagatcctcttcacctcgctctgccacaccgacgtctactgctgggaggccaaggggcagactcccgtgttccctcggatctttggccacgagtctggaggtatcatagagagtgttggagagggtgtgaccgacgtagctccgggcgaccatgtacttcctgtgttcactggggagtgcaaggagtgtgccacctgcaagtcggcagagagcaacatgtgtgatctgctcaggatcaacaccgaccgcggtgtgatgatagccgatggcaagtcgcgg

SEQ ID NO: 57008 - DNA, 290 bp, Zea mays
catccttggagtgaagcagatgatttgctgttgcaacaagatggatgccaccacacccaagtactccaaggcccgttatgatgagattgtgaaggaagtctcttcctacctgaagacggttggatacaaccctgacaagatccactttgttcccatctctagtctcgaaggtgacaacatgattgagaggtccaccaaccgtgactggtacaagggcccaaccctacttgaggctttggacttgatcaatgagccgaagaggcctgcagacaagccctgcgtctccccct

SEQ ID NO: 57009 - DNA, 264 bp, Zea mays
gaaagggttagaaagttgcttttgactcatgacctggcaaatgctgctgagctcaagaatatggcgaaagaaatcaggaaacaagtagatgacgctattgctaaagcaaaggaaagttctatgcctgatacttctgaactcttcacaaatggctgcacgaagggcttcggcgtggagtcatttgggcccaacaggaaggagatgagagcttctcttccgtaggttggcagcatgatgaggcagtctcattacatggtatgatag

SEQ ID NO: 57010 - DNA, 291 bp, Zea mays
cagggatcacctcggaatggcccttcacttgatccatcagaaattttaattgcaattcatgtaatagctcctgataaggaaggaataccactcaaaaaggttatggatgcatgctcttcttgctttgagcaaagaacaatatttacccagctcgttctggcaaaagcactaaatcaactggttgaacagattcctcttcctttgctattcatgaggactgtcatgcaagcaataggtgtttttcctgcattggtggattttgtgatggagatcatgtcacgccttgtgagc

SEQ ID NO: 57011 - DNA, 265 bp, Zea mays
cctgcagcgccgccagacactccgtagtctgtaccccaagcaccggcgcggcggcggcggctaccatggcagtcgggaagaacaagaggatctccaagggaaagaagggtggtaagaaaaagaccgtcgatcccttctctaagaaggactggtatgacatcaaggccccatcggtcttcagtgtgcgcaacattgggaagactctcgtgtccaggacacagggtaccaggattgcctctgatggtctgaagcacagagtctttga

SEQ ID NO: 57012 - DNA, 283 bp, Zea mays
gccagctgatgagaggaggcctttccgtgctctcttggaggttggccttatcaggactacaacagggaaccgtgtctttggtgccctcaagggagcattggatggaggcctggatattcctcacagcgagaagaggtttgctggattcaagaaggacgacaagcagttggatgctgatacccaccgcaggtacatctatggtggccatgttgctgactacatgaagaaccttgctgaagaggagccagaaaagtaccagagccacttcagtgcgtacattaag

SEQ ID NO: 57013 - DNA, 289 bp, Zea mays
  unsure (1)..(289): unsure at all n locations
ggaaattggcagatgaggtgttctcaattgttggacgggatccacttattgaggtggccattgccctagaaaaggcagcgctgtcagacgaatatattatcaagaggaagctgtatccanatgtggatttctactctgggctaatttatagggcaatgggattccctacagaattttttcctgtgctgtttgctattcctcgcatgggtggctggctagcgcattggaaagagtcactcgatgatcctgacactaagattataaggccccaacaggtatacaccggctt

SEQ ID NO: 57014 - DNA, 287 bp, Zea mays
gagaaattgtgctgaggattacaagagccctgtatcaatatggcttccaaggccaccggggggatacgtagctcttgggtgtgttgctgtcccttcattcaaggagcccactcttgactgtgctttctgtgtggatgagagactcgcggaggatgccgcgtatgaggagcaaatcatatgggcctcatcggatgcttacccatggggatgctatatctaccaagttcagagcgcctcaatgcagttcatggcacttcgtgtcccaaaagaacaatctgagctaaggc

SEQ ID NO: 57015 - DNA, 266 bp, Zea mays
gtcgagcaccacgtcggtgaccgcggtgtcttcgccagggcctctggggactacgccattgtgatcagccacaaccctgacaacggcacatcgaggattaagctgccctctggcgccaagaagattgtccccagcagctgccgtgctatgattgggcaggttgctggtggaggcaggactgagaagccgatgctcaaggctggtaacgcgtaccacaagtaccgtgtgaagaggaacagctggcccaaggtgcgtggtgtggccat

SEQ ID NO: 57016 - DNA, 278 bp, Zea mays
cagcaaatacttataaccataacttcaaaggttcctattgcacatgtgggcggccttatcctgacccagaagctaaggagcaagttgacatgatacaatgctctatatgtgaggactggtttcatggggatcatattggtcttaactctattgaagagataccaagagatgaggaaggggagccactctatgaggaattgatatgccacaaatgctcatctgtctgccatttctagaaattgtatccagatacatttgggcttctggtaagccaatct

SEQ ID NO: 57017 - DNA, 209 bp, Zea mays
gaaaaaatgtttttcatatttctcccttttcccagatgattataaatttgataagtctgagattattcgtttatgggattcaataggaatcataggttctagtatacagcaaaagaaaatagaggacataggatcggattattttgatgaactattagatagtggttttcttataaaagggagcaatgatttttatgtaatgcatgatt

SEQ ID NO: 57018 - DNA, 289 bp, Zea mays
tgaagagattgtgaaggaagtctcatcctacctcaagaaagttgggtacaaccctgataagattgcctttgttcccatttctggttttgagggtgacaacatgattgagaggtccaccaaccttgactggtacaaaggcccaaccctgcttgaggctcttggagagatctacgagcccaagaggccttcagacaagcccctgcgtctgcccctccaggatgtgtacaagattggtggtattggaactgtaccggttggtcgtgtggagactggttcatcaagcctggta

SEQ ID NO: 57019 - DNA, 273 bp, Zea mays
cccaactggagccaaggtgacgaaggctgctgccaagaagaaatgatctatctgtctggtgctgtgcttgcttgttggttacctcgtggaagcttaaaatatctcgtcttgttgacatccttgcagttgtcgcgtgaacaagtaatctatgatggcaatgttagcctggtcatgaagtattattactttcgttgaaaccgtgatgctattaagacttaatttttttatggaacatcgaatgtaaggcatacatggttatgagtttgtactacc

SEQ ID NO: 57020 - DNA, 288 bp, Zea mays
gacgggagacgcgctccccagtccccacccccctctcgtgtcgtggcgacgactgcgggggctgtcgctgccgccctacgtcaggtggccaggtcgtattagggcacttcgccggcgacgagtaccacaaggcagtggacactttctctggtatcagagtgttcatgtccaattattatgatgactacgatgacattgacgggatggaggatgattatgatatggatgatcccattgatgacatggtagacgagcagcaagggattaggattctgatgtggaagataa

SEQ ID NO: 57021 - DNA, 229 bp, Zea mays
tgacacatcgtccaaatttgggcacggtcgcttccagactaccgatgagaagcagaggttctttggtaagctcaaggcgtaaggtgctgcggtgcagcgaaagtcccatttgtcaaaatcatcaaactgtgaaacctttgtttgttaccttgctgtaccaagttttgtagcaggatgatttgggagcatgttccggtcttcaatggattgttctacgcttcagaactgc

SEQ ID NO: 57022 - DNA, 288 bp, Zea mays
caagctcgaagatattgttccttcgtcacacaactgtgatattccgcatgtgaaccgtactgagtaccagctgattgatatatcagaggatggatttgtgagcctgcttacttcagatggcaacactaaggatgatctttgactcccaactgatgagactctagtggcccagatcaaggaagggtttgaaagcggcaaggatcttgttgtgactgtccagtctgctatgggggaggagcagatctgcgcgctgaaggatgttggccccaagaacttccctgccttgga

SEQ ID NO: 57023 - DNA, 285 bp, Zea mays
cggctcgaggaagctggaaagttctccctcagcctacgactttctctatgggcagaacaccttggtcttcttccaggagaggttagttgcattatggatcctgtggatgattcagcgtacaaaaacatctggatggccactgctaaggagaataccgtgatctaccatcaagtattctcatgtgttcccaacgatcacatccattctaggtatcaatttcgccaaagttttgctcatcgtaaggagaaaattggccacacaaccatagcttcggtgttgccttag

SEQ ID NO: 57024 - DNA, 286 bp, Zea mays
gagaggatcatgaaggcacaggccctgagggactcgagcatggcgggctacatgtcgagcaaaaagacaatggagatcaacccagagaaccctatcatggatgagctccgcaagcgtgccgaggctgacaagaatgacaagtcagtcaaggatctcgtgatgctgctgttcgagactgctctcctgacctccggcttcagcctggatgaccccaacaccttcggcaaccggatccaccgcatgctcaaactcggtctgagcatcgagaggacgagcctgttgaggc

SEQ ID NO: 57025 - DNA, 279 bp, Zea mays
actttgagaaaagaggtctggaaattcttgttggggtatcatgaatatgattcaacatatgctgagagggaataccttgctgtcatgaaacgagcagaatatgaagtcataaaatctcagtggaagagtatctcagccacccaagctgaaaagacaccaccaagtttagggaaagaaaaggcctaattgacaaagatgtggtgagaacagataggtccattccctattatgaaggagatgacaatcagaatgttgtagttttacgtgatatctgttaac

SEQ ID NO: 57026 - DNA, 252 bp, Zea mays
tcggagaccctttatcaatcaactacagacggcaagaagtttgttgactgcttgaaggatcagaatatcatgcctggcatcaaggttgacaagggtttggttccattgcctggatccaacaatgaatcatggtgccaaggtcttgatggtttctctccaaggtgccctgagtactataagcagggggcgcgcttcgcaaagtggaggactgttgttagcatcccttgtggtccatctgcattagcagtcaag

SEQ ID NO: 57027 - DNA, 280 bp, Zea mays
agccaacacctaaactaaagaacagtagtagtccctgtgtacgtctagcaacgatccgcaccgagctcgccagttttgctcgttagtttggggacggcgatggcgtccggtcaggaaagcagggaggagctggcgcgcatggccgaggaggggcagaccgtcgtccccggcggcaccggcggcaagaccctcgaggcgcaggagcacctcgccgaaggcgcagtcacggcgggcagacccgacgtgagcagctgggccatgggggtacagcgagatgggc

SEQ ID NO: 57028 - DNA, 280 bp, Zea mays
tcctacctcttgttacaacttgcgcggtgggggcagtgaggcagcaagacgtgaggtccaggatgatgaacaacaacagtggcggcggtgcggaggcctggagggggcatgggtacgggagtgggtggagggggggacgggcggcacgacgcggaggctgcgctcaccgagttcctctcatccctcatggactacacccccacgattcccgacgagctggtggagcactacctcggccgcagcgggttccactgccccgactgcgcctaacgagactggt

SEQ ID NO: 57029 - DNA, 155 bp, Zea mays
  unsure (1)..(155): unsure at all n locations
accatctcaggtttcgaaggtgacaacatgattgagaggtccaccaaccttgactgaaacaanggcccaancctataanangctttggacttgatcaatgagccgaagaggccttcagacaagcccctgcgtctccccctacaggatgtgtacaa

SEQ ID NO: 57030 - DNA, 292 bp, Zea mays
cgagcaggaggcggacaaggtaagcagcaatcgcaggaaccctagcgccgccgcacccgcaggaatgggtatcgacctcgtcgccggtgggaggaataagaagaccaagcgcactgcgcccaagtctgacgatgtctacctcaagctcctcgtcaagctctaccgtttctgagtcaggaggaccaagagcaatttcaacgctgtcattctcaagaggcttttcatgagtaaaaccaaccgaccaccaatctccatgcgccgccttgtcaagtttaggaaggaaaggagaaga

SEQ ID NO: 57031 - DNA, 276 bp, Zea mays
taacatgcctcatgattctgacagtttccgtcaacctgacatgcaccatggaatggaggttcgccttggtttgtccaagggacctatctgtcctagcttcaattgaggcagtaatgtaattctgctgcaagttcacctctcagtccagtacttcagtcaatagaccatattaagatggtgaaatatgaaaactggtagcttgcatctgttcaatgttatgttttaatcaacgctgaatttaatatttgtcaagtttgaactttctggtttccttgc

SEQ ID NO: 57032 - DNA, 281 bp, Zea mays
gaccctgcaaggcaagaccggttcatccagcgatgggttgacgcactgacagaccctcgcgtgacccatgaacaccggaccatttggatctcctactggtcccagtgcgacgccgctcttggccagaagctggcttctaggctgaacctgaagccgagcatgtaagatcgacgaggaagaaagcaggcaccggtggccaaggatgcaacgcaacatggagcgtgtgatgtttacaccaatataattgaataaacaggggatgtcgcgttgtcgtacttatg

SEQ ID NO: 57033 - DNA, 149 bp, Zea mays
gtactttgtaacagacagtgagtaaatgactgcagagtacgagaactgcaagctgcttttggttgataagaaaatcaccaatgcaagggatcttatcaacgttttggaagaagccatcagaggtgcatacccaatcctgataattgcag

SEQ ID NO: 57034 - DNA, 282 bp, Zea mays
accgagtcttccagtgattcaaagggattggtttatctgtttgaggaggctctcaacacaccggattccaaggaaggccttcaaagactgattgatccggcgctcggcgaggattaccccatcgactcgatcctcaagatgacggtcctggcaagggcgtgcacgcaggaagaccccaaggcaaggcccacgatgagatccatagtggtggcgctgatgacgctgtcgtcaaccagcgagttctgggacatgaacgcgacccaggagaccaaggtgtcgtga

SEQ ID NO: 57035 - DNA, 273 bp, Zea mays
agatcatcaagatcttcttggacccaaaggagaggaacaacaccgaatacaagctggacacctacactacggtctaccgcaggctgtgtgggaaagatgtggtctttgagtaccctatggccgaaaatgcataaatatgacgcccggatatccccattttattttgttgaatctggatgtttctttggggtctcaactagactgctccgtatgtacttcaaaaaccatagttttgatgccaaagttgttgcctaggatttggtactcgggaat

SEQ ID NO: 57036 - DNA, 281 bp, Zea mays
ctcctgcgacgccacaaccacacgttcacggtagcgagagcttatcgtcgtcggcggtgaagatggtgtcgctgaagctgcagaagcggctcgccgctagcgtcctcaagtgtgggaaaggcaaagtctggcttgaccccaatgaagtcagcgagatccccatggctaactcccgccagaacatccggaagttggttaaggatgggtttattatcaggaagcctcagaaggttcactctaggtcccgtgcaagaagggcactgaggccaagcagaagggaa

SEQ ID NO: 57037 - DNA, 303 bp, Zea mays
gaagaccagaaggtgagaagagagagagagagtgtgtgtgatcggtacaaggatcaccgctgtgcctgcgcgtgctgcttcaccgaatcgagtcagatcctgtccgaatccgagctaagggatggcaaccggtagtgaagcctcgactggcagctgatgctgtggtgactgtgctaaacacgacagcaagaggatgctccatgcggtttaccgtgttggggatctggaccgcacaatcaagtactacacggaatgctttgggatgaaactgctgaggaaaagggatgttcctgatgagaagta

SEQ ID NO: 57038 - DNA, 149 bp, Zea mays
tgacacatcgtccaaatttgggcacggtcgcttccagactaccgatgagaagcagcggtcccttggtaagctcaaggcgtaaggtgctgcggtgcagcgaaagtcccatttgtcaaaatcatcaaactgtgaaacctttgtttgttcac

SEQ ID NO: 57039 - DNA, 309 bp, Zea mays
tgttcatggtccatctggccacgatccccatcaccggcaccggcatcaacccggccaggattctgggcgctgctgtcatctacaacaacgacaaggcctgggatgaccactggatcttctgggtgggtccattcatcggcgccgcaatcgccgcggtctaccaccatacgtgctgagggccagcgccgccaagctgggatcgtctgcctccttcagccgctagatcgatggcctcccgccggacaaggacagccggaggcgtgaactgtagatataccagaggctggacaaggacagcgtgtcgtcgtt

SEQ ID NO: 57040 - DNA, 297 bp, Zea mays
ggagaagatgtagtccactcacttaaagtttctctggaagatctttacaatggaatctcaaagaagctctctctttcgcgcaatgtcatctgctcctcgtgcaagggcaagggctcgaagtctggtgcttcaatgaggtgccctgggtgccagggctcagtatgaaagtcaccattcgtcagctggggccttccatgatacagcagatgcagcagccttgcaacgagtgcaaggggactggggagagcatcaacgagaaggaccgctgcccagggtgcaagggtgagaaggtcgttc

SEQ ID NO: 57041 - DNA, 297 bp, Zea mays
tggtggtgtggagacaattgagaactgtgtttgtttgcatgaggaggatcatgggatcctttggaaacatcaagactggagaactggtttagcagaagtaagggggtcaaggaggctcactgtttcatttatctgtacagttgcaaactatgagtatggttttactggcacttctatcaggatgggaaaatagaggcagaagtaaagcttactggaattctcagtttaggggccttgatgcctggggaatcgaggaaatatggcacaactattgcccctggtctgtatgcaccagtt

SEQ ID NO: 57042 - DNA, 298 bp, Zea mays
cggactatgagagcggacgggccatacccaataaccaggtggttggcaaaatcgagcgggccattggcctcaagctccggggaaaggacattggaaagcccatcgagagggggcctagggcgaaatgaacacaaagcctcgaaatcagtgcgctccagcgatctcgttccgccggttccctgtggccgccagttccgttctcctcacgggccgaacggaacaaggggtccagcttgcgggggaccctccccagcccattcctgctgtgaaacaaacaaaaccttgcatagcgcaaaaa

SEQ ID NO: 57043 - DNA, 221 bp, Zea mays
cagctacccaatctctctctggattgagaagaccactgagaaggaaatatctgatgatgaggacgaggaagataagaaggacgaggagggcaaggttgaggatgttgatgagaaggaaggggaggaaaagaagaagaagaagatcaaggaggttttcatgattggaaattggttaacaagcagaggcctatctggatgagaaggctgaggagattacaaag

SEQ ID NO: 57044 - DNA, 295 bp, Zea mays
cggactatgagagtggatgggccatacccaataaccaggtgcttggcaaaatcgagcgggacattgggctcaagctccggggaaaggacattggaaagctcatcgagaaggggcctagggcgaaatgaacacaaagcctcgaaatcagtggactcagctgatctcgttccgccggttccctgtggccgccagttccgttctcctcacgggccgaacggaacaaggggtccagcttgcgggggaccctccccagcccattcctgctgtcaaacaaacaaaaccttgcaaagcgcaa

SEQ ID NO: 57045 - DNA, 256 bp, Zea mays
gcgcaggatcatggttgggcttccaactacggagagcagcgagctgatcttgaggacgttcgtttcaaaggagaaagttgatgaagatattgatttcaaggaacttgcggccatgacggaaggatacagcggcagtgatctcaagaatctctgtgtgactctgcttaccgccctgttagggagctcctgaagatagaaggagagaggaaactggagcgaagggaaaaggagtcaaaagacaaggcggcggcggcgg

SEQ ID NO: 57046 - DNA, 305 bp, Zea mays
tccagaaggagagcgtgcgcccgtcctcaagctgcttcccagcaaagatgagccgctgctggtctggagggatgccctccctgaccggcaagactatcaccctcgaggtggagtcctctgacaccatcgacaatgtcaaggccaagatccaggacaaggagggcatccaccggaccagcagcgtttgatcttcgctggcaagcaactggaggatggccgcacccttgcggattacaacatccagaaggagagcaccctccacctggtgctccgtctcaggggtggtatctagatctttgtgaaga

SEQ ID NO: 57047 - DNA, 230 bp, Zea mays
agctgctctcgtccctagaaataaagcagctcctccgcggggcggcgaactactacccatcgccaaaaccctagccccgatccggtcgaagagcactacttcttggcatggcgggcaccctagccaggcaagcctcttctccagaagcagctcaaggatctgcgaagaaccccgtggatgggttctccgcagggcttgtagacgatagcaacgtcttcgagtggcaggtc

SEQ ID NO: 57048 - DNA, 298 bp, Zea mays
gttgttattgatgaagctgcccaggtacttgaggtggcatgctggatagccttgttgaaagggccgagatgtattcttgctggagaccatcttcaacttcctccaacaattcaaagtgttgaggctgaaaagaaggggatgggaagacactctttgtacgccttactgaagcttatggagaggaaatcacatccatgctcactgtgcagtacagaatgcacgagcacattatgagctggtcatctaaagaactttacaataataagatcaaagcacattctagtgttgctgggcatat

SEQ ID NO: 57049 - DNA, 286 bp, Zea mays
  unsure (1)..(286): unsure at all n locations
attggttgaaaagtatctcatataacacagcattctctcgcattgtgcttatcctacgtgcatctcatgtgaataatgagaaggcaaagatgttgctcaaacctgacaaaacaattgttactgaaccacatcatatatggccactctgaatgatgaacaatggttgaaggttgaatgtgcactaagggacctcattctttccgattatgcanaganaaacaatgttaatacttctgcactcacacaatctgaaatgcgagatatcatccttggtgctgaaattgct

SEQ ID NO: 57050 - DNA, 293 bp, Zea mays
aagctatcaagagactcgtagaggctgaggcacttaagatggaaattattccaaaccccaaggaagttgatggtgtgaaagtccttcaactcgtaaccgcagctggtgcagctattcggttcttcgactaagcgattggaataatgttccccgcacatagaatctcccagtgaaggctacatctgatctgttgcttgtgcagtctgatctttacaccttggttgatggctttgtcatccgcaacccatccagagcgaatccagctaacccttcaattgagcttggacctgagt

SEQ ID NO: 57051 - DNA, 295 bp, Zea mays
gcgcagattgacatggcattggggaggtttgatgctgctgttgctgcagctgagaaggctagagatcttgatcccgggaatgcagaaatcgggatggttttgaataacgtgagactagttgcaaaagccagagagcaaggaatgatctcttcaaagctggcaagttttcagatgcatccatggcttatggtgaagggctcaagtatgatccctcaaattcagtgctccactgcaatcgagctgcttgttggtcaaagctagaaaagtgggaaaaggctgttgatgactgcaatga

SEQ ID NO: 57052 - DNA, 291 bp, Zea mays
gtcgatccaagatgcagatcttcgtcaagactctcactggaaagactatcaccctcgaggtggagtcctctgacaccattgacaacgtcaaggccaagatccaggacaaggaaggcattcccccggaccagcagcggctcatcttcgctggcaagcagctcgaggacgggcgcacacttgccgactacaacatccagaaggagagcactctccacctggtgctccgcctcaggggtggcatgcagatcatcgtcaagacactcactggcaagaccatcagcctcgaggtgg

SEQ ID NO: 57053 - DNA, 292 bp, Zea mays
gccgctcctcgagcacccccgtcccgcgccgcctccggctccggcgagatgtcacgcttcggtctatccggcccgccgccgccgatccgcgacacgtactcactcctcgtcctcaacatcaccttccgcacaactgctatacaatcttccctctcttcgacaagtacggcgagattgtcgacatctacatcccaagggaccgccggactggtgactcgcgcggattcgcgttcgtaaggtacaagtacgaggacgaggcacagaaggcagttgataggctcgatgggagatt

SEQ ID NO: 57054 - DNA, 299 bp, Zea mays
catgaatgcttgacatttatttccgtgaagggcatatattatcaggctgaagttcaaggacaaaagatcacctggctaactccgcatgctcttcagcaagtattaactgatgatgttgatttcaatgtgatgctttctttttagaattctatgagacttctctaggatttgtgaacttcaaaatctatcattcaataaatgtaaattatcctcctattctggatccacgtctggaagctttagctgttgagctctatgcattgtgccgatacatgtctgctggttccagaagaatgatt

SEQ ID NO: 57055 - DNA, 297 bp, Zea mays
gctcgccgccgccccgccgtgttgctcgccgacaccgccccgccggcagccaaaatgccgttcaagaggttcgtggagatcgggcgagtggcccttgtacactacggcaaggagtatggccgcctcgtcgtcatcgtcgacgtcgtcgaccagaacagggctcttgttgatgcccccgacatggttcgttgccaaatgaacttcaagcggctttccctgactgacatcaagattgacattaaacgtgtcccaaagaagactacactgatcaaggcaatggaggaagctgatgtgaaa

SEQ ID NO: 57056 - DNA, 290 bp, Zea mays
ggaagaccgaagaccgagccgtgcgggggctcgggacgggaacgggacaggaccccaaaatctcagatccttcctgcccgcccgcccgtgcccgtcgacgcgtcgttcttgccggccgcgccccacctccgccctctctcctccagggggatcttatacgcctcaggctgcgcgatggtgctgtgggtcttcggctacggctccctcatctggaaccccggcttcgacttcgacgacaaaatcctcggcttcatcaagggctacaagcgcacctttaatctcgcttgcat

SEQ ID NO: 57057 - DNA, 290 bp, Zea mays
tgcaattactagagtgtctgcagtttcatatgttggaagctatctgtcccgggcaaggttcatttccgtaaatatagttgtttctgtactcaaaaggctagtggactggtgtgattattattgtggccatcagctggacaatggggtgacagcaaattctataaagcaccagctattttatgctagctgtcaggctgtgatgtatgtcctatgctttcggttaagatctattatggactacccaaatcttaaacaacaactttttcgaatgcgaatccgggatatcttgg

SEQ ID NO: 57058 - DNA, 278 bp, Zea mays
cggactatgagagcggacgggccatacccaataaccaggtgcttggcaaaatcgagcgggccattggcctcaagctccggggaaaggacattggaaagcccatcgagaaggggcctagggcgaaatgaacacaaagcctcgaaatcagtgcgctccagctgatctcgttccgccggttccccttgggcgccagttccgttctcctcacgggccgaacggaacaaggggtccagcttgcgggggacctccccagcccattcctgctgtcaaaaaacaaa

SEQ ID NO: 57059 - DNA, 292 bp, Zea mays
agctggacctgattctgttgtacctgatgctcctaatgcgggtgaacacacattgtcaaagatacttgcagaaaaaacaagtaaatgggttgaacaatatctcgacgcaatggaaaaggttaaactgaaacaaggacgaagagtgccatgggcatttcttctgatggaaatgcgtatctgcaggagagccagttttggaaactttacaaggaagatcctgcagtatgtgcgatcgtgatgaaaacttcagttggccttgtctacctgcttgcctgtctgctatcacctttca

SEQ ID NO: 57060 - DNA, 299 bp, Zea mays
gaaagaagagatagatcgaagataagagcacagcactgcggaagaccaagtcaataatactcactaatagctccgcatgcaaattaaagttaggagattcaagtggggctttattagacgcagattttgcactgcgtgaaagggagggaaatgctaaagcttttttccgacaaggacaggcacacattgcacttaatgacattgatgcagccgtggagagctttaaacaggcattggagttggagccaaatgatgctggaatcaaaagagagctggctgctgcaaagaagaagattgct

SEQ ID NO: 57061 - DNA, 276 bp, Zea mays
  unsure (1)..(276): unsure at all n locations
accttggaggtggtaccttcgatgtctccctccttactattgaggaaggtatctttgaggtcaaggccacagctggcgacacccatcttgggggtgaggactttgacaacaggatggtcaaccactttgtccaggagttcaagaggaagatgtagaaggatatcactggcaacccgagggctctccggaggctgaggacctcttgtgagagggccaagagaactctgtcttccactgcccagaccacttttnagattgactcgctgtacgagggca

SEQ ID NO: 57062 - DNA, 284 bp, Zea mays
ggcttcactgtgtacccatctccccaggtgtcaacctctgttgtggagccttacaacagcgtgctctccactcactcactcctggagcacactgatgtctccatcctgctcgacaacgaggccatctatgacatctgcaggcgctccctcgacattgagaggcccaactactccaacttgaatcgccttgtgtctcaggtgatctcatcgctgactgcttctctgaggttcgatggtgccctcaatgtggatgtgaacgagttccagaccaacctggttcctta

SEQ ID NO: 57063 - DNA, 286 bp, Zea mays
cgccgccctcagctccggtcagaccctcccccttcgaagatgccgaacctcgagtgccggatgtatgagcagcggttcccggaggtggatgccgcggtgatgatccaggtgaagcacatcgctgacatgggcgcgtacgtctccctgctgtagtacaacaacatcgagggcatgatcctcttctccgagctctcccgccgtcgtatccgctccatctcctccctcatcaaggttggtcgccaggagcccgccatcgtgctccgtgtcgaccgcgacaagggctaca

SEQ ID NO: 57064 - DNA, 282 bp, Zea mays
cggactatgagagcggacgggccatacccaataaccaggtgcttggcaaaatcgagcgggccattggcctcaagctccggggaaaggacattggaaagcccatcgagaaggggcctagggcgaaatgaacacaaagctcgaaatcagcgcgctccagctgatctccatccgccggttcgccgtggccgccagttccgttctcctcacgggccgaacggaacaaggggtccagcttgcggggagacctccccagcccattcctgctggcaaacaaacaaaacc

SEQ ID NO: 57065 - DNA, 287 bp, Zea mays
tggcaatattgatctaataaatgtgctaagagagtttgaatcaaaacaggaggcacatggtgaccaaattttgatcaaggcctcagtcctggctgagttacagaggcggatactaaaagccgaggccacagtacgtgaaaaggatgaagagaacgagaaccttcatcagcggcttcagcaatatgaaaaccgctggttagagtacgaacagaaaatgaaagctatggaggaaatgtggcagaagcaaatgcgcgttctgcaatcgagcctttccgtagcaaagaaga

SEQ ID NO: 57066 - DNA, 284 bp, Zea mays
cctgcacatgtccacgctgtgtaaagggttttgatgaggatgcactacttgaggggttcaggtgcaagaaccaagcatgtgatggctttttgctgcccaactcaggtaaaaaggcttatacatgccaaaatgtggtgcttctagagatgtggaagagataaaaaatatgagaagcgaaatactacagttatcggataaagcatcttcatttctttcatcaggaaataaggctgaagcaggttctatctacaagataatcgaacagttagagagaaatctgtacc

SEQ ID NO: 57067 - DNA, 286 bp, Zea mays
cgctctctaccgtccgagaccccaagcaccagcgcggcggcgggggcggcggcgaccatggctgtcggaaagaacaagaggatctccaagggaaagaagggtggcaagaaaaagaccgtcgaccctttctctaagaaggattggtatgacatcaaggcaccgtcggtgttcagtgtgcgcaacatcgggaagactctcgtatccaggacacagggtaccaggattgcttctgagggtctgaagcacagagtctttgaggttaagctagctgatcttcaaggcgacg

SEQ ID NO: 57068 - DNA, 289 bp, Zea mays
gcaagttagcaccatcagccaggccctcatcttcgtgacaaggtcccggagctggtcatttgtcgagcgcccagggtttctattggtctttgctttcttggttgcgcactgattgccacactgattgctgtgtacgccgactgggcgttcacttcgatcaaaggcattgggtggggctgggctggcattgtgtggctgtacaacatcatcttctacttccctctcgatatcatcaagttcctcatcagatatgctcttagtgggcaagcgtgggatcttgtcattgagc

SEQ ID NO: 57069 - DNA, 291 bp, Zea mays
  unsure (1)..(291): unsure at all n locations
atagtactggtgattatgtccttcgacttggtgctgatcagtcttctgaaaatttaacattgctagaaactggtgagcctatctattccccgacactgcaggaaggccccatcatgacagcagagcttataaaagaaacagaggagctagtgttacggacaggaagtcttggtgctggatgctctcaacttctatcagatatgcaggctttcaaggcagcaaatcctggttgtgtcctggaagactttgttagatggcactctccanccgattggtctgaggattgtgctg

SEQ ID NO: 57070 - DNA, 295 bp, Zea mays
attttcgtcgtggttacgacggtgacactaacaagcaacatgatgctactggtgtttatcccggaatagacattggtagagatcatgggactaccggtgtttatggcctaaacaccgacagacatcatggaacttctggggtgaatcccgggatagacacccataaccaacaacatgggactaccgttggttatgctggttacactggaaggcagcatgggaatacaggtggcctttactatggaaccgacaccgcggacacaggaaccggtcctagagtggaaacacggtggca

SEQ ID NO: 57071 - DNA, 295 bp, Zea mays
  unsure (1)..(295): unsure at all n locations
cagaccagcacccagcagccctcgtcggggggcggcactgcagcttcaccagccgccgcctttccccgtctcctctgcctctgcctctccccctaacccccttccatttctccaccccaccccgctcccgcttccgcttcctcgccacttagttcgtttcgcacccgcagccgcggctgcgttcgcattgggggcacgcaatggagcagtacgagaangtggagaagatcggggagggcaccgtacggggtgtgtacaaggcgctggacaagggccaccacgagacgatcgcgct

SEQ ID NO: 57072 - DNA, 280 bp, Zea mays
atccatttcacggtggagttccctgactcgttggcaccagagcagtgcaaggctctcgagacagtacttccaccaaggccttcatccaagctgacagacatggagatagatgaatgcgaggagacgactatgcatgatgtgaacaacatcgaggaagagatgcgcaggaagcaagctcacgctgcccaggaggcgtacgaggaggacgacgagatgccgggcggagccagagagtgcagtgcgcgcaacagtaagcagactatcatcaaggcaattggga

SEQ ID NO: 57073 - DNA, 298 bp, Zea mays
aatcgtctctctcccgtcctcccctccaccgccgcagccgccgccgtacctcctcctcccgcgcagtagccaccgccaccgccggaaatgaagaccatcctggccacggagacgatggacatccccgagggggtcacggtcacggtggcggccaagctggtgacggtggaggggccgcgcggtaagctcacccgcaacttcaagcacctcaacctcgacttccagctgcaggacggcggtcgcaagctcaaggtcgacgtctggtttggcacccgccgaaccatggccgccatccgca

SEQ ID NO: 57074 - DNA, 287 bp, Zea mays
agggccatcatcgaggccgccctccgcaccggcgcccaggctatccacccgggatacggtttcctttcagagagtgctgatttcgcgcagtctgtgaagccgaggggctcaaattcattggaccaccagcatctgcaatccgagacatgggcgataagagtatatccaagaggatcatgggtgctgctggcgtgccgctggttccagggtaccatggggctgaccaggacgttgagctgttgacactcggaacggataaaatcggttatcctgtttaaatcaaccca

SEQ ID NO: 57075 - DNA, 294 bp, Zea mays
cgagagcgaatccatggcgtcggcggcgtggtgggagacgctggtggtcgcagcagcggcggatggaaccggtgggagcagcaccacggtggtgtccatctgcatgttcacgacggtgctgtgcctgtgcctcgtcgcggaccacctcgtctacgagaacaagtgggtcgatgagtccatcagcgccctcgtcatcgggtgcatcataggcgtgatcgtatttctgctgaccaaggggaagcactcaaacatcctgcggttccgatgagcaactcttcttcatctacgtgcttc

SEQ ID NO: 57076 - DNA, 280 bp, Zea mays
ggaggttgcgataaagagaatgatggccactaaaacaaaagaattcatagtggaaatgaaagttctttgcaaggttcatcatgctagtctgaattgattggctatgcagcaggcaaggatgagcttttcctggtttatgagtactctcaaaatggttcactcaaaaatcatctacatgatcctgaaagaaaggggtgttcatcactttcatggatctttcgggtccaaattgcacttgatgctgccagaggactagaatacattcatgagcacaccaaga

SEQ ID NO: 57077 - DNA, 292 bp, Zea mays
actggccccaagttggtagggtggagcttagcgatctgaagatcagatacagggaagatgctccccttgtactgcatggaatcacatgcactttcgaaggcggagataagattggtatagtcggtcggacaggaagtggaaagacgactttaatcggtgcattgtttcgtcttgttgagccaactggggggaaaataattattgactctgtagatatcaccacgattggcttacatgaccttcgttcacgtttgggtatcattccgcaagatccgacactctttcagggaac

SEQ ID NO: 57078 - DNA, 266 bp, Zea mays
ttttcaggtacattcaaagaacattttgggaagtgtggggatataattgatgctgtcataatgaaggaccgctacacacaaaagcccagaggctttggctttattacttttgctgatcccactgttgttgacagagtgattgaggatgaacatgttatcaatataaaaccggttgaaattaagagaacgatccctaagggagctgctcctttgaaagatttcaagacgaagaagatttttgttggtggattacctcagctctaaaa

SEQ ID NO: 57079 - DNA, 286 bp, Zea mays
gcccctcagccatgtccttgccaccaagctaggtgctcgtctcaccgaggtccgcaagaacggaacctgcccctggctcaggcctgatgggaagacccaggtgacagtcgagtaccgcaatgagggtggtgccatggtccccatccgtgtccacaccgtcctcatctccacccagcacgacgagacagtgaccaatgatgagatcgctgctgacctgaaggagcatgtcatcaagcctgtcatccctgagcagtaccttgacgagaagaccatcttccaccttaac

SEQ ID NO: 57080 - DNA, 286 bp, Zea mays
  unsure (1)..(286): unsure at all n locations
atcgagccgattcggcccaacaagaatgcatcatcaaactaaatgacattctacaagatgnnacgtcctttgagctagttgcaaggttctgctatggtgtgaaaatagagctttcacctgcaaatgttgtctacctacggtgtgcctcagagcatctagaaatgactgaagaagtagctgaggaaaacctgattgcacagtcagaaatgttcctcaaccaagtggttctccgtaactggaaagattcctggcagcattggaaacatgtgatgacctactccccatg

SEQ ID NO: 57081 - DNA, 291 bp, Zea mays
caaaatgtcgctttatccttcttgatgtcattccagtgggggccattgtccttgcagtaacaacactccttgattggtggatgtatggttcctgggtcatagtgccgcttaattttttgaaattcaacttattgtcttccggaggagactactatggaacacatgtcttccattggtactttacacagggttttccatccatgatttggacattcttaccatttgcattgtgcggtattgtaaagtctcaggaatggaggctttcaggtctaattgcttgggtggtagggg

SEQ ID NO: 57082 - DNA, 279 bp, Zea mays
caagctgaagaccgtgcccatcgtatagggcagaagaatgaagtgcgtgtgtttgttcttgttagtgtcggctccattgaagaagagatcctggaccgtgcaaaacaaaagatgggtatcgatgcaaaagttatccaggctgggttgtttaacacaacttccacagcacaggacagacgagcattgctgcaggagatccttaggagggggacaagctcgctgggaacagatatccccagtgagcgcgagataaatcgtttggctgcacgaactgatgaa

SEQ ID NO: 57083 - DNA, 287 bp, Zea mays
gggatacaaaaagaaacactttctgctctgtttgagacttacttccgcattctgaagcatagtatggccgcttcaaattcaaggactaaggtgaataatgtttcccctggtggctcacacccacttctcactccatgcctggagggtttagggaaattttcacatttaattgatttggatttcatgggtgaacttatatcttgcctcaagaagctttctgggtatagtgaccgacaagacgaaattcccaatgataatgcactgtctgtctcagaacgtctgcagtg

SEQ ID NO: 57084 - DNA, 283 bp, Zea mays
ctcgctctgggccgccgccgccgccctaagccacgtgctgaggctttcgttggtctcttcgccggcgacgagcacccagcagttctgtagaaatggctgatggtgaggacatccagcctcttgtctgcgacaatggcactggaatggtcaaggctggttttgctggcgatgatgcaccaagggcggttttccctagcattgttggccgtcctcgccacactggtgtcatggtagggatgggacagaaggacgcatatgttggcgatgaggcacagtccaagag

SEQ ID NO: 57085 - DNA, 281 bp, Zea mays
ctctcacaggtcacaggctcacagcacactgccactccgaaaccccaagcgccaccaggaccaggcagcctcctccgtcctatctcctccaagtccaacaagcacctatgggaggccatctccgcccggatgcgggaccaagggttcgaccgctccccgaccatgtgcaccgacaagtggcgcaacctgctcaaggagttcaagaaggcgcgcaccactctcggaacagcggcggcggctctggctctggagggaacggcaacgccaagatggcgtactac

SEQ ID NO: 57086 - DNA, 263 bp, Zea mays
ctctttgactatggcgtgcaagatgacgagagcccctcaggttcgaatgattcagatgtggttccagtcttggtagaaaaggttgctcttcctatcttgcaccaccgcatcgagcgctgctgggatgtattgagtacccaagggactagaaaggctgtggaagctagcaggatggtgatcggttatttaccaacatcaagcaaggatttgcatcgactactggctgccgtgagcagccgtctaacccaggcgtcggcgatctt

SEQ ID NO: 57087 - DNA, 290 bp, Zea mays
ggcagaccggctattggctccattgctccactgtctgctttggctgccttgcctcgatggaccggatgcagtgaggaatccagccgaacgacagttttgaaggataggaaggggagctggaagcagtcacgcaggcagcctcgccgtgattcatatggaacaagctggagtcagtttctgctgtgccactcactgtttaccttaagattattacctgtgttgttgtcctttgctcgttagggctgataacataatgactcatttagaaatcatgcccctcgttttattaa

SEQ ID NO: 57088 - DNA, 279 bp, Zea mays
cccgaagcctacttggatatctctggaagttctattaaccccagtgagagaacctatccagaggagatgatccaaactgggatatccaccattgatgtcatgaattccattgctcgtggacaaaagattccactgttttctgctgctgggctccctcacaatgaaattgctgctcagatttgtcgtcaggctggtcttgtgaagacattggagaaaggaaagcatgctgagggtggtgaagatgacaactttgctattgtgtttgctgctatgggagtg

SEQ ID NO: 57089 - DNA, 188 bp, Zea mays
aaaggaggcatccaagtcactgcctgacttcaagaaggatgatcagaaggctgtggattctgctctgatcaaggctatcgaggctgtcccggagctgaaaacctatcttggcgcccggttctctctcagggatggtgacaagccccatgagatggtcttctaagctcttagttttggagttcggagga

SEQ ID NO: 57090 - DNA, 294 bp, Zea mays
aatctttgaggtcaaggccacagctggtgacacccatcttggtggtgaggactttgacaacaggatggtcaaccacttcgtccaggagttcaagaggaagaacaagaaggatatcactggcaaccccagggctctccggaggctgaggaccgcttgtgagagggcgaagaggactctgtcttccactgcccagaccacgattgagattgactcgctgtatgagggcatcgacttctactccaccatcacccgtgccaagtttgaagagctcaacatggacctgttcaggaagtg

SEQ ID NO: 57091 - DNA, 306 bp, Zea mays
ctttgggacaaagaacttcgacatggctatcgtgttcaaggatttcaagaaagacgttctccgcattgactccatcccttcagcatcgcttgacgcgataaaggaatggctggacacaactgacctcaagtactatgagagcaggctgtctctgaactggcgccctatcctgaaaactataatcgatgatcctcagaagttcattgacgatggcggctgggagttcctgaacatggaggcgagtgactcagagactgaggacacagaggaatcagaccaaggctatgtgccttcagacgctgagcc

SEQ ID NO: 57092 - DNA, 307 bp, Zea mays
attgattctgctgttctctcaaggctgaagcatttttcggcaatgaacaagctcaagaagatggcattaagggttattgctgaaagcctgtctgaggaagagattggaggcctcaaggagttgttcaagatgattgatactgacagtagtgggactaaaacatttgatgagctgaaagatggcttgaaaagggtaggctctgaattaacagagaacgaaatccaggctctaatggaagcagctgatattgataacagcggaaccatcgactacggcgaattcattgcagctacgttgcacatgaaca

SEQ ID NO: 57093 - DNA, 304 bp, Zea mays
ctctgctggccagctcgccttcgtcttcttcggcgggtgcccgcgcacctggaccggcttctcctccgccgccttcgccgacctcgccgccatcgtcaggctgtcgctgtcgtctggcgtcatgctctgtttggagctgtggtacaacaccatactggtgctgctcactgggtacatgaagaacgcagaggttgcgctggacgccctctcaatatgcctcaacatcaacggctgggagatgatgatttccatcggctttctggcggcaccggagtacgggtggcgaacgagctgggagccggga

SEQ ID NO: 57094 - DNA, 305 bp, Zea mays
ccgtcggcacctccgcttcaagatgcagatctttgtgaaaaccctgactggcaagactatcaccctcgaggtggagtcgtctgacaccattgacaacgttaaggccaagatccaggacaaggagggcatccccccagaccagcagcggctcatctttgctggcaaacagcttgaggacgggcgcacgcttgctgactacaacatccagaaggagagcaccctccaccttgtgctccgtctcaggggtggcatgcagatctttgtgaagacactgaccggcaatactatcaccctcgaggtggagt

SEQ ID NO: 57095 - DNA, 306 bp, Zea mays
gctgcctccgcctctcgagtctcgtccacccgtcatcctcctagctcctctactcgccagtcgccatgggcaagattaagatcggaatcaacggcttcggaaggatcggcaggctcgtggccagggtcgccctccagagcgaggatgtcgagtccgtcgtcgtcaacgaccccttcatcaccacggactacatgacctacatgttcaagtacgacaccgtccacggccactggaagcacagcgacatcacactcaaggactccaagacccttctcttcggtgacaagccggtcaccgtctttggca

SEQ ID NO: 57096 - DNA, 306 bp, Zea mays
ccatgccggacttctctaggtttgataatctatgggatttgcaacttcgcgacaacgagctcacagggccggtgcctgagagtcttttcaagttgaaggccctgaagaacgtgactctgacgaataatttgctgcaggggccgatgcctcagattcctaatcaacttcatgctgacatcaaagcagatctcagagcggttttgtgtgcaggaagccgggaagccgtgcgatccccgtgtgagcctgctgcttgaggttgctgctgggttcatgtacccgaaggcacttgctacggattggaagggg

SEQ ID NO: 57097 - DNA, 103 bp, Zea mays
ctcgagcgaatcggctcgagttcaggctgggtcagcaattgctgagaaccttaggacatataatcagcctgcgtttctctacattcctatggctggagagctt

SEQ ID NO: 57098 - DNA, 301 bp, Zea mays
gtcggggagttcgccaaggaggtgaacgccgtggacgtgctggtgggcgtgcacggcgccgggctcaccaactcgctgttcctccccacgggcgccgtgttcatccagatcaacccgtacggcaagatggagcacatcggggaggtggacttcggcatccccgccgtggacatggggctcaagtacatcgcctactccgccggcgtcgaggagaccaccctggtggacacgctggggcgcgaccacccggccgtcaaggacccggagtccatccaccggagtgggtgggggaagtggccga

SEQ ID NO: 57099 - DNA, 294 bp, Zea mays
gaaggccacaagagctttcccagtggacacacttcatggtcttttgctggtctaggcttccttgcatggtacttagctgggaaactcacggcttttgatcgcaaaggacatattcggaagctatgcattgtgtttctgcctcttcttactgctgcgcttgtggctgtttctcgagtggatgactactggcatcattggcaagatgtatttgcagggggtcttataggtcttacagttgcttcattttgctatctacagttttttccatatccttttgatggcgatgctttgtgg

SEQ ID NO: 57100 - DNA, 299 bp, Zea mays
tctcccgccgccgccaatcccctcccgttctccgccaccgccaatcccctcccgtcctccgccacctctgctgagagcgagaagagatggccggcaagggtgatgggccggcaatcggcatcgatctcggcacgacctactcttgcgtcggtgtgtggcagcacgaccgtgtcgagatcatcgccaacgaccagggtaaccgcaccacaccctcgtacgtcgccttcaccgactccgagcgcctcatcggagatgcggccaagaaccaggtcgccatgaaccccatcaacaccgtcttt

SEQ ID NO: 57101 - DNA, 102 bp, Zea mays
aagggatctgggagtgcatgccgcagtatatatggtggttttgtgaaatggtgcatgggagaaaaagatgatggaagtgacagtattgccgtgcagcttgct

SEQ ID NO: 57102 - DNA, 130 bp, Zea mays
ctctcaaaccctagccgcctcctgcaagtttcagagctcaggaatctgcgccatggcgagtgagacggagaccttcgcatttcaggctgagatcaaccagctgctctcactcatcatcaacaccttccac

SEQ ID NO: 57103 - DNA, 141 bp, Zea mays
ctcgagcgttttgatcaatggaccagaaatcatgtcaaagctagcaggagaaagtgacagcaacctcagaacggcatttgaagaagctgagaaaaatgcaccttcaatcatttttattgatgagatagattccatagcacc

SEQ ID NO: 57104 - DNA, 298 bp, Zea mays
cagggaacaaattctgcaagggtggtgactgtaatttctctgattccagtaactcctcatggacgtggatctctccttggcatctttcgaggagttactggaatcagagaaatcacaggagagatccacgtccatgaggaagcttataatcgcagtgatcctttgcatcatattcatgacggtggaagtggtcgggggcatcaaagcaaacagtcttgccatcttaactgatgcggcgcaccttctttctgatgtggcagcatttgccatatcgttattctctctctgggctgctgga

SEQ ID NO: 57105 - DNA, 296 bp, Zea mays
ccgcggtctgctcgtacgatctgtgcagcagatctgaggtcccgggcgaccgtgaagcagcttcaatcgtcggcatggcgctcgtattgcatagtggggctggaaacaagaatgccttcaaagcacttattgctgcagaatacagtgggatcaaggttgagttgcccaaggattttgagatgggtgtctccaacaagacccctgagtttcttaagatgaacccccgtgggaaggttcctgttctggagactcctgatggccctgtttttgagagtaatgctatcgcacgctatgtt

SEQ ID NO: 57106 - DNA, 304 bp, Zea mays
  unsure (1)..(304): unsure at all n locations
caaagctggtgagaaaaggctgggtacggatgagaagacctttatccgcgttttcactgaacgcangttgggcacacttggcatctgtttcgtctgcctaccatcatatgtatgaccggaaattagagaaggttatcaagagcgaaacatctggaaactttgaattcgcacttttagctatcctcagatgcgcggaaaacccagcaaagtattttgcaaagctcttacgaaaggccatgaaaggtctaggcactgatgacaagacacttataagggttgtggtgacgaggactgaaattgatat

SEQ ID NO: 57107 - DNA, 298 bp, Zea mays
tgacgaagctgctgaggctggccaagtacggggtcgtcggacggagggaggttctggagtccggcgacatggcagtgctgttgcggaatgcgaaggccggggacaaggtgtcggctcgagcgctgctgcacctcatcctcgacggcgacgaaggggacgcctccaagaaagcttgtaggtactgatcactgcacattcaactccacacagaaaggttttggttctgatgattttcgtaagattcgtaatggtgcaatggtagggcctttggacttaaatgctaaagtgatagtagagt

SEQ ID NO: 57108 - DNA, 295 bp, Zea mays
  unsure (1)..(295): unsure at all n locations
cttcatagttcagtgtgtcgcataaaaatgtcgcagttgctggataaagccaagaacttcgtgtcggagaaggtaaatgatatggccaagccgtagggatntgtcactgacgtggacttcaagcgcgtgagcaaagataatgtcgagtacttggccaaggtctctgttcgtaacccttattcaacttccatacccatttgtgagatcaactactctttcaaaagcgcatccagggagatagcatcagggaaaattccagacccaggatcgttgaaggcaaaggacacaacaatgg

SEQ ID NO: 57109 - DNA, 294 bp, Zea mays
ggaagggcaacagatgtagctctagggtggtcagtagctttaggttctcctttcacatttgctactactctagagcaggagtaccggagtgacatttttggcgagcgaggtattttgcttggtgctgtccatggcatggtggaggctcgtttcaggagatacacagaacaaggaatggacgaggactcagcatataagaatactgtagagagcatcactggaattatatcgaaaactatttcaaagaagggtatgcttgaagtgtataactccttgactgaagaaggaaagaag

SEQ ID NO: 57110 - DNA, 293 bp, Zea mays
gaagcatgctggacaatctcaaacatcacagctggtaacagggaacagattcaggccgtgattaatgcaaacataattgcacctctggtgcaacttctgcaaactgctgaatttgacatcaagaaagaagcagcctgggcaatttcaaatgccacttctggtggcacacatgatcagatcaagtaccttgttgcccagggttgcattaagccactctgtgatctgcttgtttgcccggatcccagaattgtaacagtttgcttggagggtcttgagaacatcctgaaagttgg

SEQ ID NO: 57111 - DNA, 294 bp, Zea mays
caagcatgagagttgtgggcagtgcacgccttgccgagaggggacaccctggctctggatgatcatggagaggctcaaggttggtgacgcgaagctggaggaaattgacatgcttcatgaggtcacgaagcaaatcgaagggcatacagatagtgcgcttggggacgctgcggcatggcctgtgcaggggcttatcaggcacttcaggccagagttggagcggaggatccgcgagcgagctgaaagggagctgttggcggcttctgcataatgtgccagccatgtagcccctgt

SEQ ID NO: 57112 - DNA, 298 bp, Zea mays
atcttgttgttactgattctatagaagtggttaagcagattttggactcagctttacaaggaattgaagagcaaaatatggaaatcaagcttaaaacattccatgaacatgaatgcaatggtccagtaatcttgaaggttaactcctgctgtagtcgggacctttcagagaaagtcattggagtttgctttgtagcacaagatttgaccaggcagaagatgattatggataagtatactaggatacaaggagactatgttgccatagtaaagaaccccactgagctcatccctcccat

SEQ ID NO: 57113 - DNA, 300 bp, Zea mays
ggaagggcaacagatgtagctctagggtggtcagtagctttaggttctcctttcacatttgctactactctagagcaggagtaccggagtgacatttttggcgagcgaggtattttgcttggtgctgtccatggcatggtggaggctcttttcaggagatacacagaacaaggaatggacgaggactcagcatataagaatactgtagagagcatcactggaattatatcgaaaactatttcaaagaagggtatgcttgaagtgtataactccttgactgaagaaggaaagaagcagttt

SEQ ID NO: 57114 - DNA, 295 bp, Zea mays
aggacggcgacgcccgacggccgcatggtgatggaggaggacctgagccggatgccatacctgaaggccaccatcaaggagtccatgcgcatccacccgccggcgccgttcctcctgccgcacttctccacccacgactgcgagatcaacggctacaccatccccgccggcacgcgcgtcatcgtcaacgcgtgggcgctcgccagggacccgacgtgctgggacaaggccgaggagttcttcccggagcgcttcctggaacaaggccgcgacgccgaggtcgacatgtacggca

SEQ ID NO: 57115 - DNA, 144 bp, Zea mays
gttactgctgacacatttgaaaaggacacggaaatgtggcagcaacgagtagaaaaatattggagtttgttgggcccaaaggtaaaaccagacactattagaaacatcatggacatgaaagcaaattttgggtcatttgctgct

SEQ ID NO: 57116 - DNA, 305 bp, Zea mays
  unsure (1)..(305): unsure at all n locations
ctcgagccgattcggctcgacttctcccgccgccgccaatccgctcccgttctccgccagcgccaatcccctcccgtgctccgccacctctgctgagagcgagaagagatggccggcaagggtgatgggccggcaatcggcatcgatctcggccggacctaccttgcgtcggtgtgtggcagcacgaccgtgtcgagatcatcgccaacgaccagggtaaccgcaccacaccctcgtacgtcgccttcaccgacatcgagcgcctcaatggagactcggccaagaaccaggncgccatgtaaccc

SEQ ID NO: 57117 - DNA, 263 bp, Zea mays
agataaatcaaggaatggaccccataaacgagaggaaaatgtttcagcagcttgtcagagctgccatccaaattaacacgccgcagtgcttccttctgacgcccaagctcctacctgatctggagtacagcgatgcctgcagcattctcaacattatgaacggccatggattgaggagccagcaaaagcttggagctccggtgattgttggaggacagtggtcagcgcacgtgacactgagcgccgagctattttgccttgac

SEQ ID NO: 57118 - DNA, 190 bp, Zea mays
ccctcccgttctccgccaccgccaatcccctcccgtcctccgccacctctgctgagagcgagaagagatggccggcaagggtgatgggccggcaatcggcatcgatctcggcacgacctactcttgcggcggtgtgtggcagcacgaccgtgtcgagatatcgccacggtcgtgctgccacgaccgacgc

SEQ ID NO: 57119 - DNA, 295 bp, Zea mays
ctcgagccgattcggctcgagaagggatcctggtggtatgagcgctcccacggagaaaagggacctctatgatgctgaacacgggaagaaggttttgagcatggctcctggcctcgagaggctcaacatccttcctttcaaggtggctgcatatgtcaaaagcaaaagaaaatggatttcttcgatccatcaaggaaagatgatttcctcttcatctctggcacaaagatgcgcactcttgccaagaaccgcgagagtcccccggatggttttatgtgcccgggctgctggaaag

SEQ ID NO: 57120 - DNA, 293 bp, Zea mays
ggtgagcatatcattgctggagctggtgagcttcatcttgtgatttgcctgaaggatctgcaagatgacttcatgggaggtgctgaaattattgtttctcctcctgttgtgtccttccgtgaaaccgttcttgagaagtcctgccgcactgtcatgagcaagtcacctaacaagcacaaccgtctgtacatggaagcgcgccccctggaggagggtcttgctgaggcaattgatgatggccgcattggcccacgtgatgatcctaagggtcgctcccagatcctctctcaaga

SEQ ID NO: 57121 - DNA, 292 bp, Zea mays
cgcctccctttccccttccctccctccctctccccgcgggccgccagaggcaatttcgccctcgattcgaccccgattcgtccgcccgcgaccgggattccctccgccaagcgcggatctgaacgctgcgctccgtgtcgccgctcgaatccgccatgatcggggccaaatccaagggcgccgccaaggccgatgccaagctggcggtgaagagcaagggggcggagaagcccgccaagggcaggaaagggaaggccggcaaggaccccaacaagccctagagggcatccag

SEQ ID NO: 57122 - DNA, 253 bp, Zea mays
gttgagagagcgttaaaggcacgttatcaagatgcaatgaacatactgaggccacagggaagggaacttgatctgctgatcgtaatactgcctgacaacaatggttctctttatggggatctcaaaaggatctgtgagactgaactcggattggtctccagtgttgtctgactaaacatgtttttaagatgagcaagcagtaccttgcaaatgttgcactcaaaataaatgttaaggcttggggaaggaatac

SEQ ID NO: 57123 - DNA, 261 bp, Zea mays
cgccgtctgccttctgcgcctccatttcggcctctgtcccttgcaagttcaatctcacctccaaccatgggtaaagagaagtcccacatcaacattgtggttattggccatgtcgactctggcaagtcgaccaccacaggagaccttatctgcaacttggaggcattgacaagcgtgtgatcgagaggttcgagaaggaggctgctgaaatgaacaagcggtccttcaagtacgcgtgggtgctcgacaagctcaaggctg

SEQ ID NO: 57124 - DNA, 155 bp, Zea mays
ctgggccgactacggcgcccactacatcaaggtgcgcaagctctacgacctcgagctcttcacgcagcgccgcctcgaggcgctcaggtccatccgcgatgacgaggtcaccgccatggtcgagtccgtctacaaggccgtcaccgcgcctggaa

SEQ ID NO: 57125 - DNA, 218 bp, Zea mays
gcagctcatccagccgatcgccaacgggccaccgtgctctctctagacactgattttgatggctgcatgcggctcattcgcgaggtcactgcagagctgccaatctaccttgccaattcgctcaacccgctccgccttgaggggcagaagacagcggccatcgagatattgcagcagttcaattggcaggtgccagattgggtcattgttccaggagg

SEQ ID NO: 57126 - DNA, 248 bp, Zea mays
cgaatcgagcgcccgccacggcgatggcgactagagtcctgccgccggctctgctctctttcatactcctcctgctgctctcgctctcagcccgcgacaccgtcgccgcgggcgaggatttcccacgcgacgggcgggtgatcgacctcgacgagagaatttcgaggcggcgctgggcgccatcgactttctcttcgtcgacttctacgcccctctgtgcggccactgcaagagcactgcgcccgagt

SEQ ID NO: 57127 - DNA, 239 bp, Zea mays
aaagtactgtccacttgaccatgttgcaatggatcaaaatgaggagctatttactgttagcaacagttcactttcagagtttgctgttcttgggtttgaattgggttactccatggagaaccctaattcattggtactttgggaagcacaatttggcgattttgccaatggtgcacaagtgatgttcgaccaatttttgagcagcggcgaggcaaaatggttgcggcaaaccggccttg

SEQ ID NO: 57128 - DNA, 288 bp, Zea mays
caaggcgttccacacaagatacgagcggcggaggaacgacgcacggagacaagggacctctatgatgctggggacgggaagaagggttggagcatggcgcctggcctcgagaggctgaacatccttcgtttcaaggtggctgcatatgagataaagcagaagagaatggatttcttcgatccatcaaggaaaggtgatttcctcttcatctctggcgcaaagatgcgcactcttgccaagaaccgcgagagtcccccggatggttttatgtgccgggcggctggaaag

SEQ ID NO: 57129 - DNA, 232 bp, Zea mays
aaatggttggaagcaagcccctttatgtagctcttgcgcagcgtaaagaagacagaaaggcaaagctacaggcacaattttcacaaatgcgtcctgttgcaatggcgccttcagtaggtcctcgcatgcccatgtttccacctggtgtccctggagttggtcagcagctgttctatggtcagccaccaccagccttcatcaaccctcaggctggatttgcttccagcaacct

SEQ ID NO: 57130 - DNA, 261 bp, Zea mays
aatcttgctccagaaccagaagacgtgtattggtccaatctttggctaccctataagcaactttgggctcgccgtattgctacactcctaggctctatctttttcatgttcatatttctgctaccggtgacatttatacaaggactatccagctagagcagttgcagcagaggcttcctttcctaagaggaatattgaagaagaaatactacatgactcagctagtaactgggctacttcccagtgtcatactgcaaatct

SEQ ID NO: 57131 - DNA, 236 bp, Zea mays
ggaagtctcatcctacctcaagaaagttgggtacaaccctgataagattgcctttgttcccatttctggttttgagggcgacaacatgattgagaggtccaccaaccttgactggtacaaaggcccaaccctgcttgaggctcttgaccaatcaccgagcccaagaggccttcggacaagcccctgcgtctgcccctccaggatgtgtacaagattggtggtattggaactgtacc

SEQ ID NO: 57132 - DNA, 248 bp, Zea mays
  unsure (1)..(248): unsure at all n locations
tggatggattttgccgcaacagaagttgatcctggtgttgcatggtacttgtatccaaggcttgggtacctcccttatgttagcacaactgaggaaacagctatttcttcattgaagaggtcgcttggtgctctgaacacacacttgcttcaaacacataccttgttgggcatgctgttactctagctgacattgtaatgacatgcaacctctaccatggaattgcacgagatctgaccanagacctc

SEQ ID NO: 57133 - DNA, 230 bp, Zea mays
cgaatggaggtgccactcaagttcgctcctttgccaaggatgcagctccagctgaccgtcctcctgttagtggggatgatctcctgaagggcatattctttgaggtaaagaagaagtttgagacagctcttggcgtccttaaaaaggaagagattactattgatccagatgacccagcggcagtttctcgatatgctcaagtcatgaagactgtaagggaaaaggcggat

SEQ ID NO: 57134 - DNA, 293 bp, Zea mays
gacgcatttcatacagagctacttctctcttgtatgcaaaacttgaaatgtggcaaagctgttgacatccctaactacaacttcaagacatacaaaagtgtcccaaatgcaaggaaggttaatccttcggatgttattattttggaaggaattctagtttttcatgattcacgcctcagggatttgatgaacatgaagattttcgttgatacagacgctgacgtacggttaacaaggaggatccatcgtgataccattgacaagggtagagatctcaaagctgtgttagaaca

SEQ ID NO: 57135 - DNA, 293 bp, Zea mays
cgacggtcgacgccgcggcttctcctcatcctcgtcccctccgtccgctgactggaagtggtcaacacagaagaaggtcgccatattgttaagttaaaagttggatcatcggaataatgccgccccacaagatcgagactgggcatcaagatgtggtgcatgatatcgccatggattactacgggaagcgcctagctacagcctcccctgataacacaataaagatcattggcgtaagtggaacctcgcaccagcagcttgcaaccttgagtggacaccagggcccagtatgg

SEQ ID NO: 57136 - DNA, 292 bp, Zea mays
aaggagttcagctacagcaagatcctcaaagatctcaagaaagagttctgctgcaatggtacagtggtccaggacccagaacttggacaggtcattcagctccagggtgatcagaggaagaacgtctcgaatttcctcgtccaggccggcattgtgaagaaggagcacatcaagattcatggtttctgagcaaccgccgggtccatagcaaaccaaccctgcatgcagggccagcttattatatataatatctgaggtggagcatatctatctggctgtgtactacaagcag

SEQ ID NO: 57137 - DNA, 292 bp, Zea mays
cagttcgcatcggagatgaagacacttggccaggtgaggcaccggaacttggttccgctcttgggattctgcgtcgccaagaaggagaggttgctggtgtacaagcacatgcccttgggctcgctctacgaccagctaaacaaagaggaaggtagcaagatggactgggcgctgaggctacggatcggcatcggtgcagcgaaagggcttgcgtatctccaccatacctgcaaccctcgagttctccacggcaacatcagctccaagtgcatcctcctggacgaggactacg

SEQ ID NO: 57138 - DNA, 294 bp, Zea mays
cccctcaatatctctcgtgagactcttcagcagaacaagatcctgaaggtgatcaggaagaaccttgtgaagaagtgtgttgagctcttctttgagattgctaagaacaaggaggactacaacaagttttacgaggctttctccaagaacctcaagcttggcatccacgaggactcgcagaacaggaccaagatcgccgagcttctgagataccactccaccaagagtggtgatgagctgaccagcctcaaggactacgtgaccaggatgaaggagggacagaatgacatatac

SEQ ID NO: 57139 - DNA, 290 bp, Zea mays
tctgctcgttcgatctgtgcagcagatctgaggtcccgggcgaccgtgaagcagcttcaatcgtcggcatggcgctcgtattgcatagtggggctggaaacaagaatgccttcaaagcacttattgctgcagaatacagtgggatcaaggttgagttgaccaaggattttgagatgggtgtctccaacaagacccctgagtttcttaagatgaacccccttgggaaggttcctgttctggagacttctgatggccctgtttttgagagtaatgctatcgcacgctatgtt

SEQ ID NO: 57140 - DNA, 286 bp, Zea mays
accagctttgaccgccgcctcccttcccctccgctactgctcctccccaccccactcccccgcaggagcggcggcggcggcggcgaggtcgtaccccacatcggcgagcggcggcggcaccgccggagtgcaaaggcaagatgttcgggcgcgcgccgaagaagagcgacaacaccaagtactacgagatcctcggggtgcccaagtcggcgtcccaggacgatctcaagaaggcctaccgcaaggctgctatcaagaaccaccccgacaagggcggtgaccccga

SEQ ID NO: 57141 - DNA, 282 bp, Zea mays
agtagtcgttctatgatgtatgaagctccccttggctacagcattgaggacgttcgacctgccggaggcgtgaagaagttccagtctgctgcttactccaactgcgcgaagaagccatcctgatatcccttttggcttcctcattctagtagtttaggatttcttttctgacactttgattctgaccaatctctctggcctgctgcttcctgataatcgaccagttccccagtcttgctccttgcactcctccctccatctccagcattgtgttctgattca

SEQ ID NO: 57142 - DNA, 286 bp, Zea mays
ttcactgagactgtggaacttcagattggtctgaagaattatgatccacagaaggacaagcgtttcagtggctctgttaagttgccccatatccctcgtcccaagatgaaggtgtgcatgcttggtgatgcccagcatgttgaggaggccgagaacatgggacttgactacatggatgttgaggctctcaagaaaatgaacaagaacaagaagcttgttaagaggcttgccaagaagtaccatgctttcttggcatcagaggccatcatcaagcagattccccgtc

SEQ ID NO: 57143 - DNA, 283 bp, Zea mays
ccgttctccgccaccgccaatcccctcccgtcctccgccacctctgctgagagcgagaagagatggccggcaaggttgatgggccggcaatcggcatcgatctcggcacgacctactcttgcgtcggtgtgtggcagcacgaccgtgtcgagatcatcgccaacgaccagggtaaccgcaccacaccctcgtacgtcgccttcaccgactccgagcgcctcatcggagatgcggccaagaaccaggtcgccatgaaccccatcaacaccgtctttgatgccaa

SEQ ID NO: 57144 - DNA, 283 bp, Zea mays
  unsure (1)..(283): unsure at all n locations
gtccactgaggcacaacatgagctcgtagaatcagctgcagttcacncttatgggctgatccatgcacgatacattctgaccagtaaatcgctggctgcaatgctggagaagtataggaactatgacttcgggcggtgccgcgtgtttactgctgtggtcaaccatgcctgccggttggacaatcagatattcatcgatctagtaccgtgaaaatatactgccccaagtgtgaagacatctactacccacggtccaagtaccaaggcaacatcgacggcgcat

SEQ ID NO: 57145 - DNA, 285 bp, Zea mays
ctagtcccctgctccattctcagccgccgccaatcccttcccgtgctccgcaaccgctgagtgagaagaagagatggccggcaagggcgatggcccggctatcggcatcgatctcggcacgacgtactcttgcgtcggcgtgtggcagcacgaccgcgtcgagatcattgccaacgaccagggtaaccgcaccacgccctcgtacgtcgccttcaccgactccgagcgcctcatcggagatgcggccaagaaccaggtcgccatgaaccccatcaacaccgtctt

SEQ ID NO: 57146 - DNA, 284 bp, Zea mays
ctggtgactccccaaagtgccgtgatctggtacttggtcatggtgggctataccctttgctgcagcagcttaatgagcatgctaagctttcgatgcttaggaatgctacatggactctctccaacttctgtcgggggaagccacaaccaaactttgatcaggtcaaaccagcattgccagcactacagcaccttattcactctcaggatgaggaggtcctaactgatgcctgctgggcgctctcatacttgtctgatgggactaatgataaaatccaagctgtt

SEQ ID NO: 57147 - DNA, 282 bp, Zea mays
gtttttgcctaccgattggcaaagctaagatagaacgtgagggtaaagatgttaccattactgcgttctccaagatggttggctatgctctccaggctgcagagatactgtccaaggaaggaatcagtgctgaggtgatcaaccttcgatcaatcagaccacttgatagagctgctattaatgcatctgtcaggaaaaccaaccgattggtgactgttgaagaagggttcccccaacatgggattggtgccgagatatgcatgtctgttgtagaagacagct

SEQ ID NO: 57148 - DNA, 282 bp, Zea mays
ggagaagatgtagtccactcacttaaagtttctctggaagatctttacaatggaatctcaaagaagctctctctttcgcgcaatgtcatctgctccaagtgcaagggcaagggctcgaagtctggtgcttccatgaggtgccctgggtgctagggctcaggtatgaaagtcaccattcgtcagctggggccttccatgatacagcagatgcagcagccttgcaacgagtgcaaggggactggggagagcatcaacgagcaggaccgctgcccagggtgcaag

SEQ ID NO: 57149 - DNA, 281 bp, Zea mays
tgccctccccggcgtcgcgctctggtcgtcgtcggccgggaagatggctggcggcttcagggtacttcatctggtcaggccctttctggctttcttgccagaggtgcagagcgcggataggaagataccattcagagaaaaagttatctacactgttatttctctcttcatttttctggtgtgcagccagctcccactctatggcattcattcgacgactggagctgatcctttctactggatgcgtgttatccttgcatcaaaccgtggcactgtgatgg

SEQ ID NO: 57150 - DNA, 280 bp, Zea mays
aacaattcctccgtgaaagtcttcgcaacaccagtgcagaggtcatccagcatggtgcatgtttgtcggttgggcttgcagctttgggcacatcagatgaggaaatatatgaggacataaagaatgtcctttacacagacagtgctgttgctggtgaggcagctggtattggcatgggcttgctcatggttgggaccgctagtgaaaaggctagtgagatgcttgcttatgcacatgatacacagcatgaaaagattataaggggtttgtcactgggaat

SEQ ID NO: 57151 - DNA, 279 bp, Zea mays
tttgcatttgtctacatggaagatgaacgcgatgctgaagatgctatcagtagacttgatggaattgattttggcagaaaaggaaggaggatcagggttgagtggacaaaggaggatcgcactgttggccgaaaaagcagctcaaggaggtctcctaccaatacaaaaccgaccaaaaccttgtatgtgatcaactttgacccgatcaacacaagaatccgagatctggagaggcacttcgataaatatggcagggtcgcaaatgtaagcatcaaaaag

SEQ ID NO: 57152 - DNA, 275 bp, Zea mays
gtctgatcagattagggagctcagggagtccattgagttaccacttatgaaccctgaactctttcttcgggtgggaattaagcctcctaagggtgttctactctacggtcctccgggaactgggaagaccctattggcaagggctatcgccagtaacatcgatgccaactttttgaagattgtttcaagcgctattattgacaaatacattggagaaagtgctcgtttgattagagaaatgtttggctatgcacgtgatcaccaaccatgcatca

SEQ ID NO: 57153 - DNA, 275 bp, Zea mays
aaagcattaagaaagaggcatgctggacgatttcaaatattactgctggaaacaaagatcagatacaggctgtcataagtgctggtattatcgctcctttgttgcaactgcttcaaggagcagagtttgatatcaagaaggaggctgcttgggccatctcaaacgctacctctggtggttcccatgagcaaatcaagtacttggtgtctgagggctgcatcgtgccgctgtgcgaccttcttgtttgccctgaaccgagaattgtaacagtgtgt

SEQ ID NO: 57154 - DNA, 278 bp, Zea mays
cacacagaagcggcggcggcggagcaaacgcaggcgaaggcgagggtgtgagggaaggagcaccatccatggtgcacgtcaacttctaccgcaactatggtaagacgttcaagaaaccaaggcgtccttatgagaaggagcgtctatatgctgaacagaagctggtcggtgagtatgggctgaggtgcaagcgtgagctttggagggtccagtatgcactgagcaggatccgtaatgctgcaaggcacttgctcacccttgacgagaagaacccccgt

SEQ ID NO: 57155 - DNA, 230 bp, Zea mays
atcttagcgaagaagtgaggagaaggttctacaagaaatggtgcaagagcaagaagaaggctttcacaaagtatgctctcaaatatgaaaatgatgctggcaagaaggaaattcagctgcagcttgagaagatgaagaaatatgcttctgttatccgtgtcattgctcatacccagattaggaagatgaagggtttgaagcagaagaaggctcacctgatggagattcag

SEQ ID NO: 57156 - DNA, 280 bp, Zea mays
cggctcgagcttgaatttgacaccaaggtctgcaagacaaatgtctcatcaaagtcagcaatgcgagctcctggagatgtgcagggctctttcatcgctgaagccatcatcgagcatgttgcctgagcactcgcactagacactaacaccgtcaggaggaagaaccttcatgattttgaaagccttgaagttttctatggagaaagtgcaggtgaagcttctacatacagcctggtttccatgtttgacaagctggccttgtctccagaataccagcaca

SEQ ID NO: 57157 - DNA, 212 bp, Zea mays
atggttttgagaaaaagaacaatgaaacaattctggtttttgacctcggaggtggcacatttgacgtttcagttcttgaagtcggtgatggtgtttttgaggtgctgtctacatcaggtgacactcaccttggtggtgatgactttgacaagagaattgttgattggctcgctggaaacttcaagaatgatgagggtattgacttgctaaaa

SEQ ID NO: 57158 - DNA, 293 bp, Zea mays
ggaaggaggctgcttgggccatctcaaacgctacctctggtggttcccatgagcaaatcaagtacttggtgtctgagggctgcatcgtgccgctgtgcgaccttcttgtttgccctgatccgagaattgtaacagtttgtctggagggtctgagaatattcttaaagtagagaagcacgacaagaccatgggcgcaacaggtgacattaatgttttcgctcagatgattgacgacgcggaaggcctggaaaaaatcgagaacctacagagccatgataataatgagatctatg

SEQ ID NO: 57159 - DNA, 293 bp, Zea mays
atatcgcagtctggaaaacaaaggcaccatgttccatatcgtgattccaagcttacatttctattacaagaatcccttggaggcaatgccaaactggcaatgatttgtgctgtttcaccgtcccaaagctgtaagagtgaaacgttaagccacttaggtttgctcaacgtgcgaaagctataaaaaacaatgccgtagttaatgaagagaaaattgaagatgtaaatgcgttgcgtgagcaaatcaggcaattgaaggatgaacttcaccgaatgaaatctaatggaggcata

SEQ ID NO: 57160 - DNA, 297 bp, Zea mays
atgtgagactgctatgtctaaagaagtggagatcagacaggctgcatttgaatgccttgttgcaatagcatccacatattattcacacttagacccttatatgcaaaccatattcgacctgacagctaatgcagtgaaaggcgatgaagaccggttgcacttcaagctttcgagttctggagcgctatttgtgatgaagagattgcactccaagatgaatatgagggatctgaggatggcaactctactgtacactttcgcttcattgaaaaagccctccctttactcgttccgatg

SEQ ID NO: 57161 - DNA, 294 bp, Zea mays
gcttcaaatagctatgccaaaatggttatatatattgaagcatgtgaaagtggcagtatatttgagggattaatgccagaagaccttaatatttatgtcacgactgcatccaatgcagaagaaagtagctggggtacatactgtccaggaatggaaccaccgcctccttctgagtacattacctgcctaggtgatctatatagtgtctcttggatggaagacagtgagactaacaatctgaaggaggaaacaataaaggaacaatatgaagtggtgaagaagcgtacttcagac

SEQ ID NO: 57162 - DNA, 241 bp, Zea mays
aaaaattcagttcacaacgaatttttgtaaaatcaaaatttctcctatatggaaagcgagaattgagccaaaatgtcgttttttcatatggaccatgttgtataacataattttgactgcagacaacctacaaaagcgaggatggcctgcaatccaatttgtttcatttgcaacttatcacaagaaactatgcctcatttaggcaaagactgcccgtttttgtagaggtttggaacatgat

SEQ ID NO: 57163 - DNA, 296 bp, Zea mays
tggagtatgtcgtgccggaggagtatgtgcaaacaatgagggaatccatgctgaagaggtgcccggtctcatcgtacgagcatgtccgcggggtgtttaccaaggatctcggtgaatcgccagaaactgtttttgcagaatttgatcctgctccatttgcaagtgcttcccttgcacaagtccatgttgcccgaacgcacgatgggcaaaaagttgctgttaaggttcaacatgaccacctcacaaatactggtgttgtagatatagccactgtggatttgttagtgaatgctctg

SEQ ID NO: 57164 - DNA, 303 bp, Zea mays
gcagatgaagaggaggtgaggaagcaatataggaagctagctctgctgctgcacccagacaagaacaagtctgttggtgctgaggaggccttcaaactgatctctgaggcgtggagtgtgttgtcagatactagcaggaaggtagtttatgatgagaagcgaagaaatcattctgttgtcaatgtaaccaatggcatttatacctatgataagaaggcaaacaagagggctcgaaagaatgctgctgctgcagctgctgccgctgctgctgccgctgcagctgaggctactactcgtcctgtt

SEQ ID NO: 57165 - DNA, 223 bp, Zea mays
gcaggatgtcgcaccgtaagttcgagcacccgaggcacggctccctcggcttccttcccaggaagcgctctcccgcaccgggcaaggtgagtcattcccagggatgaccaagaaccttgcatctcagtgctccttgtaaagctggcatgactcacattgccggagttaaaccaggtcaactcataaaagaactttgagtgtacacatgaacctctctgcatgt

SEQ ID NO: 57166 - DNA, 287 bp, Zea mays
attggtataggattgtgcttgatgaagctcacacaatcaaatctcctaaaactaaaagtgcccaagcagcttatagattaaagtcggaatgcagatggtgccttacaggcacaccattgcaaaataatttggaggacctctacaggcttctctgcttcctacatgttgaaccatggtgcaatgcaaaatggtggcagaggcttattcagaaaccttatgagaatggtgatgatagagggttgaaacttgttagagctattcgtaggccactaatgctaaggaggacc

SEQ ID NO: 57167 - DNA, 288 bp, Zea mays
atagtcctctgttacttcacccgccgccgccaatcccctcccgttctccgccaccgccaatcccctcccgtcctccgccacctctgctgagagcgagaagagatggccggcaagggtgatgggccggcaatcggcatcgatctcggcacgacctactcttgcgtcggtgtgtggcagcacgaccgtgtcgagatcatcgccaacgaccagggtaaccgcaccacaccctcgtacgtcgccttcaccgactccgagcgcctcatcggagatgcggccaagaaccatgtc

SEQ ID NO: 57168 - DNA, 287 bp, Zea mays
ggagattggagctggtgaccagggacacatgttcgggtatgcgaccgatgagacccctgagttgatgcccctcagccatgtccttgccaccaagctaggtgctcgtctcaccgaggtccgcaagaacggaacctgcccctggctcaggcctgatgggaagacccaggtgacagtcgagtaccgcaatgagggtggtgccatggtccccatccgtgtccacaccgtcctcatctccacccagcacgacgagacagtgaccaatgatgagatcgctgctgacctgaagg

SEQ ID NO: 57169 - DNA, 293 bp, Zea mays
ggataatcaacaactaattatcaaggacataagaatattgtcgcgatcatgtgaaaatgatatgtatgcacttcaaatgcagtggagaaatgagatctctaacttaggatctgggttaaaatgtttggttgatgctgctgaaaattatcataaagtcttggcggagaaccaaaagttatttaatgaagtgcaagaactaaaaggtaatataagagtatattgtcgtgtgaggccatttctttcgggtcaagacaaaaagtctactacaattgactacatgggggaaaatggtg

SEQ ID NO: 57170 - DNA, 338 bp, Zea mays
tgtagatcgacgtaagtagtatcggatgtcggatatcggctcgaggttcttgctcccacccgtgagcttgcacagcaaattgagaaagttatgcgcgcacttggtgactaccttggtgttaaagtccatgcatgcgttggaggaacatctgttcgtgaggatcaaaggattctcgccagtggtgtgcatgttgtgttggtacacctggtcgtgtgtttgacatgctgcgtagacagtccctccgccctgataacatcaagatgtttgttcttgacgaagctgatgaaatgctttctcgtggtttcaaggatcagatttatgacatcttccagattctg

SEQ ID NO: 57171 - DNA, 293 bp, Zea mays
ggagttctacatcactagccggacgcacgacaccttcattgctgacctctcagttggcctgtctacgggccaaatcaagacgggagccccttgacggtctgaagcactggccaaatacaaccagctgctcaggatcgaggaagagtcggtgatgccgcggatcacgcaggagcaaagttcagggcaccagtggagccctactaagaaaggaacaggatgaggatgttttcttgtggagctatactagctcgctgctgccttttgttacaatgtttgtacggtcgcaataaatg

SEQ ID NO: 57172 - DNA, 290 bp, Zea mays
attggctctcggtacttggtgtatttgaatggtctggtaacaacccggtaccaccagaagtatggctactgccatatctcctgcgatttcacccagggaggatgtggtgtcattgtcgaatggtgtatttgccaatgtgctacactatgggaagaggtttgtgagtcgaatcacaccactcgtgttggaattaagaaaggaacttttcaaagacccttacagcaagattgattgggacaaggccgcaatctatgtgctaaggaagatctgtactatccacatccatttgt

SEQ ID NO: 57173 - DNA, 288 bp, Zea mays
aacacacacatgaccagatctctctcaaatccacgcgtcggcacctccgtttcaggatgcagatctttgtgaaaaccctgactggcaagactatcaccctcgacgtggagtcgtctgacaccattgtccacgttaaggccaagatccaggacgatgtgggcgtactcccaggtcatcagcgcatgatctttgctggagagcagcttgaggactggcgaacgcttgctggctacaacgtccgcgaggagatcaacatccatcttgtgctccgtgtcggcggacgtctgc

SEQ ID NO: 57174 - DNA, 284 bp, Zea mays
aaatgataataagcctgtgacaaacagccgtgacacacaagaggttaagctggaacaaggtcttgactatgtgccacttaagtggaatggttgttttccactcaagtggcacatagtcaaggatgtgcccaacaacactttgaagcatattacactggataacaatgataataagcctgtgagaaacagccgtgacacacaagaggttaagctggaacaaggtcttgaaatgttgactgttttcaaagaacatgttactaaaacgtcaattttggatgattttg

SEQ ID NO: 57175 - DNA, 287 bp, Zea mays
  unsure (1)..(287): unsure at all n locations
gcattgctgcgggaggtcgaggccggagaggtcttctgggatgggatcaagaaaggggtggttccccgtggccctcctgctgttggccgactctgccctctggccgccggtcgccgccgccgccgccggaggcaanncgccgaacacgccgttcagcagcatagcgagcgcatctcagggagtgctggtgatgtgttagaagataatcctgtgggtacgttgaaggtcttcatttatgacttaccaaggaagtacaacaagaagatggtcaccaaggattcacggtg

SEQ ID NO: 57176 - DNA, 284 bp, Zea mays
atcatctgttccgaagagacaaaatcccaaccccttgcggagaaaaagtctacaggcaagaaatcagcaggtccggcatctgctgtcagtgaccctgtttctacagttgatgcttcgtatgagaagcttctttcgtccattccgaattcgctgattttggaaagctttttaagtcatctgcacctgtagaattgactgaagctgagactgaatactcagttaatgttgtgaagcatatttttgatggacatgttgtgctccaatacaactgtaccaatacaatt

SEQ ID NO: 57177 - DNA, 142 bp, Zea mays
acgttctccgccaccgccactcccctcccgtcctccgccacctctgctgagagcgagaagagatggccggcaagggtgatgggccggcaatcggcatcgatctcggcacgacctactcttgcgtcggtgtgtggcagcacga

SEQ ID NO: 57178 - DNA, 287 bp, Zea mays
ggagaagatgtagtccactcacttaaagtttctctggaagatctttacaatggaatctcaaagaagctctctctttcgcgcaatgtcatctgctccaagtgcaagggcaagggctcgaagtctggtgcttcaatgaggtgcctgggtgccagggctcaggtatgaaagtcaccattcgtcagctggggccttccatgatacagcagatgcagcagccttgcaacgagtgcaaggggactggggagagcatcaacgagaaggaccgctgcccagggtgcaagggtgag

SEQ ID NO: 57179 - DNA, 286 bp, Zea mays
acgatctctggagcaaatttttcaagctagccagacacttaactcacagggttggagatataagatgcaggcctcaatgttggagatttacaacgagactatacgcgacttgctagcaacgaatcgcatggctgttcaggagttggtgcttcaaagtacagtatcaagcatgatactaatggtaacacgaatgtgtcggaccttacgatcattgacgtaactagtatcaacgaagtttcttctctccttaggcgggctgctcagagcagttggtagaacacaaatg

SEQ ID NO: 57180 - DNA, 285 bp, Zea mays
  unsure (1)..(285): unsure at all n locations
agtgaagctgctgagaaattgctctctgattcaaaccgaacaagaacacatataatcaaagtgattgaagggtttgagactgttacgttcaagtcaaaatttaaggagtggccacagacacctgagttgaagttgtcatcgaggatggaagaggcatggttgcagctcttctcaaacgccagggcttaaatgttaagggtttgatgaaagctgctcctacacaagaagaacctcaatcctatattgattccactggcaatctgcaggtttggcgtgtanatgata

SEQ ID NO: 57181 - DNA, 280 bp, Zea mays
acagcaacaggtgttccctagaggtggtcgtggctatcgctatcctactggacgtggaatgcctgatcctggcatgcacagtgttggtgctgtgatgccaccttcatatgagatgggagggatgccaatgagagaagcgccccccaacctgttccaattggggcgctaccactgcacttgctaacgcgccaccagatcagcagagacttatgcttggtgagaacctgtatcctcttgttgaacagctggaacgtgagcaggctgccaaggtcactggcat

SEQ ID NO: 57182 - DNA, 284 bp, Zea mays
ggtacacctggtcgtgtgtttgatatgctgcgcagacagtccctccgccctgataacatcaagatgtttgttctagatgaagctgatgaaatgctttctcgtggtttcaaggatcagatttacgacatcttccagcttctcccagccaagattcaggttggagtcttctctgctaccatgccccctgaggcccttgagattacccgcaagttcatgaacaagccagtgagaatcctcgtgaagagagatgagctgactcttgagggtatcaagcagttctatgt

SEQ ID NO: 57183 - DNA, 290 bp, Zea mays
gccgcagaccgggagcagtcgacgcgccgtcactgaatcctcagatcacggctagccgtaatcacacgccactctgctgactcccggcgagcagtgtaacattttccttcagccatgggcaaggagaagactcatatcaacttgtggtcattggatatgtcgactctggcaagtcgaccaccactggccacctgatctacaagctcggcggtattgacaagcgtgtgattgagaggttcgagaaagaggccgcggagatgaacaagcggtcattcaagtatgcctgggtg

SEQ ID NO: 57184 - DNA, 283 bp, Zea mays
agccataacagctcactttattgatgaatcctggactcttagaaatattataatgaggtttatctatgttcctgctcctcatactgctgacgtcattggtgaagaattgtatgagtcattggttgaatggaatcttgatgagaaaatatcttggatgactcttgacaactgcacaactaatgatgcggtaatctcttctcttgtgaggaatattggaaagcacaaacttatgaatgatggaaaattgctacatatgagatgttctgcccatatccttaatttg

SEQ ID NO: 57185 - DNA, 278 bp, Zea mays
tgcaattccttaaccgacacctgtcgtccaagttgttccaggacaaggagagtttgtaccccttgctgaacttcctcaaggctcataactacaagggcacgacgatgatgttgaatgacagaatccaaagccttcgtggtctccaatcatccctgagaaaggcagaggagtatctactgagtgttcctcaagacactccctactcggagttcaaccataggttccaagagcttggcttggagaagggttggggtgacactgcgaacgtgtactcgaca

SEQ ID NO: 57186 - DNA, 273 bp, Zea mays
gaaacctctcaaaccctagccgcctcctgcaagtttcagagctcaggaatctgcgccatggcgagtgagacggagaccttcgcatttcaggctgagatcaaccagctgctctcactcatcatcaacaccttctactccaacaaggagatcttcctccgcgagcttatctccaactcttccgatgcgctggacaagatcaggttcgagagtctcactgacaagagcaagctcgatgcgcacctgagcttttccatccacttgtcccagacaggc

SEQ ID NO: 57187 - DNA, 292 bp, Zea mays
gctgtccaggctgctatcctcagtggtgagggcaacgagaaggtgcaggacctgcttctgcttgacgtcactcctctctctctgggtctggagactgccggaggagtgatgaccgtccttatcccgaggaacaccaccatccccaccaagaaggagcaggtgttctccacctactcggacaaccagcctggtgtgttgatccaggtgtacgggggcgagaggaccgggaccgggaaaaacacctgcttgggaagttcgactctccggcatcccacgggctccccgtggtgtc

SEQ ID NO: 57188 - DNA, 286 bp, Zea mays
gctgccggcgctgatgtgtccatgattggccagttcggcgtcggtttctactctgcctacctcgtcgccgatagagttgtcgtgaccaccaagcacaacgatgacgagcagtacgtgtgggagtcccaagcgggcgggtcgttcactgttactcgtgacacgtcagggtaacagcttggcaggggcactaagatcacactgttccttaaggacgatcagctggagtaccttgaggagcgtcgcctcaaggatctggtcaagaagcactctgagttcatcagctacc

SEQ ID NO: 57189 - DNA, 259 bp, Zea mays
gttcggagcgggcagcagcacacagccccatcccaatcctagtcgatcttcttcccctcctcaaggaagaaaagaagctgaaccatggggaagagaaagtcagctgctaagccacctcctaagaagcggatggacaagcttgacactgtcttttcctgcccattctgcaaccacgggagtagtgttgagtgccgaattgacatgaagaatctgattggggaacatcttgtagaatctgtcaagaaaattcagcacaact

SEQ ID NO: 57190 - DNA, 274 bp, Zea mays
  unsure (1)..(274): unsure at all n locations
ggcgaccgtctcacccngcgccgcaacaggtgcttcgagcagctcagcggccagacccccgtcttctccaaggcgaggtacacggtgcggtcgttcggcatccggcgtaacgagaagatcgcctgctacgtcacggtgaggggcgagaaggccatgcagctgcttgagagcggcctcaaggtcaaggagtacgagctgctcaggaggaacttcagcgacaccgggtgctttggtttcggcatccaggagcacatcgaccttggtatcaagtacg

SEQ ID NO: 57191 - DNA, 277 bp, Zea mays
ccttatgttgaggtgaaactaggaaattataagggccagactgggcatttcgagaagaagaacaacccggagtggaatcaggtctttgcctttgcaaaggagcgcatccagtcatcagttgtggagattctggtcaaggacaaggatcttgtcaaggttgacttcattggacgtgttatatttgatttgaatgaggtcccaaagagagtgccacctgaaagcccattggctccacaatggtatcggttggaacaccgaaatgggcacaaggtgaggg

SEQ ID NO: 57192 - DNA, 253 bp, Zea mays
gtgttctgattcacctgctccaatggctgttctttctgctgctgatgcttccccggtctcagctatcgggtttgagggctatgagaagcgctttgagatcacattctctgaggcacctgtctttgtggaccctcatgggcgtggtttgcgtgccctctcaagggcccagattgactctgttctggatcttgcagggtgcacaattgtgtctgagctctccaacagggatttcgactcatatgtcctttctgag

SEQ ID NO: 57193 - DNA, 141 bp, Zea mays
gaagaagccggtggatcttgattcaactcttgatgagcttggagatggggaggacactcaagatgatcaagctgtagaggaacaaggggaaggcattgtgctgggaagtgtccctacatacccttgggagggaactgatcg

SEQ ID NO: 57194 - DNA, 248 bp, Zea mays
cagaccccacagagacccagaggggtggacgttggacgccggagcggcgaccgatacaattcatatagttccataactctatgccaaccttttggagtatctggagcgatacagcacttggcaggaatgatcgaatgagactcgaaggttattgtggctcttaataaaggtgttgatgccccttatttcaggttgcagattacggactggttgccgatctgtttgaggttctggatgagttactgaag

SEQ ID NO: 57195 - DNA, 176 bp, Zea mays
tgctttcacggagaaggagagggatgcacaccacttgcgtgggctgcttcctcctgcagttgttcctcaagaactccaaattaagaagatcatgcacaacctgcggcagtaccaggtccctttgcagcgctatatggccatgatggaccttcaggagaggaacgagaggcttttct

SEQ ID NO: 57196 - DNA, 248 bp, Zea mays
cgctttcttagccgctaagcatatccctctccgccacgatctcgatggtggagatgtctgtggtggagctcaggacgctgccgctcggcttccgcttccaccccaccgacgaggagctcgtcacccactacctcaaacgcaagatcaccggcaagatcaactccgagtccgaggtcatccccgagatcgacgtctgcaagttcgagccgtgggacctcccagataagtccctgatccggtccgatgat

SEQ ID NO: 57197 - DNA, 275 bp, Zea mays
tgctattgggggaaacactgctggtccaggtgatgctgttctcaatgtatacataaatcatgacaagaaatttgcttttgtggagatgagatctgttgaggaagcaagcaatgcaatggccctggatggcattatgttcgaaggggcaccggtgaaggttagaaggccaacagactacaacccttcccttgcagccgccctgggcccaagccagccaagccccaatctgaatcttgctgcagttggcctaacagcaggatctaatggaggactag

SEQ ID NO: 57198 - DNA, 250 bp, Zea mays
ctttcaacaataacagcacaggcagtgcaagcagcacgggaagcactaatagcagtgctctctacaaagtagatcatgaagcagattgtctggattatgagatcctgtgggaagaccttgtcattggagaacaaataggtcaaggctcttgtgggacagtcatatcatgctttgtggtatggttcggatgtggctgttaaagttttctccaagcaagaatattcagaagaagtgatactgacctttcgac

SEQ ID NO: 57199 - DNA, 265 bp, Zea mays
cgcccaactcaccctgctccctgataagaagcaagatgagaatacatctgcaagagtggagaatgaggaggcagaggaggaggtggtgcctcatgtgccaccagccacaagtgaggggcttcgcatccattccttctgcaagacattgactgcctcagacacaagcacacatgggtggttctcagtgctgcgccggcatgcagatgagtgcctcccaccactggatatgagtcaaccatccccaaatcaagaatggtgggcaagg

SEQ ID NO: 57200 - DNA, 150 bp, Zea mays
attggactgcttgctccctgttgaccattgggtattctgaaccatcgagccatggctgccaagctgactcgcctccacagtcttcgcgaccgtcttggtgccaccttctcctcccatcccaatgaactgatagcactcttttccaggtat

SEQ ID NO: 57201 - DNA, 120 bp, Zea mays
ggggatcagaaaaagaagctccatctcatactttcataccaagggcaaaactaccctatcaagaaagaactaaaatgtgaaacagacaagttgacacatttttacccatttattcttaga

SEQ ID NO: 57202 - DNA, 245 bp, Zea mays
gcgtcccacattgttggataccctcgcatgggccccaagagggagctcaagtttgcacttgagtctttctgggatgggaagagcaccgctgaggatctggagaaggttgctaccgacctcagggccagtatctggaagcagatggctgatgctgggatcaagtacatccccagcaacactttctcgtactatgaccaggtccttgacaccactgccatgctcggcgcctgtcccgaacgttactc

SEQ ID NO: 57203 - DNA, 149 bp, Zea mays
tcatcaaggattatcgtggcaagattgagactgagctgaccaagatctgtgatggcatcctcaagctgcttgagacccatcttgtgccgtcttccactgcccccgagtccaaggtcttctatctcaagatgaagggtgattactacaga

SEQ ID NO: 57204 - DNA, 277 bp, Zea mays
gctcaaaccctaatcgccgtccgccggcgacgccagcacgatggcccgctacgaccgcgccatcaccgttttctcccccgacggccacctcttccaggtggagtacgctctcgaggccgtccgcaagggcaacgccgccgtgggcgtccgcggcacggacaccgtcgtcctcggcgtcgagaagaagtccacacccaagctccaggactccaggtccgtgcgcaagatcgcgtgcctagacactcacatagctctggcgtgcgcggggctgaaggcg

SEQ ID NO: 57205 - DNA, 269 bp, Zea mays
  unsure (1)..(269): unsure at all n locations
ctaaaacccatctcctcctctcttttcccctcccttttccagcacggggagcgacctgcgccgccgccacgatgccgaagcactaccgccctgcgggtaagaagaaggaagggaatgcggcaaagtacatcacgaggaccaaggcggtcaactacctgcacgttagcctcgcaatctttaggaagctatgcattctaaagggtgtctttccacgtcagccanagtagaaggtggaagggaacacaggactactacacacaaggatatgc

SEQ ID NO: 57206 - DNA, 234 bp, Zea mays
gcaaccagcgtcggtgagaagaatgtcctcatctttgaccttggaggtggtaccttcgatgtctccctccttactattgaggaaggtatctttgaggtcaaggccacagctggcgacacccatcttgggggtgaggactttgacaacaggatggtcaaccactttgtccaggagttcaagaggaagaacaagaaggatatcactggcaacccgagggctctccggaggctgagg

SEQ ID NO: 57207 - DNA, 297 bp, Zea mays
ataccaccttcaacaaacccagcttctctactaaaggaagctatccatgtcatcagttgtggatatgaggacaaaactgaatggggaaaagagattggctggatctatggttcagtaacggaggatattctgactgggtttaaaatgcatgcaaggggctagtgcatcgtctactgcatgccaccacgaccttgtttcaagggttctgcaccaatcaatctttccgatcgtcttaatcaggtgctccgttgggctcttgggtcagtggaaattctgcttagtagacattgtcctatc

SEQ ID NO: 57208 - DNA, 292 bp, Zea mays
tcaattttgtggggcgcattttaggacctagaggtaattctctaaagcgagtagaagcatccactgggtgtcgtgttttcattagaggaaacggttccatcaaagattcagggaaggaggacaaactacggggaaaaccgggctatgagcacctgagtgatccgctgcatatcttgatagaggccgagttccctgccagtatcatcgatgcaaggctgagacaagcacaggagattatagaagaattgcttaaaccagtggacgagtcccaagatctctacaaaaggcagca

SEQ ID NO: 57209 - DNA, 299 bp, Zea mays
gatgaagggcctcttcaagtccaagccgcggacgcccgtggacatcgtgcggcagacgcgcgagtgcctcgtctacctcgacctccactcggactccaggagcggcgatgccaagcgcgaggagaagatgacagagctaagtaaaaatatcagggatatgaagtctatcctttacggcaatggtgaatcagagcctgtaactgaagcatgtgtacaattgacccaagaattcttcagggagaacactttacggctattaatcatacatcttccaaaactaaatttggagactaggaaag

SEQ ID NO: 57210 - DNA, 187 bp, Zea mays
agcaaaacaacatcaagctctatgtgcgcagggtgttcatcatggacaactgcgaagagctgatccctgagtggctgagcttcgttaagggtattgttgactctgaggaccttcccctcaatatctctcgtgaaactcttcagcagaacaagatcctgaaggtgatcaggaagaaccttgtgaagaa

SEQ ID NO: 57211 - DNA, 161 bp, Zea mays
gagaattatacaaaagatttcaaaaacaaagatgtgacgaggaggcaaatagctgtggcaacataccttatcgataaactagcccttagggctggcaatgaaaaggacgacgatgaagctgatactgttggttgctgtacgctgaaggttgataatgttac

SEQ ID NO: 57212 - DNA, 298 bp, Zea mays
atgggtggtggtgggtcccatgctgatccatttgacattttctcatcattctttggaccctcttttggaggaggtggtggaagcagcaggggaagaaggcaaaggaggggagaagatgtagtccactcacttaaagtttctctggaagatctttacaatggaatctcaaagaagctctctctttcgcgcaatgtcatctgctccaagtgcaagggcaagggctcgaagtctggtgcttcaatgaggtgccctgggtgccagggctcaggtatgaaagtcaccattcgtcagctggggc

SEQ ID NO: 57213 - DNA, 294 bp, Zea mays
tgggaatgctgctggaacaatgggtgctactgctcaatccaattggaaattcaatgttgttcagacgggagtacaccatgcgcttaatccagaccccttcagaggtgcttttggttctgacggggagaaatacgccagagatgttcaggaaatcatcgaatttggtcctacagggagagttggtgggttcatttcggaagccatacagggggttggtggaatagtggaactggcaccaggatacttgcccgtggcatacagtatggtaaggaaagccggtgggctctgcatcgc

SEQ ID NO: 57214 - DNA, 299 bp, Zea mays
  unsure (1)..(299): unsure at all n locations
ctcgacaagcaatggccatgggaggaggagcagacaccacccgagctgcgctacctctcgggcctgggcaacaccttcacgtcggaggcggtgccggngtcgctccccgtggggcagaacaacccgctagtgtgcccgctgggactctacgccgagcagctctccggcacctccttcaccaccccgcgcgcccggaacctgcgcacgtggctgtaccggatcaagccgtcggtgacccacgaacccttctatccgcggaaccccaccaacgagcgcctcgtcggcgagttcgaccgcac

SEQ ID NO: 57215 - DNA, 302 bp, Zea mays
cactgcccaacagctgattcagcagcaacaaattttgcagcagtttcagcagcagcaactgctacaatctccgcgtgtttcagcatctggttcacagaagtctgcgaaccttacaggctcgcagccgggtacaccattgtcaggtggaaccatgactggtggaagtgcaagtcagggagctgaaggaactagccaacttcttgggaaaagaaaaatacaagatttggttgcacaggtagatcccctaggcaaggttgaccctgaagaggaggatttacttctagagatcgctgatgacttca

SEQ ID NO: 57216 - DNA, 302 bp, Zea mays
gttacttctcccgccgccgccaatcccctcccgttctccgccaccgccaatcccctcccgtcctccgccacctctgctgagagcgagaagagatggccggcaagggtgatgggccggcaatcggcatcgatctcggcacgacctactcttgcgtcggtgtgtggcagcacgaccgtgtcgagatcatcgccaacgaccagggtaaccgcaccacaccctcgtacgtcgccttcaccgactccgagcgcctcatcggagatgcggccaagaaccaggtcgccatgaaccccatcaacaccgtc

SEQ ID NO: 57217 - DNA, 296 bp, Zea mays
  unsure (1)..(296): unsure at all n locations
ctgggatgtgctacccactccttgttagctctgttggtatcattgtctgcttgatcaccaccctttttgctactgatttctttgaagtcaaggctgtgaaagaaattgagcctgcacttaagaagcagctcatcatctccaccgccctnntgactgttggtattgctgtaatcagctggttggcccttccagctaagttcaccatcttcaactttggtactcagaaggatgtctccaactggggcttgttcttctgtgttgcaatggtctgtgggctggtctgattattggttttg

SEQ ID NO: 57218 - DNA, 294 bp, Zea mays
gttgattgctgatataaaggcaaacactcctggaattgaaaaggctatcatttccactcattgtcagaatgaccttggtcttgcgactgccaacacactagcgggcgctcgtgcaggagcacggcagttagaggttactattaatggtattggtgaaagggctggaaatgcttctttggaggaggttgtcatggcaattaaatgccgcagagaactgttagatggtctctatactggaatcgattcccgacatatcactttgacgagcaaaatggtgcaagagcatagtggact

SEQ ID NO: 57219 - DNA, 180 bp, Zea mays
aaacaagcgctacatgaacgcagattggctttggaacaggatgtctccaggttgcaagaacaactgcaagctgaaagggatctgcgagctgcattggaggttggcttgagcatgtcttctggacagttttcaagtgctcgttcgatggacgtgaagacaaaggcagaacttgaggagatt

SEQ ID NO: 57220 - DNA, 182 bp, Zea mays
tgggattgttgggagagtactctcgtgcaactaggaaaaggcacaaggttccgtcccactgcatgcgtcaagagactgtctggttttcttgttctgatttgtcatctgctggtgctcaaagccggcttggtttcctcgaaggatcagcatctactctagaatacaagactttgtcgcatctg

SEQ ID NO: 57221 - DNA, 295 bp, Zea mays
caagagatagagataaaatcgccgccgcacccagctccgcaacgcgcacctccctttccccaactcgatctcgcacctagggtttcgtctcgtcgctctcgtcctccgcgaagatgccgaagaacaagggtaagggaggcaagaaccggaagcgaggaaagaacgaggctgacgacgacaagcgcgagctcgtcttcaaggaagacgggcaggagtacgcgcaggtgacccggatgctcggcaacgggcggtgcgaggccatctgcgtcgatggcacgcgccgcctctgccatat

SEQ ID NO: 57222 - DNA, 294 bp, Zea mays
gcttgaggcaatccccgccctctctagccctgcgcaaccagttcggttccatggccaacagcaatctcccgcgccgaatcatcaaggagacgcagcggcttctcagcgaaccagcaccggggattagcgcgtcgccgtcggaggagaatatgcggtatcttcaatgtcatgatccttggccccgcgcagtcaccctatgaaggtggagttttcaagcttgaactattcttgcctgaggaatatccaatggctgccccaaaagttagatttctcacaaaaatttaccatcctaat

SEQ ID NO: 57223 - DNA, 293 bp, Zea mays
gagctttctctcgctcctgagtgcagtctctctctctgcgccctgcgctctgcgccgccgccatggaggacgacgatgactgccctcctctcgccgttgagctccctccgcgggtgccgtcccctccagagcaatctccctcagacgcctcgccagttggcatcaccgtcatcaccggctacctcggggctggcaagtcgacgctagtcaactacattctgaatgagcaacatgggaagagaattgccgtgatactaaatgagtttggagaggaaattggggtcgagagggcg

SEQ ID NO: 57224 - DNA, 212 bp, Zea mays
cccgcagctcccatcctctcgctcgccaggagaagcagccgccgttgctgctgccgcgtccacagaatggggggtttcgtgaagactcataagaccaatgcgtatttcaaacgtttccaagtgaaattcaagagaaggcgggctggcaagacagactacagggccaggataaggctgattaaccaagacaaaaacaagtacaacacacccaa

SEQ ID NO: 57225 - DNA, 181 bp, Zea mays
agaagaaggcgtgcgaagggtcggtataaagtcgtacgaggtcaacttgcctgaggacagctctgaggaggaggttatcaagcacatagcgagtttcaacagtgacccgtccgtgcatggcatcttggttcagttgcccttaccaaggcatatgaatgatgagaacattctgaatgcggtc

SEQ ID NO: 57226 - DNA, 223 bp, Zea mays
caaggtccaggcaatgcgttcgccggttcggctggaacgagcttcactccgcacatcatcacggcgtctccttcagaggacgtggcggcgaagatcgttgcgttcgccagccagtcgtcaaaggcggtgtgcgtcctctcggcgatgggttccgtctccagggccgtcctccgccacccggccgacggctctcccatggcgagggttcacgcgtcgccgcagc

SEQ ID NO: 57227 - DNA, 289 bp, Zea mays
ggctgtgcttcctcgtgtacatggattagctctaaagacgacagttgccgcggtgcgcgtgaatgcgttgcgctgtttaggagatcttgtgccatccctggacaaagaaggtatattgggtatcttggagacggttcggcgttgcacagctgttgaccatactgcgccaactcttatgtgcacacttggtgttgctaatgcaatctataaacaatgcggtgtggagtttgctgcggaatatgtgattcctctcatcttcccattactcacagcacatcaactgaatgta

SEQ ID NO: 57228 - DNA, 174 bp, Zea mays
cacgacgcaagggagagtgacggaaagcgaccggcgcgacgaggagggccaaggcgaagaggggaagcaccgcaccaggacccttgttcgccgccgccgcctctgatctccgcgaggttgtcaggattcaatatgtcgaccagcacattcgctacttcctgcacgctgttgggc

SEQ ID NO: 57229 - DNA, 124 bp, Zea mays
gctcaaatagtaatcgcagtcagccggcgacgcaagcacgatgtcacgctataactgcgcgatcaccgttttctctcccgacggccatctcttccaggtggagtaagctctcgaggctgttcgt

SEQ ID NO: 57230 - DNA, 174 bp, Zea mays
catggcgacagagacggagaccttcgcctttcaggctgagatcaaccagctgctctcactcatcatcaacacgcttctattccaacaaggagatcttcctccgggagctcatttccaactcttccgatgcgttggacaaaatcaggttcgagagcctcactgacaagagcaagc

SEQ ID NO: 57231 - DNA, 242 bp, Zea mays
gttcatggaagctcttgctgccggcgtgatgtgtccatgattggccagttcggcgtcggtttctactctgcctacctcgtcgccgatagagttgtcgtgaccaccaagcacaacgatgacgagcagtacgtgtgggagtcccaagcgggcgggtcgttcactgttactcgtgacacgtcaggggagcagcttggcaggggcactaagatcacactgttccttaaggacgatcagctggagta

SEQ ID NO: 57232 - DNA, 277 bp, Zea mays
cttccaggttgcaacctatggcgaatccatggagggggtgttggttgcgttatcagtggctgcccacccagaattcctctcactgaggcagacatgcaagtagaactcgatagaagacgtccgggtcaaagtagaattacaaccccaagaaaggagactgatacatgcaaaattctatcagggacacatgatgggatgactactggtacaccagttcacgtctttgtcccaaacacagatcaaaggggtggtgattacagtgaaatgtctaaagcgt

SEQ ID NO: 57233 - DNA, 291 bp, Zea mays
gttgccaaagaattccctcccctagccgccgccgccgccgctcgtctccctgagaggtgtcgggaccgaggaactggccgagtactaggtagagaatcgtgttttcttgtctcagcccggggtctgctgcgtctggtggtggtgaaggggagaaattcgtgagatctgttccggatcaggcgtgcgagctcgggaatcaggggtttcacacatagcttcgtcgatttgaatttgatgtactaatggagtctaagggtggcaaaaagtctagcagtagtcgtctatgatgta

SEQ ID NO: 57234 - DNA, 201 bp, Zea mays
tgcgccgcgacgtccctcgccttcgccgcgaatccgagactccgatctcgggttcaccgcagcgcacagagcagccccgtctcccggcccgatccgcgctctcctctccgtcgcttcagtcatggcaggaatggcacctgagggttctcagttcgatgctaagcactatgattctaagatgcaggagctgctgagcaccgg

SEQ ID NO: 57235 - DNA, 147 bp, Zea mays
gcttcaaatagctatgccaaaatggttatatatattgaagcatgtgaaagtggcagtatatttgagggattaatgccagaagaccttaatatttatgtcacgactgcatccaatgcagaagaaagtagctggggtacatactgtcca

SEQ ID NO: 57236 - DNA, 195 bp, Zea mays
cgctcgcctcgggtcaaaccctaagcagggagttgatttatccgctgcagccatgagtaagttgcagtctgagtctgtcaaggatgccatctcccagattgttggggatgccaaggagaagaataggaagttcactgagactgtggaacttcagattggtctgaagaattatgatccacagaaggacaagcgttt

SEQ ID NO: 57237 - DNA, 144 bp, Zea mays
cggtgagaagaatgtcttcatcgacactggtagcgttcttgtcaagaccataggcgatagctgcagctgttggctatggtcttgacaagaaggctacagtgtggtgagaagaatgtcctcatctttgatcttggaggtggtacc

SEQ ID NO: 57238 - DNA, 150 bp, Zea mays
cagaactccgtgtcgtcatatgctcgtcaaggctggggcgccggtggaccagaccattgccacgctcgcggcgcaccttgatcagggggactgtatcgtcgatggtggcaacgagtggtacgagaacacggagaggagggagaaggcgat

SEQ ID NO: 57239 - DNA, 298 bp, Zea mays
caatatgtcgaccagcacattcgctacttcctgcacgctgttgggcaatgttagaacaacgcaggcctcccagacagcggtgaagagcccttcgtctctaagcttcttcagccaagttacgaaggttccaagcctgaagacctccaagaaactggatgtctccgccatggctgtatacaaggtgaagcttgtcgggcctgaaggtgaagagcacgagtttgatgctccagacgacgcctacatccttgacgcggccgagactgccggtgtggagttgccatactgtgccgtgctgggg

SEQ ID NO: 57240 - DNA, 231 bp, Zea mays
gcttcaaatagctatgccaaaatggttatatatattgaagcatgtgaaagtggcagtatatttgagggattaatgccagaagaccttaatatttatgtcacgactgcatccaatgcagaagaaagtagctggggtacattttgtccaggaatggaaccaccgcctccttctgagtacattacctgcctaggtgatctatatagtgtctcttggatggaagacagtgagact

SEQ ID NO: 57241 - DNA, 128 bp, Zea mays
ggcattctcgcagtatcctcgctctcgtaggtttgctgtccgcgacatgacgcagacagttgctgttggagtcatcaagagtgtggagcacaaagacccgaccggcgccaaggttaccaaggcagctg

SEQ ID NO: 57242 - DNA, 217 bp, Zea mays
  unsure (1)..(217): unsure at all n locations
gtactttgtaacagacagtgagaaatgactgcagagtacgagaactgcgagctgcttttagttgataagaaaatcaccaatgcaagggatcttatcaacgttttggaagaagccatcagaggtgcatacccaatcctgataattgcagaggaccttgagcangaggctcttgctacccttgtcgtcaacaagctcagaggatcactgaagatcgctg

SEQ ID NO: 57243 - DNA, 294 bp, Zea mays
caaatcttcgattagattctcgttgacaagaagactagaaccgaacctgaccatgtcgctgatccgccgcagcaacgtgttcgatcccttctccctcgacctctgggacccctttgagggcttccccttcggctccggcaacagcagcagtctcttcccctcgttcccgcggaccagctcggagaccgcggccttcgctggcgcgcggatcgactggatagagactccagaggcgcacgtgttcaaggccgacgtaccggggctgaagaaggaggaggtcaagtggaggtcgag

SEQ ID NO: 57244 - DNA, 275 bp, Zea mays
caagaaggcaaccagcgtcggtgagaagaatgtcctcatctttgaccttggaggtggtaccttcgatgtctccctccttactattgaggaaggtatctttgaggtcaaggccacagctggcgacacccatcttgggggtgaggactttgacaacaggatggtcaaccactttgtccaggagttcaagaggaagaacaagaaggatatcactggcaacccgagggctcatcggaggctgaggacctcttgtgagagggccaagagactctgtctcc

SEQ ID NO: 57245 - DNA, 287 bp, Zea mays
ggattatgaaccacagacagttgtcttaggtggatgaacgagttctcacagtatcacaacaaggttcttgtggagcagctcaagaagcttcgcaagcttcatcctggagcaaccatcatctatgctgattactatggagctgctatggaaattttcctttcccctgaacaatatgggatcgaatatcgcctagtggcttgctgtggtggagaaggaccctacggtgtgtccccatctacaggctgtggattcggagaatataagctgtgcgatatccagagaagtat

SEQ ID NO: 57246 - DNA, 288 bp, Zea mays
tttggctctcggtacttggtgtatttgaatggtctggtaacaacccggtaccaccagaagtatggctactgccatatctcctgccatttcacccagggaggatgtggtgtcattgtcgaatggtgtatttgccaatgtgctacatctatgggaagaggtttgttggtcgaatcacaccactcgtgttggaattaagaaaggaacttttcaaagacccttacagcaagattgattgggacaaggccgcaatctatgtgctaaggaagatctgtatatccacatccattt

SEQ ID NO: 57247 - DNA, 110 bp, Zea mays
cgatcttcttaatcacctgacagtttcttaccatcatttgatcttattgatggacatgttaagcctgttctagggagaaagattaactggatgaagacagggatcgttga

SEQ ID NO: 57248 - DNA, 151 bp, Zea mays
ggaactgttgcagcagatgcaactgaagggtcttcaagttgatgaactctactcacttgacctggatgctctcaatgatcttcagccaatatatgggctaatattgctatacaaatggcgacctccagaaaaggatgagcgtcctgtcatc

SEQ ID NO: 57249 - DNA, 273 bp, Zea mays
aattgcgcgacgacatcaaagaacacaaagatattgcacattttgaaacggcatatgttgtgaaactacaccgcatagcgacacttgcacctccacaacaggtttttactttcacccatccaaatttctcaccaaatgccagcaaccaaaggtacaccaagttgcaatttgaaatgctgccagacatgggttcatgccttgtgcacggatttgctggctattttgactctgttctttataaggatgttcatcttggaatcgagccaaacaccg

SEQ ID NO: 57250 - DNA, 268 bp, Zea mays
gagacagacggttgctgttggagtcatcaagagtgtggagaagaaggacccgaccggtgccaaggtgaccaaggctgctgccaagaagaaatgatgcgacctgtcgttgatgcagcgtctgcttttccaatacgtagctgagatgttccattttgacataagttttgtatactgtggttgctgtttaccttgtgaactgttgagctctactattgggtgtccgtttatctgtttatgtagcatcttgttatttcacctattgcaatac

SEQ ID NO: 57251 - DNA, 287 bp, Zea mays
gcgacttccacgtcgactccgagggcctccagcgtcagatcgatgaactggcctcgttctccgactcgcccgcgccgtccgtgacccgcgttctgtacaccgacaaggatgtgcaggctcgaaggtatataaaagggataatgaatcaacttacgcttgttgttcgagaagatgctgttggtaacatatttggccgctgggagggttccgagcctggactaggagcagttgcaactggatctcatgttgatgccattccattctcaggcaaatttgatggtgttgtt

SEQ ID NO: 57252 - DNA, 182 bp, Zea mays
acttgtaacacttgggtttgaccttaatattaaccatgcctataagcccttggttgaagcaataaggagattcaatattgataaaagaagtccacttcctcaggttgcctggaattttgtaaatgatgggctgcgtacttcgctttgcctgcagtttgagcctcatcatattgcagctggtg

SEQ ID NO: 57253 - DNA, 143 bp, Zea mays
cgaggatgacacaactggtgcatcgactccatatactgctgctattcctgaatacagagttgttttcattgacaaatctgacctgtcattccaagatagatcatggacactagccaacggtactggtgtgattgatattcaac

SEQ ID NO: 57254 - DNA, 270 bp, Zea mays
cttagggactatcaaacgctacttcgtaactgggtagttataaagttagttttgggtttgttaggaagcatgctgtgaggcatggtcaagcaagatggaatttgtccctctcttcttgagagagatatctctaggcccctcgaatgattggatcaagaaatgcatggctgtgctagggttaagtgttaatcaataaaaggattcaaattcatagtatcgagaaagagagatcagcttagagccagaccaaatattgtgagacaaagggac

SEQ ID NO: 57255 - DNA, 180 bp, Zea mays
cttgatcacctggaaagtgtactagcaaatgaaccagtctctgtcaagagtggccagttcattgttgaagtcaaaccacagggaataagcaagggaatagttgccgagaggatacttgcatcagtgaaggagagaggaaagcaggctgattttacattgtgcatcggcgatgataggtct

SEQ ID NO: 57256 - DNA, 277 bp, Zea mays
cttccacgaggccaaggctactaacgcccccgaggtcgtcgtatggggatcaggctcgcctctgcgcgagttcctgcacgtcgatgatctcgccgacgccgtcatcttcctgatggatcactactccggcatggagcatgtcaatgtggggagtgggagtgaggtcaccatcaaggagctcgccgaactagtcaaggaggtggtcggcttccaggggaacctggtgtgggactccagcaagccggacggcacacccaggaagctcatggatagctcc

SEQ ID NO: 57257 - DNA, 282 bp, Zea mays
caagaacatcaatcctgatgaggccgttgcctatggtgctgctgtccaggctgctatcctcagtggtgagggcaacgagaaggtgcaggacctgcttctgcttgacgtcactcctctctctctgggtctggagactgccggaggagtgatgaccgtccttatcccgaggaacaccaccatccccaccaagaaggagcaggtgttctccacctactcggacaaccagcctggtgtgttgatccaggtgtacgagggcgagaggacccggacccgcgacaacaa

SEQ ID NO: 57258 - DNA, 229 bp, Zea mays
gtggcacaaccatgttccctggcatcgctgaccgtatgagcaaggagatcaccgcccttgccccgagcagcatgaaaatcaaggtggtggctccacccgagaggaaatacagtgtctggataggagggtccatccttgcctccctgagcaccttccaacagatgtggatctcaaaggctgagtacgatgagtcaggaccagcgattgttcaccggaagtgcttctaagc

SEQ ID NO: 57259 - DNA, 267 bp, Zea mays
aatcggaaccagtgggagtccatggtgtgcctggtccagtcagaggcaccatgggacaaaaaatctctcgtcaagaatggttctcttaatgtcttccatcttcaggagtacaatgcaacagttgagttctactgggctccgttcctagtggagtttaactcagacgacccagacattcacagcatcagcgaccgcatgatcaagccgacatcgatcgcgaacatgcggcaaactgggaaggcgtggactacctgatcttcaacactt

SEQ ID NO: 57260 - DNA, 121 bp, Zea mays
tagtcccctgctccattctcagccgccgccaatcccttcccgtgctccgcaaccgctgagtgagaagaagagatggccggcaagggcgatggcccggctatcggcatcgatctcggcacga

SEQ ID NO: 57261 - DNA, 178 bp, Zea mays
caagaacctcaagcttggcatccacgaggactccacgaacaggaccaagattgctgagctcctgaggtaccactcgaccaagagcggggatgagctgaccagcctcaaggattatgtgaccaggatgaaggagggccagaacgacatcttctacatcactggtgagagcaagaaggct

SEQ ID NO: 57262 - DNA, 280 bp, Zea mays
caggatgtgattgacccaaacactggactggtttacactaacatgttcgacgcccaggtcgattccatcttctttgcgctcatggctctgaacttcaagactttgaagatcatgatcactgagtcagggtggccaaacaaaggggcggtcaaggagactggagccacaccagacaatgctcagacctacaataccaatttgatacgccatgttgttaatgacagcggcacaccggcgaaaccaggggaagagattgatgtctacatattttcattgttca

SEQ ID NO: 57263 - DNA, 245 bp, Zea mays
ccgacacttaaagattgttgatctctcagcggacttccgactacgcgacatcaatgagtatgctgagtggtatggacattcccacagggcaccggaacttcagggggaagctgtgtatggtttgaccgaacttaaacgagatgacataagaaatgcacgcctggtagcaaatccagggtgttatcccacatctattcaacttccgctcgttcctttggtaaaggcaaaactgatcaagctaacca

SEQ ID NO: 57264 - DNA, 155 bp, Zea mays
gttgaccatcctgttgaactcctggacgaagtggttgaccacttcttcctcttgaactcctggacgaagaacaagaaggatatcactggcaaccccagggctctccggaggctgaggaccgcttgtgagagggcgaagaggactctgtcttccac

SEQ ID NO: 57265 - DNA, 264 bp, Zea mays
cctgcagcgccgccagacactccgtagtctgtaccccaagcaccggcgcggcggcggcggctaccatggcagtcgggaagaacaagaggatctccaagggaaagaagggtggtaagaaaaagaccgtcgatcccttctctaagaaggactggtatgacatcaaggccccatcggtcttcagtgtgcgcaacattgggaagactctcgtgtccaggacacagggtaccaggattgcctctgatggtctgaagcacagagtctttg

SEQ ID NO: 57266 - DNA, 209 bp, Zea mays
caaagtacttgtgcattgctttgagggaaaaagtcgaagtgcgactgttgttcttgcctacctgatgctgaggaaaaactgtactctcctggaagcatggaacatgctgaagaaggtgcaccgacgcgcgcatcccaatgatgggtttgctaagatcttgctggatcttgacaagaaactgcacgggaaaatctccatggaatggcaac

SEQ ID NO: 57267 - DNA, 256 bp, Zea mays
tggatagtgggaccacatatgcttatttgccagagcaagcttttgtcgcttttaaagaagctgtgacaagcaaagtacattctcttaagaaaattcgtggccctgatccaagttataaggatatctgctttgcaggtgctggaaggaacgtctcaaagctgcatgaggtatttccagatgttgacatggtatttggaaatggacagaagctctcactcacacctgaaaattatttattccggcacttccaagttga

SEQ ID NO: 57268 - DNA, 103 bp, Zea mays
cgggcagccaggttaccagccggtgatactgatcgaccagcctctgcagttctatgagaggatggcttactatgtcgtcgcggagtgctgtttggtcactgca

SEQ ID NO: 57269 - DNA, 142 bp, Zea mays
ccggtgtctatgatccggacttcatcgccgctaaccagggctctcgtgccaacaatgtcatcaagggcaccaagaaagaacaggtggagcagatcatcaaagatatcagggagtttaaggagaagaacaaagtggacaaggt

SEQ ID NO: 57270 - DNA, 261 bp, Zea mays
ctcatcgtgcagcacctcagatcctacagcgatccagctgaacagaagtggatcatagctgtgctgttcatggtgcctgtttatgcctgcgaatcgataatctcactgtggaactctaagctctctctggcctgtgatatattacggaattgttacgaagcctttgctctgtacgccttcggacgatacttggtggcttgccttggtatgtaaagcagctgcacagtaataatctgcatatatatatataatcacagcgta

SEQ ID NO: 57271 - DNA, 139 bp, Zea mays
ccgagcctctctccgtgttcgtcgacacgtacggcaccggcgcgatccccgacaaggagatcctcaagattgtcaaggagaacttcgatttcaggcctggcatgatcatcatcaaccttgacctcaagaaaggcggcaa

SEQ ID NO: 57272 - DNA, 308 bp, Zea mays
gccacctctgctgagagcgagaagagatggccggcaagatgaatgggccggcaatcggcatcgatctcggcacgacctactcttgcgtcggtgtgtggcagcacgaccgtgtcgagatcatcgccaacgaccacggtaaccgcaccacaccctcgtacgtcgccttcaccgactccgagcgcctcatcggagatgcggccaagaaccaggtcgccatgaaccccatcaacaccgtctttgatgccaagcgtctcattggcaggaggtttagtgatgcctctgtccagagtgatattaagctgtggccc

SEQ ID NO: 57273 - DNA, 285 bp, Zea mays
gccaggtttttctccttttagaccgcaacctcaaaaccctagcttgtccctcctgctcccagatctcttccactcggccactccctagcacatcaaaccctagctccgcccagcccccaaccatgtcggcgatgatgcaaccgcagatcatcctgctcaaggagggcacggacacgtcgcacgggcgcgctcaggtggtgagcaatatcaacgcgtgcacggcggtgggcgacaccgtgcggaccagctggggcctcgggggatggacaagctcatccacgacga

SEQ ID NO: 57274 - DNA, 292 bp, Zea mays
aatttggaggcatcctttctagggactgcacgtgtgattgggtggttcagtctgatgcttggcacctacacctacaaccgctattttaaacagaagaagctcaggaatattcttgtgtttgctcatgttggtcttgccgtaattaccctactggacattgttttggtgtcacggttacatgttcagtatggaattgccgataagtacatggtgctgtggggttccgcgttggctgatgcaatcaaccagttcaagatgatgccgttcctgatcctgtcaggacagctttgcc

SEQ ID NO: 57275 - DNA, 293 bp, Zea mays
aagcacttctgggtgaggagaatggctctagatcgcaggaactataagcagcttgtggaaactacagttgagatggcaaacaaggttggagttgctgatattgttgggagggttgttgaggatctgaaagatgaaagtgagccctacagaagaatggtgatggaaacaatcgagaaggtggtagccaacttgggtgcatcagatattgatgctcgtctggaggagctgcttacacatggtatcttgtatgctttccaagagcagactagtgatgacgcaaatgttatgctaaa

SEQ ID NO: 57276 - DNA, 167 bp, Zea mays
cagaaacagagctttggtcacttattgaagccaagggtgatatccctgcagctcgaagcggacacacggtgattagagctggtgctacattgatactttttggcggtgaggacacaaaaggaaagaaacggcatgaccttcacatgtttgatctgtagtcatcaaca

SEQ ID NO: 57277 - DNA, 244 bp, Zea mays
cgacagagaatccatggcggcggcggcgtggtgggagacgctggtggtggcagcggcggcggatggaaccggtgggagcagcaccacggtggtgtccatctgcatgttcacgacggtgctgtgcctgtgcctcgtcgcgggccacctcctcgaggagaacaagtgggtcaatgagtccatcaccgccctcgtcatcgggtgcatcataggagtgacggaattccgcctgaccaaggggaacact

SEQ ID NO: 57278 - DNA, 289 bp, Zea mays
cgagagagagagagacggaaagggggagatgagccggagcctggggatcccggtgaagttgctccatgaggcagcgggtcatgtggtgacggtggagctcaagaccggcgaagtgtaccgggggtccatggtcgagtgcgaggataactggaattcccagctcgagaacattaccttcatcgccaaggatgggaaggtttcgcagctggagcacgtcttcatcagaggaagcagagtgagatttatgactatacctgatatgctcaagaacgctcacatgttcaagcgc

SEQ ID NO: 57279 - DNA, 278 bp, Zea mays
tgaggcggcatgggtggcagctcccgtaccaccctctccaggtggtggccgtgtccgtcttcctggcgctggcgttcgcgttctacgtcttcttcgcacccttcgtcgggaggtaagttttccagtacgtggtcatggggctatacactccgctggtattatgtgtcttctttctatacatctggtgttccgctgcaaactcagctgttcctggggtcctcatatcacagatgtatctgagtttgtacggaagctgctgtctctagcatctgtaggaa

SEQ ID NO: 57280 - DNA, 290 bp, Zea mays
ctcatccgcaccacctccccctgtcccccgctcctgcctcgactcaccaccattagagcgcgcgcgccaagctcgtggtgaggtctccgagatgaaggttatcgagaagatcctggaggcggcgggagattgccggacggcgttctcgttcgagtacttccctcccaagacggaggagggggtcgagaacctgttcgagcggatggaccgcatggtggcgcacggctcctccttctgcgacatcacctggggcgacgggggatccaccgctgaccttaccctcgaaatcg

SEQ ID NO: 57281 - DNA, 284 bp, Zea mays
cgagtacttcgcctatctctttggagtgcaggaaccagggttctacggcgcaattgacatcgcctctggacagtcaattttgttcgctccaagattgccagctgactatgctgtttggatgggtgaaataaaacctttgtcgtacttcagggatacatacaaggttgatatggtcttctatgttgatgagattgcaagggttgtgcaagatcatttcgggaaccatggaaagcctcttctgtttctgctacatgggaggatactgactctggaatttctcaaag

SEQ ID NO: 57282 - DNA, 158 bp, Zea mays
gtccactcttgtcaagtacataaagggagttggaaacatgagccatgagcaatggcggtcgttccataacgacaagaagacagcggaggcacggaacttccttgatggtgacctgatcgagtcgttccttgaccttagccggagcaagatggaggtgg

SEQ ID NO: 57283 - DNA, 295 bp, Zea mays
  unsure (1)..(295): unsure at all n locations
aaaaacttcatcttcaacaacgcctgtcaatagcagtccagtgtgcagagggtctggttcatatccattcattagcagctgaaagtcctgaatcatgtggcaccagcctcttaggaaacttcagatctgccaacatatttttggacgagaatantgtacaatttatcttcaatgtgaacttgtcaacatttcttggactttcaggtgcacaaaaacatacagtgttttcaattcattacaatggaccagaaaagtattattcagactcaagggatgttctggtcaacttcttaac

SEQ ID NO: 57284 - DNA, 284 bp, Zea mays
gtcctctgttacttctcccgccgccgccaatcccctcccgttctccgccaccgccaatcccctcccgtcctccgccacctctgctgagagcgagaagagatggccggcaagggtgatgggccggcaatcggcatcgatctcggcacgacctgaagatgcgtcggtgtgtggcagcacgaccgtgtcgagatcatcgccaacgaccagggtaaccgcaccacaccctcgtacgtcgccttcaccgactccgagcgcctcatcggagatgcggccaagaaccaggt

SEQ ID NO: 57285 - DNA, 140 bp, Zea mays
agcgccgccgcctcctactccgcgccggcaactctgatccggaccgagcgctggccatggcgctcgccttcgacgagttcgggcgccccttcattatcctgcgggagcatgatcaagaagacgcgctcttcgggggcttg

SEQ ID NO: 57286 - DNA, 295 bp, Zea mays
atgacaagcagctggatgctgatatccatcgcaagtacatctatggtggccatgttgctgactacatgaggaacctcgctgaagaggagccagagaagtaccagtctcacttcagtgagtacattaagaagggaattgacgctgatgactaggaagctctgtacaagaaggtccatgctgccatccgtgctgatccttctgtggtcaagtcaagcaagcagccagcataggagcacaagaggtacaaccccaagagactgacatacgagcagaggaaggccagtctcattgaaag

SEQ ID NO: 57287 - DNA, 264 bp, Zea mays
acgcaagcacgccgtctccgagggaaccaaggccgtcaccaagttcaccagcaactgagcgcgctgcgggatccgcggatctgttagaagggttctttgctgtgtcctttccccagtcccccaccctacccgcctagtagctagcttgcctgctctataaatccggcgcgccggattgtaatggtcctcttagatttgatgtccctgttgtggaatatagttgtatctctccgcttgctattaaaaaaaaatagctaacaaaaa

SEQ ID NO: 57288 - DNA, 167 bp, Zea mays
gagatcaaaactagattattggtcagaggatgaacttgatgctctgtggataggagttcgtaggcatggaaggggaaattgggatgctatgcttagagatccaaagctgaagtttttgaacaaccgaactagtgaggagctggccttgaggtggattttggaggagc

SEQ ID NO: 57289 - DNA, 139 bp, Zea mays
gggattgaaatcgaggagaactgggacaaggttaagactatttttcttcctactgagaagccaacgacgtttgattaatgtgctcctttgattgcaatccatccattggaggtacttgttgctctcctccttagttcta

SEQ ID NO: 57290 - DNA, 154 bp, Zea mays
  unsure (1)..(154): unsure at all n locations
agatatgtggaaaccatagctattngggggcgaagggcttatgagcgtcatttcaaggaatggcgtcatcagcatgggatgcgatgccttggcattcccaatactaagaatttcaatgaaattacatccatcgaggaggcgaaagcgctctggg

SEQ ID NO: 57291 - DNA, 291 bp, Zea mays
gaaggccacaagagctttcccagtggacacacttcatggtcttatgctggtctaggcttccttgcatggtacttagctgggaaactcacggcttttgatcgcaaaggacatattcggaagctatgcattgtgattctgcctcttcttactgctgcgcttgtggctgtttctcgagtggatgactactggcatcattggcaagatgtatttacagggggtcctataggtcttacaattgcttcattttgctatctacagttatttcgatatccttttgatggcgatgctttg

SEQ ID NO: 57292 - DNA, 142 bp, Zea mays
gtgatttgaatgagacatattttgttggaaatgttgatgaagcttccaaacaccttgtacgttgtacctatgagtgcttggagaaagctattgcgatagctaaacctggagttcggttccgagaggtcggagaagtcataaa

SEQ ID NO: 57293 - DNA, 271 bp, Zea mays
cgggcagccaggttaccagtcggtgatactgatcgaccagcctctgcagttctatgagaggatggcttactatgtcgtctcggagtgctgtttggtcacttcagtgagggacgggatgaacctgatcccatacgagtacgtaattgctcgacaagggaatgagaggatagatagtattctaggccttggtccggcttcaaggtagaagagcatgcttgtcgtgtcagagttcatcggctgctcgccctccctgagcggcgctatccgtgtg

SEQ ID NO: 57294 - DNA, 162 bp, Zea mays
gccctcttggatttctataacaagtggcagcatgaatacttggttgtaagcaagtggtttgctcttcaagctacttcagagattcctggaaatgttgcaaatgttcagaagctgctgtctcaccctgctttcgacctgaggaatcccaacaaggtgtactca

SEQ ID NO: 57295 - DNA, 293 bp, Zea mays
  unsure (1)..(293): unsure at all n locations
gatcaacctctgccacggtggccgggagtggcatcgtgccgccatgcgctctgtgcggaggctcaacgaggagggaggattctgcgtgacgcttatggtcgacaccgagggttcccagctcctcgtcgcggaccacggaggcgccacctcagtcaaggtcgaggatgggtcagagtggatatttacaaacaaaaaagctgatgaagcccatcagttcacaatgcatgtgaattttgataagttttctgaagggttttggttggtgatgagcttgtaatantggtggaatggca

SEQ ID NO: 57296 - DNA, 229 bp, Zea mays
caggatctggcggcaaaacttgcgcccagatattcgaggaggctggttgtgatacaccagcaagtcctaattgcggcgcttgtctgggtggacctcgcgatacgtatgcacggatgaatgaacctacggtctgcgtgtccaccacgaacaggaacttcccgggcaggatggggcacaaggaagggcagatctacgtggcgtccccctacagggctgcagcctcggccct

SEQ ID NO: 57297 - DNA, 289 bp, Zea mays
tcgagaaatcaatgggatcctgcttccagcttgtctttgcaccaatcgatgagcttttccctgatgatgctccattggtatcttcaggctttcgcgtgatcccgttggacataaaaacagacggaccaccctctggaagaacgttggatttggcctctagtcttgaagttggcgcaaccacgcaacaagtggcagggaatggatctcaggacgtttgcaacctgagatctgtgctgacaattgcctttcagtttccctatgaaacacatctccaggacaccgttgcagc

SEQ ID NO: 57298 - DNA, 295 bp, Zea mays
gatttcgctctcttcttcccgtcgagacccaaccataccagcggcgccgcaggctgacgaggaggcggagtagagtggccggactacctcgacacctccactgcaaccatgggtatctcacgtgattcgatgcacaagcgccgggccaccggtggaaagcagaagacgtggcgcaagaagcgaaagtatgagcttggccgccagcctgctaacaccaaactgtctagcaataagacagtgaggagggtccgtgtccgtggaggcaacgtgaagtggagggctctccgattggata

SEQ ID NO: 57299 - DNA, 308 bp, Zea mays
gcaagatggtccttgatgactggaagaggctatactcaaacacaaagactaacttccgggaggttgccatcaaaggtttctgggacatgtacgacccagagggctactctttgtggttctgtgactacaagtacaatgatgagaacaccgtctcctttgtgaccctgaacaaggttggtggattcctgcagcggatggacctgtgccgcaagtacgcctttgggaagatgctcgtgataggctctgagccacccttcaagctgaagggcctttggctcttccgtggccaggatgttcccaagtttgta

SEQ ID NO: 57300 - DNA, 215 bp, Zea mays
atcgaaaggtatgcacctgccgacagattctataaactagctatggcctatgcacccgttccagatcttcacattatgaggttgcttcatctgtgttatgcacaccacgagatgcaatcatgggctaaatcagcacaatgtgcagttgctgtagctgccgtgatcatgcaggcacttattacaagcaatgatgctatgtggagcaactagcatgt

SEQ ID NO: 57301 - DNA, 148 bp, Zea mays
gtgttgagactggtatcatcaagcctggtatggttgttacctttggtcctagtggccttactactgaggtgaagtctgttgaaatgcaccatgaggctctccaggaggtccttcctggtgacaatgttggcttcaatgttaagaatgt

SEQ ID NO: 57302 - DNA, 288 bp, Zea mays
gcagatctttgtgaagacattgactggcaagaccatcaccttggaggtggagtcgtctgacacaatcgataatgtcaaagccaagatccaggacaaggagggcattccaccggaccagcagcgcctgatctttgctggcaagcagctggaggatggccgtaccctcgccgactacaacatccagaaggagagcaccctccacctggtgctccgcttgcgaggtggtatgcagatctttgtgaagaccttgactggcaagaccataaccctggaggttgagagctccga

SEQ ID NO: 57303 - DNA, 123 bp, Zea mays
cgtgaggttctccggggttcgggttcgtgggtgagcggatcgagatggcggcgtcggatgttgagtaccgctgcttcgtcggcatgactcccttggccacggacaaccactcactccacaacg

SEQ ID NO: 57304 - DNA, 234 bp, Zea mays
tagggtttttgattttaggccgcggccgctgctcatctcacatccctcgagaagacgcctgctcctcgccgatcgatacgattgccgtcttctccgacctccacaccgccgacggcctcaagtccctcgaggcttacctcgccggcaaaacctatgtgtctggtggctccattactaaggatgacattaaggtctctcccgcggtgccgtcgaagccctgacgctagatttcct

SEQ ID NO: 57305 - DNA, 287 bp, Zea mays
  unsure (1)..(287): unsure at all n locations
caggtatgcagctgccgagggtttctataaactagctatggcctatgcacccgttccagatcttcacattatgacggttgcttcatctgtgtgatgcacaccaggagatgcaatcatgggctgaagcagcacaatgtgcagttgctgtagctggcgtgatcatgcaggcacttgttggaaggaatgatgctgtgtggagcaaggagcatgttgcttcgctgcgcaagatttgccctattgtcaacactgatgtgactgcangaacatctgcagctgaagtcgaggga

SEQ ID NO: 57306 - DNA, 196 bp, Zea mays
aaacaagccaaggaggcagatgacttgctggcacaaggaaaatatcttggtcctttgcatggcattccatatggcctcaaagatataattgcggtaccacacaataagaccacttggggctcaaggacgtttaaaaaccaagtccttgatagtgaagcttatgtgtacagaagattgaagtccgctggagcagtcc

SEQ ID NO: 57307 - DNA, 285 bp, Zea mays
actctgcgcctaattactgtgaccagatgggcaacaagggcgaatttattcgcttcacagctccagaaatgaaaccagatattgttactttctcagctgtgacacatcctgatgtgaagcacgatggcatatgcaaataacttcctcaggatgtttcaatgacagaatataacaacattgtttagcaattttaatcagatgataatgatgatgatcagctcccaattcacatttcttgctaggtttcagtatatgctccttttacacaagtcagtgatgcaggga

SEQ ID NO: 57308 - DNA, 185 bp, Zea mays
ggtcaatggtggtagagttagcagctgggcatgcattaacttctcacggaatgtgcaagatggtgctgccgggagtttctgtcatgaattggctttgatgtgccaagtatcaggaatggattttgtacttgaacctgtgctgtcaccttgctatgcaaggcctcaacttgttcaaagcgcactac

SEQ ID NO: 57309 - DNA, 234 bp, Zea mays
caaacacataccttgttgggcatgctgttactctagctgacattgtaatgacatgcaacctctaccatggaattgcacggatcttgaccaagaccttcacgtctgatttccctcatgtcgagaggtatttctggaccatggttaaccagcctaacttcaagaaggtcattggtgaggtcaagcaggcagattctgcacctccgattccgaaaaatgctgctccttctagggagc

SEQ ID NO: 57310 - DNA, 212 bp, Zea mays
cctgtggttctgtgactacaagtacaatgacgagaacacagtgtcgtttgtgactatgaacaaggttggtggcttcctgcagcggatggatctgtgccgcaaatacgcctttggcaagatgcttgtggttggctctgagccccctttcaaggtcaacgggctctgactcttccgtggcaccgaaatccccaagtttgtcatggatgaggtct

SEQ ID NO: 57311 - DNA, 265 bp, Zea mays
aaagtttcgtggaaaattgtcatcttttagctcagctcgtaatgatggtaataaattccgtgatatatacaactttgcattcacttgggcaagggaaaagggtcaaaagtctctctcactggagactgctattggaatgtggcagttgctatttgctgaaaggaaatggcctcttctggatcattggtgtcagtttttacaggtcagacacaataaagccatatctagagacacatggtccagctgctggaatttgtgagacgac

SEQ ID NO: 57312 - DNA, 297 bp, Zea mays
acaaaattcagttcacaacgaatttttgtaaaatcaaaatttctcctatatggaaagcgagaattgagccaaaatgtcgttttatcgtatggaccatgttgtataacataattttgactgcagacaacctacaaaagcgaggatggccttgcaatccaatttgttgtctttgcaacttatcacaagacactatgcctcatttaggcaaagactgcccgtttttgtagaggtttggaacatgatcctatcttgggccaaaaaaaaaaaaaactagagcaagacaaaaaaaagaggggg

SEQ ID NO: 57313 - DNA, 294 bp, Zea mays
tcaatgaaattcttcctgagggaagataggccaatgaagaatggctatgtgggctggggttcaaaagagctcatggagttcctttcctctataggcaaagatacattgaattccctagatcaacatggtgctactgaagttgtgaaggtgtacattcaacaaaaaggtctcttagcaagagataagaaaaaacttgtcatatgtgatgacaagctcaagattttgtttaggagatcaaaagtgaggtacaacaggatatatagcttgttaggtaagcatattgctgtgaatatg

SEQ ID NO: 57314 - DNA, 275 bp, Zea mays
tgcttgtccggcacggcagtcccgagcagaggctcaagtatctgcccaagctcatcagtggggagcatatcggggcactggcaatgagtgaacccaactctggctctgatgttgtcagtatgaagtgcaaagctgagaaagtggacggcggctatgtcctgaatgggaataagatgtggtgcaccaatgggccgtctgctcagacgctggttgtttatgcaaaaacagatctagctgcggtatcaaaggaatactgcatcatatcgagaagggat

SEQ ID NO: 57315 - DNA, 293 bp, Zea mays
tattgaatggatttcaacatccccacccacgtgtgagatgggctgctatcaatgccatcggtcagctttctacggatttgggcccagatcttcaagttcattaccaccagcaggtgctgcctgcattggccaatgctatggatgatttccagaatccacgagttcaggcacatgctgcttcagcgattttgaattttagtgagaattgtacaccggaaattttgacgccttacctggatggaattgtgaacaaattacttgttcttcttcagaatggaaagcaaatggtgcag

SEQ ID NO: 57316 - DNA, 249 bp, Zea mays
cggccatcgactcagcgagtcagctggtgtctctgagaagtgagagttgattgcccataggatatatctgtgttgactataagtacaaatctagaagtacctactattgtagttggagcagttaatctcaaaactatcataaatgagaaacacaatgtgcatgagattgtgtcggaactctcatatgttgtcatcgggtgaagattgatagtcgaatgcgtccagaagattggcagaacggggatgctc

SEQ ID NO: 57317 - DNA, 294 bp, Zea mays
agctgtcggcacgcagtcccgagcagaggctcaagtatctgtccaagctcatcagtggggagcatatcggggcactggcaatgtttgaacccaactctggctctgatgttgtcagtatgaagtgcaaagctgagaaagtggacggcggctatgtccttaatgggaataagatgtggtgcaccaatgggccgtctgctcagacgctggttgtttatgcaaaaacagatctagctgcgggatcaaaaggaataactgcattcataatcgagaaagggatgcccgggttcagtactg

SEQ ID NO: 57318 - DNA, 290 bp, Zea mays
aacttcggccaccaagagatgcaccggtatcttggtatgcaactgatgctttggagacgatgaagaagtatggagctatatatttaagtccattttcacaccatttggcagaagatattgataatccagagctccagagattgagatgcagagcaaattaccatgcactacgattcaagccaaatatcatgaaaacaagcagtgagatagtaaacaagctccgctacagaaggccatttcatgtcaattcatcttcgatttgagttggatatgcttgcatttgcagggtg

SEQ ID NO: 57319 - DNA, 136 bp, Zea mays
ccattgcaaatgttcaagtttgataccaatgaaggtcgtgacaccttctggcactcaagtgctcatattcttggagaatctattgagagagcatatggatgcaagctgtgtattgggccttgcaccacaagagggg

SEQ ID NO: 57320 - DNA, 290 bp, Zea mays
cagctatagtgaacaagggagcttgtgcaagatttgcatttgctgctgcgatttttggtgatttccaagaagcacttttctggctacagctgcctcaagctcttcgccacttcctgggtaaatccacaagtagatcaagagagaagatctcacaatcaagtttacatcctgattctgaacaaagctccagatttaatcggatagcttcaagagagagatctgcttctgaaaagttcacgaaaaatgctgcgaattatgggcaattaagctcaatggcatttaatcaagag

SEQ ID NO: 57321 - DNA, 85 bp, Zea mays
ctgccttctataagagcttgacaaatgactgggaggagcatctggctcgtcctcacttctctgtggagggtcaactggagtgcaa

SEQ ID NO: 57322 - DNA, 290 bp, Zea mays
gcgctgaagatgccgcgacagatgctcaagtatctgcccaagctcatcagtggggagcatatcggggcactggcaatgagtgaacccaactctggctctgatgttgtcagtatgaagtgcaaagctgagaaagtggacggcggctatgtcctgtaatgggaataagatgtggtgcaccaatgggccgtctgctcagacgctggttgtttatccaaaaacagatctagctgcgggatcaaagggaatagctgcattcataatcgagaaagggatgcccgggttcagtactg

SEQ ID NO: 57323 - DNA, 82 bp, Zea mays
ctcagatcacggctagccgtaatcacacgcgactctgctgactactggcgagcagtgtaacattttccttcagccatgggca

SEQ ID NO: 57324 - DNA, 297 bp, Zea mays
agactgtggaacttcagattggtctgaagaattatgatccacagaaggacaagcgtttcagtggctctgttaagttgccccatatccctcgtcccaagatgaaggtgtgcatgcttggtgatgcccagcatgttgaggaggccgagaagatgggacttgactacatggtgttgaggctctcaagaaaatgaacaagaacaagaagcttgttaagaggcttgccaagaagtaccatgctttcttggcatcagaggccatcatcaagcagattccacgtctcctatggtctggtctcaa

SEQ ID NO: 57325 - DNA, 296 bp, Zea mays
gagaaagtgttcgccaatgtgggcaagactatcgggtacaaagttggaacaatgattgagatccccagggcagctctggtggctgatgagatagcggacaggctgaattcttctccttcggaacgaacgacctgacgcagatgacctttgggtacagcgggatgatgtgggaaagttcattcccgtctatcttgctcagggcatcctccaacatgacgccttcgaggtcctggaccagaggggagtgggcgagcttgtgaagtttgctacagagaggggccgcaaagctaggccta

SEQ ID NO: 57326 - DNA, 187 bp, Zea mays
gatgattcatatctggacagctacatcagcacaattggagttgactttaaaattaggacagtagagcaagacgggaagaccataaagcttcaaatttgggatactgctggacaagagcgcttcaggacaatcactagcagctactaccgcggactcacggatcattattgtatatgacgtcacagac

SEQ ID NO: 57327 - DNA, 235 bp, Zea mays
ggggtgcatacactcctagcagcgggaatgacaacggttctttcaagaagttcgctccaaggtcaggcaacaccgtgtttattaagggctttgacacctctggtggagaggaccagatccgcaccgctcttgaagagcattttggatcatgtggagatatcatcggatttcaattccaaaggattatgacactggtgtaagcaaaggaatggcgtacatggatttcaaggaccca

SEQ ID NO: 57328 - DNA, 216 bp, Zea mays
gttcgatctcttcctgtagaagagcagccaaagcaaattattgtgacaaggaagggcatgttggatcccttggaggtccatctacttgacttccctaacattgtcattaagggcagcgagctgcagcttcctttccaggcttgcttgaagattgagaatttggtgatcttatactgaaggcaactgaaccacagatggttctttataatatatatg

SEQ ID NO: 57329 - DNA, 195 bp, Zea mays
gtctgtcgctctcgctctcagacgactgggccgccgccgcttggtgctgaggctttcgttggtctcttcggcggcgacgagcacccaccagcagttctgtagaaatggctgatggtgaggacatccagcctcttgtctgcgacaatggcaccggaatggcaaggctggttttgctggggacgatgcaccaagggc

SEQ ID NO: 57330 - DNA, 290 bp, Zea mays
catcaatgtgaggaaagggcagatcacaaacatcctggaggagaatgtcgtgcagccgttgctggtgagcacaagtgccattacgttagcctgcgagtgtgtcagaatgatcttgaagattgatgacattgtcactgttaggtaagagcgtgaagttggggtcatgtagcctgctctgttctgtctggattgattattagttaggttactgcttaatgtaaaacttggttcatgggcgtgtttctacacttggttttgatgttagtactatccttgacatgaaactacta

SEQ ID NO: 57331 - DNA, 293 bp, Zea mays
tggacctgttcaggaagtgcatggagcctgttgagaagtgcctgagggatgccaagatggacaagagcaccgtccatgacgttgtacttgttggtggctccactaggatccccagggtgcagcaactgctccaggacttcttcaacggcaaggagcttgcaagaacatcaaccccgatgaggctgtcgcctatggtgctgctgtccaggctgccatcctgagcggtgagggcaatgagaaggtgcaggacctgcttctgctggacgtcacccctctgtccctgggtctggaga

SEQ ID NO: 57332 - DNA, 261 bp, Zea mays
ggcaataccttttgcgctttcaaaggatggaattgagatgcagtttgcaactaatcatgttgggcatttcctgctcacacaccttctattggataccatgaagaggacctctcatgaatcaaatttggaaggaagaattgtcaacgtgtcatcagggggcacagacttgcatatcgggaaggaatccgttttgacaagatcaacgatgaatcagtgtatagtagcattggtgcatatgggcaatcaaagcttgcaaacata

SEQ ID NO: 57333 - DNA, 290 bp, Zea mays
ggctgccagcacctatgacaagcggagacctatgagcaaaacattccgaaggcttcttgaagtgagtgaaaggcagacatttgttgggccgcccgagaatgtgagggaccatgtaatggctgccacaagagccctcaacaagggtgatcaccaaaagctttcagtgtcataaattcgttggagatttggaagcttttgaggaacagagagcatgtccttgagatgttgaagcttaagatcaaggaggaagctcttagaacctatctcttttcatactcgtcttcgtacga

SEQ ID NO: 57334 - DNA, 148 bp, Zea mays
ggctgccagcacctatgacaagcggagacctatgagcaaaacattccgaaggcttcttgaagtgagtgaaaggcagacatttgttgggccgcccgagaatgtgagggaccatgtaatggctgccacaagagccctcaacaagggtgat

SEQ ID NO: 57335 - DNA, 290 bp, Zea mays
gtctgtcgctctcgctctcagacgactgggccgccgccgcttggtgctgaggctttcgttggtctcttcggcggcgacgagcacccaccagcagttctgtagaaatggctgatggtgaggacatccagcctcttgtctgcgacaatggcaccggaaggtcaaggctggttttgctggggacgatgcaccaagggcggttttccctagcattgttggccgtcctcgccacactggtgtcatggtagggatgggacagaaggatgcatatgttggcgatgaggcacagtcca

SEQ ID NO: 57336 - DNA, 174 bp, Zea mays
ggcctcaatgtgctgcgtatcatcaatgagccaaccgctgctgctattgcctatggtcttgacaagaaggcaaccagcgtcggtgagaagaatgtcctcatctttgaccttggaggtggtaccttcgatgtctccctccttactattgaggaaggtattttgaggtcaaggcca

SEQ ID NO: 57337 - DNA, 261 bp, Zea mays
ctccgatccccaattcctccttcggatctcgcattcagcgcagcaaggtgtgaaggaagggggacgcggaggaagatggggctcgcgttcgggaagctcttcagccggctcttcgccaagaaggagatgcggatcctcatggtcggcctcgagccgccggtaaaaccaccatcctctacaagctcaagctcggcgagatcgtcaccaccatccccaccatcggtttcaatgttgaaactgttgagtacaagaacattagct

SEQ ID NO: 57338 - DNA, 135 bp, Zea mays
ccatattacgttatggtggtatgtatgcattggtctctagcctacaggggaactgccaacaacaatgccatccaccagctgctgcattttgctgtatcagatgtcagtgatgatgttcggaggactgaagttatg

SEQ ID NO: 57339 - DNA, 144 bp, Zea mays
cgttctgcaaacgatccatgtgctatctctcttagggcttgttcggttattttcaatccatatggattggaggggattgatacagattggaggggattttgacttactagagattgaatctctcccaatctccctcaatccata

SEQ ID NO: 57340 - DNA, 120 bp, Zea mays
ctgtaatcagctggttggcccttctagctaagttcaccatcttcaactttggtactcagaaggatgtctccaactggggcttgttcttctgtgttgcaattggtccatgggctggtctga

SEQ ID NO: 57341 - DNA, 86 bp, Zea mays
agcgaatcttgggacttggagatttgggttctcagggaatgggaattcctgtaggcaaacttgctctatacactgctcttggagga

SEQ ID NO: 57342 - DNA, 86 bp, Zea mays
cttcaattctgttggtttctatcagatgacaaagctggctattattccctgtactgttatactggagacccttttcttcaggaaga

SEQ ID NO: 57343 - DNA, 298 bp, Zea mays
  unsure (1)..(298): unsure at all n locations
gttcttcctgaattgaatggcaagctcactggcatgtccttccgggttcccaccgtggatgtgtcagttgttgacctcactgttagaatcgagaagggggcctcctacgagganatccaagaaagctattaaaggctgcttctgaggggcccattcaagggtaatcattgggctaacgtggaggaggatctggtttccaccgacttcaccggtgacaagcaggtcgagcatcttcgaggccaaggcggggattgccctgacgaccattcatcaagctcgtctcgtggtacgacaacga

SEQ ID NO: 57344 - DNA, 157 bp, Zea mays
gagatgtcggtggccggggacaggctgctgtacaaggtccccggcgagcgccggggagccgacggcgtgtggtgcctaacgttcgggaacgcggacatggtgcccctgacggcgcacgtgatcgggcacaccaccagatgaacctacgggtcgagta

SEQ ID NO: 57345 - DNA, 284 bp, Zea mays
gagagttcgacctagcacgcccggccgccgccgcagcccgcaatggcgtcccttttcaaggaccccagcaagctctcggcgtacagggaccgccggttcaaggggacgcaggaggagtatgaggcggccctgctgcgtcgacaaggcgtacatcggtaatatgtccttgctacacaacgaggagcaggcctacgagctcttctcccgcgccgggaagatcaagaagatcatcatggggctcgacaagaactccaagaccccatgcggtttctgttttgtactgt

SEQ ID NO: 57346 - DNA, 276 bp, Zea mays
  unsure (1)..(276): unsure at all n locations
agctcaacgtcgagctcatcaagagggctgcggtcttccactacggatcaataagcttgattgctgagccttgccggacagcacatctccgtgccatggagattgccanagaggcaggtgcactgctctcttatgacccaaacctgagggaggcactatggcaatcccgtgaggaggcccgcaccagatcttgagcatctgggacaggcagacattgtcaaggtcaacgagtcgagctcgagtcttgacaggatcgactcggtggaggcgatgttg

SEQ ID NO: 57347 - DNA, 268 bp, Zea mays
agcagtaagatccagagcgtgctgggatacatggcacctgagttcacttgcacaacggtcaaggtcacggagaagtgcgacatatacagcttcggagtgctagtccttgagattttgtcaggcagaaggcccgtagaatatctggaagatagtgtggtttcgctttctgatcttgtcagtgatgcactcgatgatgacaggctggaggactgcatggatccacggtatcaggtgagtctcgatggtggaggcacactgatcatcaagc

SEQ ID NO: 57348 - DNA, 280 bp, Zea mays
gttgattttgagaaaaccctagagtattggcaactagacaagtggaacggctccttctctgttaagtggcacattgtcaaggacgtgcccaacaatattctcaagcacatcatcctggagaacaatgagaacaagcctgtcacaaacagccgtgacactcaggagatacgcctcgaacaaggctacagatgttcaagatattcaaagatcatgtcagcaagacttccatcctcgacgactttgcctcctatgagagccgccagaagttgatgcaggatag

SEQ ID NO: 57349 - DNA, 287 bp, Zea mays
ttcacaaatgcggatattcttgaagccacttaccctgctgttgcgaagaggctacatgaagactggatggatgaccctgctattcctatagtcactggttttcttgggaagggatgtaaatcatgtgctggtcaccactttaggcaggggtggtagtgacttgacagctacaaccattggcaaagcctttgggattaagagaaatccaagtttggaaggatgtagatggtgtggtgacatgtgatcctaatatatatgcaatgctatacccgtgcctacttgacttt

SEQ ID NO: 57350 - DNA, 284 bp, Zea mays
gacggcatgaacctgtctgcccctcaaacattcaggtccaaggagatctccaagagcaacgtggtggatgacatggtctcaagcaatgccattctctatgggcccggcgagcatcccgatcaatgttgtgtcatcaaagtaagtgccgtacgtgggagacaagtaagagggctatggacgagtacacatcagagatcttcatggggcggcagagcaccatcgtgctgcacaacactgcgaggactcgctctcgccgcgctatcatcttgatcggtgctctggct

SEQ ID NO: 57351 - DNA, 258 bp, Zea mays
catggttttcttctggagcgaagaagtttattaagcgcattctcgatcctaatcctgatacgaggataacaattgcagaaattttggaagatgaatggttcaaaaaagactataaaccaccacgttttgaacaaggtgaaggtgttagccttgacgacattgatgctgcattcaaatgattcagaggaccgtcttgtggcagagaaaagagagaaaccagaatccatgaacgcatttgctcttattccgaggtcgcag

SEQ ID NO: 57352 - DNA, 248 bp, Zea mays
gcaggattcaccgaagagagtgggacgctgggtgatatatgggagactgtatcaaacagtgatcttgttttgctactgatatctgattctgctcaggctgataactacgagaaaattttctcgcacatgaaaccaaacagtattcttggtttgtcacatggatttctccttggacatttggtatctcggggttttgattgcccaaaaagatcagtgtgaatgtgtatgcccaaagggattgggccatc

SEQ ID NO: 57353 - DNA, 253 bp, Zea mays
cggaagcatacagatgtccctgctcctgacatggggaccaatgcacaaaccatggcatggatgctggatgagtactcgaaatttcatggtcactccccagcagtcgtcactgggaagccaatagatcttggtggatcactgggcagggatgcagcaactgggaaaggcgtaatgtatgctaccgaggccctactcgctgaatattggaaatgcatttctggataacttttgtgatcaaggttttggcaatgtg

SEQ ID NO: 57354 - DNA, 269 bp, Zea mays
attactgacaagtcgagttgcttggatttggacatggctgagtttgtgctgcaagacgtggtggtgtctgctgtaagtcaagtactgataggttgccagggtaaaggcatcagagttgcttgcaacctgccggagagatccatgaagcaaaaggtttacggggatggtatacggctccagcagatcctctccgacttctgattcgtttcggtgaaattctctcctgctggtggctctgttgatatctcttcaaactgaccaggacagca

SEQ ID NO: 57355 - DNA, 283 bp, Zea mays
ggggactggagagagcatcaatgagaaggaccgctgtccagggtgcaagggtgagaaggtcattcaagagaagaaggttcttgaggttcatgttgagaaggggatgcaacacaaccagaagatcaccttccctggtgaaactgatgaagcgctgatactgtcactggagacattgtattcgtcctccagcagaaggatcactccagattcccgagatagggtgaagatctcttctatgagcacaccttgtctctgaccgaagcactatgtggggtccaatttg

SEQ ID NO: 57356 - DNA, 262 bp, Zea mays
cacccagtcattttggcttttctatatacaatgctttaactatgtatttagatatagtgtatatttaagtgcactataaaagatgccccctccatcccaaaataaaatgtgttttacctttttagttgatacatgcaataatgaatatatttgtcctacatatgtgtctagattcatcatcatccatttgaacatagacataagatcaagtataaaatgactaatatttggggatgagggatatgtatgtagaaagctaaca

SEQ ID NO: 57357 - DNA, 224 bp, Zea mays
cacggcgctaacgcggggctggacatcgcggtgcggctgctcgagcccatcaaggaggagttcccaatcctctcttacgccgatttctcccagctcgcgggaactgtggccgtggaggtcacggtgggcctgagattcccttccacccggtaggaggacaagcttcagccccacctgagggccgcttccgatgccataaggtctgacaactgagcagttttggc

SEQ ID NO: 57358 - DNA, 260 bp, Zea mays
gggccatcaacattatggatgatatgcaacgtgccgctatacctcctagccgaactacgtataataatgttataaatgcatgtggagctgctggtaactggaagaaagctttagaactttgtaagaagatgactgaaaatggtgtatggccagatttgatcacacacaacattgttctgtctgcttttaagaatggagctcaatactcaaaagccatagcttactttgaattatgaatcctctaaagtgccccgatacat

SEQ ID NO: 57359 - DNA, 254 bp, Zea mays
atagaattataggggctcactttttcagccctgctcatattatgcccttgcttgaaattgttcggacggagaagacatcaccacaagctatccttgatctcatcaccattgggaagataataaagaaagtccctattgtggtcggcaactgcacaggatttgcagtcaaccttacattttttccttacacacagggttctcatcttctagttagtcttggtattgatgttttcagaattgatcgagtaataagc

SEQ ID NO: 57360 - DNA, 271 bp, Zea mays
catggatctttgcttggacacaaacaaggttccatctgcctgtctggcttggatttggtgcagcgataaagcacatcatgcagaaggacatcaggaacatccatatactgagagaaatgtacaatgagtggccattcttcaggggtcaccctgtagtgcttgagatggttttcgcgaagggagactccgggaatcgcagctgtgtacgacaaattgctagtggctgatgatttgcatcctttcgcgagaactgaggaagaactatgaagag

SEQ ID NO: 57361 - DNA, 262 bp, Zea mays
  unsure (1)..(262): unsure at all n locations
cgggaacggcggaagcaaacaactagaaattccccagcccggttccttttcgtgcggtttgatctcgtcggaggcccggccgcagttccgccatcagccatcgaattcgatggcggccaacttcgggaacaagatccgcaacgccaagctggctcctcttggagatgtaggcgctggcaaatctagcttggttcttcggtttgtaagggacagttgttgaattcaggaatcaacaatcgagcagcttctntaccagacttag

SEQ ID NO: 57362 - DNA, 270 bp, Zea mays
caggagggctggtacaaagactgagcctgatcggggaatatttgtaaagcacttcaagaatatcccaatggctgacatggaaattgttcttccagagaagaaaaatccatcactaacaccaatggattgggtcaagtttctcatttctgctgttatcgggttgcttatgacttgcaggtcactctagttggctctctgaaatgccatagctgatgtatgggttgtatagcaatctgtctggtgtgatggatatgtgctagatatcttcac

SEQ ID NO: 57363 - DNA, 179 bp, Zea mays
gtgaaattgagaacattgagaaagatgctattttggacttgattggaattgtcacatcagttggcccttctgtcacgtttatccgaaaggatggcgtggaaacccagagaagaacacttgaactgaaagacatgtctggtcgaagtgtacaacttaccttatgggggaagtggtgtgtt

SEQ ID NO: 57364 - DNA, 292 bp, Zea mays
gggaaggtaggatgaacgttgcgatgtcaaattccgtcacaactgcaatccgggatagcataagggacacagctattgggaaaataaggaacactgagaaggctgatcgtgctacagtggaacaggctattgacccaagaacacgcatggttttattcaagatgttaaaccgtggtgtctttaataacataaatggctgcatttctacagggaaagaggcaaatgtctatcatgcaacaaagacggatggccaggagcttgcaattaaagtctacaaacctctgtccttgtt

SEQ ID NO: 57365 - DNA, 302 bp, Zea mays
cccaagccgaccccgccgacgtacactccaagccccaagcctcccacacacccgacgcccaagccgaccccaccgacgtacaccccttccccaaagcctccgacacctaagccgaccccgccgacgtacacgccttcccccaagcctccgatacccaagctgaccccaccgacgtacactccaagccccaagccaccggctaccaagcctcccacgcccaagccgaccccaccgacgtacactcccacaccgaagccgccggccaccaagccgcccacctacactcgacgccgccggtgtct

SEQ ID NO: 57366 - DNA, 300 bp, Zea mays
gccaacccaaccaggaggagctctgcttcacccgcagcatcaccggcgccggcggcagtgagtaccgcatcgaccgcaaccaagtcacctgggacgtctacaacgccaagctcaggtccctcggcatcctcgtcaaggcccgcaacttcctcgtctttcagggtgatgtagaatccattgcctccaagaaccccaaggagctcaccgctctcctggagcagatctcaggctctgatgagcttaggagggagtatgacgagctggaggagcagaaagccagggcgaagagaagtctgctct

SEQ ID NO: 57367 - DNA, 297 bp, Zea mays
ccaatctagaagctcccctctccctccctccctctctctctctctcttcgccgtccgaagctccgcacccaatctaatcgacacctcaccgagatgggccgcaagttcttcgtcggtggcaactggaaatgcaatggaaccacagatcaggtcgagaagattgcctaaaccctgaatgaaggacaggttcccccttcagatgttgttgaggtcgttgtcagccctccttatgtcttccttcctgtggtcaagagccagctgcgccaagagttccatgttctgctcagaactgctggg

SEQ ID NO: 57368 - DNA, 294 bp, Zea mays
gaaaacctccaaggctccaaccctagccgcgatccgacaacgcctccatccctagccgactgctgcaagcttcagagctcaagagtcagggcgccatggcgacagagacggagaccttcgcctttcaggctgagatcaaccagctgctctcactcatcatcaacaccttctattccaacaaggagatcttcctccgggagctcatttccaactcttccgatgcgttggacaaaatcaggttcgagagcctcactgacaagagcaagctcgatgcgcagcggagctgttcatcca

SEQ ID NO: 57369 - DNA, 286 bp, Zea mays
tacaatagagatgacttccctgttcagtacgatgctgcaaagttctttgtcattaaatcatacagcgaggatgacatccacaagagcgtaaagtacaatgtgtgggcaagcacaaccaacggaaacaagaagcttgatgctgcttaccaagaagtcacagtcaaagggatctgcatgccctatattcttgttcttctcagtgaatacaagtgggcagtttgttggtgttgctgaaatgactggcgccgttgattttgagaaaaccctagagtatggcaacaggaca

SEQ ID NO: 57370 - DNA, 289 bp, Zea mays
ctccagcaaaggaggggcaagaagggatacgttctcgcatgtttaagtcagttatcactgcgaaccatcctgaattttcaagcatgagacaacaggatgtccttgaattcttccttcaccttattgacagagttgagaaggcaaaccctggagaccgtgagctaaatcctttttccggtttcaagattgttgttgaagagagggttcagtgcccttctgggaaggtttcttacaacaaacgatctgacaacgttctttctttgagcataccacgcatgaggcaactaat

SEQ ID NO: 57371 - DNA, 185 bp, Zea mays
cggaagtgttgggatagcatgcacagccgaacacgcagaatggggggtgggtggctcaccgccttcgatgggaggcggtttaggaggtgggtagcggtgtgcagggcctctgcccagtagctggcagggagagatgcctggaagagaaggcaatgaatcatattggtggtggtgcgaatcatacg

SEQ ID NO: 57372 - DNA, 293 bp, Zea mays
ctccgctcggccaccagctttgaccgcctccactcccctccgctcctgtttctccataacccacccccccgcaggagcggcgcggcggcggcggcggcaaagccaaaggcaagatgttcgggcgcgcgccgaagaagagcgacaacaccaagtggtacgagatcctcggggtgcccaagtcggcgtcccaggacgacctcaagaaggcctaccgcaaggcagctatcaagaaccaccccgacaagggcggtgaccccgagaagttcaaggagctcgacaagcctatgaggttt

SEQ ID NO: 57373 - DNA, 286 bp, Zea mays
gtttctcaatgctgttgatgacaagcggaaggaagtcctctctaaaatagaagaggatgttgctaagctcagcggttctgcagccaagcatggaaatatatatgtgacagctgcaaagaagatcatggacaagggctctgactacactaagaagtacgatgagaggcttcaccgcatgctggagaagtggtgtagctagttcagtaaagatgaaaagcgtcaaactagttgtggaatggtggtattgtctatagtacatgtgtttggactttgacactgggttcca

SEQ ID NO: 57374 - DNA, 287 bp, Zea mays
ctcttggggcagctgtgcagggtggggttttggcaggagacgtgaaagatgtagttcttctggatgttactccattatctcttggtttggagacattgggaggagtgatgacaaagattatccccaggaataccacactgccaacctcaaaaccggaggtattctcaacagctgcagatggacagacgagcgttgagattaatgttctccagggagaaagagagtttgtcagggacaacaagtccgttggaagcttccggttggatgggaccctcctgcacctcgtg

SEQ ID NO: 57375 - DNA, 286 bp, Zea mays
actggccccaagttggtagggtggagctacataatctgaagatcagatacagggaagatgctccccttgtactgcaaggaatcacatgcactttcgaaggacggagataagattggtatagtcggtcggacaggaagtggaaagacgactttaatcggtgcattgtttcgtcttgttgagccaactggggggaaaataattattgactctgtagatatcaccacgattggcttacatgaccttcgttcacgtctgggtatcattccgcagatccgacactctttca

SEQ ID NO: 57376 - DNA, 279 bp, Zea mays
gacatatctggtggcaatgctcgctgtatagcaatgcttcttgcattcagagaggcaataaatgattactccatgccttctgaaaaaattctgaatagagatcttactgctaaaatcagtagctatgtgtcatttctcatcgagtgcagaccacgttcaatcagcatgggcaacgcaattagatttttgaagaacaggattaccaagctaccacttgcattttcagagtcagaagctaaagttagtcttcaatctgatattgatcgctttataatgaga

SEQ ID NO: 57377 - DNA, 293 bp, Zea mays
ccgcagttcccccgcgcccgagacgcaaccccgcgccaggagtaagtttgttcttttatcgatatggcgagggaggagaatgtctacatggccaagctggctgagcaggccgaaaggtatgaagagatggttgagtatatggagaaggtggctaagactgtagatgtggaagagctcactgttgaggagcgtaacctcttgtcggtcgcatacaagaatgtgattggggctcgccgtgcttcatggcgcattgtctcttctattgaacagaaggagagtcccgtaagaacgaa

SEQ ID NO: 57378 - DNA, 275 bp, Zea mays
gaggaaccagttatgttgatagcttttgttcttctagggaagaatctggagcagagggcaaaacttaaagctaccagtgatatgactggactgcttagtattcttccatctaaagcacgcctaatggtggataatgatgctgagaaatcatcattgattgaagtcccatgtgatactctagctgttggggactatgttgttgtgctacctggggatcacatcccagcagacggtattgtgaaagctggaaggagtacattgatgaatcaagtttg

SEQ ID NO: 57379 - DNA, 283 bp, Zea mays
cggtgacccgtcgtcgtcgtcgtcgtcgacgacgccgcgcggcgacggcaacgtgtggcgcacgtcttccacccggggagcaacctggccaccaagggcatgggcgccaacctcttcgaccggccgcagcccaactcccccaccgtctacgactggctctacagcgacgagaccaggagcaaccaccgctagatcgggcgagatggatggacagtgaagaggccatgtttgctggtccttgtggttatctaaaacgcacgcatgctctatatagctagtcatc

SEQ ID NO: 57380 - DNA, 251 bp, Zea mays
caaaatgtcgctttatccttcttgatgtcattccagtgggggccattgtccttgcagtaacaacactccttgattggtggatgtatggttcctgggtcatagtgccgcttaattttttgaaattcaacttattgtcttccggaggagactactatggaacacatgtcttccattggtactttacacagggttttacatccatgatttggacattctgaccatttgcattgtgcggtattgtaaagtctcag

SEQ ID NO: 57381 - DNA, 281 bp, Zea mays
aacatataagggtttccttgatgaactactgaataatatctccacaattaacacggacttagatattgaagcctctggtggatacgatgatgacctgattgccagactgttgaagctcgggtgttgcaaaaataaggaaatagctgttaagacagtcaaaaccatcaagttcttgggactacatgaagagactcaaatacctaagggttgttcgagcccatttgatgtgatttgccagcgaatggaacagaggatggcctatggcacaatgagcaagacat

SEQ ID NO: 57382 - DNA, 292 bp, Zea mays
ccgctcctccgcaaccccttcccctcctccgccgaagcctctcctccggccgccgaaaccctagcctccgccgctgccgtcatggcaagcagcaacgtctcgaccgtttacatctctgtcattgatgacgtcatctccaaggtccgcgaggatttcatcacctacggagtcggtgacgccgtcctaaacgagctccaggctctctgggagatgaaaatgctacactgtggcgcgatctcggggaacatagaccgaaccaaggctgctgccgcgtcctcggaggcacaccggc

SEQ ID NO: 57383 - DNA, 253 bp, Zea mays
ctctcacaggtcacaggctcacagcacactgccactccgaaaccccaagcgccaccaggaccaggcagcctcctccgtcctatctcctccaagtccaacaagcacctatgggaggccatctccgcccggatgcgggaccaagggttcgaccgctccccgaccatgtgcaccgacaagtggcgcaacctgctcaaggagttcaagaaggcgcgcagcaactctcggaacagcggcggcggctctggctctggag

SEQ ID NO: 57384 - DNA, 298 bp, Zea mays
gtacaagcttcccgggcacaatggttctgtcaatgagactgctttccatcccacagagccgatcattggatcttgcggcagcgacaagcagatctatcttggggaactttaagtgactatcagttccttttcagctagatgttcttgtgacactttgatgaggagaggaggcactgacaccctgttcctttgcctgagaattggaacactcagtttggctgatctggatttgacatttgttgattgtcttgttaagcccagttggtcttgccgttcacaaatgccccatactttgcac

SEQ ID NO: 57385 - DNA, 282 bp, Zea mays
ggatgcctatctactggactgggacacgcggtaccggatcgctctgggtgctgccgaaggcctgcggtatcttcacagcgactgcaagccgcaggtcattcaccgcgatatcaaatcgaacaacatactgcttgatgagatgatggaggctcatgtgggggacttcggtttggccaaacttattgacatttccaactctagatcgatgtctgctgttgctggttcctatggcttaattgctccagagtacgccttcaccatgaagtcactgagaagtgtgat

SEQ ID NO: 57386 - DNA, 285 bp, Zea mays
gcgcgcttcaaggccttttttttttgagataacaaggaggagaggaggagatggcggtcacgatcacctgggtgaaggcgatgcagatcttcgacagccgcggcaaccccaccgtcgaggtggacgtgggccttagcgacggcagctacgccagtcagggccgtacccagcggcgcatccactggaatatatgaggccttggagttgagggatggaggatctgattatcttggcaagggtgttcttagggctgtcagcaatgtaaacacattattggaccagcga

SEQ ID NO: 57387 - DNA, 275 bp, Zea mays
  unsure (1)..(275): unsure at all n locations
gaaaagcttcatgctgagtgggcagcagccaagttatcttgcaagaagcgcctggccaaacatgtgttggatgtgacaggtgttacgattgatccaactagcctttttgatatacagattaagcgcatacatgagtacaagagacagctcctaaacatattgggagctgtttacagatacaaaaaattaaagggaatgagtgcagaagagaagcagaaggtcacaccgcgcactgtcatgataggagggaaagcgtntgcaaatacactaatgcc

SEQ ID NO: 57388 - DNA, 209 bp, Zea mays
ctttgggacaaagaacttcgacatggctatcgtgttcaaggatttcaagaaagacgttctccgcattgatctccatcccttcagcatcgcttgacgcgataaaggaatggctggacacaactgacctcaagtactatgagagcaggctgactctgaactggcgccctatcctgaaaactataatcgatgatcctcagaagttcattgac

SEQ ID NO: 57389 - DNA, 147 bp, Zea mays
caacgagaacctcatcaagcagacagctgatgcgctggtcaacaccggtctggcgaactagggctacgagtatgtcaacatagatgattgctgggcggagtctgacagggactaccagggaagcttcgttgcagacagacaaacctt

SEQ ID NO: 57390 - DNA, 283 bp, Zea mays
agctaagattatccttgatcgtgagtctgggaggtccagaggttttggctttataacttacacgtcttctgaggaggcttcggctgccatcactgccatggatggaaagactctggatggacggaacatacgggttaatcatgctaacgagaggacaggtggcttccgcagcagcggtggttatggtggtggcggctatggtggtggtggtggtggctatggtggcggtggctatggtggcggctatggtggtggaagcagtggctatggcggcggcggcagt

SEQ ID NO: 57391 - DNA, 279 bp, Zea mays
  unsure (1)..(279): unsure at all n locations
cggaggcggcggaggcagtggcggtgcgaacgtggctaatgtggtcaccgacgcgttcttcaacggcatcaagaaccaggccgggagcgggtgcgagggcaagaacttctacacccggagcgcgttcctgagcgccgtcaacgcgtacccgggcttcgccataccnggacggaggtggagggcaagcgcgagatcgccgccttcttcgcgcacgtcacgcacgagaccggacatttctgctacatcagcgagatcaacaagagcaacgcctactgcgac

SEQ ID NO: 57392 - DNA, 282 bp, Zea mays
tcaccaccgacccctactgggtggctgccagggccacttggtacggtgcgccaaccggcgctggcccctatgacaacggtggtgcttgtgggttcaagaatgtgaacctacctcctttctcggccatgacatcgtgcggcaaccagcccctgttcaaggatggcaagggctgtggctcgtgctaccagatacgttgtgtcaaccacccggcatgctctggcaacccggagactgtgatgatcaccgacatgaattactacccagtcgccaagtaccactttg

SEQ ID NO: 57393 - DNA, 163 bp, Zea mays
ggatgcctatctactggactgggacacgcggtaccggatcgctctgggtgctgccgaagcgctgcggtatcttcacagcgactgcaagccgcaggtcattcaccgcgatatcaaatcgaacaacatactgcttgatgagatgatggaggctcatgtgggggac

SEQ ID NO: 57394 - DNA, 281 bp, Zea mays
gaaggccacaagagctttcccagtggacacacttcatggtcttttgctggtctaggcttccttgcatggtacttagctgggaaactcacggcttttgatcgcaaaggacatattcggaagctatgcattgtgtttctgcctcttcttactgctgcgcttgtggctgtttctcgagtggatgactactggcatcattggcaagatgtatttgcagggggtcttataggtcttacagttgcttcattttgctatctacagttttttccatatccttttgatgg

SEQ ID NO: 57395 - DNA, 155 bp, Zea mays
cctccctccatctccagcattgtgttctgattcacctgctccaatggctgttctttctgctgctgatgcttccccggtctcagctatcgggtttgagggctatgagaagcgccttgagatcacattctctgaggcacctgtctttgtggaccctc

SEQ ID NO: 57396 - DNA, 169 bp, Zea mays
tgtcaatacctacaccttgatcaacagggatggaaagcctcaccttgtgaaattccattggaagcctacttgtggtgtgaaacgcttgctcgacaatgaagctgtgactgttggaggcacctgccacagccatgcgacgaaggatctatatgattccatcgcagctggg

SEQ ID NO: 57397 - DNA, 297 bp, Zea mays
cgtccggtcagaccaatcaacaaagtgacgcgagcacgagcatccatcgtttccccttcttccccatcgcgtgccctcgccgcagccatcttccatggcggaccagctcacggacgagcagatcgcggagttcaaggaggccttcagcctcttcgataaggatggcgacggctgcatcactaccaaggagcttggaactgtgatgcgctcccttggccagaaccccactgaagcagagctgcaggacatgatcaacgaggttgatgctgatggcaatgggaccattgacttcccaga

SEQ ID NO: 57398 - DNA, 281 bp, Zea mays
caggcaggtcggcgaggagggcaggaagaccgaagaccgagccgtgcgggggctcgggacgggaacgggacaggaccccaaaatctcagatccttcctgcccgcccgcccgtgcccgtcgacgcgtcgttcttgccggccgcgcgtcacctccgccctctcctcctccagggggatcggatacgccacaggctgcgcgatggtgctgtgggtcttcggctacggctccctcatctggaaccccggcttcgacttcgacgacaaaatcctcggcttcatcaa

SEQ ID NO: 57399 - DNA, 287 bp, Zea mays
ctcctctctctctgggtctggagactgccggaggagtgatgaccgtccttatcccgaggaacaccaccatccccaccaagaaggagcaggtgttctccacctactcggacaaccagcctggtgtgttgatccaggtgtacgagggcgagaggacccggacccgcgagaacaacctgcttgggaagttcgagctctccggcatcccaccggctccccgtggtgtcccccagatcacggtctgcttcgacatcgacgccaacggcatcctgaacgtgtctgccgaggac

SEQ ID NO: 57400 - DNA, 280 bp, Zea mays
agcgcacacacacacaaccagatctcccccaaatccacccgtcggcacctccgcttcaagatgcagatctttgtgaaaaccctgactggcaagactatcaccctcgaggtggagtcgtctgacaccattgacaacgttaaggccaagatccaggacaaggagggcatccccccagaccagcagcggctcatctttgctggcaaacagcttgaggacgggcgcacgcttgctgactacaacatccagaaggagagcaccctccaccttgtgctccgtctca

SEQ ID NO: 57401 - DNA, 287 bp, Zea mays
cccgtgccaggtttgaggagctcaacatggacctgttcaggaagtgcatggagcctgttgagaagtgcctgtgggttgccacgatggacaagagcaccgtccatgacgttgtacttgttggtggctccactaggatccccagggtgcagcaactgctccaggacttcttcaacggcaaggagctgtgcaagaacatcaaccccgatgaggctgtcgcctatggtgctgctgtccaggctgccatcctgagcggtgagggcaatgagaaggtgcaggacctgcttctg

SEQ ID NO: 57402 - DNA, 290 bp, Zea mays
gggctctaccgtgtcgtccatggcatcgatgttttcgatcccaagttcaacattgtctcccctggagcagacatgagtgtttactacccgtatacggaaaccgacaagagactcactgccttccatcctgaaatcgaggagctcatctacagcgacgtcgagaactccgagcacaagttcgtgctgaaggacaagaagaagcccctcatcttctcgatggcgcgtctcgaccgcgtgaagaacatgacaggcctggtcgagatgtacggcaagaacgcgcgcctgaggga

SEQ ID NO: 57403 - DNA, 277 bp, Zea mays
tgtggttattggccatgtcgactctggcaagtcaaccaccaccggccacctgatctacaagcttggaggcattgacaagcgtgtgattgagaggttcgagaaggaagccgctgaaatgaacaaacggtccttcaagtacgcttgggtgcttgacaagctcaaggctgagcgtgagagaggtatcaccattgatatcgctctgtggaagtttgagaccaccaagtactactgcactgtcattgatgcccctggacatcgcgacttcatcaagaacatg

SEQ ID NO: 57404 - DNA, 273 bp, Zea mays
gggtggtggtgggtcccatgctgatccatttgacattttctcatcattctttggaccctcttttggaggaggtggtggaagcagcaggggaagaaggcaaaggaggggagaagatgtagtccactcacttaaagtttctctggaagatctttacaatggaatctcaaagaagctctctctttcgcgcaatgtcatctgctccaagtgcaagggcaagggctcgaagtctggtgcttcaatgaggtgccctgggtgccagggctcaggtatgaa

SEQ ID NO: 57405 - DNA, 276 bp, Zea mays
caagcatgagagttgtgggcagtgcacgccttgccgagaggggacaccctggctctggatgatcatggagaggctcaaggttggtgacgcgaagctggaggaaattgacatgcttcatgaggtcacgaagcaaatcgaagggcatactataagtacgcttggggacgctgcggcatggcctgtgcaggggcttatcaggcacttcaggccagagttggagcggaggatccgcgagcgagctgaaagggagctgttggcggcttctgcataatgtgc

SEQ ID NO: 57406 - DNA, 271 bp, Zea mays
ctagtcatcattgcagcatctgttttacttgattaacattttttaatagcatccttgctctgctgtctactgatgttcagtaacatgtcataactagtgacgtgaacatatcagattccatttcctttgttttgtcctgttgacatatttctttcctttttatgccagagaaagagaacttgtgcctttatggtttgccaaatgagacttgggaggttactcttccagctgaggaagtacctcctgagcttccagaaccagcactgggcat

SEQ ID NO: 57407 - DNA, 269 bp, Zea mays
caacaaaattgctccaaggttccaggagggaatcaaggccttctcaggcagcccaattgttggggagatacgcggtctgggactgatacttggaactgaatttgtcgacaacaaatctccaaatgatccatttccagatagatggggtgttggttcgatatttggcgcggagtgcgagaagcgtgggatgctcatcagggtggctggggacagcatcatgctgtcaccccggctgatcatgactcccaatgaagtcgaagaaatcataa

SEQ ID NO: 57408 - DNA, 299 bp, Zea mays
aaacgatgaagcagatgcattttggtgctttgagaacattgatgcgtagattgcgaggaaatttcagatgcacagatcaatctgtgggagttgccaaccaacttcaacaccttgcgtctattattcaggttcttgaccccaagctacatgaccacctagaaactcttggtggaggtgactacctttttgcgttccgtatgttcatggtgctttttaggcgtgaagtatcatttggagactccttatacctctgggagatgatgtgggctctggaatacgaccctgacattttcttcgca

SEQ ID NO: 57409 - DNA, 297 bp, Zea mays
ccgcagttcccccgcgctcgtgacgcaaccccgcgacaggagtaagtttgttcttgtatcgatatggcgatggaggagaatgtctacatggccaggctggctgagcaggccgaaaggtatgaagagatggttgagtatatggagaaggtggctaagactgtagatgtggaagagctcactgttgaggagcgtaacctcttgtcggtcgcatacaagaatgtgattggggctcgccgtgcttcatggcgcattgtctcttctattgaacagatggaggagtcccgtaagaacgaagag

SEQ ID NO: 57410 - DNA, 302 bp, Zea mays
agataaatcaaggaatggaccccataaacgagaggaaaatctttcagcagcttgtcagagctgccagccagattaacacgccgcagtgcttccttctgacgcccaagctcctacctgatctggagtacagcgatgcctgcagcattctcaacattatgaacggcccatggtctgaggagccagcaaaagcttggagctccggtgattgttggaggatcagtggtcagcgcagctggacactgagcgccgagtattttgccttggaccgtacgaggcttgtaaagcttagcgtgtatagctgg

SEQ ID NO: 57411 - DNA, 295 bp, Zea mays
gcgcgacgacgcgctggaacctgccgacctcttcagccgccacctcacggtcgtcgacgtcggcggcggcacggggttcaccacgctcggcatcgtcaagcacgtcaacccggagaacgtcacgctgctcgaccagtccccgcaccagctcgacaaggcccggcagaaggaggccctcaagggggtcaccatcatggagggcgacgccgaggacctcccgttccccaccgactccttcgaccgatacatctccgccggcagcatcgagtactggccagacccacagcgggggatc

SEQ ID NO: 57412 - DNA, 302 bp, Zea mays
ccaatcagtactgatgggcaggtttctctcacagttctgcgtgggcccatattggatgaagtgcaccagcagataaattcatggatttttcagattaccaggctttacaaggagaaggactttttggaaactgaatttatagttgggcccataccagtagatgatggaaatggaaaagaagtagcaactgaaattgttacaaacatggttacaaacaaaacattctacactgattccagtggacgtgatttcatcaaaaggataagagattatcgatcggagtggaagattgaagtgcacca

SEQ ID NO: 57413 - DNA, 294 bp, Zea mays
caaaatgatgatgcatgaagagcttcaggctagctggcaccagccaacaaagtgcaccgtgtttcacagcctggatcaaaccaggcttcaggagctactcttccaggttgcagaaaaaatatcggatctggtggagacaaacgagagggcatacgagttaagaactggtggtactcttgaggggctaccgcccaggcgcaggggcgaggctcaggattcatccaagtggcaggagagctttgtcgcatcacaggggcggctaggtggtggcaacggtttggatactccggtaga

SEQ ID NO: 57414 - DNA, 297 bp, Zea mays
gatcagtagagttttacgagtcatcaagggatgctgtgacacctcatgctgtcaaagttaaagtgtttgttcattcctactaccagaaagccaagaagttttctaagccttacattgatcaaattgctgagattactaaaccacatgtctagaaaattagaactactctgaagccatacactaagagagcagttcatgcatatgggtcatttctcaagtcggcaaccacataccatcgacaggctcaagcaagcatcatggactaccttcaccagcatgatataacaaaatcattgg

SEQ ID NO: 57415 - DNA, 294 bp, Zea mays
ccaggaacaggaaagacacaaactattcttggactccttagtgccgttctccattctgctcctgcaagaatgcagatcaaaggaggatttgatgttctaaaacatgggccagaactggacattgatggcaagcgtgcacactggataaaggcatctccttggttacttggtgcaaatcctcgagatctgattatgcctgttgatggtgatgatggattttacccaacgggaaatgaactgaaacccgaaatctaccattccaatcgcaagtatcggcctcatgtgttggtgtgt

SEQ ID NO: 57416 - DNA, 294 bp, Zea mays
ggagggcctcaagctgcacgactaccgcgccatcatccggagccccatggatctcggcaccgtcaagcagaacctcaccgccggccggtacccctcgcacgaggcgttcgctggcgacgtccggctcaccttcaacaacgcgctgcggtactccccgcccgaccaccacgtgcacaggtacgccggcaacctcctcgcctcgttcgaggggatgtacaaggaggccgtctcgtggttcgagcagcagcgccagcagctcgagccaccaatgcagcccgatttgccgccgccgcc

SEQ ID NO: 57417 - DNA, 296 bp, Zea mays
aaaaacagcattaacatttcaaagcaattctcagggctctgaaataacggagttgtttgaccatgatcattttgaaccctactccagagaagatacaacaatttccttaggacagacaaacaagtttaacattcgtgaggtctctccagaatgggcattttcctatgagatcaccaaggtcatcattacgggagattttctgtgtgatccatcgaatttgtgttgggctgtgatgtttggtgacaatgaggtacccgttgaaatagttcagccaggtgttctccgctgtcacacac

SEQ ID NO: 57418 - DNA, 295 bp, Zea mays
gaggcttttctacaagcttttaattgataacgtggaggagctgcttcctgtggtttatacaccaactgtaggtgaggcctgccagaagtatgggtccatctttcgacaaccacagggtctgtatgtcagcttgagggacaaagggaaggtcctagaagttctaaagaactggccacataggaacattcaagttatctgtgttactgatggtgagcgaatcttgggacttggagatttgggttctcagggaatgggaattcctgtaggcaaacttgctctatacactgctcttgga

SEQ ID NO: 57419 - DNA, 298 bp, Zea mays
ccctagtcctctgttacttctcccgccgccgccaatcccctcccgttctccgccaccgccaatcccctcccgtcctccgccacctctgctgagagcgagcagagatggccggcaagggtgatgggccggcaatcggcatcgatctcggcacgacctactcttgcgtcggtgtgtggcagcacgaccgtgtcgagatcatcgccaacgaccagggtaaccgcaccacaccctcgtacgtcgccttcaccgactccgagcgcctcatcggagatgcggccaagaaccaggtcgccatgaa

SEQ ID NO: 57420 - DNA, 292 bp, Zea mays
ctagggtttttgattttagccgccgccgctgctcatctcacatccctcgagaagacgcctgctcctcgccgatcgatacgatggccgtcttctccgacctccacaccgccgacggcctcaagtccctcgaggctcacctcgccggcaaaacctatgtctctggtgactccattactaaggatgtcattaaggtcttcgccgcggtgccgtcgaagcctggcgctgagtttcctaatgccgcccgctggtacgagaccgtctctgcggctgtagctcaagattccctggtaag

SEQ ID NO: 57421 - DNA, 289 bp, Zea mays
tgagatcgctgaagcttaccttggcagcacgatcaagaatgctgttgtcacggtccctgcctacttcaacgactcacagaggcaggccacgaaggatgctggggtgattgctggcctcaatgtgctgcgtatcatcaatgagccaaccgctgctgctattgcctatggtcttgacaagaaggcaaccagcgtcggtgagaagaatgtcctcatctttgaccttggaggtggtaccttcgatgtctccctccttactattgaggaaggtatctttgaggtcaaggccaca

SEQ ID NO: 57422 - DNA, 289 bp, Zea mays
gtttccaagatgttcgggcgcgcgacgaagaagagcgacaacacacggtactacgagatcctcggggtctccaaggacgcgtcccaggatgacctcaagaaggcctaccgcaaggccgccatcaagaaccaccccgacaagggcggcgatcccgagaagttcaaggagctagctcaggcctatgaggtcctcagtgatcctgaaaagcgagagatttatgatcaatatggtgaggatgccctcaaggagggaatgggaggtggtggagggatgcacgatccctttgaca

SEQ ID NO: 57423 - DNA, 288 bp, Zea mays
gccacagcagtctttgtcctgttctgtctggtagcagcaattgtcttctatgttacaccgcttcaagttattgctgcattaggagggttctatgtgatgaggcacccaaggttcagacataggttgccctcagtactagtaaacttcttcagacggttgccagcaaggactgactctatgctataaataagccactacctggtggtcttatcgttgtaatccctagagatgctttctctgttactgtatcttgctcgccttcgttgctatctgtaactgtgtctgttc

SEQ ID NO: 57424 - DNA, 295 bp, Zea mays
gagggttcttccttcgccatcttcagttccctccccacaccgttgcggcgcggcaccacctgaacccgaccaccgcccacaccatgttgtcccgattgccagcgacggtgagccttcttcgccggtcgctccgagaaccgcgcggcttcagctcctctgtgctggcttcatctaaggaaacggccgacgggaagctggtggcgtcggtgcttttcgagcgcctccccgtcgtcatccccaagatccaccccgttgtctacgctttccaagaattctcatttcggtggaggcagca

SEQ ID NO: 57425 - DNA, 285 bp, Zea mays
caacaaaattgctccaaggttccaggagggaatcaaggccttctcaggcagcccaattgttggggagatacgcggtctgggactgatacttggaactgaatttgtcgacaacaaatctcaaaatgatccatttccagctgaatggggtgttggttcgatatttggcgcggagtgcgagaagcgtgggatgctcatcagggtggctggggacagcatcatgctgtcacccccgctgatcatgactcccaatgaagtcgaagaaatcataagcaaattcggcgatgc

SEQ ID NO: 57426 - DNA, 298 bp, Zea mays
ggcgcagaagcagaagtacttgccatcccttgctcaacttactactgttggctgttgggctttgacagagccaaactatggaagtgatgcgagctccttgagaactatagcgatcaaggcacctggtgggtggcacatagatggtaacaaacgctggatcggtaacagtactttcgccgatgtgctcgtcgtgttaggtaggaatgcagacacgcaacagctaaatgggttcattgtgcggaaaggagctcctggcctgaaagctacaaagatcgagaacaaaattggcctcaggatg

SEQ ID NO: 57427 - DNA, 300 bp, Zea mays
agcgtgtccgcagcgagaccaacatatcatctggtgctgtttctgtcagttcagcggcggttgaactggccctgatgaagcttccgaagtctgaagcactgtcagctaggatgcttctgattggtgctggtaaaatgggaaagctagtgatcaaacatctggttgcgaaaggatgcaagaaggttgttgtggtgaaccgctccgtggaaagggtggatgctattcgtgaggagatgaaagatatagagatcgtgtacaggcctctctcagacatgtatcaagctgctgctgaagctgatg

SEQ ID NO: 57428 - DNA, 188 bp, Zea mays
agcgtagtacggtagtattcggctcgagggacttactgggaccgagtcttgaagatcttttgagcttttgcaacaggaagttgtccctcaaaactgttttgatgcttgctgatcaaatgatcaatcgagttgagttttttcattccaagtcattcttgcatagagatatcaagcctgacaattttctc

SEQ ID NO: 57429 - DNA, 195 bp, Zea mays
gagtatggctgtcctcctaggagcaacagtaatgcttcatttgagcacatctcctttagggagttagcagcaagaggaatcaccaaaatggacatgacagcagtaacatgttgtgaggagaacaacattcctgtcgtcatctttaacatgttggagcctggtaacatctcaagagcaatttgtggagatcaaata

SEQ ID NO: 57430 - DNA, 122 bp, Zea mays
cctccctccatctccagcattgtgttctgattcacctgctccaatggctgttctttctgctgctgatgcttccccggtctcagctatcgggtttgagggctatgcgaagcgccttgagatca

SEQ ID NO: 57431 - DNA, 179 bp, Zea mays
aacagatcctagatcttctgctagctgagacgcgaccagcgaagatctgttctcaggtaggcctgtgcacttttgatggcactcacggtgttagcactggaattcgtagcgtagtagatgacaaagctgggaaatcaaatggtggtctcaagagtgatccaatgtgcaatgcctgtgag

SEQ ID NO: 57432 - DNA, 147 bp, Zea mays
caaagagaggatggttgccaaggtcgagccccttgtcaacatgggtcagataaccagagctacctgcccaatgaaccttgcccttgcggtcgtcgccgagctcgacgacctcactgttggtgggctgatcaacggttacggcatcga

SEQ ID NO: 57433 - DNA, 226 bp, Zea mays
ttcactgagactgtggaacttcagattggtctgaagaattatgatccacagaaggacaagcgttgcagtggctctgttaagttgccccatatccctcgtcccaagatgaaggtgtgcatgcttggtgatgcccagcatgttggggaggccgagaagatgggacttgactacatggatgtagaggctctcaagaaaatgaacaagaacaagaagcttgttaagaggc

SEQ ID NO: 57434 - DNA, 221 bp, Zea mays
cgtgacgactggggcgaccgtcgctgccgccctacttgccggttgctcggttcttcttcggcccgttagccgtcgacgagcaccaccagggcaaccagatacttcagtggcttcgcaaggatgtcctggtgcactattgagtctgatcctggtgtgttcactgagctgattcagcaaatgcaagtgaaaggtgtacaggtggaagagctttactctctcga

SEQ ID NO: 57435 - DNA, 250 bp, Zea mays
cctcctccttcgccggcgtcgacgatgggtgactatggccacggcggggggcagatgcggggcaacccggactcccgccccaggggccagggccagcgccctaacgtccagcagctcaagctcatggggcagatccacccgacggggctcacgcccaagctgcttaagctcttcgaaccgcgtccaccgctcgagtacaagcccccgctggagaagcgcaaattgccggcctacaccgggatggcacaat

SEQ ID NO: 57436 - DNA, 264 bp, Zea mays
cagttcgcatcggagatgaagacacttggccaggtgaggcaccggaacttggttccgctcttgggattctgcgtcgccaagaaggagaggttgctggtgtacaagcacatgcgcttgggctcgctctacgaccagctaaacacagaggacggtcagcaagatggactgggcgctgaggctacggatcggcatcggtgcagcgaaagggcttacgtatctccaccatacctgcaaccctcgagttctccaccgcaacatcagctc

SEQ ID NO: 57437 - DNA, 274 bp, Zea mays
tcctcctccaacttccactcgagtagggttctgccggccgtttcctcgtcgtcgcaatggagttctggggtgaagaagtgaagccaggagccactgtttcttgcaaagttggtgatggtttggttatccacctttcacaggctgcactaggggaaccaaagaaagcgagtgagaatgtccatgtgtctgtcaaattgatgataagacagtcgtgcttggacacttatcagttgagaagcatcctcagatctcttgtgatctggtatttgataaa

SEQ ID NO: 57438 - DNA, 290 bp, Zea mays
gtcagagcccgatcccgatccagcgaggcggcgaccctccctcctccccttgcttcgctcgtccagccctgaccacccgcatccccgtcagtcatggcagcggcagcaggcggaggcgcggtgcgtgcgctgtcccagaaggagcaggacatacagatgatgctcgccgccgacgtccaccttggcaccaagaactgcgatttccagatggagcgctatgcctttaagcgacgcaccgacggcatctacatcatcaaccttggcaagacatgggagacactgcagcttgc

SEQ ID NO: 57439 - DNA, 277 bp, Zea mays
gtccgttcagtttggccagaagggcatcccctacctgaacacctacgacggccgcaccatccgctaccccgacccgctcatcaaggccaatgacaccatcaagatcgatctggagaccaacaagatcatggacttcatcaagtttgacgtcggcaacgtggtcatggtgaccggcgggaggaacaccgggcgtgtcggagtgatcaagaacagggagcagcacagggcggcttcgataccatcacgtcgaggactccatgggccaccattcgccacc

SEQ ID NO: 57440 - DNA, 285 bp, Zea mays
tgcttcgcaaaaaacttcaggacattaagaatgatgataaactgattcaagctgagggagttgaatctctctctgaagaagagctccggcaagcctgccgggaacgtggtcatctaggcctgctgtcaactgaagagatgtgccagcagctccgagactggttggacctatcacggaatcatgctgtgccatcttcacttctcatactttcaagagcctttactgtgtctgggagaatgaagccagaggaggcctgtgtagcaacactatcttctgtaccagacg

SEQ ID NO: 57441 - DNA, 302 bp, Zea mays
agctgctctcgtccctagaaataaagcagctggtccgcggggcggcgaactactacccatcgccaaaaccctagccccgatccggtcgaggagcactacttcttggcatggcgggcacccctagccaggcaagcctcctgctccagaagcagctcaaggatcttgcgaagaaccccgtggatgggttctccgcagggcttgtagacgatagcaacgtcttcgagtggcaggtcaccatcatcggcccgcccgacaccctatatgatggaggctacttcaatgcaataatgaccttccccaga

SEQ ID NO: 57442 - DNA, 300 bp, Zea mays
ctagtcctctgttacttctcccgccgccgccaatcccctccgttctccgccaccgccaatcccctcccgtcctccgccacctctgctgagagcgagaagagatggccggcaagggtgatgggccggcaatcggcatcgatctcggcacgacctgctcttgcgtcggtgggtggcagcacgaccgtgtcgagatcatcgccaacgaccagggtaaccgcaccacaccctcgtacgtcgccttcaccgactccgagcgcctcatcggagatgcggccaagaaccaggtcgccagaaccccat

SEQ ID NO: 57443 - DNA, 303 bp, Zea mays
  unsure (1)..(303): unsure at all n locations
tcttgtgagagggccaagaggagtctgcgttccactgcccagaccacagatganattgactcgctgtacgagggcattgacttctactccaccagcacccgtgccacgtttgaggagctacgacatggacctgttcaggaagtgcatggagcctgttgagtaatgcctgagggatgccaatgtggacaagagcgccgtccatgatgttgtccttgttggtggctccactaggatccccagggtgcagcagctgctccaggacttcttcaacggcaaggagctgtgcaagaacatcatcctgat

SEQ ID NO: 57444 - DNA, 319 bp, Zea mays
tccagaaggagagcgtgcgcccgtcctcaagctgcttcccagcaaagatgagcggcgctggtctggagggatgccctccctgaccggcaagactatcaccctcgaggtggagtcctctgacaccatcgacaatgtcaaggccaagatccaggacaaggagggcatcccaccggaccagcagcgtttgatcttcgctggcaagcagctggaggatggccgcacccttgcggattacaacatccagaaggagagcaccctccacctggtgctccgtctcaggggtggtatgcagatctttgtgaagacactcatggcaaga

SEQ ID NO: 57445 - DNA, 311 bp, Zea mays
tgcacgacaacaaagtcaattacatcagatcgtaaaccaagaacacaggaaacttcctgaaggatttggattaccactcaatgacaaatctatcacttgaagctcgtgagaaactttccaaggtgcgtccacaaacaataggtcaagctagcagaatcggcggtgtgagcccagcagacatgacagttctcctcatttggatggagagcaaccgacgcatggagcgccacaggagacagcgagagcagctgggatcagttgcagtcgagtcggatggttcttcagaggaggccgtccaagccagacggcat

SEQ ID NO: 57446 - DNA, 338 bp, Zea mays
agaccgtagacgcacgtgagctcggattcagaaggcggatccaggctcgcacacggcaacatcaagtcaaccaacgttctgctcgacggagaccacaacccttacgtctcagactacgggctgagctcgttgacgagccttccgatcaccacttcccgagctgtcgctggctaccgagctcaggagaccttcgaatcgaggaagttcacccacaagtccgacgtgtacggtttcggcgtcctcagctatggagacgctgacgggcaaggccccgcttcagtcacagggtcaggacgacgccgtcgacctaccgaggtgggtgcattcggggtccgcga

SEQ ID NO: 57447 - DNA, 296 bp, Zea mays
gccaactagttcattacaaaggccaccctgaccccttaagaggggatgcccttaataacgctgttcgggaaactgcgaatgaggctattgctgcaattttctccacagaggaccctaaacctgctgtcgcaaccgaaagtcttggcaagcgcatacaaggctttggaaatactaattacgagccatctagagatgaaaagaagtctttccttagtgaacttagcgaagtagtgggtattggaagtgcatccatcaagcagggttatgagcaacttcgctgcagcgcatgaataatg

SEQ ID NO: 57448 - DNA, 297 bp, Zea mays
gttgacgccattgatgcgagcgagcaggccgaggctagcacgggacaagcctcttctgctcgcaaattgggacgcaacatacggaagagcgagatagctcctctgaatgaggaggatctagtgcctggcgcatcttttactgggaaggtgatgtctatcaagccattcggagttttcgttgacattggggcattcacagaaggccttgtccatatctccagagtaagtgatgggttcgtgaaagatatatcttcccacttcactgttggacaagaggtgtcagtgagatgcttgaag

SEQ ID NO: 57449 - DNA, 299 bp, Zea mays
ggcgcgggcggacaacgagcaggcggatgacgagttgtgccaagccacaatgggtatctcgcgtgactcagtgcacaatcgccgagccaccggtggaaagcagaaggcctggaggaagaagcgaaagtatgagcttggtcgccagccagccaacaccaagttggcaagcaataagacggtgacgagggtccgtgtacggggaagtaatgtgaaatggagggctcttcgccttgatactggtaactactcatggggaagtgaagctgttacgcgctagacccgtatcctcgacgggtcta

SEQ ID NO: 57450 - DNA, 303 bp, Zea mays
ataccgttcagatcctgaatggaagatcattttacttaggtacttcaatccagttggtgctcatcctagtggatatcttggcgaggacccacgaggaattcccaacaatcttatgccctatgttcagcaagttgcggttggtaggaggccagctctaacagttttaggaaatgactatgcaacaagagatgggactggggtccgagattacatccatgtggttgaccttgctgacggacatattgctgcattgcagaagctttttgagaactctagcatagggtgtgaagcgtacaaccttgg

SEQ ID NO: 57451 - DNA, 299 bp, Zea mays
tgcagaccttgtcacggcgatggcgagggcgaggtgcaaggcaaagcatcagcttcgcgacgaggagaggccgtggggggaatgctgcgacttggccgtatgcgtcaagacgtacccgctaacttgctcgtgcttcgatcgggttgagcgctgctccgacgcctgtaaggagtgcgtggaaacggaggactcgcgccacgtctgcgtcgacaggtaccgtggcgaccccgggcccaggtgccacgacggcgacgacgatggtggggagtggtcgccgacgccgatgctcgcgagtggca

SEQ ID NO: 57452 - DNA, 119 bp, Zea mays
tgtgatggatgccaaaactgattacccggcagcctgcaatgctatggagacgttgcttgttcgtagagaccttataaaggctccaggtcatgacgatatactcctatcgctcgtaacag

SEQ ID NO: 57453 - DNA, 295 bp, Zea mays
ctgaaatttgaacaccaatccagcaaaggttgcaactttggagcaccttatgagtggcaagtttacaacactcttagtgggaaccatggtgtcccacgggtacactacaaaggaaagcagggagagttttacatcatggttatggatattttgggaccaagcctatgggatgtttggaataataattcccactcgatgtctgttgagatggttgcttgcataggtatagaggcaatctccatactggaaaagatgcactctaaagggtatgtccatggtgatgtgaacctgagaa

SEQ ID NO: 57454 - DNA, 297 bp, Zea mays
ctagtcctctgttacttctcccgccgccgccaatccctcccgttctccgccaccgccaatcgcctcccgtcctccgccacctctgctgagagcgagaagagatggccggcaacggtgatgggccggcaatcggcatcgatctcggcacgacctactcttgcgtgggtgtgtggcagcacgaccgtgtcaagatcatcgccaacgaccagggtaaccgcaccacaccctcgtacgtcgccttcaccgactccgagcgcctcatcggagatgcggccaagaaccaggtcgcatgaaccc

SEQ ID NO: 57455 - DNA, 295 bp, Zea mays
  unsure (1)..(295): unsure at all n locations
tttgaagctattactggttatggccttggtggttcttctatggctcttttcggccgcgntggtggtggtatttataccaaggctgctgatgttggtgctgaccttgtggggaaggtagaaagaaacattcctgaggacgatccaagaaacccagctgttattgctgacaatgttggtgataatgttggagatattgctggaatgggatcagatctctttggctcatatgctgaatcatcatgtgctgctcttgttgtggcctctatctcgtcttttggaatcaaccngaatttac

SEQ ID NO: 57456 - DNA, 298 bp, Zea mays
atagaacggccagactcccgaagtcatgatgctggtatccgtgcatcaatgtctaaactgacaatccaagaagggccaaggcctcatcaaaataacaggatgcagaattccgggtactggcccaatcaaccacatccatctcactttactggacccccagcccagcggcctatgcagaacatcagttttacacctcagcgacctttccaaaccgggggatttccgcagcagagacctgtaaatggggctccaccaccattacctcccagtaactggattggtaagcaaccagtggatg

SEQ ID NO: 57457 - DNA, 286 bp, Zea mays
gtcgatggatatctcgcagaggttgcaagggacccaaatataccggtctacaagtttttcagcctagctgagacggtttcggccggttcaaggccggttcatgatggactgtatcgtgccattgatatgtatctgaaggagcacccaggcttgggcaagagcgacaagaagaggctatgtgccctgatggactgcaagaagttgtcgcccgatgcgtgcgctcatgccgtgcagaacgagcgcctgcctctgaggatcgtggtgcaggtgctgtaccacgacagac

SEQ ID NO: 57458 - DNA, 293 bp, Zea mays
ctgcgacatcagaaaactgagctcgccccctcatgccttccctcatccgccggaccgctgctgtccgcctccaaccctccagttcgacgcaggcggcgacggcggcgcgccgagatgaaggtctccgtgaagacgctcaagggatctagcttccagatcgaagtggagcccaccgacaaggttgctgctgtgaaaaaggtcatagagaatatgcaagagcaggcttcctatccagctgaccaacaagtccttatacatcaaggaaaggtgctcagcgatgacacacattagag

SEQ ID NO: 57459 - DNA, 292 bp, Zea mays
ctgcgacatcagaaaactgagctcgccccctcatgccttccctcctccgccggaccgctgctgtccgcctccaaccctccagttcgacgcaggcggcgacggcggcgcgccgagatgaaggtctccgtgaagacgctcaagggatctagcttccagatcgaagtggagcccaccgacaaggttgctgctgtgaaaaaggtcatagagaatatgcaagagcaggcttcctatccagctgaccaacaagtccttatacatcaaggaaaggtgctcagcgatgacacccattaga

SEQ ID NO: 57460 - DNA, 271 bp, Zea mays
gctctccatcatcgacagcggcatcggcatgacaagtccgaccttgtcaacaacctcggtattatcgccaggtccgggagcaaggagttcatggaagcccttgctgctggcgctgatgtgtctatgattgggcagttcggtgtcggtttctactctgcctacctcgtcgccgagagggtcgtcgtgaccaccaagcataacgatgacgagcggtacgtgtgggaatctcaggcgggcagcgtcttcactgttacacgtgacacgtctgggg

SEQ ID NO: 57461 - DNA, 299 bp, Zea mays
ctagggtttttgattttagccgccgccgctgctcatctcacatcactcgagaagacgcctgctcctcgccgatcgatacgatggccgtcttctccgacctccacaccgccgacggcctcaagtccctcgaggctcacctcgccggcaaaacctatgttcctggtgactccattactaaggatgacattaaggtcttcgccgcggtgccgtcgaagcctggcgctgagtttcctaatgccgcccgctggtacgagaccgtctctgcggctgtagcctcaagattccctggtaagctgttg

SEQ ID NO: 57462 - DNA, 299 bp, Zea mays
gcagatacaagtgtgaatcgaaaaaggtgcacctgaaacaggttgatattattggactgggttctggtgcggaggtggatcagaaacttaagtatgctaatgatctttcgtcgggtgtgatattcggaagagagcttgtgaactctcctgcaaatgtccttacccctgctgtgcttgcggaggaggcgtcaaagatcgcttctgcttacagtgatgtgttcactgccactgtactagatgtagagaaatgcaaagaactaaagatgggttcctacttgggagttgctgcacttctgcta

SEQ ID NO: 57463 - DNA, 287 bp, Zea mays
attctttattgtgtccttatccgtaaaatacataatgacactcataagtgcaatatagtaatcgcagtatggttgtatgaaacttagaggttgtacaagttgtactgacaataagctgggaatactgtaatctcgcagctactgctaggacagtaggccacttgtccaagagcactgaagtgatgaaacttgtcaacagcctcatgaaagccccggaggttgcagccacaatgcaggaattcagcaaagagatgacaaaggctggtgtgatggaagaaaggtcaacg

SEQ ID NO: 57464 - DNA, 288 bp, Zea mays
tgaatttgttatgtttgatcgttccaagctttcaagggttgattggaagtacattataattgatgaggcacagaggatgaaggacagagactccgtcttggcgcgtgatcttgatcgctatcgctgccagcggcgcctccttctcaccggtactcctctacagaatgatctcaaggagctttggtccctcttgaatttgttgcttccagaagtatttgacagtagcaaggcattttcagattggttctctaagccttttcagagggatggtcctacacaaatgaagaa

SEQ ID NO: 57465 - DNA, 285 bp, Zea mays
tgactccactactggtggttttgaggctggtatctccaaggatggacagacccgcgagcatgctctccttgctttcacgcttggagtgaagcagatgatttgctgttgcaacaagatggatgccaccacacccaagtactccgaggcccgttatgatgagattgtgaaggaagtctcttcctacctgaagaaggttggatacaaccctgacaagatccactttgttcccatctctggtttcgaaggtgacaacatgattgagaggtccaccaaccttgacggtac

SEQ ID NO: 57466 - DNA, 289 bp, Zea mays
gcaatcaaaagagtggcactccagaagagggcgagagtgaaacttgagttttctgctccggcagaggctggtagaaaggactacatgatttacttgatgtcagactcttacttgggctgcgatcgggagtatgaattcaacgttgatgtcaaggatgctggaggggattgatgatgaagaccgtgacactatgtcgcatagaagtagaattgtgtgtgtactgtaacgcgatattggaacattctgtgttgtaacctcgaacatgtggaagctgtaacttatttgcatg

SEQ ID NO: 57467 - DNA, 285 bp, Zea mays
atcaacaccgtctttgatgccaagcgctcattggcaggaggtttagtgatgcctctgtccagagtgatattaagctgtggcccttcaaggtcattcctgggcccggtgagaagctaatgatagttgttcagcacaagggggaggagaaacagtttgcagccgaagagatctcctccatggttctcatcaagatgcgtgagatcgctgaagcttaccttggcagcacgatcaagaatgctgttgtcacggtccctgcctacttcaacgactcacagaggcagcacg

SEQ ID NO: 57468 - DNA, 284 bp, Zea mays
ggcatgcagatcttcgtgaagaccctgaccggcaagactatcaccctcgaggtggagtcttcagacaccatcgacaatgtcaaggccaagatccaggacaaggagggcatcccaccggaccagcagcgtttgatcttcgctggcaagcagctggaggatggccgcacccttgcggattacaacatccagaaggagagcaccctccacctggtgctccgtctccagggtggtatgcagatccttgtgaagacactcactggcaagaccatcacccttgaggtgga

SEQ ID NO: 57469 - DNA, 288 bp, Zea mays
cgggaacggcggaagcaaacaactagaaattccccagcccggttccttttcgtgcggtttgatctcgtcggaggcccggccgcagttccgccatcagccatcgaattcgatggcggccaacttcgggaacaagatccgcaacgccaagctggttcttctgtggagatgtaggcgctggcaaatctagcttggttcttcggtttgtcaagggacagtttgttgaattccaggaatcaacaatcggagcagcattctattcccagaccttagcggtaaatgatgagactg

SEQ ID NO: 57470 - DNA, 287 bp, Zea mays
agcagctcaggccctacatggagtccatggtgccacttcccggtgtctatgatccggacttcatcgccgctaaccagggctctcgtgccaacaatgtcatcaagggcaccaagaaagaacaggtggagcagatcatcaaagatatcagggagtttaaggagaagaacaaagtggacaaggtagttgtgctgtggactgcaaacactgaaaggtacagcaatgtatgtgctggtctcaacgacacaatggagaatctgctggcatctgtggacaagaacgaggcggag

SEQ ID NO: 57471 - DNA, 283 bp, Zea mays
tggaggagcagcagcagcaggcggcgccgaggagcggcatcccactcagtgcttgcaaccatggctaggggattgaagaagcacttgaagaggctcaatgcgcccaagcattggatgctcgacaagcttggcggacttttgctcccaagccatcttctggacctcacaagtccagggagtgccttcctctgatcctcatcatcaggaacaggctcaagtatgctctgaactaccgtgaggtcatttctatcctgatgcaacgccatgtacttgttgatggcaa

SEQ ID NO: 57472 - DNA, 289 bp, Zea mays
atggtcctggaatgtggattgttcctgtaacagcatgctgtggatcatatgatgcacagaaaaagttcttattgaaagataaaatggataagataaatattaaagagttttctgactctcaaagtgctgatggggagaagaatcaaatcatttggatcaaattgaatattgatcaaactggattatatagagtgaagtatgatgatgaacttgcagctggacttgtaaatgcaatcaaagcaaagaagctctcattaatggataagattggtatcgtggaagattcata

SEQ ID NO: 57473 - DNA, 291 bp, Zea mays
tcaagggggagctcgccctcgtgccccagtcccccgacaggtcgctcgcgcgccacaagttcgtcgacgactgcgaggcagccatcaacgagcagatcaatgtggagtacaacgcctcgtatgcgtaccactccctcttcgcctacttcgaccgcgacaacgtggccctcaaaggatttgccaagttcttcaaggaatccagcgacgaggagagggagcacgctgaaaagctcatggagtatcagaacaaacgcggaggcagggtgaggctccagtcgattgtggcgcctt

SEQ ID NO: 57474 - DNA, 285 bp, Zea mays
gtggctactccatgaatgcgatccatggctctgcattctccacaatccatgtgacgcccgaggacggtttcagctacgccagttacgaggttatgggcttggatgccactgctctgtcttatggtgaccttgtcaagagggtcctccggtgctttggcccctcagagttttccgttgccgtgaccatcttcggcgggcgtggccatgccgggacatggggaaaggcacttggtgcagaggtctatgactgcaacaacatggtggagcaggagctgcctggaggcg

SEQ ID NO: 57475 - DNA, 281 bp, Zea mays
gccatatctggacagataccgataacaaccgtgcagggatgctcccttttgtctttgacaactcatttgggtttgagcaatatgtggattatgcattagatgtccccatgtattttgtgtaccgaaataataagtatattgactgcaccggaatgtcatttcgggattttatgcaaggaaagctccgacaagctcctggggagttgcctactcttaatgattgggagaaccatctaacaacaatttttcctgaggttaggttaaagagataccttgagatg

SEQ ID NO: 57476 - DNA, 285 bp, Zea mays
gttcggagcgcacacacacacaaccagatctcccccaaatccacccgtcggcacctccgcttcaagatgcagatctttgtgaaaaccctgactggcaagactatcaccctcgaggtggagtcgtctgacaccattgacaacgttaaggccaagatccaggacaaggagggcatccccccagaccagcagcggctcatctttgctggcaaacagcttgaggacgggcgcacgcttgctgactacaacatccagaaggagagcaccctccaccttgtgctccgtctc

SEQ ID NO: 57477 - DNA, 279 bp, Zea mays
atcacccgtgccaggtttgaggagctcaacatggacctgttcaggaagagcatggagcctgttgagaaatgcctgagggatgccaagatggacaagagcagcgtccatgatgttgtccttgttggtggctccactaggatccccagggtgcaggagctgctccaggacttcttcaacggcaaggagctgtgcaagaacatcaatcctgatgaggccgttgcctatggtgctgctgtccaggctgctatcctcagtggtgagggcaacgagaaggtgcag

SEQ ID NO: 57478 - DNA, 284 bp, Zea mays
  unsure (1)..(284): unsure at all n locations
ccggaggagtgatgaccgtccttatcccgaggaacaccaccatccccaccaagaaggagcaggtgttctccacctactcggacaaccagcctggtgtgttgatccaggtgtacgagggcgagaggacncggacccgcgacaacaacctgcttgggaagttcgagctctccggcatcccaccggctcnccgtggtgtcccccagatcacggtctgcttcgacatcgacgccaacggcatcctgaacgtgtctgccgaggacaagacgacggggcagaagaacaag

SEQ ID NO: 57479 - DNA, 287 bp, Zea mays
caaagaattccctcccctagccgccgccgccgccgctcgtctccctgagaggtgccgggaccgaggaactggccgagtactaggtagagaatcggtttttcttgtctcagcccggggtctgctgcgtctggtggtggtgaaggggagaaattcgtgagatctgttccggatcaggcgtgcgagctcgggaatcaggggtttcacacatagcttcgtcgatttgaatttgatgtactaatggagtctaagggtggcaaaaagtctagcagtagtcgttctatgatgta

SEQ ID NO: 57480 - DNA, 289 bp, Zea mays
gtgacgctcagaacgcagaagctcggcaaatgcgtgttcagcagctaagaaagatgctcgatctcctggtacatgcgtcgatgtgccgctccggcagttgccagtatccccactgccgaaaagtaaagggactattccgtcacgggatgcagtgcaaaacccgtgcttcgggaggatgcgtcctctgcaagaagatgtggtacatgctccaactccacgcccgggcttgcaaagattcagagtgcaaagtgccacggtacagggatctgaaggagcatctcagaaggtt

SEQ ID NO: 57481 - DNA, 287 bp, Zea mays
ggaagaccgaagaccgagccgtgcgggggctcgggacgggaacgggacaggaccccaaaatctcagatccttcctgcccgcccgcccgtgcccgtcgacgcgtcactcttgccggccgcgccccacctccgccctctcctcctccagggggatcggatacgccacaggctgcgcgatggtgctgtgggtcttcggctacggctccctcatctggaaccccggcttcgacttcgacgacaaaatcctcggcttcatcaagggctacaagcgcacctttaatctcgctt

SEQ ID NO: 57482 - DNA, 286 bp, Zea mays
attgcagaggcattaagaaatgaggacaggatccatattattgatttccagattgcccaagggacacagtggataatcctgatacaagcgctactgcaaggcctgggggtccaccacacgtgcggatcactggaatagatgacccagtgtcagagtatgcccgcggtgaaggtctggaccttgtagggaagatgttgaaaagcatgtctgaggaattcaggatacctttggagtttacccctctgcccggtatttatgcaactcaagttacaaaagaaatgctgga

SEQ ID NO: 57483 - DNA, 291 bp, Zea mays
gctcgccgccgccccgccgtgttgctcgccgacaccgccccgccggcagccaaaatgccgttcaagaggttcgtggagatcgggcgagtggcccttgtaaacttcggcaaggagtatggccgcctcgtcgtcatcgtcgacgtcgtcgaccagaacagggctcttgttgatgcccccgacatggttcgttgccaaatgaacttcaagcggctttccctgactgacatcaagattgacattaaacgtgtcccaaagaagactacactgatcaaggcaatggaggaagctgat

SEQ ID NO: 57484 - DNA, 290 bp, Zea mays
cgcttccagccgccgccgcgtccgcctcgccaagcgcagcagccgccgcagcacatcgctctctcgatctcagccatggcggaggtggagcagcaacaggacacgccgaagctcttcaaccgctggaccttcgatgatgtccaggtgaacgacatctcgcacaacgactacctcgctgtgaacgcgacgaagcacgcgatgtacctgccgcacaccgcgggacgttactccaagaagcggttcgcaaggcgcatgcccgatcgtcgagcgcctcacaactcgctcatgat

SEQ ID NO: 57485 - DNA, 282 bp, Zea mays
gaagcacaaaggcttctatttggcaatacaacatacggtgacctgcgaaagttcctgtgtgggtattttgataccacaactggaaacaaaagagaaacaaggagttattttgagatctctcagtcactgggcgtggacagtccatctcaaatcttattcatcaccgatgtcttccaagaagccattgctgctaaaaacgctggttttgaggtgataatctccattcgcccgggaaatgccccacttcctgacaatcatggtttccgcactatcaaatcattc

SEQ ID NO: 57486 - DNA, 282 bp, Zea mays
aatggatgcatgtcatgtatgtccgtgaagggcatatattatcaggctgaagttcaaggacaaaagatcacctggctaactccgcatgctcttcagcaagtattaactgattatgttgatttcaatgtgatgctttcttttctagaattctatgagactcttctaggatttgtgaacttcaaaatctatcattcaataaatgtaaattatcctcctattctggatccttgtctggaagctttagctgttgagctctatgcattgtgccgatacatgtctgct

SEQ ID NO: 57487 - DNA, 279 bp, Zea mays
ggaaagtgctgctgatttcatggttaataaggtctctgagtttccaggagaggtctctgtgcttgctttgggacccctgacaaatgtagcattggccatcaaacgagacccttcctttgcaagcaaggtgaataaaatagttgtactgggtggagctttcttcgtggctggaaatgtcaaccctgctgctgaagcaaatattcttggagacccagaagcagctgacatagtttttacttcaggagcagatgtcattgtggttggcattaacataacaac

SEQ ID NO: 57488 - DNA, 280 bp, Zea mays
gccatatctggacagataccgataacaaccgtgcagggatgctcccttttgtctttgacaactcatttgggtttgagcaatatgtggattatgcattagatgtccccatgtattttgtgtaccgaaataataagtatattgactgcaccggaatgtcatttcgggattttatgcaaggaaagctccgacaagctcctggggagttgcctactcttaatgattgggagaaccatctaacaacaatttttcctgaggttaggttaaagagataccttgagat

SEQ ID NO: 57489 - DNA, 278 bp, Zea mays
gtgccatctaccaggtggaattggccatctctaagggagaccatttctaaagctgggataagaaattctcttcttgttgctccaatgcccactgcttccactagtcagattcttggcaacaatgagtgctttgaaccctacacatctaatatttacagtcgacgggttctaagtggggaatttgttgtggttaacaagcatcttcttcatgatttgactgaaatgggcatttggactcctactctgaaaaaccagataatatatgatgatggttctgt

SEQ ID NO: 57490 - DNA, 284 bp, Zea mays
cggctcgagtaaaccgtgaatggccatcgaggtccaaaaatccatctggattctggagagaggagaccccaaaatcgcagcgcgcgaaaacgcaggagcaacccgcccactcgccaccaccgcccgcgcgcacggcggcgaccgatggccccgctcgtgccgatgtcgcagccatgggtggagaaataccggccgaggcaggtcaaggatgtggctcaccaggaggaggtgattcgggtgctcaacaacaccctccagaccgccgacctgccgcacatgctgtt

SEQ ID NO: 57491 - DNA, 287 bp, Zea mays
tcaagggggagctcgccctcgtgccccagtcccccgacaggtcgctcgcgcgccacaagttcgtcgacgactgcgaggcagccatcaacgagcagatcaatgtggagtacaacgcctcgtatgcgtaccactccctcttcgcctacttcgaccgcgacaacgtggccctcaaaggatttgccaagttcttcaaggaatccagcgacgaggagagggagcacgctgaaaagctcatggagtatcagaacaaacgcggaggcagggtgaggctccagtcgattgtggcg

SEQ ID NO: 57492 - DNA, 287 bp, Zea mays
ccatattacgttatggtggtatgtatgcattggctctagcctacaggggaactgccaacaacaaagccatccaccagctgctgcattttgctgtatcagatgtcagtgatgatgttcggaggactgcagttatggctcttggttttgttctgtacaatgagcccgagcagactccaagaattgtatccctgctatctgaatcatacaacccacatgttcgctatggtgcagccttagccgttgggatatcatgtgcagggtctggattaagtgatgcaatttccttg

SEQ ID NO: 57493 - DNA, 273 bp, Zea mays
cacacacacaaccagatctcccccaaatccacccgtcggcacctccgcttcaagatgcagatctttgtgaaaaccctgactggcaagactatcaccctcgaggtggagtcgtctgacaccattgacaacgttaaggccaagatccaggacaaggagggcatccccccagaccagcagcggctcatctttgctggcaaacagcttgaggacgggcgcacgcttgctgactacaacatccagaaggagagcaccctccaccttgtgctccgtctc

SEQ ID NO: 57494 - DNA, 283 bp, Zea mays
gcattgcaggaatatgctgcaaatgcagctgagctgcgtaataagaatatacccacggtgccaacaacaattggaagggagaaggaatgcaatcctttcttgcggacctccaatccagaaattaagagaacactgtccgttccagatcatttcgatgaagatcgggtgcttggagttgtccgtcgagcaaaagataacttctgactaacaaaaggaaatgctcgtgacgtatgacccatatcttgttaaagttcagacagagaacctaagtcacaataaacat

SEQ ID NO: 57495 - DNA, 283 bp, Zea mays
cccagcctcggaaggaaccttccagaagcgcaagactctaaaggccgtcgccttcccattcttcctcgccgcgggggtcgcctgagatcacataaacaatggtgaaggctgttgctgtgcttggtagcagcgatggtgtcaagggcaccatctttttcacccaagagggagatggccctaccgctgtcaccggaagtgtctctggcctcaagcctggcctccatgggttccatgtacatgcacttggtgacaccaccaatggatgcatgtcaactggaccaca

SEQ ID NO: 57496 - DNA, 285 bp, Zea mays
ctagctagtagctccctgaaaagttcactagagaagcatttgagggaggagccatgtctgaggagaagcaccaccaccacctgttccaccaccgcaaggcagaggaggaggaaggcgcctccggcgaggtcgactacgagaagaaggagaagcaccacaagcacatggagcagctcggccagctcggcgccatcgccgccggcgcgtacgctctgcacgagaagcacaaggccaagaaggacccggagaacgagcacggccaccgggtcaaggaggaggtggccg

SEQ ID NO: 57497 - DNA, 287 bp, Zea mays
ctagctagtagctccctgaaaagttcactagagaagcatttgagggaggagccatgtctgaggagaagcaccaccaccacctgttccaccaccgcaaggcagaggaggaggaaggcgcctccggcgaggtcgactacgagaagaaggagaagcaccacgagcacatggagcagctcggccagctcggcgccatcgccgccggcgcgtacgctctgcacgagaagcacaaggccaagaaggacccggagaacgagcacggccaccgggtcaaggaggaggtggccgcc

SEQ ID NO: 57498 - DNA, 276 bp, Zea mays
gcgactttatttcaagaagacagaagaagggagagtcgtactgaggtgtaagaatggcgagtgcacaggcagtggggcaaggagaacgaggccacttcgttctgaagagcggacacaccattccggccgttggtctaggcacttggagggccggctcagataccgctcactctgttcggaccgccatcgccgaggctggatataggcacgtggacacagctgcccaatacggagtagagaaagaggtcggtagaggacttaaagctgcgatggagg

SEQ ID NO: 57499 - DNA, 279 bp, Zea mays
gaggaaatttagctgatggaacaacagtggcaatcaaacgtgcacatgaagattctctgcaaggttcaaaggagttctgcacagaaatagaattgctgtcaagattacatcatcgcaatttggttgctcttgttggctattgtgatgaagaagacgagcagatgctggtttatgagttcatgcccaatggtaccctacgtgatcatctttctgctaagactgaaagacctctgagctttggtcagagggtccatattgcgcttggtgctgcgaaaggac

SEQ ID NO: 57500 - DNA, 280 bp, Zea mays
atagcttgtaggttctttacgagatctgcccattctacaagtttggttacatgtcagcaaatggtgccattgccgaggctattaagggcgagaactttgttcacataattgatttccaaattgctcaggggagccagtgggttactctgctacaggcccttgctgcaagacctggggggccaccatacattagaatcactggtatagatgactcaaattctgcttatgccagaggaggcgggcttgatatagttgggaggacgttgtgtgatgttgctaa

SEQ ID NO: 57501 - DNA, 291 bp, Zea mays
ggccgatctgttgcttgcacttggtgtgcggtttgatgatcgtgtgacagggaagattgaggcttttgcaagcagggctaagattgtgcacgttgatattgatccggctgagattggcaagaacaagcagccacatgtgtccatctgtgcagatgtaagcttgctttgcagggcatgaatgctcttcttgaaggaagcacatcaaagaagagctttgactttggctcatggaacgatgagttggatcagcagaagagggaattcccccttgggtataaaacatctaatgag

SEQ ID NO: 57502 - DNA, 293 bp, Zea mays
cagcaaatacttataaccataacttcacaggttcctattgcacatgtgggcggcctgatcctgatgcagaagctaaggagcaagttgatatgatacaatgctctatatgtgaggactggattcatggggatcatattggtcttaactctattgaagagtaccaagagatgatgaaggggagccactctatgaggaattgatatgcgacaaatgctcatctgtctgccatatcttgaaattgtatccagatacgatttgggcttctggtaagccagatctggcagtggaaactg

SEQ ID NO: 57503 - DNA, 294 bp, Zea mays
cggtgttcttaagaagaacttgaagactgttctaagcactgtcataaagaatatgggctcaacattgggtgcttgtggcgatctcaacaggaatgtacttgctcctgcagcgccttttgtcaaaaaagatatcctttttgctcaacaaacagcagagacattgcagcactccttacaccacagtccggggcttattatgacctgtgggaagctcgagagaagataatgtcagctgaagagcctcctgaggtgacaaaagcccgcaatgacaactcgcatggaacgaacttccct

SEQ ID NO: 57504 - DNA, 294 bp, Zea mays
ccgggtcggatctgagacgagacgagttaccatctcatcccaactccggaacgaacaagttaccatctcatcccaactccgcctcgaccggatctcgtcggactcggatccgcccgaccaccccgcgccgccgcagatcaaagaagatggcagctgtcacacattcctcttcacctcggagtctgtgaacgagggacaccctgacaagctctgtgaccaggtctcagatgccgttcttgacgcttgccttgctgaggaccctgacagcaaggttgcttgtgagacctgcaccaa

SEQ ID NO: 57505 - DNA, 295 bp, Zea mays
catgaacctggaagaagaggaagaactaaggattcttcaagaagctgctaggattcgtgaacagtggcgtcgtagccagggttcaatagacactgcgatgatagagccacgtataaaggtgtcaaatcctgatgatcctgaaccaaatatcaatctattgttgaagatcaagccaatccagcaatgcagcttgtatctgaaatgatgatactttgcggtgaggcagtggctgctttcggttttgacaacaacctccctttgccatatagaggtcacccccagtccaacacagcag

SEQ ID NO: 57506 - DNA, 294 bp, Zea mays
ctcgggactcgggagcggcagtccaaccatacgtccatatccccctcccaacaaaaaaaaaaacgcccatcaatggcgatctgaatcaaccaaggcatctggaagcttggacatggagcggatcctcaagtccgccagggagtcgggctccctgaactctccaatcgctccctcagggagatacccaaggaggtgtacaacaacttggacactggcagccaggatgagaaatggtgggagggagtggacctccaaaagctcattctggctcacaataatcttgaggtgttaaga

SEQ ID NO: 57507 - DNA, 291 bp, Zea mays
ggggactggagagagcatcaatgagaaggaccgctgtccagggtgcaagggtgagaaggtcattcaagagaagaaggttcttgaggttcatgttgagaaggggatgcaacacaaccagaagatcaccttccctggtgaagctgatgaagcgcctgatctgtcactggagaaattgtattcgtcctccagcagaaggatcactccaaattcaaaagaaagggtgaagatctcttctatgagcacaccttgtctctgaccgaagcactatgtgggttccaatttgttcttaca

SEQ ID NO: 57508 - DNA, 275 bp, Zea mays
cgcctcgcatcgatcgtgggatagcattacataaaatgattaggcttgtcacaatgggtttaggaggtgaaggctatctaaatttcatgggaaatgagtttgggcatcctgaatggatagattttccaagaggtcctcaaagtcttccaaatggctcgtcattcctgggaataacaatagctttgataaatgccgccgtagatttgaccttggagatgcagattatcttagatatcgtggtatgcaagagtttgaccaggcaatgcagcaccttg

SEQ ID NO: 57509 - DNA, 294 bp, Zea mays
cctagtcctctgttacttctcccgccgccgccaatcccctcccgttctccgccaccgccaatcccctcccgtcctccgccacctctgctgagagcgagaagagatggccggcaagggtgatgggccggcaatcggcatcgatctcggcacgacctactcttgcgtcggtgtgtggcagcacgaccgtgtcgagatcatcgccaacgaccagggtaaccgcaccacaccctcgtacgtcgccttcaccgactccgagcgcctcatcggagatgcggccaagaaccaggtcgccat

SEQ ID NO: 57510 - DNA, 290 bp, Zea mays
cactcactaatgagaaggaggttgatgcatgcccaatcagagcaatgaagttctctgtctcccctgttgtgcgtgttgctgttcagtgcaaggttgcttccgaccttcccaagctagtagaaggtttgaagcgtctggcgaagtccgatcctatggtctgtgtacaatggaagaatctggtgagcatatcattgctggagctggtgagcttcatcttgagatttgcctgaaggatctgcaagaggacttcatgggaggtgctgaaattattgtttctcctcctgttgtgt

SEQ ID NO: 57511 - DNA, 274 bp, Zea mays
gccagctgatgagaggaggcctttccgtgctctcttggatgatggccttatcaggactacaacagggaaccgtgtctttggtgccctcaagggagcattggatggaggcctggatattcctcacagcgagaagaatattgctggattcaagaaggcggcaagcagttggatgctgatacccaccgcagtacatctatggtggccatgttgctgactacatgaagaaccttgctgaagaggagccagataagtaccagagccacttcagtgcgta

SEQ ID NO: 57512 - DNA, 294 bp, Zea mays
ggtgaagccgccgccgctgcagtgtccatagccaccgcaggagactgagatggggggttttgtcaagacccacaagaccaatgcgtacttcaagcgtttccaggtgaagttcaagagaaggcgcgctggcaagacagactacagggccaggataaggtgattaaccaagacaaaaacaagtacaatacacccaaatacagatttgttgtgcgatttaccaacaaggacatcacagcacaaatcatctctgctagtatagcaggtgatatggttcttgcttctgcttactcgcat

SEQ ID NO: 57513 - DNA, 291 bp, Zea mays
ggccgatctgttgcttgcacttggtgtgcggtttgatgatcgtgtgacagggaagattgaggcttttgcaagcagggctaagattgtgcacgttgatattgatccggctgagattggcaagaacaagcagccacatgtgtccatctgtgcagatttaagcttgctttgcagggcatgaatgctcttcttgaaggaagcacatcaaagaagagctttgactttggctcatggaacgatgagttggatcagcagaagagggaattcccccttgggtataaaacatctaatgag

SEQ ID NO: 57514 - DNA, 287 bp, Zea mays
  unsure (1)..(287): unsure at all n locations
ctcgagccgaatcggctcgagcggccacttcaccaagcgcccagaggagattggagctgcgtgaccaggggcacatgtacgggtatgcgactgacgagacccctgagctgatgcccctcagccatgtccttgccaccaagcttggtgctcgtccacggaggttcgcaagaatggaacctgcccctggctcaggcccgatgggaagacccaggtgacagtggagtaccgcaacgagggtggcgccatggttcncatccgtgtgcacacagtcctcatctctacccagc

SEQ ID NO: 57515 - DNA, 285 bp, Zea mays
cctctccccgcgggccgccagaggcaatttcgccctcgattcgaccccgattcgtccgcccgcgaccgggattccctccgccaagcgcggatctgaacgctgcgctccgtgtcgccgctcgaatccgccatgaagggggccaaatccaaggcgccgccaaggccgatgccaagctggcggtgaagagcaagggggcggagaagcccgccaagggcaggaaagggaaggccggcaaggaccccaacaagcctaagagggctcccagcgctttcttcgtgttcatgg

SEQ ID NO: 57516 - DNA, 286 bp, Zea mays
agcggcgacaggagtggccgcaaccccgccgccggagggggctccacgaccagatagaagagggagagaggatggggatcttcgagccgttccgtgcgatcggctacatcacggcgagcggcgtgcccttctccgtgcagcgcctcagcaccagaccttcgtcaccgtcagcgtcggcaaggctttccaagtctataactgtgctaagctgaatttggttcttgctggaccccaattgcccaagaagatccgtgctattgcatcctacaaggattatacatttgct

SEQ ID NO: 57517 - DNA, 278 bp, Zea mays
gtgccatctaccaggtggaattggccatctctaagggagaccatttctaaagctgggataagaaattctcttcttgttgctccaatgcccactgcttccactagtcagattcttggcaacaatgagtgctttgaaccctacacatctaattttacagtcgacgggttctaagtggggaatttgttgtggttaacaagcatcttcttcatgatttgactgaaatgggcatttggactcctactctgaaaaaccagataatatatgatgatggttctgtc

SEQ ID NO: 57518 - DNA, 286 bp, Zea mays
ctcatgagatagtgactgatggaactgagaaccaccttgttctctgggatctccgcccccttggcttgactggaaacaaggtcgaaaagctatgtgatctttgccacatcacattgaacaagaatgctgtcttcggtgacagcagtgcatgtctccgggtggtgtccgcattggcgcgccagcaatgacctcgaggggtctactggagaaggatttcgagcagattggggagttcctccaccaggcagtgaccatctgcctgaacatccagaaggagtacggcaag

SEQ ID NO: 57519 - DNA, 285 bp, Zea mays
cacggcgctaacgcggggctggacatcgcggtgcggctgctcgagcccatcaaggaggagttcccaatcctctcttacgccgatttctaccagctcgcaggagttgtggccgtggaggtcaccggtgggcctgagattcccttccaccccgtagggaggacaagcctcagcccccacctgagggccgccttcctgatgccactaagggttctgaccacctgaggcaagtttttggcaagcagatgggcttgagcgatcaggacattgttgccctctctggtggcc

SEQ ID NO: 57520 - DNA, 290 bp, Zea mays
  unsure (1)..(290): unsure at all n locations
accaccactactatgccgaaggcaagaaaatgaaggttctgacccaccggccacgatatattgagacggccgtagtgcctgaacttggtgaagggacttccttcgttgccgaagggaatcaagctgctctcactaaggctgaagccgaacgtcgactgcagcgccgaaggtgcctatagtcgaccgaagccaaagatgacgtggccaaagagccagagttggaaaaaaccatggtgatgccanaaattctgagcccaccggcagaggcagaattaccgaagtngataaag

SEQ ID NO: 57521 - DNA, 281 bp, Zea mays
tgtctcaaggcaactttggtggggacatcgtgtacctgcatggtatgtgacactagaggatgacctggataaaaaccttggttctgcaaatgatcgctggatagtcgcaagaaacgaaagcgatgcaaaccttgaagcgcagaaaaatatgcataaaagaaattacgtctagatcaagaccctgatgtgctggatacttggttttcatctggtcttttccccttaacagtacttggttggccatctgataccgctgacctccgtgctttctaccctacatc

SEQ ID NO: 57522 - DNA, 278 bp, Zea mays
gcgcacacacacacaaccagatctcccccaaatccacccgtcggcacctccgcttcaagatgcagatctttgtgaaaaccctgactggcaagactatcaccctcgaggtggagtcgtctgacaccattgacaacgttaaggccaagatcaggacaatgagggcatccccccagaccagcagcggctcatctttgctggcaaacagcttgaggacgggcgcacgcttgctgactacaacatccagaaggagagcaccctccaccttgtgctccgtctca

SEQ ID NO: 57523 - DNA, 286 bp, Zea mays
agatctgaaggttcggtatcgtcaaaacacgcctctaatcttgaaaggcattactgtgagcatcaaaggtggagaaaaggttggagttgtgggaaggactggcagtggaaagtcgactttggtgcaggctttattcaggatcgtggagctgcagatggccatatcatcatcgatggtgtcaacatctgcactctggggcttcgtgatctgaggtctcgcttcggtgtgattccccaagaacctgtgctcttcgaaggaactgtacggagcaacatagacccagcag

SEQ ID NO: 57524 - DNA, 282 bp, Zea mays
ctagttcaagacccccgagcgattttggtcggaagccgtgaacacggcttgccacgccataaaccaggtctaccttcatcgcctcctcaagaagacgtcatatgagcttctaaccggtaacaaacccaatgtgtcatattttcgtgttttggaagctaatgttatattctagtgaagaaaggtagaaattctaagtttgctcccaaagctgtagaagggtttttgttaggttatgattcaaatacaaaggcgtatagagtcttcaacaaatcatcgggtttg

SEQ ID NO: 57525 - DNA, 108 bp, Zea mays
tgccaccacacccaagtactccaaggcccgttatgatgagattgtgaaggaagtctcttcctacctgaagaaggttggatacaaccctgacaagatccactttgttcc

SEQ ID NO: 57526 - DNA, 291 bp, Zea mays
  unsure (1)..(291): unsure at all n locations
ctcgagccgcttcagcagaacaagatcctgaaggtgatcaggaagaaccttgtgaagaagtgtgttgagctcttctttgagattgctgagcacaaggaggactacaacaagttttacgaggcttactccaagaacctcaagcttggcatccacgaggactcgaatcacagngacaagatcgccgagcttctgagataccactccaccaagagtggtgatgagctgaccagcctcaaggactacgtgaccaggatgaaggagggacagaatgacatatactatatcactggt

SEQ ID NO: 57527 - DNA, 278 bp, Zea mays
ggatggcatcctgttcgacaatatcatgattactgatgatgagaaatttgccacctccattctcgagaagagctggaagcccaagtatgatgttgagaaggtgaaggagaaggctgaggaggctgctgctggagcagatgggctttctgacttccagaagaagagttctgacgtcctgttcaagattgctgatattccgatcttggtacactacaagaccaggattatgcatgttatcgagaagggagagaaacagctcaacatcactattggcattt

SEQ ID NO: 57528 - DNA, 293 bp, Zea mays
cgccaatcccctcccgttctccgccaccgccaatcccctcccgtcctccgccacctctgctgagagcgagaagagatggccggcaagggtgatgggccggcaatcggcatcgatctcggcacgacctactcttgcgtcggtgtgtggcagcacgaccgtgtcgagatcatcgccaacgaccagggtaaccgcaccacaccctcgtacgtcgccttcaccgactccgagcgcctcatcggagatgcggccaagaaccaggtcgccatgaaccccatcaacaccgtctttgatgc

SEQ ID NO: 57529 - DNA, 272 bp, Zea mays
cgcgcctctacatttcttctctctctgctcctccgcctccgcctgatccatccaagacagggatcgccatgtcggactcggaggagcaccacttcgaatcgcaggccgacgctggggcgtccaagacctatccgcagcaggctggcaccgtccgtaagaacggcttcatcgtcatcaagaaccgtccctgccaagttgtggaggtttctacctccaagactggtaagcatggccacgccaaatgtcactttgtcgccatagacatattcaat

SEQ ID NO: 57530 - DNA, 278 bp, Zea mays
gtgggaaccttgactatgatgttcgcatctcagaggttgagcgcctttttgggaagtatggaagggtggaacgagtggatctaaagacaggttagtctgttactctgttcattgttatgtcctcgaatttatttatgatctataatagcaaaacaatcgttgctcctgcagctatatgctgtttttggtcaaaggcagtgctctattttattaagtgaattacatccagtgtcagcaactgcagctttgaatcattctctctccaatttagatactga

SEQ ID NO: 57531 - DNA, 289 bp, Zea mays
  unsure (1)..(289): unsure at all n locations
cccatctctggtttcgaaggtgacaacatgattgagaggtccaccaaccttgactcgtnaaagggcccaaccctacttgaggctttggacttgatcaatgcgccgaagaggccttcagacaagcccctgcgtctccccctacaggatgtgtacaagattggtggtattggaactgttcctgttgggcgtgttgagactggtatcatcaagcctggtatggttgttacctttggtcctagtggccttactactgagttctagtctgttgaaatgcaccatgaggctctcc

SEQ ID NO: 57532 - DNA, 289 bp, Zea mays
cgggactcgcctccccccctcctcttcctcccctcccgcccacggctggaggtgctcacagcgagcggaccggaggcgagggattcggccgcgcgcatggcgacgcctctctgaccgaagctgctccacccactcggccatgcgcgccgtcctctcctctcgcctccccttatcctctcgttacaaaatggcgatgatggtggatcctccgaatggaatcgggaaccaaggaaagcattactactcaatgtggcagaccttatttgagatagacaccaaatatgtaccg

SEQ ID NO: 57533 - DNA, 289 bp, Zea mays
cacgagtatgagataagtctggattccagaacatctattgaagtttgtgctgatgatgatagcaacatccctaagcagcagtataatttccggaagataagtgaaattgagaacattgagaaagatgctattttggacttgattggaattgtcacatcagttggcccttctgtcacgtttatccgaaaggatggcgtggaaacccagagaagaacacttgaactgaaagacatgtctggtcgaagtgtacaacttaccttatgggggaagttgtgtgttgctgaaggca

SEQ ID NO: 57534 - DNA, 287 bp, Zea mays
gctcgtcgccgccgtcgtcatgctgcttctcttcatctccgagaccaggtcatatttttatccagcaacagagactaagttagttgtggacacatcaagaggagaaaggctacgagtaaattttgatattacttttctgagcattccttgcaccctcctcagcgttgatacaatggatattagtggagaacagcaccaggacattaggcatgacatcgaaaagatacgattagatgcacatggtaatgttattgaagcaagaaaagttagcattggtggagcaaaga

SEQ ID NO: 57535 - DNA, 286 bp, Zea mays
cgcctcgcatcgatcgtgggatagcattacataaaatgattaggcttgtcacaatgggtttaggaggtgaaggctatctaaatttcatgggaaatgagtttgggcatcctgaatggatagattttccaagaggtcctcaaagtcttccaaatggctccgtcattcctgggaataacaatagctttgataaatgccgccgtagatttgaccttggagatgcagattatcttagatatcgtggtatgcaagagtttgaccaggcaatgcagcaccttgagggaaaata

SEQ ID NO: 57536 - DNA, 265 bp, Zea mays
gatatatgcaggaacaaacccagaaacttttgtccgagctgatggtgcatttataccgtttgctgatgactttgaaattggtagtgtcagcacctccgttaaaggagttggagtcattggtaatgtaaatgcaattgacttgcaatccccaattggcagtctcattgggagactagttgtcatagttggaagaagttctggtatgacaactgggactgttgtcgcatacgcatttgagtacaatgatgagactggaatatgcttc

SEQ ID NO: 57537 - DNA, 283 bp, Zea mays
gagggcggtgcttcaggatctgcagctgtgactgactccgctatggcagaagctggtgcagttgaccctgacttagcgttggctcttcaaatgtctgtccaggatgcaaacatgtccagtgacactgatatgagtaaggtgtttgaagacagaacgttcctgtcatctatccttaattcgcttcctggtgttgatcccaatgatccatctgttaaagatttgctggcatcattgcacagccagggagagcaagagaagaaggaagacaagtcagacaaaacag

SEQ ID NO: 57538 - DNA, 287 bp, Zea mays
gcaactgcagcacactttgcaaggatgcttcttgagaatagccctcaggaggcccaagcaaagaaggctcgacaggtgctgcaagcctgccaggacaaggacgattctcaccaactgaactatgacttcagaaatccattcgttgtttgtggtcctacatagacttcctatctatcgtggccaaaaggacgtttcctgcccatactgtggatcccgatttgttccttccatcgaagggcagctttgtaccatatgtgagcttggtgcggttggggcagatgcttcag

SEQ ID NO: 57539 - DNA, 287 bp, Zea mays
tagctacccaatctctctctggatcgagacgaccactgagaaggcaatatctgatcatgaggacgaggaagataatcaggacgaccagggcaaggttgacgatgtacatgagtaggaagagtacgcacagatgaagaagacgatcaaggaggtttcccatgactggcaattggttaacaagctgaagcctatctggatgcgcccacctgaggagattaccagagcagagtatgctgctttctaccagagcttgaccaacgactgggaggagcatctcgccgttaagc

SEQ ID NO: 57540 - DNA, 286 bp, Zea mays
ccgacgaaccgaagaatttccgcaagacgcttactcggattatcagcgtccagtacgcggttcctgattttgtccgagtttcaatggagtgcaggcatctgctgtctcggatctttgtggcgaaacctgagcaacggataaccatcccagagatcaagaatcacccatggttcctgaagaacctgcccatcgagatgaccgacgagtaccagatgaacctacagctagtcgacatgaatgtcccctcgcaaagcctggaggagatcatgtccatcatactggaggc

SEQ ID NO: 57541 - DNA, 268 bp, Zea mays
gttcggagcgcacacacacacaaccagatctcccccaaatccacccgtcggcacctccgcttcaagatgcagatctttgtgaaaaccctgactggcaagactatcaccctcgaggtggagtcgtctgacaccattgacaacgttaaggccaagatccaggacaaggagggcatcccccagaccgcagcggctcatcttgctggcaacagcttgaggagggcgacgcttctgactacacatcagaagggagacctccactagtctcgtc

SEQ ID NO: 57542 - DNA, 286 bp, Zea mays
tggagaacggctttcatgaggttgaaggacttaaggaaccccaaagtgcacctcctgctattaaggaatatgggaacggtgatcctaagatgaaaaaatctattgttgacagacaacttgaaaacgtggatgcactcattgagtgtgtagggacaaaccttggatactgtgcagggaagccagttgctgctattaccatatacaaatgtcttcttcattggaaatcattcgaggcagataagactagtgtttttgaccgtctcattcagttaataggatctgctat

SEQ ID NO: 57543 - DNA, 279 bp, Zea mays
ctttgagaaaagaggtctggaaattcttgttggggtatcatgaatatgattcaacatatgctgagagggaataccttgctgtcatgaaacgagcagaatatgaagtcataaaatctcagtggaagagtatctcagccacccaagctaaaagattcaccaagtttagggaaagaaaaggcctaattgacaaagatgtggtgagaacagataggtccattccctattatgaaggagatgaccatcagaatggtgtagttttacgtgatatccggtaacata

SEQ ID NO: 57544 - DNA, 288 bp, Zea mays
gaagaaaaaaactcaagtgatgaggggagagaatctgaatccaagtgcagcaatgggtccagcatcgaggaaaaaagcaatgcgtgcaacaacaaccaggctcatcaacagaatctggagtgattactatgcacatcatttccctgaagattccaaggagggagatggaaatgaaacaaaagaaattgatgatgaacaagaagaaaatgaagatgaggatgctgaagatgaagggcagattgaagagaacatctcaaagactcctccatcaacacggtcccggaagtt

SEQ ID NO: 57545 - DNA, 284 bp, Zea mays
cgtctgtacatggcagcgcgccccctggaggagggtcttgctgaggcaattgatgatggccgcattggcccacgtgatgatcctaaggtgcgctctcagatcctctctcaagagtttgggtgggacaaggatcttgccaagaagatttggtgcttcggacctgagaccaccggcccaaacatggttgttgatatgtgcacgggagtgcagtatctcaatgacatcaaggattctgttgtggctggtctccagtgggcatcgaaggagggtgcactggctgaaga

SEQ ID NO: 57546 - DNA, 282 bp, Zea mays
agggaattgaaatgtatggtctgggaaactggcttgaagttgcagagcatgttggtaccaagtctaagttacagtgtattgatcattacacaacagcatacatgaactcaccttgttatcccctaccggatatgtctcatgttaatggcaagaacaggaaggagcttctagctatggctaaagtgcagggtgaaagtaaaaaagggacttcactgttgcctggagagctgactcctaaggctgaatctccattttctccctccagggtcaaggtggaagatg

SEQ ID NO: 57547 - DNA, 286 bp, Zea mays
ctcctcccgtcctccgccacctctgctgagagcgagaagagatggccggaaacaatgatgggccggcaatcggcatcgatctcggcacgacctactcttgcgtcggtgtgtggcagcacgaccgtgtcgagatcatcgccaacgaccagggtaaccggaccacaccctcgtacgtcgccttcaccgactccgagcgcctcatcggagatgcggccaagaaccaggtcgccatgaaccccatcaacaccgtctttgatgccaagcgtctcattggcaggaggtttag

SEQ ID NO: 57548 - DNA, 279 bp, Zea mays
gggtaagccataccgtgtctgtgattcatgttacgtgaagctaagtaaagttttggattctggtgttagttatagcagaaatactatcccccgcttacctggtgatacaaaggccgagagaatagacacaaaggcaaccagagttgcacagtctaatagttcagatatgattaggaatttggatgtgaaggcagccaagcagacgaagaagtctgagtattcgtcgcaagttccagcgacgttgcagctgaaagacatccctttcatcagcgcacctga

SEQ ID NO: 57549 - DNA, 140 bp, Zea mays
ctgcggcaatccaggttgcccagcttgctctaaagcatcgccagaacaagaggcagcagcagaggattatagctttcattggaagtcctgtgaagtacgacaagaaagttttggagaccattgggaagaagctgaaaaag

SEQ ID NO: 57550 - DNA, 285 bp, Zea mays
  unsure (1)..(285): unsure at all n locations
cccctcccgttctccgccaccgcctctcccctcccgtcctccgccacctctgctgagagcgccaagagatggccggcaagggtgatgggccggcaatcggcatcgatctcggcacgacctactcttgcgtcggtgtgtggcagcacgaccgtgtcgagatcatcgccaacgaccagggtaaccgcacctcatnctcgtacgtcgccttcaccgactccgagcgcctcatcggagatgcggccaagaaccaggtcgccatgaaccccatcaacaccgtctttgatg

SEQ ID NO: 57551 - DNA, 276 bp, Zea mays
agacagcaccggcagcaagacaccttgtaaacatcggagcatagatcgcggcggtgatggcggcctaggtgacgacggagctggacgtgggcgccgacggcgtggccgtaatcaccatctacaatccgcccgtcaactccctctccatcgacgtcttacatagcttaaaagaaagctatgaagaagcacttcggagaaacgatgttcaagctattgtcgttacagggacaggagggaaattttctgcaggaacccatataagttccctttgtggtg

SEQ ID NO: 57552 - DNA, 284 bp, Zea mays
gtaaaacttggcatccacgaggactcgcagaacaggaccaagatcgccgagcttctgagataccactccaccaagagtggtgatgagctgaccagcctcaaggactacgtgaccaggatgaaggagggacagaatgacatatactatatcactggtgagagcaagaaggcagtggagaactcccccttccttgagaagctgaagaagaggggctatgaggttctgtacatggttgatgccattgacgagtatgctgttggtcagctcaaggagtttgagggcaa

SEQ ID NO: 57553 - DNA, 287 bp, Zea mays
ctcgagccgaatcggctcgagcacacacacacaaccagatctcccacaaatccacccgtcggtacctccgcttcaagatgcaaatctttgtgaaaaccctgactggcaagactatcaccctcgaggtggagtcgtctgacaccattgacaacgttaaggcgaagatccaggacaaggagggcatccccccagaccagcagcggctcatctttgctggcaaacagcttgaggacggccgcacgcttgctgactacaacatccagaaggagagcaccctccaccttgtg

SEQ ID NO: 57554 - DNA, 296 bp, Zea mays
atatccacaggaaacaaggtcgaaaagctatgtgatctttgccacatcacattgaacaagaatgctgtcttcggtcacagcagcgcattgtctccgggtggtgtccgcattggttagtatcatttatttgttcatttcttctgtgcaagcttcaattaagtattagtccaacattgctatccacatgtcagttcgatattttttcatggtctttgagctaccttcttaatgaaaaggcgatgtgtctagatattttcttggtgtctggccctggtatggccattgttggcaaacca

SEQ ID NO: 57555 - DNA, 195 bp, Zea mays
ctcccacgtcccggttcttgctcccctccccatcggcttcgccgagttcatggtgcacctggccaccatccccgtcaccggcaccggcatcaacccggccaggagcctgggcgccgccgtcatctacaacaaggacaagccctgggacgaccactggatcttctgggtaggcaccctcgtgggcgctgccatcgc

SEQ ID NO: 57556 - DNA, 322 bp, Zea mays
gtggtgggagagtaccaccttggggagtttgtgaacagattccgccacggttcactggtgatgcgccttccagactcggatatagggcagatccctacggtcatctttggcacaataaacggggtgattggcattattgcctccctcccgcacgaccaatacatcttcctggagaagctccagtcgacccttgtgaagtacataaagggcgtcggaacctgagccacgagcaatggcggtccttccataacgacaagaagacggcggaggctcggaacttcctcgacggtgacctgatcgagtctttactatgacttagccg

SEQ ID NO: 57557 - DNA, 211 bp, Zea mays
ggcaaccagcgtcggtgagaagaatgtcctcatctttgaccttggaggtggtaccttcgatgtctccctccttactattgaggaaggtatctttgaggtcaaggccacagctggcgacacccatcttgggggtgaggactttgacaacaggatggtcaaccactttgtccaggagttcaagaggaagaacaagaaggatatcactggcaac

SEQ ID NO: 57558 - DNA, 312 bp, Zea mays
cttgaatttcgcttgcatcaaaggggaggtgaattctggtgcgttggagagacttgttgctaggtctccaaatctacgcatttgaggttgaatcgttctgtttcagtagacacactctcaaagatactattgtcagccccaaatttggaagacttggggacaggtaatctgacagatgagttccaagctgagtcctattccaggcttactagtctctggagaaatgcaaaaagctgagaagtctgtctggattttgggatgcttctcctatttgtgttccgtatatctatcccctctgtcatcaactaacag

SEQ ID NO: 57559 - DNA, 313 bp, Zea mays
aattgctgctggtagaacatttgagagcagtcctgcaatcagaaaggcatgcggctttctgttatcaaaagagcttccttccggtggctggggagaaagctatttatcgtctcaagaccaggtttacaccaatctcaaaggcaaccgagctcatgcagcgaacactggttgggccatgctggcgctgattgatgcaggacaggcccagagagatccgcgcctctacaccgagcagcaaaggttttgatcaacttgcagtcagaggacggagaattccccagctagagatcataggagtgttcaacgagaactg

SEQ ID NO: 57560 - DNA, 164 bp, Zea mays
atcgcaatggataaactgtgacattcggaacttcaggatggacatcttaggacaatttggagtaattatggctgaccccccttgggatattcatatggagctaccatatggcacaatggctgatgatgaaatgaggacgcttaatgttccaactctgcaaactg

SEQ ID NO: 57561 - DNA, 296 bp, Zea mays
ggaatcgactttaacagctttggacaagacgttgaatctgctaaaagagctgtgaggggactgccaggtttcgttgtagggaacagtgaaagtacttcactgcaagcctgttcatctgttggacatgttctcaatgaggtgtttgaaacatttgttgaatctactcttgtacaaccaacatttgtccttgactatccagttgagatatcaccattgcaaaaccacatcggagtcatgttggccttaccgagcgattcgagactttcatttgtggccgtgagattggcaatgcgttt

SEQ ID NO: 57562 - DNA, 315 bp, Zea mays
tgtgggttcgtctcagatgttgatatgagggacaagcaaacaaccttcattctgaaaaacccaccagaacagaagaagggcggaaaagacaagaaggccatgaggagagctgagacggaacggctgaaggaaggtgaggctgctgatgaggagcagaagaaactgaagaaggatgcaaagaagaagggttccaaggattccactgctaagggttgaagaagaaggctactactgctactggctctgatgaggatcactcatcctctccaactcgcagccatgatggtgacaaagcagctgcagatgatgatgacg

SEQ ID NO: 57563 - DNA, 158 bp, Zea mays
caatgagccaaccgctgctgctattgcctatggtcttgacaagaaggcaaccagcgtcggtgacaagaatgtcctcatctttgaccttggaggtggtaccttcgatgtctccctccttactattgaggaaggtatctttgaggtcaaggccacagctg

SEQ ID NO: 57564 - DNA, 306 bp, Zea mays
gcagtgcataggattggcatccttgacattagaatcttcaacactgacaggcatgctggaaatcttctggtcaagaagcttggtcctggcgccgacaattttggagagcagacagaactcattcctattgaccatggtctctgtcttccagaatgcctagaagacccatacttcgagtggatccactggccgcaggcatctgttccttctccgaggaggagcttgagtacattgcaagacttgatcctgtaaaagatgcagaaatgctacgcatggagctacccatgatacgagacgcatgtctca

SEQ ID NO: 57565 - DNA, 306 bp, Zea mays
gtacaagcttcccgggcacaatggttctgtcaatgagactgctttccatcccacagagccgatcattggatcttgcggcagcgacaagcagatctatcttggggaactttaagtgactatcagttccttttcagctagatgttcttgtgacactttgatgaggagaggattcctgacaccctgttcctttgcctgagaattggaacactcagtttggtgatctggatttgacatttgttgattgtcttgttaagcccagttggtcttgccgttcacaaactgccccatactttgcaccttgtggct

SEQ ID NO: 57566 - DNA, 310 bp, Zea mays
gatccaggagcttccagaaggcgaggaggaagagggagaagggcgcgcgcgcgcgcagcgttcaagtggtgctggtgtcggccatggatcgggttcgtggatccgcgttcctgctcggcgtcctgctcgcaggatccctgttcgcgttttcagttgctaaggaggagaccaagaagctcggcaccgtgatcggtatcgatctcggaccacctactcctgtgtgggtgtgtacaagaacggacatgtcgagatcatcgccaatgaccagggtaaccgtatcacaccctcatgggttgccttcaccgatagc

SEQ ID NO: 57567 - DNA, 309 bp, Zea mays
cagacatatttgtctctgatggtgccaaatgtgacatatctcgcttgcaggtcctttttggatctaatgtgacaattgcggtccaagatccatcataccctgcatatgttgattcaagtgttatcatggggcaaactgacttatatcagcaagacgttcagaagtatggaaacattgagtacatgagatgcggtccagaaaatggatttttcctgatctgtcaactgtccctaggacagatattatttctttgttcacccaacaatcctactggtgctgctgcatctcgggaccaactaaccaaattag

SEQ ID NO: 57568 - DNA, 296 bp, Zea mays
gcagtgcataggattggcatccttgacattagaatcttcaacactgacaggcatgctggaaatcttctggtcaagaagcttggtcctggcgccgacaattttggagagcagacagaactcattcctattgaccatggtctctgtcttccagaatgcctagaagacccatacttcgagtggatccactggccgcaggcatctgttccttctccgaggaggagcttgagtacattgcaagacttgatcctgtaaaagatgcagaaatgctacgcatggagctacccatgatacgagac

SEQ ID NO: 57569 - DNA, 206 bp, Zea mays
gtcccctgctccattctcagccgccgccaatcccttcccgtgctccgcaaccgctgagtgagaagaagagatggccggcaagggcgatggcccggctatcggcatcgatctcggcacgacgtactcttgcgtcggcgtgtggcagcacgaccgcgtcgagatcattgccaacgaccagggtaaccgcaccacgccctcgtacgtcg

SEQ ID NO: 57570 - DNA, 116 bp, Zea mays
ctggtggagagctctttgagaggatttgcagtgctggaagattcagcgaagatgaggctcgatatgtcttccagcagctcatctcaggagttagctactgtcattccacacgacat

SEQ ID NO: 57571 - DNA, 103 bp, Zea mays
ggacttactgggaccgagtcttgaagatcattttagcttttgcaacaggaagttgtccctcaagactgatttgatgcgtgctgatctgatgatccatcgagtt

SEQ ID NO: 57572 - DNA, 302 bp, Zea mays
ctccagcaaaggaggggcaagaagggatacgttctcgcatgtttaagtcagttatcactgcgaaccatcctgaattttcaagcatgagacaacaggatgtccttgaattcttccttcaccttattgacagagttgagaaggcaaaccctggagaccgtgagctaaatcctttttccggtttcaagtttgttgttgaagagaggttcagtgcccttctgggaaggtttcttacaacaaacgatctgacaacgttctttctttgagcataccactgcatgaggcaactaataaggagcagctag

SEQ ID NO: 57573 - DNA, 304 bp, Zea mays
gtcgctcgtcgcggcggcgtacaggcggagtgtctcgtactgctgttgctccacttgaacgattgaaaatattgcttcaggttcaaaatccgcacagcatcaagtacaatggtactgttcagggtctcaagtatatctggagaacagagggcctccgtggacttttcaagggcaatggtaccaattgtgcaaggattgttcaaattctgccgtgaagttttttagctacgagcaggcgtcaaagggaattctgtgggcctaccgtcaacagactggtgaagaggatgctcagcttactccgctc

SEQ ID NO: 57574 - DNA, 279 bp, Zea mays
cttaagtatagtgtcagaggaattcttcttaatgctggcatctgacaactatgtagaggtgatcctattgccatcacaaattcattggagcgataccaggaaattgacccgactttctctgggacacgtgaatacaagcttttagctgatcttgctgcatctatggatgaaggggatgttgccaaattcactgatgcaatcaagaatttgatagcatgacacgtctgggatcttggaaaacccacctgctgctcaaggccgagaacgagctgaagaaaa

SEQ ID NO: 57575 - DNA, 154 bp, Zea mays
ctcgagccgtggtgacttcattggcttagttgggataaccgatcctttgaaaagggaggctgctgtggtcatacaaggtctaaaaaagatgggtgttcatccagttatggtcactggggataactggaggactgcacgagcagttgcaaaggag

SEQ ID NO: 57576 - DNA, 302 bp, Zea mays
acccgtgccaggtttgaggagctcaacatggacctgttcaggaagtgcatggagcctgttgagaaatgcctgagggatgccaagatggacaagagcagcgtccatgatgttgtccttgttggtggctccactaggatccccagggtgcagcagctgctccaggacttcttcaacggcaaggagctgtgcaagaacatcatcctgatgaggccgttgcctatggtgctgctgtccaggctgctatcctcagtggtgagggcaacgagaaggtgcaggacctgcttctgcttgacgtcactcct

SEQ ID NO: 57577 - DNA, 295 bp, Zea mays
acggaggaggagaagaaggggcacaaagagctgaagtgggacgatccggacgtgtgcggcccttacatggttcggttctgtcctcacgatcttttcgtcaacaccaagagcaatatcgggccgtgctcgaggatccacgatctgaagctcaaggtagctttgagaagtctcctaggcacgatacttatatgcaaaggtttgaggcagagcttgcacaacaatgtgagaaattggtaatggacttagatagaaagataaggcgtggtcgagaaaggctggctcacgattctgctgt

SEQ ID NO: 57578 - DNA, 186 bp, Zea mays
ggagcctgttgagaaatgcctgagggatgccaagatggacaagagcagcgtccatgatgttgtccttgttggtggctccactaggatccccacggtgcagcagctgctccaggacttcttcaacggcaaggagctgtgcaagaacatcaatcctgatgaggccgtgcctatggtgctgctgtccag

SEQ ID NO: 57579 - DNA, 303 bp, Zea mays
aacagatcgatgtaatcggctggggctcgcagggtcctgcataagctcagaacttgagagactgacttgttgaggcaaagtcagatattgttgttaagattggtctccggaaaggttctaaatcttttgaagaagcccgagcagcaggattcaccgaagagagtggacgctgggtgatatatgggagactgtatcaaacagtgatcttgttttgctactgatatctgattctgctcaggctgatagctacgagaaaattttctcgcacatgaaaccaaacagtatgcttggtttgtcacatgg

SEQ ID NO: 57580 - DNA, 278 bp, Zea mays
ggctaagaataggctttttattgggaatgtaccccatgattggacacctgatgatttcaaaaccgcagtggaagaagttggtcctggagttttaaaagttgatctcatgaaggcaccaggctcaggtcgcaataagggttatggctttattaatactacaaccaggcatgtgcagagtatgctaagcagaagatgtctactccagaattcaaactagatacaaatgctcctactgtcagctgggcagatcataagaatgctagtgaagctacatctac

SEQ ID NO: 57581 - DNA, 265 bp, Zea mays
gtgggcgcacggcgacgagctcagcgatacagcggcaccggagagctagccgcggcctctatgctcgcggggatctgaactagtgccgctgcccaatcgcgccgacgactgatgcgcccactcctcatatcccatttccatcactcgtttctccatttcccacttcctaaacgccacttaaaagagataggagagcatcgcagtggcacacgcgcaatggaaggctcgccggtgacgcgcctcccggagctaactccctccccga

SEQ ID NO: 57582 - DNA, 299 bp, Zea mays
ggagcgcacacacacacaaccagatctcccccaaatccacccgtcggcacctccgcttcaagatgcagatctttgtgaaaaccctgactggcaagactatcaccctcgaggtggagtcgtctgacaccattgacaacgttaaggccaagatccaggacaaggaggcatccccccagaccagcagcggctcatctttgctggcaaacagcttgaggacgggcgcacgcttgctgactacaacatccagaaggagagcaccctccaccttgtgctccgtctcaggggaggcatgcagatct

SEQ ID NO: 57583 - DNA, 302 bp, Zea mays
ccttcccgtgctccgcaaccgctgagtgagaagaagagatggccggcaagggcgatggcccggctatcggcatcgatctcggcacgacgtactcttgcgtcggcgtgtggcagcacgaccgcgtcgagatcattgccaacgaccagggtaaccgcacaacgcctcgtacgtcgccttcaccgactccgagcgcctcatcggagatgcggccaagaaccaggtcgccatgaaccccatcaacaccgtctttgatgccaagcgtctcatcggcaggaggttcagtgatgcgtctgtccagagtg

SEQ ID NO: 57584 - DNA, 180 bp, Zea mays
gcagagacaggcgtcttcgtactcgcctatctccgcgactcctagctttccccaattcccccccttctcccatttctcaccaccgccgccgctccccccgttcaacaacaccatgagggagtgcatctcgatccacatcggccaggctggtatccggtcggaaacgcgtgctgggagctg

SEQ ID NO: 57585 - DNA, 290 bp, Zea mays
caaggagattgttgatctgtgccttgaccgtatccgcaagcttgctgacaactgcaccggcctccagggcttcctggtcttcaatgccgttggtggtggcactggctctggccttggttctctcctccttgagcgcctgtctgtggagtacggcagaaatccaagctgggcttcactgtgtacccatctccccaggtgtcaacctctgttgtggagccttacaacagcgtgctctccactcactcactcctggagcacactgatgtctccatcctgctcgacaacgaggc

SEQ ID NO: 57586 - DNA, 218 bp, Zea mays
cttgtatggcagttggagatggaatcctcactcctgcaatatcagttctttctgcaactggaggaatacaagtggaagagaaaaaaatgaaaaatgatgcggttgtcatcgtctctgtggtcatattgattggattattcagcatgcagcaatttggtactgtaaagtcagttggctttttgcgccgatagtatttgtttggttcatactcattggag

SEQ ID NO: 57587 - DNA, 288 bp, Zea mays
gtgggcgcacggcgacgagctcagcgatacagcggcaccggagagctagccgcggcctccatgctcgcggggatctgaactagtgccgctgcccaatcgcgccgacgactgatgcgcccactcctcatatcccatttccatcactcgtttcttcatttccaccttcctaaacgccacttaaaagagaaaggagagcatcgcagtggcacacgcgcaatggaaggctcgccggtgacgcgcctcccggaggctaactccctccccgacggcttcgttcctgactctgag

SEQ ID NO: 57588 - DNA, 290 bp, Zea mays
gtggcagcacacctcaggttcttgttccagttgctaatggttcagaggaaattgaagctgtcaatttgatagacgtgttgcgtagagcaggagcaaatgttatcgttgcgtcggtggaggagaagttacaaattgtgacccgtcgccataagtttaatcaattgctgatatgatgttggatgaagccattaaaatgcaatttgatttgattgtcatgccgggaggtttgcaaggtgctcagaagtttgctagtacaaagcaacttgttgacttactcaagaaacaagcag

SEQ ID NO: 57589 - DNA, 296 bp, Zea mays
tgactccactactggtggttttgaggctggtatctccaaggatggacagacccgcgagcatgctctccttgctttcacgcttggagtgaagcagatgatttgctgttgcaacaagatggatgccaccacacccaagtactccaaggcccgttatgatgagttgtgaaggaagtctcttcctacctgaagaaggttggatacaaccctgacaagatccactttgttcccatctctggtttcgaaggtgacaacatgattgagaggtccaccaaccttgactggtacaagggcccaac

SEQ ID NO: 57590 - DNA, 292 bp, Zea mays
gaaggagtatgataatgtctgtactcttagggtcaggatgcctatatcatcagatctaagcaacccccgtaatttcatcacaaagatagctcgttacgacaaggtggtgaacattcccaacagcatgacaatcttggatgagcttctgcctatctccattgagatgcgaaacgggactgcaggggcatatggaacttcaccaaccctggcgctgtaagccacaacgagattctagagatgtacaagaaatacatcaatcctgatttcaagtggaccaacttcacactcgaag

SEQ ID NO: 57591 - DNA, 234 bp, Zea mays
ggaccttgctggttctgagagggtgaaaaaaatctggttcagcaggaaagcaattgaaagaagcgcaaagtatagataaatctctttttgctttggctgatgttattggtgctttatcttctgatggacaacatataccttaccggaaccataatgctatgagtgattatctaatgtggattgtctgcaaaaaagctaagttttgtggactttgcggtcctaagagggtaaaaa

SEQ ID NO: 57592 - DNA, 265 bp, Zea mays
ggaacagaagatggcaccgaaaggagccgtattcgtcccaatctcacagttccccatcaagaaaatccgcaaggattgcacctacctgagcactccagcaatgaagatccctgaaaccatgcaaaataatccatgcctgcgagaactggctgccaagacggtgatgagcgcctggcgcatcggcgggatacttcacgccctggaagggtggaccgtgcacgagtgtggggacgccatggtgcatgctaacaaagcttggtcagct

SEQ ID NO: 57593 - DNA, 295 bp, Zea mays
gtgtccctcaactacgcgctgttctcgccagagtctcaggatgtgattgacccaaacactggactggtttacactaacatgttcgacgcccaggtcgattccatcttctttgcgctcatggctctgaacttcaagactttgaagatcatgatcactggtcagggtggccaaacaaaggggcggtcaaggagactggagccacaccagacaatgctcagacctacaataccaatttgatacgccatgttgttaatggacagcggcacaccggcgaaaccatgggatgagattgatg

SEQ ID NO: 57594 - DNA, 230 bp, Zea mays
tgatcgcctcgcctccccttcgctcctgcttctccataccccacccccccgcaggagcggcgcggcggcggcggcggcaaagccaaaggctagatgttcgggcgcgcgccgaagaagagcgacaacaccaagtactacgagatcctcggggtgcacaagcggcgtcccaggacgacctcaagaaggcctaccgcaatgcagctatcaagaaccaccccgacaagggcggt

SEQ ID NO: 57595 - DNA, 207 bp, Zea mays
cttaagtatagtgtcagaggaattcttcttaatgctggcatctgtcaactatgtagaggtgatcctattgccatcacaaattcattggagcgataccaggaaattgacccgactttctctgggacacgtgaatacaagcttttagctgatcttgctgcatctatggatgaaggggatgttgccaaattcactgatggcaatccaaag

SEQ ID NO: 57596 - DNA, 267 bp, Zea mays
cgccggcggcaactccagcgtcgagccctacgtcgtcacccacaactgcatcctggcgcacgtgccgtcgccgccgtctacacccgcagctaccgtgccgaacagcagggcgtcgtcggcatcaacatctacaccttctggacctaccccttctccgcgctcccgccgacgtccaggccacgcagcgctcggtcaacttcatgatcggctggatggtcaaccgctggtgcatggagactaccctcaagtgatgaagagggtagtcgg

SEQ ID NO: 57597 - DNA, 244 bp, Zea mays
ggatcatgacatgggggaggaaggctaactctttgcccagtcccacctgattggcgccacagtgtgatttatactttttgcagagagagaagatatggagtcgacaggagagattttgatggagcggtatgaggtggggaggctactggggaaaggcactttggcaaggtgcactacgcaaagaatcttgagtccaacgagagtgttgccattaagatgatggacaaggacaaagtgcctcagg

SEQ ID NO: 57598 - DNA, 240 bp, Zea mays
atcgaaatgtttgaaaaacgtgtccaagaactgacaaaaacagccgaggattctcagaagaaagcagatcagttgcgagaagatttacagttgaagacaaaacaagaaacagagatgcaagaagagttggaagggctaagagataccttgcaatctgacgacaaagttccacagacataaaaaatgagcttgataagctaaaatctctatgtgatgagaaagaatctgctttgcaggctg

SEQ ID NO: 57599 - DNA, 301 bp, Zea mays
ctccctcagccgcgtcgcgtcgcatcctacgatccaaagctctctctggtcgcaggtcgcagccatggcgaagaactacccgaccgtgagctccgagtacagcgaggctgtggacaaggccaggcgcaagctccgagccctcatcgccgctcagagctgcgcccgctcatgctccgcctcgcgtggcactccgcggggacgttcgacgtgtcgtcgaggaccggcggtccattcggcacgatgaagcatcagtcggaattggctcacggcgctaacgcggggctggacatcccggtgcggc

SEQ ID NO: 57600 - DNA, 203 bp, Zea mays
caaaagggtcatgtttctacccaagtgaagggaacattgggctatttggatcctgagtattacatgacgcaacagctctctgagaagagtgatgtctacagctttggagttgtcctgctagaactagtaactgctagccagccctcagagaaggcaggtatattgtccgtgagatcaggacagcaatagatcaatatgttcaa

SEQ ID NO: 57601 - DNA, 289 bp, Zea mays
cagctaccccatctccctgtggactgaaaagacaacagagaaggaaatttctgacgacgaagacgaggaagagaagaaagatgctgaggaaggaaaggttgaggatgttgatgagaaggaagagaaagaaaagaagaaaaagaagatcaaggggtttctcatgagtggtcattggtcaacaagcagaagcccatatggatgaggaagccagaagaaatcacaaaagaagaatatgctgccttctataagagcttgacaaatgactgggaggagcatctggctgtgaagc

SEQ ID NO: 57602 - DNA, 266 bp, Zea mays
tggacttggaaaaaatgctcattctcttaagaagggatgcgattgcttgggctacataaaatattttgatgcacatttcacaaacttcactggtggtgtggagacaattgagaactgtgtttgtttgcatgaggaggatcatgggatccttggaaacatcaagactggagaactggtttagcagaagtaaggcggtcaaggaggctcactgtttcatttatctgtacagttgcaaatatgagtatggtattactggcactctatca

SEQ ID NO: 57603 - DNA, 290 bp, Zea mays
ggctgggagaatctatggtacagagtcctgagggaacctgggcagttgctttggagctgtgccgagaatttgaggacaagtttcttgctcacataacatctggtgagggatctggttggaaaattgttgcaagttttgaaggcaagtttccagacagaatcaaacagctaccgttggaccgacatttcgatctcaacaatgtcaaaaggattgtcttggaagccgatggttatcaaccatatttgatatctccagagaaagggttgaaatccttaataaagttagtactg

SEQ ID NO: 57604 - DNA, 293 bp, Zea mays
ccctagtcctctgttacttctcccgccgccgccaatcccctcccgttctccgccaccgccaatcccctcccgtcctccgccacctctgctgagagcgagaagagatggccggcaagggtgatgggccggcaatcggcatcgatctcggcacgacctatcttgcgtcggtgtgtggcagcacgaccgtgtcgagatcatcgccaacgaccagggtaaccgcaccacaccctcgtacgtcgccttcaccgactccgagcgcctcatcggagatgcggccaagaaccaggtcgcca

SEQ ID NO: 57605 - DNA, 293 bp, Zea mays
aggtgaaggtggatatggcatagtatacaagggttatttacgtgatggctccgttgttgctgtcaaaaggctcaaggattataatgccgtcggtggggaaattcaattccaaactgaagttgaagtcataagcttggctgttcatcggaatctcctactcttattggattctgcactacagagagtgagaggttacttgtttatccatacatgccaaatggaagtgttgcttctcaattgcgggaacatatcaatgccaagccggctctagactggtcaaggaggaagagggt

SEQ ID NO: 57606 - DNA, 294 bp, Zea mays
gaagaatccatcttgcaagctttgcctgctgatattcgtcgggatgtgcagcgtcatctttgtttggacctcgttagacgtgtaccttttttctctgagatggataaccaacttctcgatgccatctgtgagcggctggtgtctttcctgtgccctgagaacacgtacatctctcgcgagggtgatcctgtgaacgagatgctcttcattatacgcgggaaactagagagctcaacgacaaatggtggccgcagcaacttcttcaactccatcatcctgcgccccggcgatttc

SEQ ID NO: 57607 - DNA, 295 bp, Zea mays
gcgatttaccaacaaggacatcacagcacaaatcatatctgctagtatagcaggtgatatggttcttgcttctgcttactcgcatgagttgccacgatatggtctcgaagttggtctgaccaactatgcagctgcctactgcactggccttctgttggctcgccgtgtgctcaagacccgtggtttagataaggaatatgagggcaatgttgaggccactggtgaggacttctctgttgagccagctgatgagaggaggcctttccgtgctctcttggatgttggccttattagg

SEQ ID NO: 57608 - DNA, 302 bp, Zea mays
acaatggttaagattaatgaccgctatgaatttcctcttcaacttgaccttgatagagacaatggaaaatatcttgctccagatgcagatcgaagtattagaaacctctatacacttcatagtgttcttgttcatagtggaggagtacatggtggccactactatgctttcattcggccgacactctcggatcagtggtacaaatttgatgatgagcgggttacaaaagaagacactaaaaaggcacttgaagagcagtatgggggtgaggaagagttgcctcaaataaaccctggtttcat

SEQ ID NO: 57609 - DNA, 292 bp, Zea mays
ggaaaaagaagcccagaaagaccaactgaccaaacaaaaaggtggcatctttgtgtcaccgaggcaccgccgatcacagaccaaagcccgctcctctggtccatcccaagcgtacagcagccgagatttcttcgatctgcgcttgcgtttttttttcttgtaaagattttagttttccccccttcaactgttgctagccttgagtcgctgagaagtttcgagaagggtggtgtgagtgtcggatagctcaagatggatccggcgttgctggacgacgtcatacgccggcttc

SEQ ID NO: 57610 - DNA, 291 bp, Zea mays
tcctcctccaacttccactcgagtagggttctgccggccgtttcctcgtcgtcgcaatggagttctggggtgaagaagtgaagccaggagcaactgtttcttgcaaagttggtgatggtttggttatccacctttcacaggctgcactaggggaaccaaagaaagcgagtgagaatgtcattgtgtctgtcaaaattgatgataagaaagtagtgcttggaaccttatcagttgagaagcatcctcagatctcttgtgatctggtatttgataaagattttgagttatcac

SEQ ID NO: 57611 - DNA, 291 bp, Zea mays
tttacaactttgagcagaggtggaggaagcagggtggtaaggacctccttgtacgtctcagggatctttctgacattattattcccccttctcctgtgatgttcccggaggacagagatacctggaatgttcagctctttagatccattgacggcggtgctgcttttggcttccccgagactcctgatgaagctgcaagagctgggcttgtgagtggaaaggatcaaatcatcgaccggagtatccaggatgcatacataaatgccatacggagggcgaagaacttcatct

SEQ ID NO: 57612 - DNA, 292 bp, Zea mays
gcaaaaggaagggttctggagaggacagttcatcactacgttctctaggtgaaaccagtgcattgcagcgagaagtcagcatggagtgtgctgatgagaaggcgggtgatgctagagccaagagagaggactacgtgcatgtccgggcaaagcgcggccaagccaccaacagccacagccttgcagaaagatttcgaagggaaaagataaatgaaaggatgaagcttcttcaagaccttgtcccaggttgcaactagattacaggcaaggccatgatgcttgatgagatcat

SEQ ID NO: 57613 - DNA, 295 bp, Zea mays
gcagagagaaggagatggcctcagtactcctttcttcattgagattagaattgttttcaactgatgacatcattgagggttttgtaatgctcttgcagtcagcagaagacactgcactcgacattgtggatgctcctagtgaacttgctctcttcctagctagggcagtgattgatgaagtattaattccgctcaatttggatgaaatcagcattaagcttcggccgaacagcagtggcagccaaactgtccagatggcgcgtgctctactgtcagctcgccattctggtgagcg

SEQ ID NO: 57614 - DNA, 295 bp, Zea mays
caatgatccagaatttaaagcaagggctcaacaaggagttgttcggctacagggaggagaagagagatatcgagaagcatggaaaaagatttgtgacattagcaggagtgaatttgacttggtctacaaacgcctaaatgtggtgcttgaagaaaacggggagagtttctataatccttatattcctcaagtgttggaggaattgagtagcaaaggcttgatcaaggagagtgatggtgccagagttatatttattcaaggtcatcagatccccttgatagtggttaagagtgat

SEQ ID NO: 57615 - DNA, 289 bp, Zea mays
cctctcaaaccctagccgcctcctgcaagtttcagagctcaggaatctgcgccatggcgagtgagacggagaccttcgcatttcaggctgagatcaaccagctgctctcactcatcatcaacaccttctactccaacaaggagatcttcctccgcgagcttatctccaactcttccgatgcgctggacaagatcaggttcgagagtctcactgacaagagcaagctcgatgcgcacctgagcttttcatccaccttgtcccagacaaggccacgaacacgctctccatc

SEQ ID NO: 57616 - DNA, 289 bp, Zea mays
agcaagtgtcaccgagactgccactaggcaactacaacgtcgccacggtcacgtatgagctcagcgtcctgcgcaacagggggccaaggagaatgcagtgcaccatgcactcgataccagccgagtgcatccaggagggcgggaaggccccaacccctaccggcaccgtccagtcgcttgacgagccagtgcccaccttacctagtaccaccaaggggaaggaagtggctgtacaattttcttcgacgagcctcagcgccgatctgtctggaccggactctgggaacga

SEQ ID NO: 57617 - DNA, 288 bp, Zea mays
gcatgtacaagctctagatattctttttattctgcatgctgaacatgaaatgaactgctccactgctgctgttaggcaccttgcttcaagtggtgtggatgtatttactgctctttctggtggtgttggagctctatatggtcctctgcatggtggcgcaaacgaggcagtacttaaaatgttaaatgagattggaagcatggaaaatattccagatttcattgtaggagtgaagaacaggaagaggaagatgtccggttttgggcaccgtgtgtataaaaactatga

SEQ ID NO: 57618 - DNA, 297 bp, Zea mays
gcttacaaacaggcaaaaaagcgaggaataagagttcgtggggttctcatatctaacccttccaacccaacaggaggcattgtgccaaaagaaatactgcatgaccttctacagtttgctgcagagaagaacatacacttaatttctgatgaaatatttgctggttcaacatatggaagtgacaagtttgttagcgtggcagatgttgtggatgaactagaggactttgataaaggcagagttcatatcatatatgggctctcaaaagacctatctcttgccgggtttcgagttgga

SEQ ID NO: 57619 - DNA, 295 bp, Zea mays
ccctcgagccgaatcggctcgagcccctcccgttctccgccaccgacaatcccctcccgtccaccgccacctctgctgagagacgagaagagatggccggcaagggtgatgggccggcaatcggcatcgatctcggcacgacctactcttgcgtccctgtgtggcagcacgaccgtgtcgagatcatcgccaacgaccagggtaaccgcaccacaccctcgtacgtcgccttcaccgactccgagcgcctcatcggagatgcggccaagaaccatgtcggcatgaaccccatcaa

SEQ ID NO: 57620 - DNA, 287 bp, Zea mays
cctagatcggtggcgcctgcctctcgccgccgatacggtgcctctcgcggtctcgctccccctcgcaggtcttttggtttttttagttcctccctttgcttcttggaggtgtttgttgccgtctcccccgcagttcttgagacatgcagagccagatagtgtgccacgggtgcaggacccttctgttctacccaagaggtgctccgagcgtgtgttgtgcggtatgccatgtggtcaccaatgtgccgcctccagcaatggagatggctcgacttatatgtggtggc

SEQ ID NO: 57621 - DNA, 286 bp, Zea mays
tcttactgtcttccttttttagaagatggctttgaccaatttgatgacaacatgaccaaccaaggggaaggcattacccagcctggtggaaaaggagtaaatcagcatagagaaaggggacttaatatgggacttggtctccaaaggatgaaccgagctcggcgtggcaaactgccaattgtcattactgaaggaaggataaggcctgtggcaccaattgttgctgcaaagtttgcaactgagtgcaacattgcagttcggaatcatgtgcttgtgcttaagtcat

SEQ ID NO: 57622 - DNA, 284 bp, Zea mays
ggctattcctcctttggtagccccaactgcccggccacctgctccagctgttaatcggcagataaaccgccaaccgcagtttatgttgggaagatcgccccaacagtggacagtgatttccttctttcacttcttcggctttgtggatctgtcaagcgttggaagcgtgcccaagatcctagtaatggaaaacctaaaggttttgggttttgtgaatttgaatctgctgaaggcatccttcgtgcgacacggcttctcaacaaattgagcattgatggtcagga

SEQ ID NO: 57623 - DNA, 288 bp, Zea mays
gttgtttcctcccttcccatcccccactgctcagcagtcagtcagcactcgccacccacacgcctccgctccgcccacggttccactccaactctccgatctccaggaatccgcggctgaagcgccggcgatggcggctcccatggtcgacgccacatacctgcgccaggtcgacagggcgcgccgccacctccgcgccctcatctccaacaagggatgcgccccgatcatgctccgcctcgcatggcatgatgctggaacttatgacctgaagacacaaactggtgg

SEQ ID NO: 57624 - DNA, 298 bp, Zea mays
tcgacgtctcgtctcgtctcgtctcgcctgcccgcagccccttggcttcgttccatccggcttctcggcggcggcggagaggagggggatggcgcaccggctgctgcgggacgcgcaggcggacgggtgggagcggtcggacttccccatcatctgcgagtcatgcctcggcgacaacccctacgtccggatgttaagagctgaatatgacaaagaatgcaaaatttgtgcacgtccttttactgtattccggtggcgtcctgggcgagatgcaaggtacaagaagactgagatctgc

SEQ ID NO: 57625 - DNA, 284 bp, Zea mays
aattaatagcgctcaacgagactgtggaggaattgcccttaaaccttgaagttggtcctattagcatgaccaagtggcaattatttttacagattgagcagtccttccaggttcatcgtagttatggaagtatgcttgaaggcgaggctgatgaactcaagagggtttttcttgaaggaaatccttatcttcttggattgactatggtcgtttctctattacactccctgtttgattttctggccttcaaaaatgatatccagttctggaacaagaacaagtcc

SEQ ID NO: 57626 - DNA, 283 bp, Zea mays
atcgcgtaccgtcgctcgccgtattcccctgccgcgcacagttcactcgcgcacctctcgccccctcgctctacgacgactagtgggccgccggcgctggcgccgccttacgccaggtgccgaggtcttcgttgatctcttcgccggcgacgcgcacccaccagctgggaaaaaatctatagccaaacataataatggctatgattgatgaacctctctacccgattgctgtactgattgatgaactgaaaaatgaagatattcagttgcgccttaactccat

SEQ ID NO: 57627 - DNA, 282 bp, Zea mays
ggcaatggcaggagcaattgtgttcggtggtttttatgctttcttcatccaccaggaaaaaaccgcccagctggaacccccaaaaccataacgagggtgcccgtcctgctagccggtgtgcttgctgtgcgatcgtttggcatgtgcttgctgaggggttgctaggggattggagaggattgaagggattaaatctcctcctattcaattttgaataggaggggatttaatccccttcaatccccctcaaaccactagtaaccgaacgtggcctgagggggc

SEQ ID NO: 57628 - DNA, 281 bp, Zea mays
aagagcagctccagaacataaaatctgaaatagctgatgcgtctgctaatcctcaaggtctacttctggaggcccttcattcggttggatattccggggcactggcaaaacctttgatggcttcagaatctgctgtaaaccggttggatgttagcagcttggaggaatttgttgctgaacattacactgctcccaggatggttcttgcagcatcaggagttgatcatgatgcgctgatttcagttgtagaaccacttctgtctgaccttccgtgcgtgaaa

SEQ ID NO: 57629 - DNA, 276 bp, Zea mays
cgcgggagatgagctcgttggagaaggtgaggcccggcatgaggagctccactgtgatttcgcctgcactctctacgagcttctccgcaacaagctcgacgaggcccgcgtccgcgagatcgtcgcagacgctgtatgacatcgagcgcgagttcgtctgcgacgccctccctgtcgcgctcgtcggcatgaacggggatctcatgagccagtacatcgaattcgtagccgaccgcctgctcatggcgctcgggtgcaagaagatgtacaacgtga

SEQ ID NO: 57630 - DNA, 282 bp, Zea mays
ctgagttcttgcgttacctgggctcaaaaagtcgggcaggggttgtaaaagttgatgcagggactacattatctttggttccaccatcagatttcctaacaaatgtgttacaagttgatggtccagagcgcctttatggtgtggtattacacattccacagatctctgctgctgctgcactgaggccacagttaactgggaccgaacaacaaccttactatgatgaaaggggactctgcctacttcacaaagagagtatagtatcatttctccgtatgacag

SEQ ID NO: 57631 - DNA, 317 bp, Zea mays
gcctgaacattgccagaactatttggcacgtgtagtcactctcaagcctagacatccccgctggcaaaagaatgatgttgcagctgaaatatctgaagcagattcacccgaggactctctgagggatattcatgacatatcacttaacttaaagctttccttggacagtgaaaaatcaggcagcaaagaagggaattcaaatgctttgagaaggcattttgaggatgcagcgcaaaagttgtcaggtgttaatgacatcaaaaaggatgtgccaggtgagaatggtaagtggtcgtcattgcgtaggaagaacacat

SEQ ID NO: 57632 - DNA, 308 bp, Zea mays
  unsure (1)..(308): unsure at all n locations
gataatttaatngagatgaactcaagataaccaaactggcgctgtccatattgtaacacctcctcaagcttcactgacctacgtattgaccaaaagatgatgaagatactagaagagactggagatgatgtcactgatgtccttgtatttggtgatgatttatggaaagttgttccagctcaggatgaaaaatctgatagacatagaggtgacacaattcagcaggctggagatgctgtagaaactggttcacttctcgagatgtcatagatctgataaatggcaatgatgatggtagatatgaaatg

SEQ ID NO: 57633 - DNA, 291 bp, Zea mays
cgccgtcacagtcgagatcatgcacgcgatgtggaagcccgccaagttcaagtacatctacctgctggcgacgctgtacgtgttcacgctgacgctgccgtcgtcggcggccatgcactgggcgttcggcgacgagctgctgacccactcgaacgcctactcgctgctgcccaagacccggtggcgcgacgcggcggtgatcctgatgatgatccaccagttcatcagcttcggcttcgcgtgcacggcgctctacttcgtgtgcgataagggatcctgatgcacgaagcc

SEQ ID NO: 57634 - DNA, 293 bp, Zea mays
gccatgggtaaggagaagactcacatcaacattgtggtcattggccatgtcgactctggcaagtcgaccaccactggccacctgatctacaagcttggaggtattgacaagcgagtgattgagaggttcgagaaagaggctgccgagatgaacaagcggtcattcaagtatgcgtgggtgcttgacaagctcaaggctgagcgtgagagaggtattacaattgatattgccctgtggaagttcgagaccaccaagtactactgcactgttattgatgcccgggacaccgtgac

SEQ ID NO: 57635 - DNA, 294 bp, Zea mays
cggacacggaggcgaaggaggagcagcagcagcaggcggcgccgaggagcggcatcccactcagtgcttgcaaccatggctaggggattgaagaagcacttgaagaggctcaatgcgcccaagcattggatgctcgacaagcttggcggagcttttgctcccaagccatcttaataacctcacaagtctagggagtgccttcctctgatcctcatcatcaggaacaggctcaagtatgctctgaactaccgtgaggtcatttctatcctgatgcacgccatgtacttgttgagg

SEQ ID NO: 57636 - DNA, 305 bp, Zea mays
ctctgtctgtcgctctcgctctcagacgactgggccgccgccgcttggtgctgaggctttcgttggtctcttcggcggcgacgagcacccaccagttctgtagaaatggctgatggtgaggacatccagcctcttgtctgcgacaatggcaccggaatggtcaaggctggttttgctggggacgatgcaccaagggcggttttccctagcattgttggccgtcctcgccacactggtgtcatggtagggatgggacagaaggatgcatatgttggcgatgaggcacagtccaagagaggtattct

SEQ ID NO: 57637 - DNA, 302 bp, Zea mays
cgcacacacacacaaccagatctcccccaaatccacccgtcggcacctccgcttcaagatgcagatctttgtgaaaaccctgactggcaagactatcaccctcgaggtggagtcgtctgacaccattgacaacgttaaggccaagatccaggacaaggacggcatccccccagaccagcagcggctcatctttgctggcaaacagcttgaggacgggcgcacgcttgctgactacaacatccagaaggagagcaccctccaccttgtgctccgtctcaggggaggcatgcagatctttgtga

SEQ ID NO: 57638 - DNA, 298 bp, Zea mays
ctcgagcgctcaaggttgtcataccacggtgtccacgcgaggctaaggggttgctgatagccagcatccgagatccaaacccagttgtattttttgagccaaagtggctgtatcgcttggctgttgaagaagttcccgaggaggattacatgctgccattatccgaggcagaagtgattagggaaggaagtgatataacacttgttggatggggatctcagcttgcggtgctgaaagaagcctgtgatgatgctgcaaaggatggggtgtcttgcgaactcatcgatctgaaaacact

SEQ ID NO: 57639 - DNA, 296 bp, Zea mays
ggaatcgactttaacagctttggacaagacgttgaatctgctaaaagagctgtgaggggactgccaggtttcgttgtagggaacagtgaaagtacttcactgcaagcctgttcatctgttggacatgttctcaatgaggtgtttgaaacatttgttgaatctactcttgtacaaccaacatttgtccttgactatccagttgagatatcaccattggcaaaaccacatcggagtcatgttggccttaccgagcgattcgaacttttcatttgtggccgtgagattggcaatgcgtt

SEQ ID NO: 57640 - DNA, 292 bp, Zea mays
gctgctctcgtccctagaaataaagcagctcctccgcggggcggcgaactactacccatcgccaaaaccctagccccgatccggtcgaggagcactacttcttggcatggcgggcacccctagccaggcaagcctcctgctccagaagcagctcaaggatcttgcgaagaaccccgtggatgggttctccgcagggcttgtagacgatagcaacgtcttcgagtggcaggtcaccatcatcggcccgcccgacaccctatatgatggaggctacttcaatgcaataatgacc

SEQ ID NO: 57641 - DNA, 295 bp, Zea mays
cacctccgagcctcagttcgcatccacgcgcgccgccgccgcctcgcagctcgacgctcaccgcgcagcatggcggaacagactgagaaggctttcctcaagcagccaaaggttttcctcagctcaaagaaatccggcaaaggtaagaagcctggcaagggcggcaaccgattctggaagagcattggccttggcttcaagactcccagggaagcaattgaagggacctacattgacaagaaatgcccattcactggaactgtttctatcagaggcagaattattgctgggacat

SEQ ID NO: 57642 - DNA, 297 bp, Zea mays
gtaccaactaggccaacggctggacggtggagtgctgtgctctcgggtcacgtgaacccgttctggtcttgagaaaaccgtgggcgagttgacatatgcaagggttaagtgctacatatgtcgtgtggttggagatcctcagctgagtattaatcgattcggttcggcgatacttctcggatatgaagactggatcactgccctgcatcgtagataacaagtgaaactaaagctgctaaaatgaagctagtataggacaagtgaatgctctagattaggcaaatctagattcaggaa

SEQ ID NO: 57643 - DNA, 312 bp, Zea mays
ggcaagcgcgagatcgccgccttcttcgcgcacgtcacgcacgagaccggacatttctgctacatcagcgagatcaacaagagcaacgcctactgcgacgcgagcaacaggcagtggccgtgcgcggcggggcagaagtactacgggcgcggcccgctgcagatctcgtggaactacaactacgggcccgccgggagggacatcggcttcaacgggctcgccgaccccaacagggtggcgcaggacgccgtgatcgcgttcaagacggcgctctggttctggatgaacaacgtgcaccgtgtgatgccgcag

SEQ ID NO: 57644 - DNA, 292 bp, Zea mays
attctcagccgccgccaatcccttcccgtgctccgcaaccgctgagtgagaagaagagatggccggcaagggcgatggcccggctatcggcatcgatctcggcacgacgtactcttgcgtcggcgtgtggcagcacgaccgcgtcgagatcattgccaacgaccagggtaaccgcaccacgccctcgtacgtcgccttcaccgactccgagcgcctcatcggagatgcggccaagaaccaggtcgccatgaaccccatcaacaccgtctttgatgccaagcgtctcatcggc

SEQ ID NO: 57645 - DNA, 300 bp, Zea mays
tcttactgtcttccttttttagaagatggctttgaccaatttgatgacaacatgaccaaccaaggggaaggcattacccagcctggtggaaaaggagtaaatcagcatagagaaaggggacttaatatgggacttggtctccaaaggatgaaccgagctcggcgtggcaaactgccaattgtcattactgaaggaaggataaggcctgtggcaccaattgttgctgcaaagtttgcaactgagtgcaacattgcagttcggaatcatgtgcttgtgcttaagtcatggaaggaatacgag

SEQ ID NO: 57646 - DNA, 303 bp, Zea mays
atcaacaagagcaacgcctactgcgacgcgagcaacaggcagtggccgtgcgcggcggggcagaagtactacgggcgcggcccgctgcagatctcgtggaactacaactacgggcccgccgggagggacatcggcttcaacgggctcgccgaccccaacagggtggcgcaggacgccgtgatcgcgttcaagacggcgctctggttctggatgaacaacgtgcaccgtgtgatgccgcaggcttcggcgccaccatcagggccatcaacggcgccctcgagtgcaacgggaacaaccccgccc

SEQ ID NO: 57647 - DNA, 288 bp, Zea mays
atcaggttgagatcaacccggtgtggcagcagcggaagctgagggagttctgcagggcgaagggcatccagctatgcgcccactcgcccctgggcgccaagggcacgcactggggcagcgactcggtgatggactccggcgtcctgcacgagatcgccaagtccaagggcaagaccgtggcacaggtgtgcctgaggtgggtgtacgagcagggcgactgcctgatcgtgaagagcttcgacgatgggcggatgaaggagaacctggacatcgtggactgggagctga

SEQ ID NO: 57648 - DNA, 282 bp, Zea mays
cagagtttctgtagatcaaagtgttgtggaccttgatatagcgttcagacttggtggatttgcatcaacgacaattcaactccttggaattgttgctgtcatgagcaaagtcacatggcaagttctgattcttatagtccccatggctgttgcatgcatgtggatgcagaggtattatattgcttcatcaagggaactaactaggattttgagtgttcagaagtctccagtgatccatttgtttagtgaatcaattgctggtgctgctacaataaggggttt

SEQ ID NO: 57649 - DNA, 144 bp, Zea mays
ctatcaccctcgaggtggagtcttcagacaccatcgacaatgtcaaggccaagatccaggacaaggagggcatcccaccggaccagcagcgtttgatcttcgctggcaagcagctggaggatggccgcacccttgcggattaca

SEQ ID NO: 57650 - DNA, 286 bp, Zea mays
gggatctgttcccgctgttaccggaggccttcaagggaatcaaacagatcggtgtaatcggctggggctcgcagggtcctgcgcaagctcagaacttgagagactcacttgttgaggcaaagtcagatattgttgttaagattggtctccggaaaggttctaaatcttttgaagaagcccgagcagcaggattcaccgaagagagtgggacgctgggtgatatatgggagactgtatcaaacagtgatcttgttttgctactgatatctgattctgctcaggctga

SEQ ID NO: 57651 - DNA, 289 bp, Zea mays
ctgaatgtacaacaatttgccaagtatatgctatttgtcaaggacattacaagcaagattgaagagaagcgtggtgtgactgttacagataatgggaacacagaggtaaaatcatcaccttcattggcaaacgggatccattctgaacctatgtcaggacaaataccagttgcaaagagcagccctgcatgggatgaagactggggtcctactaagaaatccggtgttccatctctttcagttgattctagtgcacaaacaaagcaaccctcagtagacccttttgact

SEQ ID NO: 57652 - DNA, 285 bp, Zea mays
attctcagccgccgccaatcccttcccgtgctccgcaaccgctgagtgagaagaagagatggccggcaagggcgatggcccggctatcggcatcgatctcggcacgacgtactcttgcgtcggcgtgtggcagcacgaccgcgtcgagatcattgccaacgaccagggtaaccgcaccacgccctcgtacgtcgccttcaccgactccgagcgcctcatcggagatgcggccaagaaccaggtcgccatgaaccccatcaacaccgtctttgatgccaagcgtct

SEQ ID NO: 57653 - DNA, 280 bp, Zea mays
accatgagaatatagttaccaagatggctaaggctgctcagaaatttggaatgaagagagcattggtcgtccattcaaagggtttggatgaaataagcccacttggtcccggatatatccttgatgttactccagagaagattgaaaaaatgttcttcgatccattggattttggcattcctcgctgcacattggaagatctgaaaggaggcgatccagcgtttaatgcaaaagttctccaggatgttcttgctggtcaaaggggggcgattgcagatgc

SEQ ID NO: 57654 - DNA, 285 bp, Zea mays
aacaagttttacgaggctttctccaagaacctcaagcttggcatccacgaggactcgcagaacaggaccaagatcgccgagcttctgagataccactccaccaagagtggtgatgagctgaccagcctcaaggactacgtgaccaggatgtaggagggacagaatgacatatactatatcactggtgagagcaagaaggcagtggagaactcccccttccttgagaagctgaagaagaggggctatgaggttctgtacatggttgatgccattgacgagtatgct

SEQ ID NO: 57655 - DNA, 309 bp, Zea mays
cacaaacttcactggtggtgtggagacaattgagaactgtgttgtttgcatgaggaggatcatgggatcctttggaaacatcaagactggagaactggtttagcagaagtaaggcggtcaaggaggctcactgtttcatttatctgtacagttgcaaactatgagtatggtttttactggcacttctatcaggatgggaaaatagaggcagaagtaaagcttactggaattctcagtttaggggccttgatgcctggggaatcgaggaaatatggcacaactattgcccctggtctgatgcaccagttc

SEQ ID NO: 57656 - DNA, 306 bp, Zea mays
atctgttcctgggtgactatgttgatcgggggaaacagagcatgaaacaatatgccttctcttggcgtacaagataaagtacccagaaaacttctttcttctcaggggaaaccatgaatgtgcctcgatcaaccggatatatgggttttttgatgagtgtaagaggagattcaatgtgcgtatctggaagatattcactgagtgttttaactgcctcccagtggctgcacttattgacgataagatcttttgcatgcatggggggttgtctcctgagctaaagaacatggatcaaaacgtaacatt

SEQ ID NO: 57657 - DNA, 304 bp, Zea mays
acctgcagttgatccagaaagagatcagaggactgtgtttgttacgcattatctttgaaggcagatgaaagagatgtatatgagttcttttctagggctggaaaggtccgggatgttcgcctgattatggatcgaaattcacgacgttctaaaggtggcgggtatatttaattctatgatgctatgtctgttccaatggcgatagctctttctggtcagttgcttcttggtcaacaagtgatggttaagccttcagaggctgaaaagaatttagttcagtcaaatgcttcaagtggactgcttc

SEQ ID NO: 57658 - DNA, 299 bp, Zea mays
cctaactcccagctctctcgttcaggcgcgctctctctagcggcgacgattgggcgagcggcgccactcaacgccaggtcttcgtgaaaaccatcgccggcgatgagtttcaaccagtctactgtcaaggggaaggccatgagggagaggcctagggctcgccctcatggcctgacgcagcagaggaggcaggaaataaaggaagcttttgatctgtttgatacagataactctggaagcattgatgctaaagagctcaatgttgccatgagagcctgggatttgagatgactgagagc

SEQ ID NO: 57659 - DNA, 305 bp, Zea mays
cgtcaccaagagcaagtttgacaacctgtatggttgccgccatcgctccctgatggtctgatgagggccactgacgttatgatcgccggaaaggttgccgtggtctgcggatacggtgatgtcggcaagggttgtgctgctgccctcaagcaggctggtgcccgtgtcattgtgaccgagatcgaccccatctgtgccctccaggctctgatggagggtcttcaggtccttcccttggaggacgttgtctctgaagctgacatcttcgtgaccaccactggcaacaaggatatcacatggttgac

SEQ ID NO: 57660 - DNA, 307 bp, Zea mays
gatcgccggtcgccgcctcctctccaggctgcagcacctgacgccacttcatgagcttctcggcctgcaccttcggccagggcccggcggacgcgtccagcacgctgtgcacggcgtccatcttcaccgcctcgcgcgcctgctccgcgacgttgagatccaaacaccccgtgagcatctgcagaatcaccatgccgaacgcgtacacgtccgactccgttgtgagctcgccggtcatgaagatcacggggtccatgtaccccgccgtgcccatcgggttcgtgcggcggccgatgtctcctcctcc

SEQ ID NO: 57661 - DNA, 178 bp, Zea mays
tagcaaccacttactctcgtgcgctctccgtgggagcgaggactgcggccggcggcagcggcaggttctcctagatctccggcatcatcagtgtcagatggctgacggtgaggacattcagccccttgtagtgtgacaatggaactggcatggtcaaggctggttttgctggtgacga

SEQ ID NO: 57662 - DNA, 291 bp, Zea mays
ggaggctgctgatgttgatgggaatggatccatcgacttgttgagttcatcactgccacaatgcatagacacaagctcgaaagagacgagtatttgtttaaggcattccagtacttcgataaagataacagcggtttcatcacaagagatgagttggagtctgctttgatcgagcatgagatgggtgacacgagtacaataaaggagatcatatcagaagtggacacagacaatgatgggaggattaactatgaggagttctgcgcaatgatgagaggagggatgcagcag

SEQ ID NO: 57663 - DNA, 306 bp, Zea mays
gttacttctcccgccgccgccaatcccctcccgttctcgccaccgccaatcccctcgcgtcctccgccacctctgctgagagcgagaagagatggccggcaagggtgatgggccggcaatcggcatcgatctcggcacgacctactcttgcgtcggtgtgtggcagcacgaccgtgtcgagatcatcgccaacgaccagggtaaccgcaccacaccctcgtacgtcgccttcaccgactccgagcgcctcatcggagatgcggccaagaaccaggtcgccatgaaccccatcaacccgtctttgat

SEQ ID NO: 57664 - DNA, 299 bp, Zea mays
catctttctccctatattgccttctcagtgaagtctccgtgagtaccaacccaacatcggatgtcactgtgagtttcttggaaaaactggtagagtcggcatcagattctaggcagaagcagctggccttacatcagctggcatgcaccagatatataaggaaagattaccctgaatctgagtgcttgttcaatgctgccttttctgctggccatctttattcgttagtgggtttggctagattaggcctctctgaggggtaataagcattttgctctcaagttgctagactcgtgatg

SEQ ID NO: 57665 - DNA, 292 bp, Zea mays
gggcaggcagaccgaagaccgagccgtgcggtggtcgggacgggaacgggacaggaccccagagtctcagatccttcctgcccgctcgcccgtgcccgtcgacgcgtcgttcttgaccggccgcgccccacctccgccctctcctcctcaacagggatcggatacgccacaggctgcgcgatggtgctgtgggtcttcggctacggctccctcatctggaaccccggcttcgacttcgactgacaaaatcctcggcttcatcaagggctacaagcgcacctttaatctcgct

SEQ ID NO: 57666 - DNA, 286 bp, Zea mays
gtctaggtgtcccagtgggtcaaggctatggattgctgaaacttgtgctggagcagctttcactgaatgggatgatacaagtgtgggtcgtgttggtccaccacttccttgttgctatgtgaagcttgtctcatgggaagaaggtggttacaagatttctgattctccaatgccgagaggagaggtcgcggttggtggacacagtataacaaaaggttatttcaacaatgaagcaaagacgaacgaagtatacaaggttgatgagaggggcatacgctggttctac

SEQ ID NO: 57667 - DNA, 295 bp, Zea mays
ggaaaacttgaagatgctattgaacaccttaccacgcaatagtgctgaatccactctcagcaatcatgtatggtactagagcatctgtgtttataaaaatgaagaaaccagctgctgccattcgtgatgccaatgctgctctagagatcaacccagactctgcaaaaggctataaaactcgtggaatggcatatgccatgcttggcaaatgggaggaagctgctcatgatctgcacacagcatctaacatggattacgacgaggagatcaatgctgtgctcaagaaggtgagcct

SEQ ID NO: 57668 - DNA, 298 bp, Zea mays
cggaacgcatacagatgtccctgctcctgacatgggaccaatgcacaaaccatggcatggatgctggatgagtactcgaaatttcatggtcactccccagcagtcgtcactgggaagccaatagatcttggtggatcactgggcagggatgcagcaacagggcgaggcgtaatgtatgctaccgaggccctactcgctgaatatggaaaatgcatttctggatcaacttttgtgatccaaggttttggcaatgttggttcatgggctgctcgacttattcacgagaaagtggtaagat

SEQ ID NO: 57669 - DNA, 323 bp, Zea mays
atacatgcgcacggaattccgctcttgggatcgagcagatgagaagtgtaacgcgtttgcatctgctgagcggaggactcggtgtcaggtgttctatatgatatgttgcaaaaggaggtcatttacgcaaggaaggcgtgccacgaaaaggatcagagcctgaaagacaaggacgacgcagttgagatgttggcaaagaaagtagataagttgacaaaagctatggagtcagatgccaagaaatcgaggcgcgagctagctgctatggagaaggagctggcagctgtgcgcttggagaaagagcaggataacagggcaagacg

SEQ ID NO: 57670 - DNA, 295 bp, Zea mays
agtagatacaccaatcctgtttgtccccccaagactggtgataatacagttccaccgtgtgggtttgggtcttttcatcagcagtacaggattgatggaaaacttgtggctgttggtgtagttgatatccttcctaaatgtttgtcaagcaagttattgttctgggatcctgaccttcctttcttatctcttggaaagtatactgctctgaaggagatagattgggtcaagacgacacaggagcactgtcccagccttcagtactactatctcggttattatatcattcttgcaa

SEQ ID NO: 57671 - DNA, 293 bp, Zea mays
gagcaccctccacttggtgctgcgtctcagggtggcatgcagatcttcgtgaagacacttactggcaagacgatcacccttgaggtggagtcctcggacaccatcgacaatgtcaaggccaagatccaggacaaggagggcattccaccggaccagcagcggctcatctttgctggcaagcagctggaggatggccgtacccttgcagattacaacatccagaaggagagcaccctccacttggtgctgcgtctcaggggtggcatgcagatcttcgtgaagactctactggc

SEQ ID NO: 57672 - DNA, 273 bp, Zea mays
gccgccaccctctacagataaggaagaggagagggcaggatgtcgcaccgtaagttcgagcacccgaggcacggctccctcggcttccttcccaggaagcgctcctcccgtcaccgcggcaaggtgaagtcattccctagggatgaccccaagaagccttgccatctcactgccttccttggctacaaggctggcatgactcacgttgtccgtgaggttgagaagccaggatccaaactccataagaaggaaacttgtgaggctgttaccatc

SEQ ID NO: 57673 - DNA, 294 bp, Zea mays
catgcgcttaatccagaccccttcagaggtgttttggttctgacggggagaaatacgccagagatgttcaggaaatcatcgaatttggaactacagggagagttggtgggatctgttcggaagccatacagggggttggtggaatagtggaactggcaccaggatacttgcccgtggcatacagtatggtaaggaaagccggtgggctctgcatcgctgacgaagttcaggcaggagtcgcgcgaactgggagccacttctggggattcgaagggcatggtgtcatccggacat

SEQ ID NO: 57674 - DNA, 302 bp, Zea mays
gcagggtttcgcgtacctccccggcggtgtgtgcgtgtcgagcatggggcggccggtgtcgtacgagcaggccgtggcgtggaaggtcctgagcgacgacgacacgccgcactgcctcgccttcatgttcgtcaactggtccttcgtgtgagtgaggaccggccccctagcatttgcagctgttataccctgaactctgtatccaagtactggtcgctcttgcctttgcccaggcaaccctgtgaaacgcacctgccccccagttacatcacgtggctgaccacgacacaccttttgtagtt

SEQ ID NO: 57675 - DNA, 303 bp, Zea mays
gctgcaagcatgggttgtctggagcatgtgcaatttggagaacaagattatatcagtagagagaatcctgcaatacataagcattcctgcagagccccctctttccattccagaagataggctggctctggctcagaactggccatccgaaggagagattcagctcctagaactccatgtaaaatatgccccgcagctgccatttgttctgaagggacttacagtcaccttcccaggaggcctcaagaccggtattgtcggaagaacaggaagcggcaaatcaaccctcatacaggccctctt

SEQ ID NO: 57676 - DNA, 301 bp, Zea mays
ctccgctcggccaccagctttgaccgcctcccctcccctccgctcctgtttctccataccccaaccccccgcaggagcggcgcggcggcggcggcggcaaagccaaaggcaagatgttcgggcgcgcgccgaagaagagcgacaacaccaagtactacgagatcctcggggtgcccaagtcggcgtcccaggacgacctcaagaaggcctaccgcaaggcagctatcaagaaccactccgacaaggccggtgaccccgagaagttcaaggagctcgcacaagcctatgaggttttgagtga

SEQ ID NO: 57677 - DNA, 298 bp, Zea mays
ctcccgccgccgccaatcccctcccgttctccgccaccgccaatcccctcccgtcctccgccacctctgctgagagcgagaagagatggccggcaagggtgatgggccggcaatcggcatcgatctcggcacgacctactcttgcgtcggtgtgtggcagcacgactgtgtcgagatcatcgccaacgaccagggtaaccgcaccacaccctcgtacgtcgccttcaccgactccgagcgcctcatcggagatgcggccaagaaccaggtcgccatgaaccccatcaacaccgtcttt

SEQ ID NO: 57678 - DNA, 302 bp, Zea mays
ctagtcctctgttacttctcccgccgccgccaatcccctcccgttctccgccaccgccaatcccctcccgtcctccgccacctctgctgagagcgagaagagatggccggcaagggtgatgggccggcaatcggcatcgatctcggcacgacctactcttgcgtcggtgtgtggcagcacgaccgtgtcgcgatcatcgccaacgaccagggtaaccgcaccacaccctcgtacgtcgccttcaccgactccgagcgcctcatcggagatgcggccaagaaccaggtcgccatgaaccccat

SEQ ID NO: 57679 - DNA, 303 bp, Zea mays
ctttttatgtgacaaccttaattattccaaagcagaaatcgacatctgatacgtgtgaagctacaaatgaagaagaactatttgaagttcaggacacatactcattgttcacacttggttggattcatacacatccaacacagtcctgcttcctttcttccattgacgcccacaatcattattcttatcaggtcatgctacctgaagcaattgcaatagttatggcacctactgacacaagaaaacatggtatatttcatctcacggatccaggtggcatgggcgtgatccatgattgtcaag

SEQ ID NO: 57680 - DNA, 299 bp, Zea mays
cagtgaggagtttaacaaggatacaccgaatcatgttgttatgtacatgcctgaggtttcaaaaacacatatgggaaacacgatgaggttgggctgcaggagaacattcttcagcaaacctgattgtcttacatcaaaattgtacggaagtcctccacatgtagatgaacgtcatcgtcatagatacgaggtcaatccctcttttgttcccatgcttgaaagtgctggtcttcattttgttggttgtgacgaaagtcgaaaccggatggagattgtggagctacaagatcatcccttct

SEQ ID NO: 57681 - DNA, 298 bp, Zea mays
agctggctcacttctccaggaaagtgttcgtcctcatggcgccgccgcagccgaactcgggcctcttcgtgggcatcaatcagggccatgtcgtcaccaagcgcgagctgcctctgcgcccgtcccaccgcaaggggaaagcaacgaagagggtgtccatggtcaggggcctgatcagagaggttgctggctttgctccttatgagaagcgtatcaccgagcttctgaaggttggcaaggacaagcgcgctctgaagcttgccaagagaaagcttggaactcacaagagggcaaagaa

SEQ ID NO: 57682 - DNA, 294 bp, Zea mays
gtaccttgcattctcatcattcttgggattgatagcgtgtctcttttggaatgtcatagcaactacaacagcatggattaaaggggaaggtgttatgatctggctgcttgccattatctacttcatatctggtgcgcctggggcttatgtgttatggtatctccctctttataatgcaatgagaactgagagcgctttgaagtttgggtggtttttcctattttacatgattcatataatattctgtgtgtgggcagctgtggctcctccattccctttcaaaggaaaatcttt

SEQ ID NO: 57683 - DNA, 62 bp, Zea mays
gactagttctagatcgcgtactacccagaactatgacaaatcatgaataagtttgatgtttg

SEQ ID NO: 57684 - DNA, 297 bp, Zea mays
tgcctcgggcattcttggtggccccaagaacgaatcccccaccgtcatatctccaatgcagtacaagaagaggttcaggaaagccatgtccaagtaattcctcaccgtcccggaccagtggtcctcttgacggcctggctagctaacaagaattgtccgccttaaccagaagcatttgccgtgccatgccatgccatagtacatgtccgtcattctttctgtgcctagaccctagagagagagagagagagagagagagagagagagagagagatggacacagattcattttgtgtc

SEQ ID NO: 57685 - DNA, 326 bp, Zea mays
gtacatcgcatcggattcggctcgagaattgaagaagctggaccagcgagggctgaagttctactgaaaataagagctgacttctccgcgagtgccactgctaacacaatcgtagtacaaatgccagtgcctgcatacacaatgagagcgagttttgagttggaagctggagcagttggacagacaaccgattttaaggaaggatccaggagacttgagtggaatctaaagaagattgttggtggttctgagcacaccctccgtgcaaagctgacattttctcaggagtcacatgggaatatcacaaaggaagctggcccagtgaa

SEQ ID NO: 57686 - DNA, 298 bp, Zea mays
tcgccgtctgccttctgcgcctccatttcggcctctgtcccttgcaagttcaatctcacctccaaccatgggtaaagagaagtcccacatcaacattgtggttattggccatgtcgactctggcaagtcgaccaccacaggacaccttatctgaaagcttggaggcattgacaagcgtgtgatcgagaggttcgagaaggaggctgctgaaatgaacaagcggtccttcaagtacgcgtgggtgctcgacaagctcaaggctgagcgtgagagaggtatcaccattgatatcgatctg

SEQ ID NO: 57687 - DNA, 297 bp, Zea mays
atcaacaccgtctttgatgccaagcgtctcattggcaggaggtttagtgatgcctctgtccagagtgatattaagctgtggcccttcaaggtcattcctgggcccggtgagaagccaatgatagttgttcagcacaagggggaggagaaacagtttgtagccgaagagatctcctccatggttctcatcaagatgcgtgagatcgctgaagcttaccttggcagcacgatcaagaatgctgttgtcacggtccctgcctacttcaacgactcacagaggcaggccacgaaggatgct

SEQ ID NO: 57688 - DNA, 298 bp, Zea mays
tgaaaaacttgctgaaggaatcaaacttcatgccatcccactcacagcgacgtcaaagcgcaccattcttagtgatctaattacggtttatgcaaagggtgggaaaaccattgttttcactcgcacaaagaaagatgcagatgaggtatcattggcactgacaaccagtattgcttctgaggcacttcatggtgatatttcacagcatcagcgtgaaaggacactaaatggatttcgtcaagggaaatttactgttctagtagctacagatgttgcggcccgcggtcttgatatacca

SEQ ID NO: 57689 - DNA, 294 bp, Zea mays
aaaaaggaaacgagcgctcacttgtcaacactggatttgtctattttcagcgaacgggaagtttcgtgatgggggaagaaagtttctaaagaaggttcgcagtgggggaattgagccaggcataagggctgaagtttggccatttctgcttggagtctatgatttgaacagctctgaggaggacaggaataccatcaagataaagaaaaggaaagaatatgaaaaattgaggcgacagtgccaccatgttctgcattgcaatagaggagatggtctgaatgttataaatgagtt

SEQ ID NO: 57690 - DNA, 293 bp, Zea mays
catggagcctgttgagaaatgcctgagggatgccaagatggacaagagcagtctccatgatgttgtccttgttggtggctccactaggatccccagggtgcagcagctgctccaggactttctcaacggcaaggagctgtgcaagaacatcaatcctgatgaggccgttgcctatggtgctgctgtccaggctgctatcctcagtggtgagggcaacgagaaggtgcaggacctgcttctgcttgacgtcactcctctctctctgggtctggagactgccggaggagtgatga

SEQ ID NO: 57691 - DNA, 297 bp, Zea mays
  unsure (1)..(297): unsure at all n locations
acttcatggaatacaagctgtgagtcgggactatttatgagtcctgcgaccacctcaatagaacatggtccaccaggatatgggcctggagaaaaccaggagaatgacagtacaagctgcgagttgagaatgtttacaagtcctacaatcgtctctagagaagttggcccaccaggataccagcagggagtgtttatgagtcctaaaaccatctcaagagaagtctgtcctccaggatttggcgtctggagnagaaccagggcaacgacactacatggtacaaacagagcgcgttta

SEQ ID NO: 57692 - DNA, 293 bp, Zea mays
gttgattttgagaaaaccctagagtattggcaacaggacaagtggaacggctccttctctgttaagtggcacattgtcaaggacgtgcccaacaatattctcaagcacatcatcctggagaacaatgagaacaagcctgtcacaaacagccgtgacactcaggagatacgcctcgaacaaggccttcagatgctcaagatattcaaggatcatgtcagcaagacttccatcctcgacgactttgccttctatgagagccgccagaagttgatgcaggataagaggtcgaaaca

SEQ ID NO: 57693 - DNA, 295 bp, Zea mays
ccattctcagccgccgccaatcccttcccgtgctccgcaaccgctgagtgagaagaagagatggccggcaagggcgatggcccggctatcggcatcgatctcggcacgacgtactcttgcgtcggcgtgtggcagcacgaccgcgtcgagatcattgccaacgaacagggtaaccgcaccacgccctcgtacgtcgccttcaccgactccgagcgcctcatcggagatgcggccaagaaccaggtcgccatgaaccccatcaacaccgtctttgatgccaagcgtctcatcggca

SEQ ID NO: 57694 - DNA, 295 bp, Zea mays
ctcaaaggagcaattagaagaacgactgcttcttgccattcatgaagctagtgaaggttttggctttggttgattggttcctcgggaggttgtaaagcgtgcactgggtcattggttttctgcttgacatgtacagattttgaaggcaattgagatggtcagtgctatgcataacatagatcgatccattggtctttttaggagtgctcatgctgcagtagggatctaatttattattccggatagtcgatgagtatgtcgatcgggttgggtacagtagtagagctctgcgaca

SEQ ID NO: 57695 - DNA, 285 bp, Zea mays
tgtccatgtagcgttcggatctcggctcgacgattgctgagctccttactatgattgttaggcgatccggcaaggagctggagaaggagcccaaatttctcaagaacggcgatgctggtatggtgaagatggttcccactaagcccatggtggtggagaccttttctcagtatcctcctcttggtcgatttgctgtccgtgacatgaggcaaacggttgctgtcggagtcatcaagagtgtggagtagaaggacccaactggagccaaggtgacgaagtctgctg

SEQ ID NO: 57696 - DNA, 190 bp, Zea mays
attgcatccacctttatgactcaaggtggcatacccccttcaacaaacccaggttccctgctaaaggaagctatacatgtcattagttgtggatatgacgataaaacagaatgggggaaagagatcggatggatatatggctctgttactgtagatattttaactggtttcaagatgcatgcaagaggtt

SEQ ID NO: 57697 - DNA, 291 bp, Zea mays
gaggtgagctccatcgtcatgaaggtgaaaggggcttcgttcttcaagaagaagatgaaggtgatcctgagcttcagagaagggttccgaggcgaaagggtgagggaccaatctcctatcatgtacatccacgacgtgacccagcttcctcacaatgggtggcggctccccaagcagcgccgggtgtagtttcggagtggactggaactagagctgggtttaaagaaagaaccggggaagtgtcggaggtgattttcggaaacttaacgtaatcgttgtgttgttggccta

SEQ ID NO: 57698 - DNA, 284 bp, Zea mays
ttgacatcatgcatgggcttgaacctcagacaattgaatccctgaatcttttgaagagtcgagatgcagtgttcattgttgctttgaataaggtagatcgtctctatggttggaagtaatgtccaaatgctcctattgtgaaggctttataacaacaaaatgaagatgttaagagggagttcaatatgagactcacagatattgttacacaattcaagatgcaaggagtgagtactgctttgtactacatgaacaaggagatggaagatacctttaacatagtg

SEQ ID NO: 57699 - DNA, 151 bp, Zea mays
aacgcacccagcacagacagaagaccctcgccggacgctcgctctcgccggggacaacacaatcacgaggccaggatggcccgctacgatcgcgcgatcaccgtgttctcacccgacggccacctcttgcaggtcgagtacgccctcgagg

SEQ ID NO: 57700 - DNA, 286 bp, Zea mays
agctcaacgtcgagctcatcaagagggctgcggtcttccactacggatcaataagcttgattgctgagccttgccggacagcacatctccgtgccatggagattgccaaagaggcaggtgcactgctctcttatgacccaaacctgagggaggcactatggccatcccgtgaggaggcccgcacccagatcttgagcatctgggaccaggcagacattgtcaaggtcagcgaagtcgagctcgagttcttgacaggcatcgactcggtggaggacgatgttgtcat

SEQ ID NO: 57701 - DNA, 285 bp, Zea mays
agaagatgaggcacggtgaactgctgtagattttgtgtaagacaataatggctgccaaatgttttataaggtacggaagttgtagattgcgaccatgtatgagaattttccccaccgctactcatctctttgccaccactattttagtcatcagtgctggatgggcaccctgttgatttcgacgtaccctttattgctatagcattgtaataagcgatgggcatgcttgtagttgaataagtacaatgtccatgtattcaaacatcagcgtcatgtttatttgtt

SEQ ID NO: 57702 - DNA, 287 bp, Zea mays
gtcatggccattaagatcgcaggctgcctcttgactgtcattctgatatgggaaattcctggtgtgtttgaaattttctgggcaccatttacgtttctgctaggttacaaaaacccagagccttctaagatgaacttacccctgttacacgaatggcgcttccgctctggacttgatcgttacatatggatcattggaatgatttatgcttactttcaccccaacgttgaaagatggatggaaaagctggaagaatctgagactaaggtgagagtgttaatcaaggg

SEQ ID NO: 57703 - DNA, 287 bp, Zea mays
attggagagagagaaaagaaagaaagaaagaacggcgaaaaatggtcgatgccggcgacataacggccggagggccgccacgcgctcacgaggaggagcaagcgggaactccggcatacggttcggtggtcctcggcggcacttttgaccgcctccacgacggccaccgccgccttctcaaggcctccgcggatttggggagagaccggatcgtggtgggcgtctgcacgggacctatgctcgccaagaaggagtatgcggagttattgagcccgtcgacaagcgca

SEQ ID NO: 57704 - DNA, 260 bp, Zea mays
caagatgatgatgcatgaagagcttcaggctagctggcaccagccaacaaagtgcaccgtgtttcacagcctggatcaaaccaggcttcaggagctactcttccaggttgcagaaaaaatatcggtcctggtggagacaaacgagagggcatacgagttaagaactggtggtactcttgaggggctaccgcccaggcgcaggggcgaggctcaagattcatccaagtggcaggagagctttgtcgcatcacaggggcggc

SEQ ID NO: 57705 - DNA, 287 bp, Zea mays
  unsure (1)..(287): unsure at all n locations
actcgagccgattcggctcgagcacaaattcgttggccatggctaggatgtcgnatgacagntcactttgagttcatgggagaagctcggggttgacacatggtgcttccatgatagggatattgcccctaatgggaaaactattctagaaacaaatgctaacttggatgagatagttgagctggcaaagcagctccagggtgagaccaatataaagccattgtggggtactgcacagctctttatgcatcctcgttacatgcacggagctgctactagcccagagg

SEQ ID NO: 57706 - DNA, 290 bp, Zea mays
tgtattcgtcctccagcagaaggaccactccaagttcaaaagaaagggtgaagatctcctttatgagcacaccctgtctctgaccgaagctctatgtgggttccaatttgttcttacacacctggacaacaggcagcttctgatcaaatcaaaccccggcgaagttgttaaacctgaccaattcaaggcgataaatgacgaggggatgcctatttaccagaggcccttcatgaaggggaagctctacattcatttcacggtggagttccccgactcgctggcaccagagc

SEQ ID NO: 57707 - DNA, 279 bp, Zea mays
cactccgctcggccaccagctttgaccgcctcccctcccctccgctcctgtggctccataccccacccccccgcaggagcggcgcggcggcggcggcggcaaagccaaaggcaagatgttcgggcgcgcgccgaagaagagcgacaccaccaagtactacgagatcctcggggagcccaagtcggcgtcccaggacgacctcaagaaggcctaccgcaaggcagctatctagaaccaccccgacaagggcggtgaccccgagaagttcaaggagctcgc

SEQ ID NO: 57708 - DNA, 272 bp, Zea mays
gtcgatggatatctcgcagaggttgcaagggacccaaatataccggtctacaagtttttcagcctagctgagacggtttcggccggttcaaggccggttcatgatggactgtatcgtgccattgatatgtatctgaaggagcacccaggcttgggcacgagcgacaagaagaggctatgtgccctgatggactgcaagaagttgtcgcccgatgcgtgcgctcatgccgtgcagcgcgagcgcctgcctctgaggatcgtggtgcatgtgct

SEQ ID NO: 57709 - DNA, 275 bp, Zea mays
ggagctgactgactggtggaagaaggccctggagagcgagaacgtggactcggtgaagatcagcaaccggctgcatgacaccccctgcgtcgtggtcacctccaagtacgggtggagcgccaacatggagaagatcatgcaggcgcagaccctgtcggactcgagcaagcaggcgtacatgcgcggcaagagggtgctcgagatcaaccccaggcaccccatcatcaaggagctccgcgacaaggtcgcccaggacaacgagagcgaggagctga

SEQ ID NO: 57710 - DNA, 277 bp, Zea mays
ccagcatgttcgttcagctttagcctcagtgattatgggaatggctcctgtactgggaaaggatgctaccattgaacagcttgttccaattttcctctctttgttgaaagacgaatttcctgatgttcgacttaacataatcagcaaacttgatcaagttaatcaggttattggaattgacttgctatctcaatcactgctaccagcaattgtagaacttgcagaggataggcactggagagtccggcttgcaataattgagtacatcccattgttg

SEQ ID NO: 57711 - DNA, 273 bp, Zea mays
gtgggctggcttctcctccccctcttaccaagtcctcctcgggttagggttccttcgggttttgtggaggggcgatggcggcggctgatgtggagtaccgttgcttcgtcggcgggcttgcctgggccaccagcaacgagtcgctggagaatgccttcgcctcctatacaaagatcctcgactccaaggtcatcaccgaccgggagacggggaggtcccgcggcttcggcttcgttaccttctcctccgagaactccatgctcgacgctatcg

SEQ ID NO: 57712 - DNA, 272 bp, Zea mays
gttctagctagctagcaaagggggggaaaatggctccgcttctcgctgctgccatgaaccacgctgcagcccatcctggccttaggagccacctagtaggacccaacaatgagagtttctcacggcaccacctgccgtcttcttctccacagagcagcaagcgaaggtgtaaccttagctttactacacgatctgcaagagtaggcagccaaaatggagtccaaatgttgagcccctcggaaatcccacaaagggactggttcccctctgac

SEQ ID NO: 57713 - DNA, 272 bp, Zea mays
gctgtctgtactggtagacaggtcaattggaggttccagtataaaggatggacaaatagagctaatgctacacaggaggctactccatgatgatgggaaaggcgtcgccgaggcgctaaatgaaacagtctgtctcgataagcaatgtgaaggactcattatacaagacgaaatatatgtcaaaatagacccacaaggagaaggagctcggtggcgtcggacatttggccaggaaatatactcccctctccttcttgctttcacagagcagg

SEQ ID NO: 57714 - DNA, 276 bp, Zea mays
ctcaacacagcacaggcagctcgagagagagagagagagaaagatgtcgtggttcgggcaccaccaccacaatcagccggctcccccggcgtcgggccccaaccaggtgttcaagatcttctgccgcgccaacgagaactactgcctggccgtccgcgacggcgccgtcgtgctggccccggtcaaccccaaggacgaccaccagcactggtacaaggacatgcgcttcagcacccgggtcaaggacgaggaaggcataccggcgttcgcgctcgt

SEQ ID NO: 57715 - DNA, 274 bp, Zea mays
atggatgccaccacacccaagtactccaaggcccgttatgatgagattgtgaaggaagtctctttctacctgaagaaggttggatacaaccctgacaagatccactttgttcccatctctggtttcgaaggtgacaacatgattgagaggtccaccaaccttgactggtacaagggcccaaccctacttgaggctttggacttgatcaatgagccgaagaggccttcagacaagcccctgcgtctccccctacaggatgtgtacaagattggtg

SEQ ID NO: 57716 - DNA, 269 bp, Zea mays
gatgtttacagcttcggtgtagttatgttggagcttctaacaggacgtaaaccttatgacagttcgtatccacgagctgaacaacatctagtacgatgggccacttctcaactctatgatattgatgccataacgaagatggttgatccttccattcgaggacaatgttctgataaggcattataccgttttgctgacattattagccgctgcattcagcatgaaccagaattcaggccaccaatgtctgaagttgtccaagacttaac

SEQ ID NO: 57717 - DNA, 270 bp, Zea mays
gctgtgtacaaatacaggctgcggagttacatggattcagagatccgtgccatcatggctcagtacatgcctctggataaccaagaaggagcaaaccagcatcaggtcgtgcacgccaatgatatctgaagctgcactccttttctgaagcagaaatagagggggcgtgcaacatttcacttgtgctgctgcatcattgggtcatgggttttacaggtataggtcaactaggctcaaagatacacaggttatgcgagatcaagatctact

SEQ ID NO: 57718 - DNA, 272 bp, Zea mays
gcatggagcctgttgagaaatgcctgagggatgccaagatggacaagagcagcgtccatgatgttgtccttgttggtggctccactaggatccccgcggtgcagcagctgctccaggacttcttcaacggcaaggagctgtgcaagaacatcaatcctgatgaggccgttgcctatggtgctgctgtccaggctgctatcctcagtggtgagggcatcgagaaggtgcaggacctgcttctgcttgacgtcactcctctctctctgggtctg

SEQ ID NO: 57719 - DNA, 265 bp, Zea mays
tggcgagacagacgaagattttgcgactagacttgccaccaatttagagaacctcattctcaaagaaggaccagaaacaattgctgctttcattgctgaacctgtgatgggtgctggtggtgtcatccctcctccaaagacctattttgacaaggatcaagcactcgtgaagaagtatgacattcttttcatagcagatgaggttatcactgcatttggaaggctgggaacttgtttggatgcgattactataacatcaagccag

SEQ ID NO: 57720 - DNA, 269 bp, Zea mays
gcactccaaactgtgaaagtgaggcattagctgttgctgcagccatggagaaaggaacaacccatcctattggaagggctgttttagaccactctgttggaaaggagcttccagttgtcgctgtagaaagttttgaatgcctacctggtaggggagttgttgctaccctgagtggtgtaaaggtaagggccaatgaaaatgagctatccgaggcatctatcggttctgtggattatatttcttcactatatagatccaatggtgaatca

SEQ ID NO: 57721 - DNA, 272 bp, Zea mays
gataaggatggttgggaacagaaaaggagtaagaaggataagctgatggataagcagttacttagaaagatccaagtgaaatcacatgggatattgtcgataagaaactcaaagagattatagcatctaggggaaagaaaggtactggaacgatcgagcgtgttgagcagttaacatttgtgacccgtgtggccaaaacaccagctcagaacgttgaaatcctctgccatgtgatttctgcgcagtctgatgttaaccctagtctacttggg

SEQ ID NO: 57722 - DNA, 100 bp, Zea mays
gagtggtgcaagggccccaaccagagctggaaggtgctgccctggggggacgaggcctacgcgacgcgcccgtacgctcctcctccgcctgcccaggtgt

SEQ ID NO: 57723 - DNA, 268 bp, Zea mays
ctatgcgggaggaactttagatgctgctcgcagattaaatcataaaatatgtgacattgccattaattgggctggtgggctacatcatgccaaaaagtgtgaggcttcaggcttctgttacattaatgatctagtattaggaattctggagcttctcaagtaccatgccagggttctttatattgacattgatgtccatcatggagatggagttgaagaagccttttatttcactgacagggtaatgactgtgagtttccacaagtat

SEQ ID NO: 57724 - DNA, 268 bp, Zea mays
cgcccacgcaccgccatcgttcgcttcctttcgtcaactccacttctcttctccgcgtcacctcctcttcgccgccgccgacgctccaccgggcagccagccatggatcaggactacgacgtgatcgtgctaggcacggggctcaaggagtgcatcctcagcggtctcctctctgtggacggcctcaacgttttgcatatggacagaaatgactactatggaggcgattccacctcgctcaaccttaatcagctctggaagaggttta

SEQ ID NO: 57725 - DNA, 265 bp, Zea mays
ggaaacaactgatgggtccttcatagagccaaaagagagcgctttggtatggcactatcagaacacggatcatgactttggctcgtgccaggcaaaggagctagtgagccatcttgagcgagtcctatcgaacgaacctgttgtcgtgaggcgtggccatcagatcgtagaagttaaacctcagggagttagcaaggggatttccgtggacaagatcatgcggaccttggtcagcaaaggggaagtaccagaccttttgatgtgc

SEQ ID NO: 57726 - DNA, 269 bp, Zea mays
ctcctgtactgctcttttccctctagtcttctgttttatgatctgtcagctttgctatggcactgtaactgatatccaatgtctgaagaagctgaaggcatcagttgatcccgacaataagttagaatggacattcaataacaatacagagggatccatatgcgggttcaatggtgtggagtgctggcatcctaatgagaacagggttctttcgcttcatcttggtagctttggtcttaagggcgaattccctgatggacttgagaatt

SEQ ID NO: 57727 - DNA, 264 bp, Zea mays
atcccgatgagcgtgtagagtatggggccgggattctctccagtccagaagaacgctgagcatatgccttccccatcccgatgagcgtgtagagtatgagttctggacaaacagtaatgatgaatgtggtcctaaatgtgatatgcaaatggacttcgtgaggagctttagaggaactgcacaaattcttgagaaaaagggttacactcagtttactcctcattatatcacatggtattgtccagaagcttttgttgatagcaa

SEQ ID NO: 57728 - DNA, 259 bp, Zea mays
gggcaggaagaccgaagaccgagccgtgcggcggctcgggacgggaacgggacaggaccccaaaatctcacatccttcctgcccgcccgcccgtacccgtcgacgcgtcgttctagccggccgcgccccacctccgccctctcctcctccagggggatcggatacgccacaggctgcgcgatggtgctgtgggtcttcggctacggctccctcatctggaaccccggcttcgacttcgacgacaaaatcctcggcttca

SEQ ID NO: 57729 - DNA, 260 bp, Zea mays
ggcgaaacctggattcgctgagttgatagattttaatccaatccatgcaactgacgtccaactaccttcaggtggtacatttgtgatcgcccattgtttggccgagtccaagaaagcagagacagctgcaacaaattataataaccgcgttgtggagtgtcgcttagcagcgattgttcttgccatcaaacttgggatggataggaaaaaagctatctcctccgttacaaccctctccgatgttgaagggctatgtgttt

SEQ ID NO: 57730 - DNA, 257 bp, Zea mays
ctcgccgtctgccttctgcgtctccatctcggcctctgtcccttgcaagttcactctcatctccaaccatgggtaccgcgtagtcccacatcaacattgtggttattggccatatcgactctggcaagtcgaccaccacaggacaccttatctacaagcttggaggcattgacaagcgtgtgatcgagaggtttgagaaggaggctgctgaaatgaataagcggtccttcaagtacgcgtgggtgctcgacaagctc

SEQ ID NO: 57731 - DNA, 262 bp, Zea mays
gactcggtcgcttcaccactccactcgccgcaggacgccgggcgccgccgaggggatcggagcaagatgttcttccacatcgtgctggagcggaacatgcagctgcacccacgacacttcgggccgcacctccgcgacaagctcgtttcaagctcatcaaggacgtcgagggcacctgcagcgggcggcacgggttcgttgtggcgatcacgggtgtggaggacatcggcaaggggctcatccgggaaggcacgggatacgt

SEQ ID NO: 57732 - DNA, 269 bp, Zea mays
gtgctccgcctcaggggtggcatgcagatttttgtgaagacattgactggcaagaccatcaccttggaggtggagagctctgacaccattgacaatgtgaaggccaagatccaggacaaggagggcattcccccagaccagcagcgtctgatcttgcgggcaagcagctggaggatggccgcactctcgcggactacaacatccagaaggagagcacccttcaccttgttctccgcctcagaggtggtatgcagatctttgtacagacc

SEQ ID NO: 57733 - DNA, 266 bp, Zea mays
gaggtgggctggcttctcctccccctcttaccaagtcctcctcgggttagggttccttagggttttgtggaggggcgatggcggcggctgatgtggagtaccgttgcttcgtcggcgggcttgcctgggccaccagcaacgagtcgctgggaatgccttcgcctcctacggcgagatcctcgactccaaggtcatcaccgaccgggagacggggaggtcccgcggcttcggcttcgttaccttctcctccgagaactccatgctcg

SEQ ID NO: 57734 - DNA, 101 bp, Zea mays
gacgatggtaacctccgtcgtgtgtgtgctaagcatgtagcgtgctaggagatgatatattaaatataatcgagtagtagagccacccgctgtgtgacgct

SEQ ID NO: 57735 - DNA, 247 bp, Zea mays
ccaagatccaggacaaggagggcattcccccagaccagcagcggctcatctttgctggaaagcagcttgaggacgggcgcacgcttgccgactacaacatccagaaggagagcaccctccacttggtgctgcgcctcaggggaggcagcagatcttcgtgaagaccctgaccggcaagactatcaccctcgaggtggagtcttcagacaccatcgacaatgtcaaggccaagatccaggacaaggag

SEQ ID NO: 57736 - DNA, 257 bp, Zea mays
gccaagagcagctcatctgtggagaagagctacgagctgcctgatggccaggtgatcaccattggggcggagaggttccgatgccccgaggtcctcttccagccttccttcattggtatggaagctcctggcatccatgagaccactacaactccatcatgaaatgcgacgtggatatcaggaaggacttgtatggtaacattgttctcagtggtggcacaaccatgttccctggcatcgctgaccgtatgagcaag

SEQ ID NO: 57737 - DNA, 260 bp, Zea mays
tactgtccaggaatggaaccaccgcctccttctgagtacattacctgcctaggtgatctatatagtgtctcttggatggaagacagtgagactaacaatctgaaggaggaaacaataaaggaacaatatgaagtggtgaagaagcgacttcagacttcaatagctatggtgcaggctctcacgtcatggaatatggtgacaagaccttcaagggcgagaagctttacctttatcaaggttttgatcctgcaaatgccaat

SEQ ID NO: 57738 - DNA, 264 bp, Zea mays
cctgcgcgcactctctcgtgagcagatcgagtcgtttctggatctcgcacggtgcaccatagtgtcatagctctccaacgagagctccgactcatatgttctgtccgagtccagcctctttgtgtatgcccacaaggttgttctgaagactgtgggacgacgaagctgctgctcgctattcctcgcatccttgagcttgctgcagggctgtcactgcctcttctttcagcgaagtactctcgtgggaccttcatcttccccggc

SEQ ID NO: 57739 - DNA, 269 bp, Zea mays
ccgcgaggttgtcaggattcaatatgtcgaccagcacattcgctacttcctgcacgctgttgggcaatgttagaacaacgcaggcctcccagacagcggtgaagatcccttcgtctctaagcttcttcagccaagttacgaaggttccaagctgaagacctccaagaaactggatgtctccgccatggctgtatacaaggtgaagcttgtcgggcctgaaggtgaagagcacgagtttgatgctccagacgacgcctacatccttgacg

SEQ ID NO: 57740 - DNA, 264 bp, Zea mays
gtacggcgcgccggcgcaggactacaagcagtacgacatcgtgctgctggtggggctaggcatcggcgccacgcccatgatctccatcatcaaggacatcatcaacaacatgaggcagctggacggtggcggcgacctggaggcctcgacgcgtcggcgtcgtcgtcgtcgatggcctcgttccgcacccagcgtgcctacttctactgggtgacccgggagcaggggtccttcgagtggttccgcggcgtgatggacgaggtg

SEQ ID NO: 57741 - DNA, 254 bp, Zea mays
ggacacctgagatgcagtcgctctgagattggtagatttgtttccatgcttcggaatccttcaccaattcttcgtgcttgtgctgcctttgcccttcttcagttcacaatcccaggaggtcggcatgcagtgcatcacgcagtctcttgcaggaagcaggctcaggtcgggtgttgcgcgcacagcggccagcgacaacagcttctattgaagctaaaatctttgccaggattgtactcaggaacttggagcac

SEQ ID NO: 57742 - DNA, 254 bp, Zea mays
gagcgtcagagcccgatcccgatccagcgaggcggcgaccctccctcctccccttgcttcgctcgtccagccctgaccacccgcatccccgtcagtcatggcagcggcagcaggcggaggcgcggtgcgtgcgctgtcccagaggagcaggacatacagatgatgctcgccgccgacgtccaccttggcaccaagaactgcgatttccagatggagcgctatgcctttaagcgccgcaccgacggcatctacat

SEQ ID NO: 57743 - DNA, 252 bp, Zea mays
aacctagtcgccactctgctcgcgcacaagttgggagtcactcagtgtaccatcgctcatgccttggagaaaaccaaataccccaactcggacatatacttggacaaattcgacagccagtaccacttctcttgccagttccagctgaccttattgccatgaaccacaccgatttcatcatcaccagcacattccatgaaatcgcgggaagcaaggacaccgtggggcagtacgagtcccacatcgcgttca

SEQ ID NO: 57744 - DNA, 261 bp, Zea mays
ggcgtggtagtggacagcctcctgtcgtcgatggtgaggacggggaagccgccggacttcgtgtctgtgcatcggcgacgaccggtcggacgaggacatgttcgagagcatcgtgtgcccggcctccaacagcggcgtgaagctgcggccagcagcgaggtgttcgcgtgcacggtgggcaagaagccgagcatggccaggtactacctggacgacacggtggacgtggtcaagatgctggacggcctggccagcgcgccg

SEQ ID NO: 57745 - DNA, 257 bp, Zea mays
gtacaagggtaactacacattcaccggtggaaaggctgttggatacaggaatctctttgcaatcccatggcagaagttcttggccgatgacagcctcttcttcgtggatgggatgctgcatctgagagccgagcttacgataagcaaccctagagcaatggtctctgtatagtggtagttgttacgacagatgaaaaagatatcggatgggaaacctcacgagttccagttcgctgcaagtttccagatttgccggt

SEQ ID NO: 57746 - DNA, 252 bp, Zea mays
ctgctccattctcagccgccgccaatcccttcctgtgctccgcaaccgctgagtgagaagaagagatggccggcaagggcgatggcccggctatcggcatcgatctcggcacgacgtactcttgcgtcggcgtgtggcagacgaccgcgtcgagatcattgccaacgaccagggtaaccgcaccacgccctcgtacgtcgccttcaccgactccgagcgcctcatcggagatgcggccaagaaccaggtcgc

SEQ ID NO: 57747 - DNA, 251 bp, Zea mays
tgaagatcaagctttcacaattttgtcatgttccgatctcaaatatagtgaacctccatgacgtgacaaacatttggcacatccccttgctgctaagggaccagaagacccatgaagctattctgaaagttttagatctcagtatgatggaaaagtacctcgggaacctgagttagggatgtggactaaaagagccaccaagttggacaaattgaagacttcggtcaagattgccatggttggtaaataca

SEQ ID NO: 57748 - DNA, 263 bp, Zea mays
atagcattacgctgatatgactgaagatcaatttgacttccactcatattgcttgcggaaaatgacacttcgagcatatgtttctatgctgaagtttcaggatcgtttgcatgctcatgaatacttccacaaggctgctgctctagcatcaggtgctatatgaaactacatgattctccaacaaatcttctatggaagagaattatgagatatcaaaactgccacctgctcagaggaagatgttgaggcaaaagcagaagata

SEQ ID NO: 57749 - DNA, 210 bp, Zea mays
tgaaggcacaggcgctcagggactcgagcacttctgggtacatgtcctccaagaagaccatggagatcaacccggacaacgccatcatggaggagctgcgcaaggcgcggaggccgacaagaacgacaagtctgtcaaggccttgtcatgcttctgttcgagatggcgctgctcacctcgggcttcagccttgacgagcccaacaccttc

SEQ ID NO: 57750 - DNA, 251 bp, Zea mays
gccgtccgccttgcccttcacgaaggcttggtcctcctccttgtatctccactcctcccttcacagatccgttcctccagctagggttagcgttcctctgcagcgatggcgatcaatctgactaaagcggagaagaagtcgcgtacgacaagaagctgtgcagcctgctcgatgagtacaccaaggtgctcatcgccctggccgacaacgtcggttccaagcagctccaggacatccgccggggcctcagg

SEQ ID NO: 57751 - DNA, 251 bp, Zea mays
atcgtggcgctcaagaaggtgcgcttcgacaacctcgagcccgagagcgtccgcttcatggcccgcgagatcctcatcctccgacgcctcgaccaccctaacgtcgtcaaactcgacggccttgtcacctcccgcatgcctgcagcctctacctcgtcttcgagtacatggagcacgacctcgctggcctcgccgccagtcccgaaattaagttcaccgaaccacaggttaagtgctatatgcatcagctg

SEQ ID NO: 57752 - DNA, 252 bp, Zea mays
ctcaaattcagaatcctgtggctcttgtggagaaccatcatctgtgtcggaggaacgcagaaggtgaaaagatgcttcctgatggccttatctggaggcggctcctcctcctcctatgcttctcactaaagatgattgctggattgacagtctctcaacccgccgtgcttcttctgcaagtttcttaggccgccttctccaagtgcctccaattccttacttcttatcatctttgttgaaatctagagagca

SEQ ID NO: 57753 - DNA, 251 bp, Zea mays
ctcgagccgcgtacgaaatatcaggctgctcagaagggtaaggtcggaatagtcctggacttcaactggtacgaggctcttacaaactcacctgatgaccaagcagcagcccaaagagccagggacttccacattggcggtttgttgatccattgataaacggacactatccacagataatgcaagatctcgtgaaggagaggctgcccaggttcactcctgagcaggctaaactggtgaagggctcggca

SEQ ID NO: 57754 - DNA, 250 bp, Zea mays
gttcttcctgaattgaatggcaagctcactggcatgtccttccgggttcccaccgtggatgtgtcagttgttgacctcactgtcagaatcgagaagggggcctcctacgaggaaatcaagaaagctattaaggctgttctgagggcccactcaagggtatcatgggctacgtggaggaggatctggtttccaccgacttcaccggtgacagcaggtcgagcatcttcgacgccaaggccgggattgccct

SEQ ID NO: 57755 - DNA, 248 bp, Zea mays
ctactccttatcggcgactccggcgtcggcaagagcagcctccttctccgcttcaccgccgactccttcgatgacctctcccctaccataggtgttgacttcaaggtgaagatggttagcattggtggcaaaaaatcaagcttgccatccacgacacagctggacaagagaggtttaggaccttgaccagctcttactacagaggggcacaggggatcattatggtgtatgatgtcagtcgacgagag

SEQ ID NO: 57756 - DNA, 248 bp, Zea mays
gcagtgactctgggacctacgacaacgagggcaggttcatgccagtgaacttcgagaacctgttcagcaagtacgcgcgcacttccccggacaggctcacctacagggagctctggtcgatgacggaggggttccggacgccttcgacctctacggctggattgcggcgaactggagtggacgatcctgtacgtgctggcgcgggacgacgaggggtacctgtcgcgggatgccatgcggcgcgtgta

SEQ ID NO: 57757 - DNA, 275 bp, Zea mays
aaaacctccaaggctccaaccctagccgcgatccgacaacgcctccatccctagccgactgctgcaagcttcagagctcaagagtcagggcgccatggcgacagagacggagaccttcgcctttcaggctgagatcaaccagctgctctcactcatcatcaacaccttctattccaacaaggagatcttcctccgggagctcatttccaactcttccgatgcgttggacaaaatcaggttcgagagcctcactgacaagagcaagctcgatgcgc

SEQ ID NO: 57758 - DNA, 268 bp, Zea mays
ctaagatttggtgcatgcataacaatgggtctgttgtgtggccactgggcacacagcttgtctgggttggtggagatcagtttgcattgcagacatctgttccattagagattcctgttgatggttttcctgtggacaaagaattgatgttcctgttgattttgtggcacctacaaggccagggaggtacatatcttactggaggttggcttccccttctggtcagatatttggtcagcgagtttgggttcatatccaggtggaagac

SEQ ID NO: 57759 - DNA, 273 bp, Zea mays
gacgttgggagctattgttcagtatctgaagtgtcttggatgtatattggcaatgaacaacttgaatatgcatccggagctcttaaaaagttcaggtttcttgtggagcaactatcaaaggttgacccttcttgtatgaacttgatgaacagatagcattttgggttaacttgtacaatgcattaataatgcatgcttatttggcatacggtgtccctgaaaatgacattaagctgttcgcgctaatgcaaaaggcctgttacacgatcggcg

SEQ ID NO: 57760 - DNA, 275 bp, Zea mays
gattggccccccgtactcgttctcgtgatttagaatatctcttcggcaaatatggaagaatacgagaagtggagttgaagcgcgactatgcatttattgagttcagtgaacatcgtgatgccgatgaagctcggtaccaactaatggcagggatgtcgatggaagtcgcattgttgttgagtttgctaaaggggtcccacgtggtccaggtggctcacgtgaatatatgggaagaggccctccaccaggcacaggtcgttgtttcaactgtggaa

SEQ ID NO: 57761 - DNA, 276 bp, Zea mays
ccagacatagagaagatccgtcgcctcgttcgccagtccaagtgcctccaggacaagatgactgccaaggagatctcgacttggctggcggtcgtcaagcaggaagaggagctgtacctgaagatgcaccctggcgcacgcccgcggcatccactggtggcatcgccagtgccatatctttcaacaccacctcaagcgtgtacgacgtggacatcgttgatgagtgcaagggggatgaggctggcaaccagaagacagcagtcactgacccaacct

SEQ ID NO: 57762 - DNA, 272 bp, Zea mays
gccctaccgaatctttcgccgccccatcagcccagcagttcttcgctgttcgttgccgttggttccatcggttgatcgaccggcctggagcagagagacagagagagatgggcaagtcctgggcgctcatcagccacctccaaccgtcgccgggccgagcatcaccctgctgtaccctctgtacgcgtcggtgtgcgcgatggagagcccgtccaaggcggacgacgagcagtggctgtcctactggatcatacactccttcgtcaccctcc

SEQ ID NO: 57763 - DNA, 271 bp, Zea mays
caactctttacaaggaattaaggaaagagaagcctatgctaactccagacatcactatcatgtctgttggcactgagataacatatggggaggcaatggttcctgatgatggctgggaagaatatctgaacaataagtggacaggaatattgttgtacttgaaactgtgagcttttctgagctgaagcttcagccagagacagaacagcgcccgcacaaggtcagcttttttgttgataagaagaatgcccaggaagtgataaaatctgtt

SEQ ID NO: 57764 - DNA, 271 bp, Zea mays
cgctgctcccacctctagcccgacaggtgaagccgccgccgctgcagtgtccatagccaccgcaggagactgagatggggggttttgtcaagacccacaagagcaatgcatacttcaagcgtttccaggtgaagttcaagaaaggcgcgctggcaagacagtctccagggccaggataaggctgattaaccaagacaaaaacaagtacaatacacccaaatacagatttgttgtgcgatttaccaacaaggacatcacagcacaaatcata

SEQ ID NO: 57765 - DNA, 274 bp, Zea mays
cggctcgagcggctcgagggaggttacaagtggagggacacaaagaaggcaaaccctaacatccttgtcggagcaatggtggctggccccgacaggcgcgatggctacaaagatgtccgcacgaactacaactacacggagctactctcgcagcgaatgctggtctggttgcagcgctgatctctatatccgatatcaaaaccggacggttcggcatcgataagaacaccatcttctctgcgattcctccgatgttcccaacacccccgccgcc

SEQ ID NO: 57766 - DNA, 276 bp, Zea mays
ctacaccgtctgcggcgccggcagctcatgcctccgacacggatacgccatccacatgtatgctgctaacaagcccatggatggatgctccttgtgcaatgcggacggtgacttcctcattgttccccagcaaggaaggttattatcacaaccgagtgcggaaggctgctggtttcacccggcgagatcgtcgtgatccctcaaggtctccgatttgctgtcgacttgccggatggcccctcgcgtggctatgtctctgagatcttcggcgcccat

SEQ ID NO: 57767 - DNA, 265 bp, Zea mays
tgtgaatgtaggacctaagtaaaaaggagaaagaactgcaggcaaaggaagctgagctaaacaaacgggaaagggagctgaaaagaaaggaggaagctgcagccagagctggtattgtcattgaagataagaattggcaccctttatgcccattcatcatcatgacatttcgaacgagataccaattcacctgcaaaggatgcagtacctggcgttttcttcactattgggattgacagcttgcctcttttggaacatcattgca

SEQ ID NO: 57768 - DNA, 104 bp, Zea mays
tgtcaatacctacaccttgatcaacagggatggaaagcctcaccttgtgaaattccattggaagcctactcgtggtgtgaaatgcttcttcgacaatgaagctg

SEQ ID NO: 57769 - DNA, 269 bp, Zea mays
accgggagtagtcgacgcgccgtcactgaatcctcagatcacggctagccgtaatcatcccactctgctgactcccggcgagcagtgtaacattttccttcagccatgggcaaggagaagactcacatcaacattgtgtcattggacatgtcgtctctggcaagtcgaccaccactggccacctgatctacaagctcggcggtattgacaagcgtgtgattgagaggttcgagaaagaggccgcggagatgaacaagcggtcattcaag

SEQ ID NO: 57770 - DNA, 270 bp, Zea mays
atcattgagggttttgtaatgctcttgcagtcagcagaagacactgcactcgacattgtggatgctcctagtgaacttgctctcttcctagctagggcagtgattgatgaagtattaattccgctcaatttggatgaaacagcattaagcttcggcctttcagcagtggcagccaaactgtccagatggcgcgtgctctactgtcagctcgccattctggtgagcggatactgcggtgctggggcggtggcactggatgggctgtggaag

SEQ ID NO: 57771 - DNA, 273 bp, Zea mays
cacacacacaaccagatctcacccaaatccacccgtcggcacctctgcttcaagatgcagatctttgtgaaaaccctgactggcaagactatcaccctcgaggtggagtcgtctgacaccattgacaacgttaaggccaagtccaggacaaggagggcatccccccagaccagcagcggctcatctttgctggcaaacagcttgaggacgggcgcacgcttgctgactacaacatccagaaggagagcaccctccaccttgtgctccgtctca

SEQ ID NO: 57772 - DNA, 270 bp, Zea mays
catcatcctggagaacaatgagaacaagcctgtcacaaacagccgcgacactcaggagatacgcctcgaacaaggccttcagatgctcaagatattcaaggatcatgtcagcaagacttccatcctcgacgactttgcctctacgagagccgccagaagttgatgcaggataagaggtcgaaacagcagcagctccaaaagcaggtctgggacactaggacccccgtttctgtcaccggtgagcgaccgcaggaacctgctaatgggaag

SEQ ID NO: 57773 - DNA, 268 bp, Zea mays
ggaagactggaagctggacacactgtgtgacctgtatgagaccctggccattacccagagtgtcatctttgtcaacacccgccgcaaggtggactggctcactgacaagatgaggagctcggaccacaccgtttctgcactcatggtgacatggaccagaacactagagacatcatcatgagggagttccggtctggctcctcccgtgtgctcatcaccactgacctgcttgctcgtggtatcgatgttcagcacgtgtccctggtca

SEQ ID NO: 57774 - DNA, 264 bp, Zea mays
gctgaacttcgagaggaactgggtcagatgttcggcattaagggtcagttggacgaccctgatagatcaggctggcagcttgtatttgtcgacagggagaacgatgtgcttctccttggagacgacccgtgggatcatttgtgaatagtgtatggtacatcaagatactttcacctgaggatgtgcataagatgggaaagccaggaaacgatccacgctacctatcttagctacctatcttaaatcgatacatggagctctttc

SEQ ID NO: 57775 - DNA, 266 bp, Zea mays
ttgacattccgccagcagctgaagcccttaatggtgttaagatggagttggttgatgctgcgtttcctcttctgaagggagttgttgctacaactgatgttgtggaagcctgcactggggtcaatgtggccgtcaggttggtggattccctcggaaggagggaatggaaaggaaagatgttatgtcgaaaaatgtttcaatctacaaatcccaagcatctgcccttgaagcccatgcagctcccaactgcaaggttctggtggttg

SEQ ID NO: 57776 - DNA, 263 bp, Zea mays
ctcccacgtcccggttcttgctcccctccccatcggcttcgccgtgttcatggtgcacctggccaccatccccgtcaccggcaccggcatcaacccggccaggagcctgggcgccgccgtcatctacaacaaggcaagccctgggacgaccactggatcttctgggtgggccccctcgtgggcgctgccatcgcggccttctaccaccagtacatcctccgggctggcgccatcaaggccctcggctcctccaggagcaacgc

SEQ ID NO: 57777 - DNA, 263 bp, Zea mays
ggcgaaggagtagcagcagcaggcggcgccgagtagcggctccccacctcgagcttgccaccatggctagaggattgaagaagcatttgaagaggctcaatgcgcccaagcattggatgctggacaagcttggcgagcttttgctcccaagccttcttctggacctcacaagtctagggagtgcctgccactgatcctcatcatcaggtacaggctcaagtatgctcttacataccgtgaggtcatttccatcctgatgcaac

SEQ ID NO: 57778 - DNA, 293 bp, Zea mays
caggcaggcaggtcggcgaggagggcaggaagaccgaagaccgagccgtgcgggggctcgggacgggaacgggacaggaccccaaaatctcagatccttcctgcccgcccgcccgtgcccgtcgacgcgtcgttcttgccggccgcgccccacatccgccctctcctcctccagggggatcggatacgccacaggctgcgcgatggtgctgtgggtcttcggctacggctccctcatctggaaccccggcttcgacttcgacgacaaaatcctcggcttcatcaagggctaca

SEQ ID NO: 57779 - DNA, 292 bp, Zea mays
gacctgggaagaacatgctcaacaagcatatgaattgtttgacaaggagggcaaccgaccaattgtgattgaagaacttgcatcggaacttggacttggcccttcgatctcatttcatgttgttctcaaagattggatcagacattcagatggacacccaggaagttgagttgccccttgaccaggaggaatccacctaccgtctggacgaaaaacgatcccatccatggggcagcgcaggtgtaccgaatctttggcacagcgatcagggatctatttcgcaaatgaacgg

SEQ ID NO: 57780 - DNA, 294 bp, Zea mays
cagggcctctcagacgggccgggacctcatgctcatggccaggccgtactggaacatcgagttcgtgcctccccgtcccgagagcgcgtgtcgggtgatggcggatggacagccttgtgtcgacacccatgctcaggttctcgcgtactattccctcgctggaaggaggccggactgtccgcggtggctggttactttgcatcccgcgtgactgtagatacggcaaggtgtccgagtgtggttactgttactaccagctgcttgtgtaccgtaatgaactgtagtgccgacgta

SEQ ID NO: 57781 - DNA, 150 bp, Zea mays
tgcattctgggttgtaggaatggactatggcgagtggactgagaatagccgtgggacttacaacaagtgggatggtgtttctcgttgcacgactcaggtgtttccgggagcatggactgctgtgatgctgtcacttgacagcccaggatt

SEQ ID NO: 57782 - DNA, 138 bp, Zea mays
gtctggagactgctggaggagttatgacagtgctgatcccgaggaacaccaccatccccaccaagaaggagcaggtattctccacctactcggacaaccagcccggtgtcctgatccaggtctacgagggtgagagga

SEQ ID NO: 57783 - DNA, 285 bp, Zea mays
atttgttcttacacatctggacaacaggcagcttctcatcaaatcagaccctggtgaagttgttaaacctgaccaattcaaggcgattaatgatgaggggatgccaatttaccagaggcctttcatgaaggggaagctgtacatccatttcacggtggagttctatgactcgttggcaccagagcagtgcaaggctctcgagacagtacttccaccaaggccttcatccaagctgacagacatggagatagatgaatgcgaggagacgactatgcatgatgtgaa

SEQ ID NO: 57784 - DNA, 267 bp, Zea mays
gcaaccgaaccttacatagttgctcataattttctcttggcacatgctactgcagttgcaagataccgtacgaaatatcaggctgctcagaagggtaaggtcggaatagtcctggacttcaactggtacgaggctcttacaaactcacctgatgaccaagcagcagcccaaagagccagggacttccacattggctggtttgttgatccattgataaacggacactatccacagataatgcaagatctcgtgaaggagaggctgccc

SEQ ID NO: 57785 - DNA, 284 bp, Zea mays
aggagatgaaccacggcaacatcgtcaggttacatgatgttgtccacagcgagaaccggatatacctcgtcttcgagtacctggatctggacctcaagaagttcatggactcttgcacggcatttgctaagaatcccactttgattaagtcatacctctaccagatactccgtggtgttgcgtactgccattctcatagagtccttcaccgagatttgagacctcagaacttgttgatagatcggcgtattatgcactgaagcttgcagactttggtttagcca

SEQ ID NO: 57786 - DNA, 205 bp, Zea mays
caacatcaagctctatgtgcgcagggtgtttatcatggacaactgtgaggaactgatccctgagtggctgagttttgttaagggtattgttgactctgaggaccttcccctcaatatctcccgtgagactcttcagcagaacaagatcctgaaggtgatccggaagaaccttgtgaagaagtgtgttgagctcttctttgagatt

SEQ ID NO: 57787 - DNA, 144 bp, Zea mays
tgaccaattcacccctctgggccgaatgctttacaaggcaccatctgacgggaaataggagtagcatgagcttgactacctgctgttcatcgtccgggacgtgaaggtgcagccgaacccagatgaagtcgctgacgtgaagta

SEQ ID NO: 57788 - DNA, 136 bp, Zea mays
gcaaaacaacatcaagctctatgtgcgcagggtgttcatcatggacaactgcgaagagctgatccctgagtggctgagcttcgttaagggtattgttgactctgaggaccttcccctcaatatctctcgtgagact

SEQ ID NO: 57789 - DNA, 275 bp, Zea mays
aacagatcctagatcttctgctagctgagacgcaaccagcgaagatctgttctcaggttggcctgtgcacttttgatggcactcacggtgttagcactggaattcgtagcgtagtggatgacaaagctgggaaatcaaatggtggtctcaagagtgatccaatgtgcaatgcctgtgagatggctgtggtatggatgcagaacaaactggcccagaacaagacacaggagctcatcctgacctacattaatcagctttgtgagcgtcttccttct

SEQ ID NO: 57790 - DNA, 273 bp, Zea mays
cccaatctcgcgaggggcgccgcagcagcggcaggttcgtcgccgtcgcctccatgacgtccgccgtctccaacaaggtcgagaataagaagccatttgctcctccaagggaggtacatgtccaggttacacattcaatgccacctcacaatcttgaaattttcaagtcgcttgatgattgggctagagataatatcttgacgcatctcaagccagtcgagaagtgttggcagcacaggatttctcccggaccagcatcgaaggattcagatg

SEQ ID NO: 57791 - DNA, 176 bp, Zea mays
cttacctggaggcagcgtttggatatctgcattggtgcagctcgtgggcttcactaccttcacactggtgcaaagcacaccatcatccaccgggatgtgaagacaacaaacatccttctggatgagaaatgggttgccaaggttcagattttggtctgtccaagactggcccatct

SEQ ID NO: 57792 - DNA, 282 bp, Zea mays
  unsure (1)..(282): unsure at all n locations
ctgttattactcctttgtttgaaaagatgctaagtgctagtgatgctgggcggattggtcgtttagttttgccaaagaagtgtgctgagacatacttccctccaatctcncaacctgaagggctccctttaaaggttcaggatgccagtggtaaagaatggatattccaattccgtttctggccaaataataatagcaggatgtatgtattggagggtgtcacaccttgcattcagtcaatgcagttacaagcaggcgacacagtaacctttagtcgaatag

SEQ ID NO: 57793 - DNA, 275 bp, Zea mays
atgacaagtcagtcaaggatctcgtgatgctgctgttcgagactgctctcctgacctccggcttcagcctggatgaccccaacaccttcggcaaccggatccaccgcatgctcaaactcggtctgagcatcgatgaggacgagcctgttgacgcagaggctgagatgcctcagcttgaggacgacgctggtgaaagcaagatggaggaggtcgactaagtgtcgcatcgcatgcttgccgtttatcttatccctagctaagctacctgtgatagc

SEQ ID NO: 57794 - DNA, 285 bp, Zea mays
ctagcctccagctcatgggaaagggttgctgaggagaagactttaattacccctgtgcagtgcaaaaatttgtggaggcaattcaaagctgaaactgaatatacagtcactcaagccatagctgctcaggaagcaaataagaggaacaacaacttgctcccacctccatgggcacttgctgcaatggctatccttggattcaacgagtttatgacattactgaggaatccgctttacctgtttgccaatattgtgatttatcttgttggaaaagcctttgggtgc

SEQ ID NO: 57795 - DNA, 282 bp, Zea mays
gcaaaacaacatcaagctctatgtgcgcagggtgctcatcatggacaactgcgaagagctgatccctgagtggctgagcttcgttaagggtattgttgactctgaggaccttcccctcaatatctactctgagactcttcagcagaacaagatcctaatagtgatcaggaagaaccttgtgaagaagtgtgttgagctcttctttgagattgctgagaacaaggaggactacaacaagttttacgaggctttctccaagaacctcaagcttggcatccacga

SEQ ID NO: 57796 - DNA, 281 bp, Zea mays
cagaaggagaacaacttcaagcaggctggcgagagatatcgttccttcgaccctgcaaggcaagaccggttcatccagcgatgggttgacgcactgacagaccctcgcgtgacccatgaacaccgtaccatttggatctcctactggtcccagtgcgacgccgctcttggccagaagctggcttctaggctgaacctgaagccgagcatgtaagatcgacgaggaagaaagcaggcaccggtggccaaggatgcaacgcaacatggagcgtgtgatgttta

SEQ ID NO: 57797 - DNA, 268 bp, Zea mays
  unsure (1)..(268): unsure at all n locations
ttcaacagatgcttcatcagcagctgctcaggtgnagactatatatgtgaagaacctacctgaaaatgtttctaaagagaagataaaggacctgtttgacaaacatggagaggtcacaaaaatcgttctgcctcctgccaaggctggccataagagagactttggctttgttcactttgcagaaagatcaagtgcattgaaggcagttaaaagaagtgagaaatatgaaatcgatggtcaagtactggaagtgtccatggccaaacca

SEQ ID NO: 57798 - DNA, 285 bp, Zea mays
ccgctcctccgcaaccccttcccctcctccgccgaagcctctcctccggccgccgaaaccctagcctccgccgctgccgtcatggcaagcagcaacgtctcgaccgtttacatctctgtcattgatgacgtcatctccaaggtccgcgaggatttcatcacctactgagtcggtgacgccgtcctaaacgagctctcaggctctctgggagatgaaaatgctacactgtggcgcgatctcggggaacatagaccgaaccaaggctgctgccgcgtccgtcggagg

SEQ ID NO: 57799 - DNA, 275 bp, Zea mays
atctcatcctccagcgcatatgatggttatctggaccattgcagggttgctggtgactccacgaacaccgctattttccagaaggtcatctcatcctccagcgcatatgatgatcagttcaagcagctcatttcgggcggaaatgacgcggagagtgcttactgcgaacttgttatacaggatatccaagacgcgtgcagtctttttgagcctatctacgatgagaccgatggggctgatgggtatgtctccgtggaggtgtctcctaggttggc

SEQ ID NO: 57800 - DNA, 147 bp, Zea mays
gattaagagagtcggcgatgggacttttgggagtgtatggcgtgctatgaataaacagaatggcgaagttattgctgttaagaaaatgaagacgaaatattattcatatgaggaatgtatgagtctacgtgaagtacagtctttgcg

SEQ ID NO: 57801 - DNA, 280 bp, Zea mays
attagttcttacacatctggactacaagcagcttctcatcaaatcaggctctggtgaagttgttagacctgatcaattcaatgcgagtcatgctgacgggtttccaatttaccagaggcctttcatgaaggggaagctgtacatccatttcacggtggagttccctgactcgttggcaccagagcagtgcaaggctctcgagacagtacttccaccaaggccttcatccaagctgacagacatggagatagatgaatgcgaggagacgactatgcatgat

SEQ ID NO: 57802 - DNA, 281 bp, Zea mays
ggagctcaacatggacctgttcaggaagtgcatggagcctgttgagaagtgcctgacggatgccaagatggacaagagcaccgtccatgacgttgtacttgttggtggctccattcggatccccagggtgcagcaactgctccaggacttcttcaacggcatgtagctgtgcaagaacatcaaccccgttgaggctgtcgcctatggtgctgctgtccaggctgccatcctgagcggtgagggcttcctgaaggtgcaggacctgcttctgctggacgtca

SEQ ID NO: 57803 - DNA, 282 bp, Zea mays
tacacatctatgtgcaaggaaataaggcagaattcatccagcatgctgaagcagaggtgtccaaacttagaaatgcagcatatggagttgttatgttgaacactattggctatgtatattcaaggcaagctgcaaaagaacttggaaagaaagtgagtattttgtctgttccatttattgccgaatggtttagggacaaaggacattttatcaaatcccaagtaacagctgccacagatgcaatagctcttatgcagttgcaagataacttgacgaagtata

SEQ ID NO: 57804 - DNA, 257 bp, Zea mays
tgagattggcgacattgatctgtttgaactgaatgaggccttcgcctctcagtttgtctattgctgcaacaagttggggctggaccgttctaaagtaaatgtaaatggaggcgcgattgcccttggacaccctctgggtgcaacaggtgcccggtttgtggctactcttctaaatgcgtagaagcgccggggcagagactgcagatttggtgttgtcaccatgtgtatcggatctggactggggccacagctgtgtt

SEQ ID NO: 57805 - DNA, 149 bp, Zea mays
ggggacgatgcaccaagggcggttttccctagcattgttggccgtcctcgccacactggtgtcatggtatggatgggacagaaggatgcatatgttggcgatgaggcacagtccaagagcggtattctcacgctcaagtacccgattga

SEQ ID NO: 57806 - DNA, 274 bp, Zea mays
cgcaagcgcaccgcacacctcaccgccgctcccttctcgtctcgtctcctctcctctcctcggacgcatccggcaccgacccaccgcccctcttctcgttccttccgccggaatcgctgctcctctctgtgtgctgtcgatttgcgcggcgactcttagtttagttcggtcccatccttctgttgatcaatggctgacggtgaggatatccagccacttgtgtgtgacaatggcactggaatggtcaaggctgactttgctggtgatgatgcgc

SEQ ID NO: 57807 - DNA, 279 bp, Zea mays
aaacgatgaagcagatgcattttggtgctttgagaaattgatgcgtagattgcgaggaaatttcagatgcacagatcaatctgtgggagttgccaaccaacttcaacaccttgcgtctattattcaggttcttgaccccaagctacatgaccacctagaaatccttggtggaggtgactacctttttgcgttccgtatgttcatggtgctttttaggcgtgaagtatcatttggagactccttatacctctggagatgatgtgggctctggaatacgac

SEQ ID NO: 57808 - DNA, 284 bp, Zea mays
gcaaccgacacttacatagttgctcataattgtctcttggcacatgctactgcagttgcgagataccgtacgagatatcaggctgctcagaagggtaaggtcggaatagtcctggacttcaactggtacgaggctcttacaaactcacctgatgcccaagcagcagcccaaagagccagggacttccacattggctggtttgttgatccattgataaacggacactatccacagataatgcaagatctcgtgaaggagaggctgcccaggttcactcctgcgca

SEQ ID NO: 57809 - DNA, 274 bp, Zea mays
ggcagcctcagcagtcagcaccggcacacagcccgccgtacctctcctcgtacgctccctcccggtgtgtcgtcgcccgctcgatcggtccatcgttcgtcggctcggtagccgccggatacggatcggccggcgccatgtccaaggccaggtgctacaccgatgtcaacgtgctgcgccccaaggagtagctctgactacgatgcgctcaccgttcaatggggtgagcaggataactatggagttgttaggatacttgggagagggtaataca

SEQ ID NO: 57810 - DNA, 272 bp, Zea mays
  unsure (1)..(272): unsure at all n locations
gcaggccggcgcacctgttcctgttccgagctgggcgtgggctacgacgaggccgaggactacgtggtggtcaagcacgcggcgctgttcacgtccaccgtgatgagccggctcctggcgccccncaacgtgaagctgttcaacgccgtggccctggacgacctgatcgtgcggcgtgggcgcgtcggcggcgtggtcaccaactgggcgctcgtgtccatgaaccacgacacgcagtcgtgcatggaccccaccgtgatggaggccaaggt

SEQ ID NO: 57811 - DNA, 280 bp, Zea mays
gtcagcaaatggcgtggagattcagagaagcttgtcaaagttctgtttgagcttgctaggcatcatgcaccatccacaatattccttgatgaaatagatgctatcatcagccagcgtggtgaagctcgcagtgagcatgaagctagtcgtcgcttgaagactgagctacttatcccgatggatggtttgacaaagacaaacgacttggtatttgtacttgcagctacaaatcttccctgggaattggatgcagccatgctccgccggcttgagaagcgga

SEQ ID NO: 57812 - DNA, 146 bp, Zea mays
tcatctttgctgggaagcagcttcaggacaggagcacgcttgccgactacaacattcagtaaggagagcagcctacagttggtggtgcgctctcaggggtggcattcagatctttgtgaatacgctgatcggctagactatcatcc

SEQ ID NO: 57813 - DNA, 274 bp, Zea mays
ttcaacagatgcttcatcagcagctgctcagcgtgcagactatatatgtgaagaacctacctgaaaatgtttctagagagaagatataggacctgtttgacaaacatggagaggtcacaaaaatcgtgctgcctcctgccaaggctggtcataagagagactgtggcttatgttcactttgcagaaaggtcaagtgcattgaaggcagttaaaggaagtgaaagatatgaaatcgatggtcaagtactggacatgtccatggccaaaccattgg

SEQ ID NO: 57814 - DNA, 280 bp, Zea mays
aatccttctacgtcggcaaagaccacgttggggatgtccctttgtccaagaagatagccgccggcttctcaactggtgccatcgctatcagcatcgccaaccctactgaccttgtcaaggtcaggctccaggccgagggcaagcttgcgcctggtgtgccacgttgctacactggcgcaatggatgcttattccaagattgctagacaggaaggggttgccgctctgtggactggccttggaccaaatgtagcgcggaatgctatcatcaatgctgctga

SEQ ID NO: 57815 - DNA, 280 bp, Zea mays
tgcaagccaaaatcaacgaaaccaaggatctcatgaagaagagggctaatgaacttgacaaaatgaggatggaaagaggcaagcttgacaaaggaggatactcatcaatatctggtccacgcgtgattgaaaaaacgtttagtgacatgagcatcagcggttctggatttggtagtggttctggattagtcggactgagcactgatatggactcatttgccagcaagcccaaaggtcgtccatctacagcagctactgcacctggtaaaggttttggtat

SEQ ID NO: 57816 - DNA, 283 bp, Zea mays
gcagagtttgagagagtacttgccaagcaagcaaccacccaattgtctgcgaagtgatcgaatcagactacaggaaggtggtaggtgttttctatttgacacaaagtgatctcatcttatcacttcaagaaaatcgaagaccataaccggcactctgaggcaccgaagtgcccgtctgaagactgcaactttgtggaggctctgcccaggccatctttttgagttgagctaacagaaccgagggttcttctcgacgctcgtgcacctaggtaacccctgtaaa

SEQ ID NO: 57817 - DNA, 260 bp, Zea mays
ctcgagccgtgctaatgcaaccacagcagataaattttagcatagtggactgccaccagcaaaaccaccaatattccaaataggtgttttgaggacaaactgtatagattgtctggatcgtccatatgttgctcagtatgcacattgttcagatcatcttggacatcaattgcatgcgctctggttctatagaatctccagaactaggtttagaagctcccttggcgcatcatgtgatgcacttttatgagatgatgggt

SEQ ID NO: 57818 - DNA, 277 bp, Zea mays
tgcttcgcaaaaaacttcaggacattaagaatgagcataaactgattcaagctgagggagttgaatctctcactgaagaagagctccggcaagcctgccgggaacgtggtcatgcaggcctgctgtcaactgaagagatgtgccagcagctccgagactggtcggccctatcacttaatcatgctgtgccatcttcacttctcatactttcaagagcctttactgtgtctgggagaatgaagccagaggaggctgttgtagcaacactatcttcttt

SEQ ID NO: 57819 - DNA, 279 bp, Zea mays
cggctcgagcggctcgagggaggttacaagtggagggacacaaagaaggcaaaccctatcatccttgtcggagcaatggtggctggccccgacaggcgcgatggctacaaagatgtccgcacgaactacaactacacggagcctactctcgcagcgagcgctagtctggttgcagcgctgatctctagatccgatatcaaaaccggacggttcggcatcgataaggacaccatcttctctgcgattcctccgatgttcccaacacccccgccgccgcca

SEQ ID NO: 57820 - DNA, 286 bp, Zea mays
gtttgacagtcacgttgtgaaggagcgtgagggaaagcggcctattttaactggtgatctacaagtcacactaaaagaaggtgtggggacagttggggagcttacattcacagataactctagctggataaggagtaggaaattcagacttggctcctaagattgcctcaggattttgtgagggtgttcgcattcgtgaggcaaaaacagaagcctttatggttaaggaccatagaggagaattgtacaagaagcactatccacctacactgaaagatgaggtctg

SEQ ID NO: 57821 - DNA, 282 bp, Zea mays
ctctagggtttttgattttagccgccgccgtctgctcatctcacatccctcgagaagacgcctgctcctcgccgatcgatacgatggccgtcttctccgacctccacaccgccgacggcctcaagtccctcgaggctcacctcgccggcaaaacctatgtgtctggtgactccattactaaggatgacattaaggtcttcgccgcggtgccgtcgaagcctggcgctgagtttcctaatgccgcccgctggtacgagaccgtctctgcggctgtagcctcaa

SEQ ID NO: 57822 - DNA, 267 bp, Zea mays
gccggagacagttcatcgagttgttcagcatcacaacaagatgaaccaacgcatgccacttatttatgtgaagctgtatatgtaccagatatgtagggcattggcttacattcatggcactattggtgtctgccacagagatattaagccacaaaaccttctggtgaacccacacacccaccagcttaaactatgtgactttggcagtgcaaaagttctggtcaagggggaaccaaacatatcgtacatctgctcccgatactatga

SEQ ID NO: 57823 - DNA, 275 bp, Zea mays
gtcgtctcagggaaagttgctactggtatgcaggttcggatcatgggtcccaactatgtccccgggcagaagaaggatctgtatgtcaagagtgtccagcgtactgttatctggattggagagaagccagagtcggttgaggatgttccgtgtggtaaactgatgctatggttgctctggatcagttcatcacgaagaatgctacactcactaatgagaaggagactgacgcttgcccaatcagagcaatgaagttctccgtctctcctgttgtg

SEQ ID NO: 57824 - DNA, 275 bp, Zea mays
gaaaagcttcatgctgagtgggcagcagccaagttatcttgcaagaagcgcctggccaaacatgtgttggatgtgacaggtgttacgattgatccaaatagcctttttgatatacagattaagcgcatacatgagtacaagatacagctcctaaacatattgggagctgtttacagatacaaaaaattaaagggaatgagtgcagaagagaagcagaaggtcacaccgcgcactgtcatgataggagggaaagcgtttgcaacatacactaatgc

SEQ ID NO: 57825 - DNA, 266 bp, Zea mays
ggcacttcaggaggctcttccgggtgacaatgttggcttcaacgtgaagaatgttgctgtcaaggacctcaagcgtgggtttgtggcctccaactccaaggatgaccctgccaaggaggctgccagcttcacctcccaggtcatcatcatgaaccaccctgggcagattaggcacggctatgcccctgtgctggactgccacacctcccacatcgctgtcaagtttgctgagctcattaccaagatcgacaggcgctctggcaagg

SEQ ID NO: 57826 - DNA, 272 bp, Zea mays
atgatacttgtcacgacaagataccgaccaatagtctgcgaagtgatcgaatcagactacaggaaggtggtaagtgttttctatttgacacaaagtgatctcatcttatcacttcaagaaaatcgaagaccataaccggcactctgatgcaccgaagtgcccgtctgaagactgcaactttgtggaggctctgcccaggccatctttttgagttgagctatcagaaccgagggttcttctcgacgctcgtgcacctaggtaacccctgtaaa

SEQ ID NO: 57827 - DNA, 284 bp, Zea mays
gcggctgtgctcgcgctcctcaccggatgcgcttctgcggcgagcccgggcgctggttccttcgacccatcccgcgtggttcaactctcttggcgccccagggcgttcttgcacaagggtttcctgttggatgcggagtgcgaccacctcatcgcgctggccaaggacaagctggagaagtctatggtggcggacaacaagtccggtaagagtgtccacagtgaggtgcgcaccagttccggcatgttcctcgagaagaagcaggatgaagtagtaacgaggat

SEQ ID NO: 57828 - DNA, 275 bp, Zea mays
gctggatatccaggagccgcttcccttggtgacatgatctgtggaatggcagtggctaagatcacgtccaaggacattcttttctggttcaggtcacatacagctgctgaaatcaagtggggaggtgcaaagcatgatccatctgatgaggatgacagcagaaggatgcaccctaggctgtcctttaaggctttcctcgaggttgtcaagatgaagagtttgccatggagtgactacgagatggatgctattcactcgttgcaacttattcttag

SEQ ID NO: 57829 - DNA, 244 bp, Zea mays
aaaagagctatttgtcagctccccaccatgcagaattagttgaacgcaaatggggtggaagcacacactctactgtagaagaagcaaaaagtaagattaagaatattctaagagaatatattgagaatgaagacatagatgaagcctttaggtgtataagagagctcagccttccatttttccatcatgaggttgtgaagcgtgctctcacctttggtatagagaacgtatcctcgcaaccatc

SEQ ID NO: 57830 - DNA, 276 bp, Zea mays
gttctcagatacattgcagggacagtaaaccatggacttgtgtacaacaagatgggtgaagaactaagtctgactgggtacagtgacagcgaccatggtggagatgcaaatgacgggaagagcactacaggtgtgatatttttcctcaacgaatgtcctgtcacttggcaatcacaaaagcagcgagtagttgctctatcatcttgtgaggcagagtatatagcaggagcagtcggtgcttgccagggaggttggcttaaacgtttgttggccgac

SEQ ID NO: 57831 - DNA, 274 bp, Zea mays
ctacattattgagggcagagtatgttatctgactatgtgtgaccgctcttatccgaagaaacttgcattccagtacctagaagatctgaaaaatgaatttgagagggtcaatggcaaccaaattgaaactgctgcaaggccatatgcttttatcaagtttgatacattcatccagaagactaggaaactgtatttggatacaagaactcaaagaaacctcgcaaaactgaatgatgaactctatgaggtgcatcaaattatgactcgcaatgtt

SEQ ID NO: 57832 - DNA, 275 bp, Zea mays
cgtgccccgccggctctccagcgcgccgtctctgcccagatccaggagatatgcctcgctatgatgatcgctatggaggcacgcgcttgtatgttggcagattggccccccgtactcgttctcgtgatttagaatatctcttcggcaaatatggaagaatacgagaagtggagttgaagcgcgactatgcatttattgagttcagtgaacatcgtgatgccgatgaagctcggtaccaactagatggcagggatgtcgatggaagtcgcattgtt

SEQ ID NO: 57833 - DNA, 270 bp, Zea mays
gtactaatggagtctaagggtggcaaaaagtctagcagtagtcgttctatgatgtatgaagctccccttggctacagcattgaggacgttcgacctgccggaggcgtgaagaagttccagtctgctgcttactccaactgcgcgaagaagccatcctgatatcccttttggcttcctcattctagtagtttaggatttcttttctgacactttgattctgaccaatctctctggcctgctgcttcctgataatcgaccagttccccagtc

SEQ ID NO: 57834 - DNA, 276 bp, Zea mays
ttcttgattacgatggcacacttgtgccccagtcatcaatcaacaaagctccaagtgaagaagtcatttccgttcttaacaccttatgtaatgatccaaagaacattgtgtttatagtaagtggacgaggacgtgattcccttgatgagtggttttctccgtgtgagaagcttggtctagcggcagaacatggctattttatcagatggagcaaggaagccgcatgggagtcaagctattcaaggccgcagcaagaatggaagcacattgccgaac

SEQ ID NO: 57835 - DNA, 143 bp, Zea mays
ctgacaccatcgacaacgtcaacgccaagatccaggacaaggaccgcatccctccggaccagcagcggctcatctttgctggcaagcagctcgaggatgggcgcacgctggccgactacaacatccagaaggagagcactctc

SEQ ID NO: 57836 - DNA, 266 bp, Zea mays
cggcagggtggccggtaacaaggacctgtacttgggcactttcagtactcaggaacaggcggcggaggcgtacgacatcgctgcgatcaagttccgcgggctctacgccgtctccaacttcgacatgagccgctacgacgtggagagcatcctcagcagcgagctccccgtcgggggcggagcacgctggcgcgccggcaagttcccgttggactcgctgcagccggggagcgctgctgcgatgatgctcgccggggctgctgccg

SEQ ID NO: 57837 - DNA, 273 bp, Zea mays
atcgatggttcctcgtactacattgctgatggaatcgctggtcgcaaggcaagtgtgttgaattgcaaccatccagtgactcagaagctgattttggacagcctccgccattgggtgctcgacttccatgttgatgggttctgcttcatcaatgctcctttactcgtcagaggtccacgtggtgagggcctctcacggcctccacttctggaagccatagcatttgatcctgttctttcaaagactaagatcattgcagatccttggtctccg

SEQ ID NO: 57838 - DNA, 267 bp, Zea mays
gatgcgtatcatcaacgagcccactgctgctgctattgcctacggtcttgacaagaaggccaccagctccggcgagaagaacgtgctcatcttcgaccttggtggtggcacgtttgatgtgtcgctcctcaccatcgaggagggcatcttcgaggtgaaggccactgcgggcgacactcaccttggcggcgaggacttcgacaatcgcatggtgaaccacttcgtccaagagttcaagcgcaagaataagaaggacataagcggcaa

SEQ ID NO: 57839 - DNA, 266 bp, Zea mays
tgatgaacctgggattctcccaccctgtacggatggccattcctggaagcctggcggtcaaggtggaggagaacacaaggatcaccgtgagcggctatgacaatagcgcgatcggtcagtgtgctgctaccataacgaagtggaggccacctgagccatacaggggcaagggtgtcagatatatggatgaagttgtcctgcagaagggaggaaaagccggaaagatgacatggcgtgtgtcatggcgcgctctccttacttcattt

SEQ ID NO: 57840 - DNA, 268 bp, Zea mays
ttcctgttggcgacgctctcgccaggtcttcggcggcccgttcggcggcgactagcgcctccgtttgccaggtcttcgtcgtccgtttcgccgtcgactggtgcccagcagccaggtacatctggaagaatgggggtttaccttagcacacctccaactgacaaggtatccgaagatggggaaaacgataaacttaaattcggactttcatctatgcaagggtggcgtgcaactatggaagacgctcactcggctttgctagatcttg

SEQ ID NO: 57841 - DNA, 271 bp, Zea mays
gagaacgcgctgaagagagccgaagaattaatccatgttggtcaaaagcagtcagccctgcaggctttacatgatctcattacctcgaaaaggtacaggtcatggcagaagcctctcgaaaagatcatgatgaagtatgtagaactctgtgttgacctgaggaaacgcagatttgcaaaagatggtcttattcagtataggattgtctgccagcaagtaaacgtgtcatccttggaggatgtcataaagcacttcatgcagctttcaaatg

SEQ ID NO: 57842 - DNA, 265 bp, Zea mays
accagggcccacctccctacaagaagccccatgaccttaagaaggcctggaaggtgagcgtgctcaccgctgtcatcaagcacatgtcaccagacatagagaagatccgacgcctcgttcgccagtccaagtgcctccaggacaagatgactgccaaggagatctcgacctggctggcggtcgtcaagcaggaagaggagctgtacctgaagatgcaccctggcgcacgcccgccggcatccactggtggcatcgcagtgccata

SEQ ID NO: 57843 - DNA, 264 bp, Zea mays
cagaagggtaaggtcggaatagtcctggacttcaactggtacgaggctcttacaaactcacctgatgaccaagcagcagcccaaagagccagggacttccacattggctggtttgttgatccattgataaacggacactatccacagataatgcaagatctcgtgaaggagaggctgcccaggttcactcctgagcaggctaaactggtgaagggctcggcagactacatcggtatcaacgagtacacatccagctacatgaag

SEQ ID NO: 57844 - DNA, 268 bp, Zea mays
ctaaagcaaggtggagtcccactggtagcatgttgcattgctgctgcagaacaatccagtgtgcctatcagtgtccactatgaccacggcatttccaagtcagacttgcttcaagctcttgaagcgggatttgattcagtcatggtggatggttctcatctaactttaggggataacatcttatacacaaagagcgtatcttccttggctcatgcaaaaggtttacttgtggaagctgagttgggtaggctctcaggctctgaagatg

SEQ ID NO: 57845 - DNA, 273 bp, Zea mays
caaccgtcaagttccagctcaagaaggtgtgcatgcttggtgatgcccagcatgttgaggaggccgagaagatgggacttgactacatggatgttgaggctctcaagaaaatgaacaagaacaagaagcttgttaagaggcttgccaagaagtaccatgctttcttggcatcagaggccatcatcaagcagattccccgtctccttggtcctggtctcaacaaggcaggcaagttcccgaccctggttactcaccaggaatccctcgaatcca

SEQ ID NO: 57846 - DNA, 272 bp, Zea mays
  unsure (1)..(272): unsure at all n locations
atccgaagctaccgcaagaacacgnagtctaccacccagctgaagggcagcaaggaggatgctgaggccaagcaggaccaggggttcctgtacgtcaaggtcagcatggatggcgcgccgtacctcaggaagattgacctcaagacttacaagaactacaaggacctgtcgactgcgcttgagaagatgttcagtggcttcagtactggcaaggatggcttatctgagtaccgcaaggatggtgaatatgttctgacttacgaggacaagga

SEQ ID NO: 57847 - DNA, 274 bp, Zea mays
  unsure (1)..(274): unsure at all n locations
gtgcaaggttgcctctgaccttcccaagctagtcgaaggtttgaagtgtctagcaaagtccgatcctatggttctgtgtacaatggaagaatctggtgagcatatcattgctggagctggtgagcttcatcttgagatttgcctgaaggatctgaaagaggacttcatgggtggtgctgaaattattgtttcccctcccgtcgtctccttccgtgaaaggttcttgagaagtcctgccgtactgcagnagcaagtctcccaacaagcacaaccg

SEQ ID NO: 57848 - DNA, 278 bp, Zea mays
ggacagtggaagcctcataatcttaacaggacaagacggcgagaagcctcaacctataggaattatatagggtggtacagctaaccggggaaggttgaaacttaaaagtggccagggtccggagaactggacaagtggagttgatcttggccgccttcttgatctcttggagctagatctgatcacaacaagtgaagggctacaagctgaccttggaagaacaaaggattactctagctgtcgctgcggctgcagccacataattcaactgccacaga

SEQ ID NO: 57849 - DNA, 210 bp, Zea mays
tcgacgacaaaatcctcggcttcatcaagggctacaagcgcacctttaatctcgcttgcattgaccacagaggcacaccggagcatccggcgaggacctgcacgcttgaaaccgacgacgaggccatatgctggggaattgcatattgtgtcaagggtggtccagaaaaagggctaaacgcaatacagtacttggagagaagagagtgtg

SEQ ID NO: 57850 - DNA, 274 bp, Zea mays
ctgctcttggaggagttcgtccatcagcttgtttgcctatcacaatcgatgttggcacaaataatgagaaactgcttaatgatgagttttacattggactccggcaaaaacgtgcaactggcgaggagtatcatgagcttatggaagagttcatggctgctgttaagcaaatctacggcgagaaagtcctcattcagtttgaggacttcgcgaatcataatgcttttactttgcttgcaaaatatagcaagagccatcttgttttcaatgatga

SEQ ID NO: 57851 - DNA, 266 bp, Zea mays
agcaagacctggacagaagtggcactccttctacgccactgagtacccagagcaaccaatggttaaccttgagatgtgcatgactggtctggacaagaagaaagcttgtgtctttttcaagactaatgctgatgggaacacaacatgtgccaaggagtatgtaaacctctctggcatctctgaaatcatccccgagatggagatctgcgattttgacttcgaaccctgtggctactccatgaatgcgatccatggctctgcattct

SEQ ID NO: 57852 - DNA, 267 bp, Zea mays
aacaatcctaatcagcagttgcttttggccagcgcgtcttttgattcaactatcaagctttgggaagtcgagcaaggatgccttctgtacagcttgtctggtcataggcaaccagtgtattctgttgcatttagccccgacggcgaatacttagcgagcgggtccctggatcagtgcctacacatctggtctgtgaaagaaggcaggatcctgaagacgtacagaggtactgggggcatattcgaagtgtgctggaacaaagaaggc

SEQ ID NO: 57853 - DNA, 273 bp, Zea mays
agcagctctagggagttatggggcttatcttgctgatggctctgagtacagtggggattatggtgaagctggtacgaaagagttcctgaaggactttcatcggcggaggcttcaggttcttgctgaagcaggcccggatttgattgcttttgaaacgatccccaacaaattggaagctcaggcatatgttgaactccttgaggaatgtaacatcaatatcccttcatggctttccttcaactcaaaagatggagtgcatgttgtgagtggtga

SEQ ID NO: 57854 - DNA, 259 bp, Zea mays
ccctttgcccgcctcccctcccctccgctcctgtggctccataccccaccccctcgcaggagcggcgcggcggcggcggcggcaaagccaaaggcaagatgttcgggcgcgcgccgaagaagagcgacaacaccaagtactacgagatcctcggggtgcccaagtcggcgtcccaggacgacctcaagtaggcctaccgcatagcagctatccaggaccaccccgacaaaggcgggtgactcccagaaattcaaggagc

SEQ ID NO: 57855 - DNA, 264 bp, Zea mays
gaggtctccggtccgggttcatttcagtaaatctatccatcaagttgtaggagacacaaatcaagctgtaaaatatgcagttttgcatctccgttttgataaggatatggctgcacattctgcatgtgactttggaggtggcagagctgaacagctagataaattaaagtacaggcaagttatatggcaaggaagggtattaaattcacagctaactgatgaggagcttcggaacacaggacgctgcccattgacccagaagag

SEQ ID NO: 57856 - DNA, 267 bp, Zea mays
aagaccctgaccggcaagactatcaccctcgaggtggagtcttcagacaccatcgacaacgtcaaggccaagatccaggacaaggagggcattcccccagaccagcagcggctcatctttgctggaaagcagcttgaggacgggcgcacgcttgccgactacaacatccagaaggagagcaccctccacttggtgctgcgcctcaggggaggcctgcagatcttcgtgaagaccctgaccggcaagactatcaccctcgaggtggag

SEQ ID NO: 57857 - DNA, 188 bp, Zea mays
cgggagcagtcgacgcgccgtcactgaatcctcagatcacggctagccgtaaggacacgccactctgctgactcccggcgagcagtgtaacattttccttcagccatgggcaaggagaagactcatatcaacattgtggtcattggacatgtcgactctggcaagtcgaccaccactggccacctgat

SEQ ID NO: 57858 - DNA, 267 bp, Zea mays
cctctgtcatattttatatggtacaggccactctaccgtgcaatgaggactaactattgctttcagttttggatggtttttcctgtgttacctgatccacattggtttttgcataattgctgccattgctccaccaattgtatttcatgggaaatcattaactggtattctggctgcgattgatcactttctctgaacatgtgataattgggatcttttactttgtggggtttgcactgttttgtctggagacactgctgagcattg

SEQ ID NO: 57859 - DNA, 269 bp, Zea mays
cgactgggctaccggcgcctccaccctccgcctggtgtccttcgccgtcgacgagcgcacaccagtacgtattgctcgtgatttgtgtaactacggagcaagctgcatacagcacaagatagaagatgggtatccttgagaggatcaaggagattgaggccgagatggctcggactcagaaaaataaagcaacagaatatcatcttggacaactgaaggcaaaactagcaaagttgaggacacaactattagagcctccaaagggttcc

SEQ ID NO: 57860 - DNA, 240 bp, Zea mays
ggaggagggggagttctccgaggcacgcgaggacctggccgccctggaaaaggactacgaggaggtcgccgcagagggcggcagtgatgacggtgacgaggaggaggaatactgatctgcttgcatgaatctgtttggctgtcgagccaggttgtggtgttgaaaaacctttgtttgtgtcctggcccccctgggtaatgtgtggagaaggccttccatcatcacttgctgaactgctct

SEQ ID NO: 57861 - DNA, 271 bp, Zea mays
caaccgtcaagttccagctcaagaaggtgtgcatgcttggtgatgcccagcatgttgaggaggtcgagaagatgggacttgactacatggatgttgaggctctcaagaaaatgaacaagaacaagaagcttgttaagaggcttgccaagaagtaccatgctttcttggcatcagaggccatcatcaagcagattccccgtctccttggtcctggtctcaacaaggcaggcaagttcccgaccctggttactcaccaggaatccctcgaatc

SEQ ID NO: 57862 - DNA, 215 bp, Zea mays
aaatctctctcttctctctagcggcgaggcgaggcggtgaagacgagcgagcggcgaggatgttgtgggtagacaagtaccggccgaaaaccctagacaaggtcaccgtccacgaccaggttgcgcggaacctcagaaagttcgtgtcggagcaggattgcccgcacctgctgttctatgggccgtcggggtccgggaagaaaaccctaatcctc

SEQ ID NO: 57863 - DNA, 285 bp, Zea mays
aacaaagttcttaccattgctaattggttattttgctctttccgtgccttcaggactaagtctgtactggcttacaaataatatcctcagtactgcacaacaagtgtggcttcaaaagcttggaggtgcaaaaaatcctgtcaaagaatatattgacaagctttcaagagaagaaacgactactgttcagaagaatgattctactgttcagagtgaacctctctctaaacatagtaaaccccagcctagccaagagccgaaaccaagtgggccacaacgtggtga

SEQ ID NO: 57864 - DNA, 276 bp, Zea mays
ctgatctatgcaagctttatggatgccactgttggcatatttaatgggtcgagtttgagacttcaatgtcggattcttccagcttcgtatcttcctccaaatatcagtccgagcgttcatcctgttgtggttgcggcacacccttcggaagcaagccagtttgctctagggctgactgatggtggtgtttttgtgttggaacctttggaatcggagagaaaatggggaaatcctccaccagtagagaatgggtctgctagcaacttgtccacaccg

SEQ ID NO: 57865 - DNA, 278 bp, Zea mays
gtgcaaggttgcctctgaccttcccaagctagtcgaaggtttgaagcgtctagcaaagtccgatcctatggttctctgtacaatggaagaatctggtgagcatatcattgctggagctggtgagcttcatcttgagatttgcctgaaggatctgcaggaggacttcatgggtggtgctgaaattattgtttcccctcccgtcgtctccttccgtgaaacgttcttgagaagtcctgccgtactgtcatgagcaagtctcccaacaagcacaaccgtct

SEQ ID NO: 57866 - DNA, 278 bp, Zea mays
aaaaagaggcttcctctttttgtgaagaatggtgcaattgttgtttgccgcattcaggtgaataacttgatatgcataacgaagttctctgatttcccacagcttggaaggtttacacttagaactgaagggaagacggtagccgtaggcaaggttgttgatgttccgcctgctggcagcccaacattctgagcttaagccaattttgaacaggatggataatcatgaagcagtgcgttgtcttgagatacttttctttgggagaagtgagattagtt

SEQ ID NO: 57867 - DNA, 261 bp, Zea mays
gaggaactgagcggtggggcccgcgcggccaagttatcctgttcgtatacgtgatgtttaccctagtccagagggtttatcttcgttcgtctcgtttgttgttgcccatctgtgtttttgattgcaaggtcgctctgtgtcagttgttagtgctgtgttcatcctcggctccagcagacccatgcatcaaccagcatggactgtggatcgatggatgctgttactcctgtcaggatttgttctaagttaatcttaaggaaa

SEQ ID NO: 57868 - DNA, 203 bp, Zea mays
gaacaagaagtatggatgcaatgtccctttacttctgatgaactctttcaacacccatgatgacacacagaagattgttgagaagtattccaactccaacatcgaatttcatactttcaatcagagccagtatcctcgcattgttaccgaggacttcttgccacttcccagcaaagggaaatctgggaaggatggctggtatc

SEQ ID NO: 57869 - DNA, 280 bp, Zea mays
gccgccctcaattcccctcggcgccgcgctctcaattcccctcggcgccgcgcctcctcccctcgcttcggtcctcggttagttaaccatccaggttctgtcaagatgtctgatagccatgagactgacaggaacattgagatttggaaaattaagaaactgatcaaggcattggaatcagccagaggcaatggcacaagcatgatctctctaatcatgtctccacgtgatcaggttgctcgagtggctaagatgttaggtgatgaatatggtactgctt

SEQ ID NO: 57870 - DNA, 283 bp, Zea mays
cggaggtggcagccatctccttctcggcatcatggacgccctcagaccccttgtgaagcccaagatcgtcaaaaatagaaccaagaagttcatccggcaccagtcagaccggtatgtcaagattaagcgtaactggcggaaacccagaggcattaacaacagggttcgtagaagattcaagggccagatcttgatgcccaacattggttatggcagcaacaagaatacaaagcacatgctgcccagtggcttccggaagttcctggtccacaacgtcaaggag

SEQ ID NO: 57871 - DNA, 233 bp, Zea mays
gagaagttttccgtggtatatggaatggaaccgatgttgccatcaaagtatttctagaacaggacttgacaactgaaaacatggaagatttttgcaacgagatatacatcctgagccggttgcgacatccaaacgttatattgtttcttggtgcatgcattacacctccacacttgtcaatggttactgaatatatggaaatgggatcactgtattatctcatccatatgagt

SEQ ID NO: 57872 - DNA, 274 bp, Zea mays
cttcggcgagaagccggtcaccgtctttggcatcaggaaccccgaggagatcccgtggggtgaggctggtgctgagtatgtcgtggagtccaccggtgtcttcactgacaaggacaaggctgctgcacatctgaagggtggtgccaagaaggttgttatctctgccccaagcaaagatgcgcccatgtttgttgttggtgtcaatgaggacaagtacacctccgatgttaacattgtttccaatgctagctgcaccacaaactgccttgctccc

SEQ ID NO: 57873 - DNA, 274 bp, Zea mays
ctgtcgctctcgctctcagacgactgggccgccgccgcttggtgctgaggctttcgttggtctcttcggcggcgacgagcacccaccagcagttctgtagaaatggctgatggtgaggacatccagcctcttgtctgcgacaatggcaccggaatggtcaaggctggttttgctggggacgatgcaccaagggcggttttccctagcattgttggccgtcctcgccacactggtgtcatggtagggatgggacagaaggatgcatatgttggcg

SEQ ID NO: 57874 - DNA, 283 bp, Zea mays
gaaatgaaacctatgtgaacattgaatatgaagcttctgagatgtttgatctgcacaacgttgtcatatctatacctctgccagcacttcgggaggttccgagtgttagacagatcgatggagagtggaagttcgactcaagaaactctgtgttggaatggtctattctccttatcgatcagtcgaatcgcagtggttccatggaatttgttgttcccccagctgacccatcatcgtttttccccatctccgttggattttctgcatcgagtactttcagtga

SEQ ID NO: 57875 - DNA, 273 bp, Zea mays
gcaagctcgatgcgcagccggagctgttcatccacattgtaccagacaaggcttcgaacacgctctccatcatcgacagcggcatcggcatgaccaagtccgaccttgtcaacaacctcggtaccatcgccaggtccgggaccaaggagttcatggaagcccttgctgctggcgctgatgtgtctatgattgggcagttcggtgtcggtttctactctgcctacctcgtcgccgagagggtcgtcgtgaccaccaagcataacgatgacgagc

SEQ ID NO: 57876 - DNA, 275 bp, Zea mays
gcccgtgattgatttgggttacttgtttgcggggtcgcaggaacgcggcgagctcggacgaaatccagctgcggatcgacccggtgcacggggacctcgacgaggagatcgacgggctgcactccagggtccgcatgctcaaaggggtggcccatgagattttttctgaagccaagttccagaatgattttcttcatgaactgcaaatgacccttgcaaaagctcaggctggagtgaagaacaacatgcggagattgaacaagagcatcatccag

SEQ ID NO: 57877 - DNA, 275 bp, Zea mays
gctggaggagttatgacagtgctgatcccgaggaacaccaccatccccaccaagaaggagcaggtattctccacctactcggacaaccagcccggtgtcctgatccaggtctacgagggtgagaggacccggacacgcgacaacaacctgctgggcaagttcgagctctccggcatcccccctgcaccccgtggtgtgccacagatcaccgtgtgctttgacatcgacgccaacggcatcctgaacgtgtctgccgaggacaagacaacggggca

SEQ ID NO: 57878 - DNA, 272 bp, Zea mays
agctgcttcctgtggtttatacaccaactgtaggtgaggcctgccagaagtatgggtccatctttcgacaaccacagggtctgtatgtcagcttgagggacaaagggaaggtcctagaagttctaaggaactggccacataggaacattcaagttatctgtgttactgatggtgagcgaatcttgggacttggagatttgggttctcagggaatgggaattcctgtaggcaaacttgctctatacactgctcttggaggagttcgtccatca

SEQ ID NO: 57879 - DNA, 271 bp, Zea mays
ggacggatggtcctgaacaagaacgtcgacaacttctttgcagagaatgaacagattgctttctgcccagcgattattgttcctggaattcactattctgatgataagctgctccagacgagaatcttctcctatgctgatacccagaggcaccgccttggtccaaactatctgatgcttcctgtgaatgcaccaaaatgtgcccaccacaataaccaccatgatgggttcatgaacttcatgcacagggacgaagaggtgaactacttcc

SEQ ID NO: 57880 - DNA, 271 bp, Zea mays
caagtacaacacacccaaatacagatttgttgtgcgatttaccaacaaggacatcactgtccaaatcatatctgctagtatagcgggtgatatggttcttgcttctgcctactcgcatgagttgccacgatatggtcttgaagttggtctgaccaactatgcagctgcctactgcactggccttctgttggctcgccgtgtgctcaagatccgtggtttggatcaggagtacgagggcaatgttgaggccactggtgaggacttctctgtt

SEQ ID NO: 57881 - DNA, 272 bp, Zea mays
ggtggacctcacggcgatgctggcctcactggccgcaagatcatcattgacacctacggtggctggggagcccatggtggtggcgctttctccggcaaggacccaaccaaggttgaccgcagcggagcctatgtcgcaaggcaggctgccaagagcatcgtcgccagcggccttgctcgccgcgccatcgtccaggtgtcttacgccatcggcgtgcccgagcctctctccgtgttcgtcgacacgtacggcaccggcgcgatccccgacaa

SEQ ID NO: 57882 - DNA, 268 bp, Zea mays
gagatctctttgaaggaattcttcaggctgggtcaacaattgtcgagaaccttaggacatataatcagcctgcttttgtgtacattcctatggctggagagcttcgtggaggagcttgggttgtggtcgatagcaaaataaatccagaccgcattgagtgttatgctgaaaggactgccaaaggtaatgttctcgaacctcaagggttaattgaaatcaagttcaggtcagaggaactccaagactgtatgggtaggcttgacccaga

SEQ ID NO: 57883 - DNA, 266 bp, Zea mays
tacagccgcccgggagaagatggctgccccagcagtgtccgggctctcccggcaggtgcgatgcttcagtacctctgtggtcagaccatttgccaagcttgtgaggcctcctgttcaggtatacggtattgaaggtcgctatgccacagctctttattctgctgcatcaaaacagaataagctggagcaagtagaaaaggagttgttgagagtagcacaaatcctgaaggaacccaaagtggctgcttctgttttgaatccctatg

SEQ ID NO: 57884 - DNA, 265 bp, Zea mays
cggctcgaggggagatccttgggatgatgagttccagttggcgaactcgatagccttgttaagttacccggtacacgtgcacatccatctgaggccattaaggcaaggattggtgcatgtgggcctgataacttgggagggctgtcacacggcacgacgcgtagctcctgtcgtgggtgacgtgctcgtctacccctggacgtgcatgtctaccccccgtgtattttatgcgcattgatcatgttatttatattaatgaaatgga

SEQ ID NO: 57885 - DNA, 264 bp, Zea mays
atgggccaaaaggatgcatatgtgggcgatgaagctcagtccaaaagaggtattctgacactgaagtacccaattgagcacggcattgtcggcaactgggatgacatggagaagatctggcaccacaccttctacaatgagcttcgtgtggcacctgaggagcaccctatactgctgaccgaggctcctctgaaccccaaggcaaacagggagaagatgacccagattatgttcgagacattcaactgcccagcaatgtatgtg

SEQ ID NO: 57886 - DNA, 250 bp, Zea mays
cggctcgagggatgaaaaggtgaagaaatcaggggattgaggacttgggtgggtgggcatctctcaggagccccatctccgggcgtgtcacctcctgggcagggttctgggaccctctgtgggtgacgcacaccctgggatggggctagtagagccttcaggcgccttcgggcgtggactctggcgcactctagtggacaggagaaggaacgccttccaggaaacctgtggactagggttgcagggactt

SEQ ID NO: 57887 - DNA, 262 bp, Zea mays
ggaggagggggagttctccgaggcacgcgaggacctggccgccctggagaaggactacgaggaggtcgccgcagagggcggcagtgatgacggtgacgaggaggaggaatactgatctgcttgcatgaatctgtttggctgtcgagccaggttgtggtgttgaaaaacctttgtttgtgtcctggcccccctgggtaatgtttgggtgtttccttccatcatcacttgctgaactgctctagtatttgcatttgtaattgaa

SEQ ID NO: 57888 - DNA, 265 bp, Zea mays
aaaggaacaaccgggaaatagtcaaagcgaacttaggttttgtcaaagctttagttgctaaatctaaagctgacatattgcatgaacacttgactggagttgttgagggcctgctgagctggcaaagtgatacaaagaattcctttaaagctaaggtcaagtcactcatagaaattcttgtgaagaaatgtggtttagacgctgtgaaggctgtgatgcctgaggagcatatgaaattgctcacgaatattaggaagattaatga

SEQ ID NO: 57889 - DNA, 156 bp, Zea mays
gggggtcaagcagatcggagttattggatggggctcgcagggtcctgcccaagcccagaacctgagagattcactggctgaagccaagtcagatattgttgtgaagattggtctccggaaaggatccaaatcttttgaggaagcacgtgccgctgg

SEQ ID NO: 57890 - DNA, 274 bp, Zea mays
ggctcctgatcgattgcccggtaggccgaagacgctgtctcctcaaatgatccaatctcattgaccagcgcctgctgaggacattcagatcctgagatgtggtcctcctccgatgaacaaggccatggctgcacaccttgacgagctcaactacacaaaggagatgcagttccagttctaagcaatgttaagtttgcaaataataattagtgaccgacatggttcttcggtcacaggaatagtacctgactctgctcgttagctgatatcagga

SEQ ID NO: 57891 - DNA, 136 bp, Zea mays
aacctctcaaaccctagccgcctcctgcaagtttcagagctcaggaatctgcgccatggcgagtgagacggagaccttcgcatttcaggctgagatcaaccagctgctctcactcatcatcaacaccttccacacg

SEQ ID NO: 57892 - DNA, 302 bp, Zea mays
cgctgattatgtctcaaatgagcttggagaagagatttggccagtccagtgtttttgtagcctctactctgatggaatatggcggtgttccacaatctgcaactcctaagtctcttctgaaagaagctattcatgtcatcagctgtggctatgaggacaaaactgactggggaactgagattgggtggatctatggttctgttacagaagacattctcaccggattcaagatgcatgctcgaggctggcgatcatctattgcatgcctaacgaccactttcaagggactgctccatcaactt

SEQ ID NO: 57893 - DNA, 302 bp, Zea mays
aagccaaggaagtgcctgctccccaggcagatgatgctcccaagactgaagctccttcgaaaggacctgtcaagtcgcacaaggcaaaagctgctcttgatgctgatgatgattatgaggccgagcccctgaaggagaaggcaaagcctacggaggctgatgtggctaagttgaaagagatcaagaggcaggaggagattgagaagaacaagcttgcattggagaggaagaagaagcaggctgagaagcaagcagcaaaagccgcggcccgggcacagaaggaagctgagaagaagctgaag

SEQ ID NO: 57894 - DNA, 289 bp, Zea mays
ggaggagacagcaggcccacgtcggaggacccgaaggagacatagagacctatttttgatgtgtttggatgttctggcgcctgcttattttgaggactcttaatatttctgagtgtataataggaacttgtgtcacctctgcggcttccctgctgcttatttgtttttacatggttagaccaggaaccttcacgagctgtagaatttagttcttgttggtcatttgtgtgtgtgcctgacgggtataatccctagttcaatcagatagaggtgttggtttttttactcg

SEQ ID NO: 57895 - DNA, 190 bp, Zea mays
tcgagcgaatcggctcgagacaaaagaagtctgaaagagagacggagttgaaggagaaatttgaaaagaatattcaaacggtagctgagaagttccaaaacactaacttgtatctgaagaacttagatgataacattgatgatgaaaagttgcgtgaaatctttgctgagtatggcaatataacttcttg

SEQ ID NO: 57896 - DNA, 219 bp, Zea mays
tgccgtgggagatgttcgtcgaatcatgcaagcggcttcggatcatgaaaggatcagaagccattggcctggcgccaagggccatggagaaatgcaagaacagaagctgaggagaagacggacggacggaagcttgcatctcagcaccaccaggggtggatggatgcaagaagaacaaatctccatggcttttgcagctctgctcgtctctgtatcata

SEQ ID NO: 57897 - DNA, 194 bp, Zea mays
cacacacacacaaccagatctcccccaaatccacccgtcggcacctccgcttcaagatgcagatctttgtgaaaaccctgactggcaagactatcaccctcgaggtggagtcgtctgacaccattgacaacgttaaggccaagatccaggactcggagggcatccccccagaccagcagcggctcatctttgct

SEQ ID NO: 57898 - DNA, 302 bp, Zea mays
ggatggcaataaatggggcagacccaacagctggtcatccaagtccctacatgccaccaccttccccttggatgaatcagaggccgctgggtgttgatgtgaatgtcgcttatgtggaaggccgtgaagatcctgacaggggcgtgcagcctcagccactgactcaggattttttgatgatgtcttctgggaaacgcaagagggatgagtatcctggtcagctcccttctggttcttttgtaccacaacaagatggaagtgctgatcagatagtagaatttgttgtgtcgaaggaaaatgcg

SEQ ID NO: 57899 - DNA, 302 bp, Zea mays
gtacctgcatgctttatttgatctggagaacgggaaccaggagctcaagagcgacctcaaggacctgtacatcaacaatgctatccagatggatgttaccgggagcaggaaggctgttgtcatccacgtcccataccgcctgcgcaaggcctttaggaagatccatgtcagactcgtcagggagctggagatcaaattcagcggcaagaggtttgacatggtagatctgccattatcagaacaagatgaattaatggacatgctttggaatatctcttgattgaacaacgccagtatgcaga

SEQ ID NO: 57900 - DNA, 293 bp, Zea mays
atccagtggtagagctgctagtacagagcggtgcggggctatcatccggagacgtggccttgtacgcttgcgtcgctgtagaggaaaatgaccctgagctgcttgagaacattatccgttacggcggcaacgtaaacagctcaatgaaagacggaaccacgccgctgcaccgcgcggtctgtgacgggaacgtccagatggttgagttgttgctggaacacggagctgacatcgacaagcaggacaacaatggctggtcggcgagagctctagctgaccagcaaggccatgac

SEQ ID NO: 57901 - DNA, 260 bp, Zea mays
tgccattacactacaatactactgcgcggtaggctcgcactcgcaccacaccacgccaccgctgctgcctgctcctcacagtcctccccgcgctcgcattgcgattcgcgttccacaaatgggaggaaacaatgaggacaaagcagtggttatccagatgttgctgttcgttgcaggtatcaacaccctcctgcagagtttctttggtaccatgttgcctgcagtgatcggcgggtcatacacctttgttctgcctacca

SEQ ID NO: 57902 - DNA, 298 bp, Zea mays
gatcaatcggctgagaatgtcgtatgctactcttgagggggcttgccaggagatgagaagcagcaggctgttccacaaagtccttgaggctgttgtgaatttcggcaatttcatgagcaccaattcggggtctccaagttcaaaaggcttggagccaaacactgttctgaagatagctgatgtgaaaggagctgatgggaaggctgctctcatgcagttcattgtccaggaaattgtgaaacctgaaggatatgatgtgatgcagcatggttcaggtgcatgcaagatgagcacaaac

SEQ ID NO: 57903 - DNA, 211 bp, Zea mays
ccaggacaaggagggcattcccccagaccagcagcggctcatctttgctggaaagcagcttgaggacgggcgcacgcttgccgactacaacatccagaaggagagcaccctccacttggtgctgcgcctcaggggaggcatgcagatcttcgtgaggaccctgaccggcaagactatcaccctcgaggtggagtcttcagacaccatcgac

SEQ ID NO: 57904 - DNA, 294 bp, Zea mays
gaaagacagagaaaggagaaggaacagggaagcaaagcacaagacgtggccgccgcagtccgcaccccctccccaatcacgccacccgacaccgcgctccgcagattcgtagtcgctgctaggcttccggcgagatggacgtggtgaaggcggcgcagttgttcgggcggacgctggaacgggtattggtgcatcccttggtgctgctcagcatcgtcgaccactacaaccgcgtcgcccgcgacacccgcaagcgcgtcgtcggcgtcctcctcggcacctcatcccgcgggt

SEQ ID NO: 57905 - DNA, 285 bp, Zea mays
tttcccgtcctgtccttccacccggcggcttaaaccctagttctcactcccatcgccgcttcagctccgccgctgcagatggagttctggggtctcgaggtcaagcctggttccactgttaagtgtgagcctggatatggctttgtgctgcacctttcccaggctgctcttggggaatcgaagaagagtgataatgccttgatgtatgtcaaaattgatgatcagaaacttgccattggaaccctctctgttgacaagaacccacacatacgatttgatctgatt

SEQ ID NO: 57906 - DNA, 288 bp, Zea mays
ggaaaggttgaggatgttgacgaggagaaggaagagaaagagaaagagaaaaagaagatcaaggaggtttctcacgagtggtcattgatcaacaagcagaagcccatctggatgaggaagccagaagagatcacaaaggaagaatatgctgccttctacataagcttgacaaatgactgggaggagcatctggctgtgaagcacttctctgtggagggtcaactggagttcaaggctgttctctttgttcctaagagggccccatttgatctcttcgacacaaggaag

SEQ ID NO: 57907 - DNA, 303 bp, Zea mays
ctccgctcggccaccagctttgaccgactcccctcccctccgctcctgttcctccataccccacgcccccgcaggagcggcgcggcggcggcggcggcaaagccaaaggcaagatgttcgggcgcgcgccgaagaagagcgacaacaccaagtactacgagatcctcggggtgcccaagtcggcgtcccaggacgacctcaagaaggcctaccgcaaggcagctatcaagaaccaccccgacaagggcggtgaccccgagaagttcaaggagctcgcacaagcctatgaggttttgagtgatc

SEQ ID NO: 57908 - DNA, 281 bp, Zea mays
gttggcctcaaggaggacgacctcgagcggatcgtccagcgagcgataataagctagggcgtgttcggctggctacaaaccgacactgttgcagctgtttggattgctgcagctgcaatccatagagagaaaaatactgtagaagccgcagccgcagccggattgcagccgcagcaagccgcagcgaacaagctgctagctaggagtagtcgtcaactcgtcatgtagtaccacacagactcagttttcgcacgtgtgccaagacaaaactacaaaaggac

SEQ ID NO: 57909 - DNA, 309 bp, Zea mays
  unsure (1)..(309): unsure at all n locations
ttcttatgnacgtaatctcggagttctaatcgagtggtactgctggcgcatttgatgttaccactaaaggaatacttcatgcggcgcttgatagatcagagtattggcgtctgtccgatgaaaaagggaaaccccctggagtattgggttggtggccttcaagagcagtcacatttatagagaatcatgatactggttctactcagggccattggaggttcccctatggtatggaactgcaaggatacgcctacatcctgacacaccctggcactcccgcagtcttctatgaccacatatttccacaca

SEQ ID NO: 57910 - DNA, 232 bp, Zea mays
  unsure (1)..(232): unsure at all n locations
gtgcagtactgattttaattcaaaatctttgtcaaagaagaaacataaagtgacaaacatccaagaacgtgactcgtatcagagaaactacatacatgctagcgaggttattttatccatcctgctggacaaggacaggagcagctcgacaatcctctcgctganccctgctagtcctgagattcctgaacttttaacgcaatgctctatcggcattgctggacctggactg

SEQ ID NO: 57911 - DNA, 280 bp, Zea mays
tgctcgagccgaatcggctcggctatgactacgctcattgcatggtggattctcttgatcacatcacacattcgctgtgcacacttgagtttgacatacgtcgattttcatactactggctacttgttgccttgggcctttatcaaccatatgtgtgggtctattctccgctaaacatatcaaatactgtgatgtctatgaccaagttgaatcgacttgtgacagagaagtgggtcgatgggtgggatcatcccgcttgttgacactggctggtctccgg

SEQ ID NO: 57912 - DNA, 282 bp, Zea mays
ttctgctgcaatggtacagtggtccaggacccagaacttggacaggtcattcagctccagggtgatcagaggaagaacgtctcgaatttcctcgtccaggccggcattgtgaagaaggagcacatcaagattcatggtttctgagcaaccgccgggtccatagcaaaccaaccctgcatgcagggccagcttattatatataatatctgaggtggagcatatctatctggctgtgtactacaagcaggcctagtacgccgcctgcgcgttcctcctattaca

SEQ ID NO: 57913 - DNA, 149 bp, Zea mays
gatgttggagaggacgcgccgagaacagtagtcagtggccttgttaaattcatacctcttgaagaaatgcagagccggaaagtctgcgtgctctgcaatctgaaaccggtggcaatgcgtggcataaaatcacatgcaatggttctggc

SEQ ID NO: 57914 - DNA, 274 bp, Zea mays
gttggattgggttcaaagttgggcttttggacagctgtggtgtgcacggcagctctgtgacttgtgaggaggaagggaggaagaaagcggatccatggcgtcgaagcggatcctcaaggagctcaaggacctgcagaaggatcctcccacctctttccagcgcaggccctgttgccgaagatatgttctactggcaggcgacgattatggggccatcagatagcccatacgctggtggcgtatttttgtccactattcactttccaccggacta

SEQ ID NO: 57915 - DNA, 156 bp, Zea mays
gaggcagacggttgctgttggagttatcaagagtgtggagaagaaggacccgaccggcgccaaggtgaccaaggcggctgccaagaagaaatgatgcgatcctccgcctgcttaggcattccttatttttacaccacacaatttctgtttgtgatc

SEQ ID NO: 57916 - DNA, 248 bp, Zea mays
ggaggaggccgcggtgctgtccccccggactgcggggatccgcagcgatctagccgagataggcggcaggatgtggagcggtttctcgatgctgcagaacaacttggccgtggccgtgatttcgaggatcggctcgtcgctcctgccgttcgggctaggcggcgcggacgacggggagtccgtgcccggcatcaccgaagaggtggtggtgttcgtcaggcacatctccacgcggcccgagacatggc

SEQ ID NO: 57917 - DNA, 252 bp, Zea mays
ggaacaaaatgagctcgtagaatcagctgcagagatgctttatggtctgatacatgcacgatacattctgaccagtaaaggactggctgcaatgctggagaagtataagaactatgactttgggcggtgcccgcgtgtttactgctgtggtcaaccatgtctgccagttggacaataagacatccatcgatctagtaccgtgaagatatactgccccaagtgtgaagacatctactacccacggtccaagta

SEQ ID NO: 57918 - DNA, 277 bp, Zea mays
tccatccccaagagagactgctgggctgtctgcctctggctttgtcactgcaattaccgattctctaaatcggacttatggcgatcctcacaaaagcttaaagaatcataccaatgactatgtaaatgctatattggttccagaaggtcgccaagttcctttagatattgaaaatttggcagctcagggaatttttcatgtggtaaccgtgaagtctattcatgaccctaaagttggcgtcatatttgatgcacggtcattgatccaagccctaacc

SEQ ID NO: 57919 - DNA, 274 bp, Zea mays
  unsure (1)..(274): unsure at all n locations
tttctcaaaggtttggttggagattataacaggacaccaacgattgtcatcgtctggtccattctgctgtctagcaatctctcgctcctttgggttcggattgatcctttcctagcgaaggatgatggtacgcttcttgagaattgtggttnggattgcaactaggatgtcagtgcatcagctcccccaatctgcatatgcttgaagtatattttctggtgtttgtccccatatttcagtgtctgtagataagagacatgaaatgtcccaagtt

SEQ ID NO: 57920 - DNA, 285 bp, Zea mays
cacggggaagctgccgcggacgtggttcaagtcggtggaccagctgcccatgaacgtgggcgacgcgcactacgacccgctcttcccgttcggcttcggactcaccaccaagggcacaatgagtgagtttgaggcgctctgatgggatgtggatgtcgcctgtgatcccgctgtgtgtattcgtgggcgggcgtgaggctttggctttcgaattggttggggtgacgggcggcgagtcgtgtacgccgaaaacattgcgcacgtaccgttgggttgggatgtttg

SEQ ID NO: 57921 - DNA, 200 bp, Zea mays
agaggcatagggaactgtagaagggtctgtgaaaacatccccattgtcctctgcggtaataaggttgatgtgccgaacaggcaggtcaaagccaagcaggttactttccacaggaagaagaatctgcagtactatgaaatttctgccaagagcaactacaactttgagaaacctttcctgtatctcgcaaggaagctggc

SEQ ID NO: 57922 - DNA, 280 bp, Zea mays
gccagcacatttggcatcatttggctatgtttttccgagatgaactgttatcttggtcgtggaggcggcctctgggcattccatcagtccctgtcgctgctggaatgatcaacccatcagatttccaacagaaggtggtaaacaatgtggagcatgtcatcagtcgtatcaagtcaatctcgccacattgtctggctgaggaggaggagaatgcaaccgagccacctcagtcggtacaaagaggcgtcaccgagctggtggaagcggcattgtcgtccag

SEQ ID NO: 57923 - DNA, 277 bp, Zea mays
ggccaagaattttccgtgttgactatgggcattaagaagctgctaccaagtttttgaaggatccaagaacttacggagtcttgacaaagaatagaattggcgatggaaatggcaaggtgaaggcccttgaggtagtgcgtgtgaagtgggagaaagtagaagaaagatttcaactcaaggagatggaaggatcagaagagatgtattgaggtgatctcgtcctcctagctatgggattcttgggtcctgaagcgacaatagctgagaaattgggttt

SEQ ID NO: 57924 - DNA, 240 bp, Zea mays
ctaatactgtctgatataactagttgctttttctctctatggtaagaatctgcaattaaatttgacatccattggttatatattttttccttgttcagttaccatacatgttgccatctgaaaaggcattttcagctgttgtatctgctacttggcatcttcaacaaagtcgggatagtagtttatgatggaaaggggctgttcagtgatgctcgtgtttggtggtaagcttttttatgc

SEQ ID NO: 57925 - DNA, 294 bp, Zea mays
acgcgtacgcgtacgcagacttcggctcgagggtgaatatgagtgagaaggatttccaagaaaaaaagaacaagtttctacccaagatacatgcttgggtgcacgaacatggtggtgaaaccatacttcctttcagctgtgcttttgaacagaaactagtggatatgccagaagatgaagccgccaaatattgtgctgtaaaccagataacaagcatgatcccaaaaattatcaagactggttttgcagcaattcatctgatatactttttcactggctgttctgatgaggtaa

SEQ ID NO: 57926 - DNA, 145 bp, Zea mays
gtaaaacttggcatccacgaggactcgcagaacaggaccaagatcgccgagcttctgagataccactccaccaagagtggtgatcagctgaccagcctcaaggactacgtgaccaggatgaaggagggacagaatgacatatact

SEQ ID NO: 57927 - DNA, 108 bp, Zea mays
atgttggaaagggtatggctggtggagaactggtggtagttcctgtagacaaaacaggatttgttcctgaggatgctactatagttggaaacacttgtctgtatggag

SEQ ID NO: 57928 - DNA, 139 bp, Zea mays
cttgtgtgccactgctatcctgtgatctgccctgagtggctcctatcgtgttatgtttctgtcggttcttatctatctgtcgttgtgtggtttacaacttacgttgtaagactttattcccccgctttgctactgggtt

SEQ ID NO: 57929 - DNA, 271 bp, Zea mays
tgtatgaatcgcatagtagatcatgttctctattcctgccttcagtttcttttctcagttgtggtttatcgcggcggggttgatgttgagatttgagatcctcacctgaggaatggaaaaatgctcacctgaggaatggaaaaatataaaaggcttgttcggttattcctatcccatgtggattggatgggattggaaaaaattatgaaagattttaacttgtttgagattgaaatccatccaatcccacctaatccacatgaattaagag

SEQ ID NO: 57930 - DNA, 188 bp, Zea mays
atttgaaggcattcacgttcaatgatctaaaaaatgcaaccaagaacttccgaccggacagccttcttggggaaggagggtttgggcatgtctacaaaggttggattgatgagcacacgcttgctccttcaagacctgggagtggtatggttgttgctgtgaagaagcttaaaccggaaggttttcaa

SEQ ID NO: 57931 - DNA, 293 bp, Zea mays
aggtgatccactcccgctgggccatgctgggcgcgctcggctgcgtcttcccggagctgctcgcccgcaacggcgtcaagttcggcgaggccgtcgtggttcaaggccggctcccagatcttcagcgagggtggactggactacctcgggaaccgagcctcatccacgcgcagagcatcctcgccatctgggcctgccaggtcgtgctcgagaacctcgctgaccacattgccgaccccgtcaacaacaacgcttgggcctacgccaccaacttcgtccccggcaagtgaggg

SEQ ID NO: 57932 - DNA, 296 bp, Zea mays
gcccatcagacccagagaatttcccatttgttgtgcttggtaacaagatcgatgttgatggtagtaacagccggactgtttctgagaagaaggctaaagcatggtgtgcttcaaagggaaacatcccctactttgagacgtcggctaaagagggttcaatgtagaggctgcatttgagtgtatagcgaggaatgctgtaaaaaatgagccagaagaagatatgtatcttcctgatacgattgcatgttgggggcgctggaaggcaacaacgttcgtcaggttgtgaatgctagaag

SEQ ID NO: 57933 - DNA, 298 bp, Zea mays
cttcatcctcccatctcctgatctccatctccatcttcttcgcagcgccggcgatccatcttccgctgcctcccttcctcgcgctcgggctctcagtgacggcatcagcggtttcccctcccgcctctcgccagtcgcatcacgcccccgcctccgtccaccgcacaccggccggtgaccctacattacttgctaatctttcttgagggcagatggccgtttcttttgcaaatgtcaacgccgaggcagggctgaaaaagcttgatgagtaccttctcactcgcagctacatcactgg

SEQ ID NO: 57934 - DNA, 298 bp, Zea mays
gaggcttgctaggcacacgtgctgcaagcatcgactaccctgtccgaaccaaccagatcccacgagagatccctgagcgcaagttcccctcatggttgcttgtgctcggtgcgggaacattgccatttggtactctcttcattgagctcttcttcacctttccagcatttggttgggaaggttctactatgtctttggcttcctgttcattgtcctcttcctgctggtcatagtctgtggtgaggtttctctggtcctgacctacatgcacctttgcgtggaggactggaaatggtgg

SEQ ID NO: 57935 - DNA, 289 bp, Zea mays
gtaaaaaaaggtcctagccggttatggagaaacttgttgagcgtcggatgaagatgtgcgtgaagttcgtataatacctgccaagtgctcgacaaatggtcttgttgggactatgcttcgtcgccgaaggtcttgtaggaagaagcagcttggctgaagctatccgcatgagacgaccgaaggatcctcttcgtgaagcttcggaattacaaaccaacttaaaagtagaatgaccttttagtccataaatgtttgagtcgctgttgtaatcccttataaggggcataat

SEQ ID NO: 57936 - DNA, 308 bp, Zea mays
gctcgttctgttcgagtgctcggaacgcacacaccggccggtctccgatctccgatccccgatcccctcgtcgatccaagatgcagatcttcgtcaagactctcactggaaagactatcaccctcgaggtggagtcctctgacaccattgacaacgtcaaggccaagatccaggtcaaggaaggcattcccccggaccagcagcggctgatcttcgctggcaagcagctggaggatgggcgcacactagcagactacaacatccagaaggagagcactctccacctggtgctccgcctccgcggtggt

SEQ ID NO: 57937 - DNA, 286 bp, Zea mays
gaagcagctgagtttcgtttcaaatggggctacgagatgccagttgatgtgttagcaaaatggattgctgacaaagctcaagtttacacgcagcatgcatacctgagaccccttggagtagttgctatggtcttgggctacgatccagagaaaatgcccaactactcaagtgcgaccctgctggtcacttctttggacataaggcaactagtgccgggctcaaggagcaggaagcaataaattttctggagaagaagtgaaggatgcccgaaattccctatgacga

SEQ ID NO: 57938 - DNA, 294 bp, Zea mays
ctaccccacacagaagcggcggcggcggagcaaacgcaggcgaaggcgagggtgtgagggaaggagcaccagccatggtgcacgtcaacttctaccgcaactatggtaagacgttcaagaaaccaaggcgtccttatgagaaggagcgtcttgatgctgaactgaagctggtcggtgagtatgggctgaggtgcaagcgtgagctttggagggtccagtatgcactgagcaggatccgtaatgctgcaaggcacttgctcacccttgacgagaagaaccccgtcgtatctttga

SEQ ID NO: 57939 - DNA, 288 bp, Zea mays
caaacacgtatgtggaaggtgggtgaaagggtccgttcaaccaggccacaaggtgatcttggcccactgcatcccttcactgctggagtgtatgttgcactaatgatggctcagattgaggtccttaggaagaagggccactcttactcagagataattaatgagagcctgatcgagtccgtggactcgttgaacccgttcatgcatgctcgcggtgtggccttcatggtcgataactgctccacaactgctcgtttgggatctaggaagtgggcacacgcttcgatt

SEQ ID NO: 57940 - DNA, 282 bp, Zea mays
aggtcttctcccgcattgaccacaagttcgacctcatgtacgccaagcgcgccttcgtgcactggtacgtcggtgagggtatggaggagggcgagttctccgaggctcgtgaggatctggcggcgcttgagaaggactacgaggaggtgatgctgagtttgacgagggtgaggacggcgacgagggtgacgagtactagacgctctactggcgcggcgtcgtcgggcttgtgtgccactgctatcctgtgatctgccctgagtggctcctatcgtgttatgt

SEQ ID NO: 57941 - DNA, 293 bp, Zea mays
ggatgcacagggagttgcatgacataaaaccattatacaaatatctgcatgcaacccaccatatttacaacaaggagaataccttgtctccatttgctggacttgcatttcatccactggatggtattctgcaagcaataccgcatgtgttgcgctcttcctctttccaacacacttcaggacacatattgcactcttgttcctagaggctgtgtggacaacaaacatccacgactgcattcatggcaagatatggccagtcatgggcgctggatatcacaccattcaccata

SEQ ID NO: 57942 - DNA, 258 bp, Zea mays
tgtaagtgacactgtttcatcaggtgctggccctgataggagtggcccaagagctgtatctgtagtgaattcttcatcagagaaactgggtggtgcaactgtggttgccactgcagttgttcctgatgaagtggacaagatcaagggattctggtacaaggaagtgatattgaccatgttaacctcattctgacattaggtgggactggcttcacacccagagatgtcacaccggaagcaacaaaaatgtgatacaga

SEQ ID NO: 57943 - DNA, 176 bp, Zea mays
atgaaagtggggcaaaatctgaagttatctggaatcataatgggcataatcattgagtggtgctctcttatttatgaccccattatttactgatataccccagtgtgcattggctgcaattgtgatttctgctgttactggcctggagattatgaagaggccatcttcttgtgggc

SEQ ID NO: 57944 - DNA, 287 bp, Zea mays
gttcggagcgcacacacacacaaccagatctcccccaaatccacccgtcggcacctccgcttcaagatgcagatctttgtgaaaaccttgactggcaagactatcaccctcgaggtggagtcgtctgacaccattgacaacgttaggccaagatccaggacaaggagggcatccccccagaccagcagcggctcatctttgctggcaaacagcttgaggatgggcgcacgctagcagactacaacatccagaaggagagcaccctccaccttgtgctccgtctccgt

SEQ ID NO: 57945 - DNA, 287 bp, Zea mays
ggtgaagccgccgccgctgcagtgtccatagccaccgcaggagactgagatggggggttttgtcaagaaccacaagaccaatgcgtacttcaagcgtttccaggtgaagttcaagagaaggcgcgctggcaagacagactacagggcaggataaggctgattaaccaagacaaaaacaagtacaatacacccaaatacagatttgttgtgcgatttaccaacaaggacatcacagcacaaatcatctctgctagtatagcaggtgatatggttcttgcttctgctta

SEQ ID NO: 57946 - DNA, 278 bp, Zea mays
tgaatttggtgtggacccaaatgtagatccagagttggcactcgccctgcggttgtctatggaagaagaacgagcaaggcaagaggctattgcaaaaaaggctgcagaagatacatctaataccgaaaatatcaatgcctcaactcaaacagcgattctgttatggctgaagcagaacttgcctcaaatgctgctgctggtgacaagcaagaacagccaaaggatgatgacgatctactacagcaggcacttgcaatgtcaatggagggcggtgcttc

SEQ ID NO: 57947 - DNA, 282 bp, Zea mays
gcgacgactacgccgggtcttcttcagacccaggtcgttgccgcctacgccaggtgcccaaatcttcttagggcccttcgccggcgacgagcacacaagcttggttgacccccaacaaattgcaaaatgtcagccaatgtcggtgatcaaccagcggtggcagcagcaatgatgcagctggggggagctttgaatgtaacatatgctttgagctgcctcaagagccaatagtgactctttgtggccactcttctgctggccatgctttaccggtggctgcac

SEQ ID NO: 57948 - DNA, 151 bp, Zea mays
gaataacgcagagctctgtgctcccggcctctgtcttctgccgtcccggccgtttaatttatagtctctactgtgtgttcgtcccatgtgtttagcagcagcagcaggtgtattgtgcgggtatgtaatggtattgcaacttattgggtgt

SEQ ID NO: 57949 - DNA, 291 bp, Zea mays
aacgaaagcatttatcaaggaggtgtattgaaggttagagtagaattgccagacgcatatccttacaaatccccatcgattggtttcatcaataagatatatcacccaaatgtcgatgaaatgtctggttcagtctgtttggatgtcatcaaccagacttggagcccaatgtttgatcttgtcaatgtgttcgaggtattccttccacaacttctgttatattctaatccttctgatccattaaatggagatgcagctgcgttgatgatgcgtgatcgccctgcttacgaa

SEQ ID NO: 57950 - DNA, 285 bp, Zea mays
gggcaggaagaccgaagaccgagccgtgcgggggctcgggacgggaacgggacaggaccccaaaatctcagatcctacctgcccgcccgcccgtgcccgtcgacgcgtcgttcacgccggccgcgccccacctccgccctctcctcctccagggggatcggatacgccacaggctgcgcgatggtgctgtgggacttcggctacggctccctcatctggaaccccggcttcgacttcgacgacaaaatctcggcttcatcaagggctacaagcgcacctttaatc

SEQ ID NO: 57951 - DNA, 266 bp, Zea mays
cggcaaggagctgtgcaagatcatcaatcctgatgaggccgttgcctatggtgctgctgtccaggctgctatcctcagtggtgagggcaacgagtaggtgcaggacctgcttctgcttgacgtcactcctctctctctgggtctggagactgccggaggagtgatgaccgtccttatcccgaggaacaccaccatccccaccaagaaggagcaggtgttctccacctactcggacaaccagcctggtgtgtcgatccaggtgtacg

SEQ ID NO: 57952 - DNA, 271 bp, Zea mays
caagctagtcgaaggtttgaagcgtctagcaaagtccgatcctatggttctctgtacaatggaagaatctggtgagcatatcattgctggagctggtgagcttcatcttgagatttgcctgaaggatctgcaggaggacttcatgggtggtgctgaaattattgtctcccctcgcgtcgtctccttccgtgaaacggttcttgagaagtcctgccgtactgtcatgagcaagtctcccaacaagcacaaccgtctgtacatggcagcgcgc

SEQ ID NO: 57953 - DNA, 181 bp, Zea mays
tcacatgcacgcgtagcaggatccggctccagctccaaggtgctgtgcacgcagatcattcctgatgaggccgttgcctatggtgctgctgtccaggctgctatcctcaatcgtgactgcaacgacaaggtgcaggacctgcttctgcttgacgtcactcctctctctctgggtctggaga

SEQ ID NO: 57954 - DNA, 280 bp, Zea mays
gccgccgccgctgctcatctcacatccctcgagaagacgcctgctcctcgccgatcgatacgatggccgtcttctccgacctccacaccgccgacggcctcaagtcactcgaggctcacctcgccggcaaaacctatgtgtctggtgactccattactaaggatgacattaaggtcttcgccgcggtgccgtcgaagcctggcgctgagtttcctaatgccgcccgctggtacgagaccgtctctgcggctgtagcctcaagattccctggtaaggctgt

SEQ ID NO: 57955 - DNA, 284 bp, Zea mays
gagcagggtcaagaatcaaataaagataggctgtgtatagatattctagagagggagatgatgcggaatcctatggcggtggaagatgccgtcacctcgcctttgttggcagatgatcttcacatgaagcttctctacctggaaaacagagttgcatttgctagattgttctttcctgctgaagccaaggtcgccatgcaaatcgcacaagcagacaccacagaagaattcggcggtatagttgcagttgcagcaagcacttccggtaaactgagggaggtgga

SEQ ID NO: 57956 - DNA, 281 bp, Zea mays
gaagaatcaactgccgatgatgcagatgatgatgatactaaagattgtaaaggtttatttaagaacttatagttctacttgagtcgagaggtgcctagggagtccctgttatttataattccagcatttggagggactgtttcatgggaaggagaaggatctccatttaaagacatagacgaagatatcactcaccaggttgattccatttgcaataatttattacaccaaagtttaactatatagtcggagacattgtgtaccatccctaaagtaagatg

SEQ ID NO: 57957 - DNA, 282 bp, Zea mays
gcgagaagttgatggtggaattgaaaccatctgccttgatctgccagcagtgatcaccacggatttaagacttaaccagccaagatatgcaactttgcccaacataatgaaggcaaaatccaaagttattaagaaagtcgccgctgaagaccttggcgtagatattagatcagacatggaggtgattgaggtcaatgaaccaccaaaacgaaaagcaggggtgattctttcatgtgtcgacgagctcctgacaagttgaaaaatgaagcacgtgtcctttaa

SEQ ID NO: 57958 - DNA, 274 bp, Zea mays
tgatgaagagggtagtgaggaggatgaagatgatgacgagtgatggagctcctcgagacaatggaccgtgcttcatccaacaatggagcggcttcacaaggccccgtggcgatcacaaaaaaggagcctatatccatgtactagaattattcagtttcactccacatcgtgatgttttatttttacttttgtcgtgctataacggatagcgctcctcgttggcgccactggcgggtggttctgcctctggtctggtgtgtttgtgtgtggtcac

SEQ ID NO: 57959 - DNA, 150 bp, Zea mays
gtttaatgatgcttttgggagagtttggatgttgtcgttaatgcattggacaatgtcactgcaagaatgtacattgattccagatgtgtatattttcagaaaccacttcttgaatcgggtactcttggtgccaagtgcaacacacagatg

SEQ ID NO: 57960 - DNA, 175 bp, Zea mays
ggagcacaagatatatatgcagatgtaatagcttgttcctgaccaattcctcgctgtattatgctgattgtgggagcacagtgttctgtagtggtcaggcgctaaagaacattgcgccaaccttattcatgaaagcatgccaagcccttacaaataatcgctggatgcacttttg

SEQ ID NO: 57961 - DNA, 225 bp, Zea mays
atattgcacttgacgaggtcgagaggcgtgagtatctcatctggatttggtatcctgttaaaggagcaaggggccaggggtttcttcaggggatgggtgcctactttgcttggttacagtgctcagggggcttgcaagtttggcttctatgagttctttaagaagtattactcggacatcgcagggcctgagtatgcccaaaagtacaagtctctaatctacctc

SEQ ID NO: 57962 - DNA, 284 bp, Zea mays
cgtaatccaccgatcatgatacatagtatggtttagtagtagcttatctatgcttttgtgctcgcatttacctgtggttgcatatcaagtattattaaaatgccttgttgtctaaatatgatatattgtgttgggggccttcggcttccgaaggtcctcaaaaacatgatttaacaatgtttctggagtataatgtgtgaacaggtatcttcggacttgaatcagaaagggagaagctcaaaagatacgaaggttgacacagtgccgaagctgtgaagcaggaa

SEQ ID NO: 57963 - DNA, 274 bp, Zea mays
caagacccgtggtttagataaggaatatgagggcaatgttgaggccactggtgaggacttctctgttgagccagctgatgagaggaggcctttccgtgctctcttggatgttggccttattaggactacaactgggaaccgtgtctttggtgcccttaagggagctttggatggtggcctggatattcctcacagcgagaagaggtttgctggtttcaagaaggatgacaagcagctggatgctgatatccatcgcaagtacatctatggtggc

SEQ ID NO: 57964 - DNA, 285 bp, Zea mays
caagatgcaaatccgatgagcgtgctaaaaagaagctgacaatagaagaagcaccgaatattctgactattgcactgaaaagatatcagtctggcaagtttggaaagatcagcaaagccatcagatttccagaaaccctcaacttggctcgctatatgaacccagatactgatgacatatcgccagtttacagcctctatgcagtggttgtccatcatgatgtcatgaatgctgccttctctggccattatgtatgttatgttaaagatacacagggatagtggt

SEQ ID NO: 57965 - DNA, 252 bp, Zea mays
gaagcatgctgcaaggagggaacatttggatgcgttgcttgaggaatactgagtgagatgtttatcgcttgagtcggttaattccaccgttgcagtggttgtatatactcggaaacataggggggcaggcacatcatccttgaaaggcttcactgccactcactcactctgcagataactatacatgtacatctgtgacgatcagtaggcatgcttatttaaagcatctgtggctgcaaaatcgtcagggcg

SEQ ID NO: 57966 - DNA, 283 bp, Zea mays
gcagaacaagatctgaaggtgatcaggaagaaccttgtgaagaagtgtgttgtagtcctccttgttctcagcaatctcaaagaagagctcaacacacttctttgagattgctgagaacaaggaggactacaacaagttttacgaggctttctccaagaacctcaagcttggcatccacgaggactcgcagaacaggaccaagatcgccgagcttctgagataccactccaccaacagtggtgatgagctgaccagcctcaaggactacgtgaccaggatgaag

SEQ ID NO: 57967 - DNA, 257 bp, Zea mays
agaacattagcttcacggtctgggatgtcgggggtcaggacaagatcagacctctctggaggcattacttccagaacacacagggtcttatctttgttgtggatagcaatgaccgtgaccgtgttgttgaagccagagatgagctgcacaggatgctgaacgaggatgagctacgtgatgctgtgctgcttgtttacgccaacaagcaagatcttcctaatgccatgaatgctgctgagatcactgacaagcttgga

SEQ ID NO: 57968 - DNA, 271 bp, Zea mays
aatccttcaagcgcaagtgcctcctcctcgtcgtccggtcgtgagaagggatggcgggccgtggcaaggctatcggcgctggcgccgcgaagaaggcaacgtcgaggagctccaaggccggactccagttccccgtcggcaggattgctaggttcctcaaggcgggcaagtacgctgcagcgcgtcggcgccggcgcccccgtgtacctcgccgccgtcctcgagtacctcgcggctgaggttctcgaacttgccgggaacccgcgaggga

SEQ ID NO: 57969 - DNA, 275 bp, Zea mays
ccgccgccgacgccgcagaagagacgcatcgaggttagcacgcgaagagacgaccatgagggccaagtggaagaagaagcgcatgaggaggctcaagaggaagcgcagaaagatgaggcagagatccaagtaggcagatcgagatggattgtggacctgatgacatgcgtgggtacatacatttcttcggatgcgttggtgtgcctgtggagagatgtcaacctgccatggtgtcacggtccgccatcagttgaacgtcttgcctgcacttcagt

SEQ ID NO: 57970 - DNA, 277 bp, Zea mays
ccgggtcctcggagcacgatgaagtttgttgctgcctacttgcttgctgtcctcgctgggaacgccagcccctccgctgaggatttgactgccattctggagtcagttggctgtgaagttgacaatgaaaggatggaactcctgctgtccctactgagcggtaaggacatcaccgagctcattgccgcgggcagggagaagtttgcttcagtcccatgtggtggcggtggtgtcgctgttgcggcagcttcacctgctgctggcggactgctcctac

SEQ ID NO: 57971 - DNA, 280 bp, Zea mays
  unsure (1)..(280): unsure at all n locations
ggaggaggccgcgagtgctgtacnnccccggacctgcggggatccgcagcgatctagccgagataggcggaaggatgtggagcggtttctcgatgctgcagaacaacttggccgtggccgagatctccaagatcgcctcgtcgctcctgccgttcgggcaaggggaggcggacgagggggagtccgtgcccggcatcaccgaagaggtggtggtgttcgtcaggcacatctccacgcggcccgagacatggctcgattttcccctcttcatcagcgagcg

SEQ ID NO: 57972 - DNA, 274 bp, Zea mays
gctggtatcctggtcaacggctgcatcagggacgtggatgagatcaacggctgcgacatcggtgtccgggctctcagctcgcaccctatgaaggccaacaagaaggggatgggcgagaagcacgtccccgtcaacatcgctggaaccaggatttgcgacggcgagtggctctacgccgatcccgatggcattcttgtctccaggacggaactcaccgtgtagacagacacctggttgtatgtgtgtgtgtataaggaatcgggcgctcttgctg

SEQ ID NO: 57973 - DNA, 109 bp, Zea mays
gccgctatctacctatatcgattttagtaggtactcactcctgtacataaaccctgcagaaaaaaagagggttcagttgtttatggacccctggcaaatttgctatcgc

SEQ ID NO: 57974 - DNA, 279 bp, Zea mays
gaagcatgtcaaggcagagaacggagtcattctcaccaagcccttccttgatgtctgcaagcaaatattgcctgtcctcgataaatttggaggtgctatggcaattgtaaagagtgatatcggcggcaatatcacaagactggaaaacaagtatacttcagaaccatcaaagtatgaacacttgtacagcatggttcaggaagaagttcaaaacaagaccgcaaaaggttcctcaagctgcacaaatgggcttctgtggctgacgagggccatggactt

SEQ ID NO: 57975 - DNA, 279 bp, Zea mays
ggcgagtgcacaggcagtggggcaaggagaacgaggccacttcgttctgaagagcggacacaccattccggccgttggtctaggcacttggagggccggctcagataccgctcactctgttcggaccgccatcgccgaggctggatataggcacgtggacacagctgcccaatacggagtagagaaagaggtcggtagaggacttaaagctgcgatggagggcgggatcaacaggaaagatttgtttgtgacgtcgaagctatggtgcaccgagctggc

SEQ ID NO: 57976 - DNA, 273 bp, Zea mays
cacccggggaacaacctggccaccaagggcatgtgcgccaccctctacgtcccggccgcagcccaactcccccaccgtctacgactggctctacagcgacgagaccaggagcaaccaccgctagatcgggcgagatggatggacatgaagaggccatgtttgctggtccttgtggttatctaaaacgcacgcatgctctattatagctagtcatcactatatatatacttgtgtttgtgtattgttgttcttgttctgctggtgtctccgccg

SEQ ID NO: 57977 - DNA, 272 bp, Zea mays
caccagattcattggttctcaattttcaattctttcatgatggttatctttctcactggactagtgtcaatgatactgatgcggactctaagaaatgattatgcaaagtatgcccgtgatgatgatgatattgaaactctggacgagatgtcaatgaagaatctggatggaagcttgtacatggtgatgttttccggcctccttgcaatctagttcttctttcagctcttgttggtattggtacacagttggcagcactgattctactagtg

SEQ ID NO: 57978 - DNA, 273 bp, Zea mays
ggactacaacaagttttacgaggctttctccaagaacctcaagcttggcatccacgaggactcgcagaacaggaccaagatcgccgagcttctgagataccactccaccaagagtggtgatgagctgaccagcctcaaggactcgtgaccaggatgaaggagggacagaatgacatatactatatcactggtgagagcaagaaggcagtggagaactcccccttccttgagaagctgaagaagaggggctatgaggttctgtacatggttgat

SEQ ID NO: 57979 - DNA, 271 bp, Zea mays
cgctgattatgtctcaaatgagcttggagaagagatttggccagtccagtgtttttgtagcctctactctgatggaatatggcggtgttccacaatctgcaactccagagtctcttctgaaagaagctattcatgtcatcagtgtggctatgaggacaaaactgactggggaactgagattgggtggatctatggttctgttacagaagacattctcaccggattcaagatgcatgctcgaggctggcgatcaatctactgcatgcctaag

SEQ ID NO: 57980 - DNA, 273 bp, Zea mays
  unsure (1)..(273): unsure at all n locations
tcgcgactcctctccgactctccgcacaggactccaaccgcctcgccgttgcatcgccgcgggcgtcaacctaggctgctgccggtaccggtgcgtccccagccatggctcggccgccgcaggaggcgatcgacaccttcgtagcatcaccggcgccgacgccgtcaccgcagtccgcgtgctcgagcttggagaagatgggagctctcaactgggccaaagtagttcatgagcaccaagggtggcgcccatnagctgtatctggctccatgc

SEQ ID NO: 57981 - DNA, 270 bp, Zea mays
agccgtgacatgcatgaccatgttgttggggtgtgctttgtagcccaggatatgactgttcacaagttggtcatggacaaatttacccgggttgagggggactacagggccatcattcacaacccgaacccgctcattcctcgatatttggtgccgaccagttcggatggtgctctgagtggaacgcagccatgaccaagcttactgggtggcacagagatgaggtgatcgacaggatgctccttggcgaggttttcgacagcagcaatg

SEQ ID NO: 57982 - DNA, 269 bp, Zea mays
gagcaggagtgtggtcggggtggacagggactacctgtcctacgacgagccaaagacggtgttcccgggcgaggcgtgcgatgaccttggcggcgagttctgcgaggcgccgtaccaggacggcgtctccaaggagctggcgcacgcctgaagaccctgatccatccatttctgtccaccacgctatgtacgtatgtgtagcagatggttgacatctacgtgttagagcccggagagctggagaagctagctagcgtgcttacagaata

SEQ ID NO: 57983 - DNA, 271 bp, Zea mays
  unsure (1)..(271): unsure at all n locations
catcaaaattgtacggaagtcctccacatgtagatgagcgtcatcgtcatagatacgaggtcaatccctcttttgttcccatgcttgaaagtgctggtcttcattttgttggttgtgacgaaagtcgaaaccggatggagatgtggagctacaagatccccccttctatgtaggtgttcagttccacccggagttcaaatcaaggcctcgaagaccttcacctccttttacaggtctaataatggcgcactaanacaactgggagcaaatt

SEQ ID NO: 57984 - DNA, 268 bp, Zea mays
gctgctgctgttaaaaaagtgtacagaaaagcaacactgtgtatccatcctgacaaggtgcagcaaaagggtgcaaatctccaacagaaatatatcgctgagaaggtttttgatctccttaaggaggcgtggaacaaactcaactctgaagagctcttctaaacagcctcacgactgaacatagggtcgcccctcagggtctgcacaaggtactctcggaagaaactcacaagctggagtggcttgaggttggtcggggggaacatga

SEQ ID NO: 57985 - DNA, 270 bp, Zea mays
ggcgtttgctcccgaatcccttcggcccgcccgctcgacgtgatcccaccggcagccatggatccatacaagcaccgcccgtctagtgggagcaactccagcttctggaccaccaactccggcgcccccgtctggaacaaaactctgccctcaccgtcggacagcgatgtctaatcctccttgaggattatcatctaatcgaaaagcttgctcagttcgacagagaacgtatccctgaacgtgttgtgcatgcacggggagccagtgcca

SEQ ID NO: 57986 - DNA, 262 bp, Zea mays
ctcgcagtcaagaaggatcttgaaccagaatactcatgcagagttgttcaacgcatccatgaagaggtaccagaagaagtccttgctttggacaaaagagttgagtgtaactccaagattgctgttgcactctcattaatgacgagtgcttccttccgagtgttgaccagagaactggcatcaacttgatacgcaatgttgtgtataactgtggatcaaattttgcccgattggatttccgtggattctatataattatttt

SEQ ID NO: 57987 - DNA, 275 bp, Zea mays
ctgcagatgagaaggcattctttgatgactacaaagaggcccacctcacctactccgaactggggtatgctgatgcttaaatggcccatatcctggagcgggatacaaactgctgcctgtatggactcgtgcgatcttttgcatttggattcagggtgaaccaccagattgtctagtgtcttctctgtaataagtttatctgttcttggtactttgtctatggttgaatcggaacccattttacgtttgcctagattcctaaattcttgtgctgt

SEQ ID NO: 57988 - DNA, 273 bp, Zea mays
aacctctcaaaccctagccgcctcctgcaagtttcagagctcaggaatctgcgccatggcgagtgagacggagaccttcgcatttcaggctgagatcaaccagctgctctcactcatcatcaacaccttctactccaacaagggatcttcctccgcgagcttatctccaactcttccgatgcgctggacaagatcaggttcgagagtctcactgacaagagcaagctcgatgcgcagctgagcttttcatccaccttgtcccagacaaggcca

SEQ ID NO: 57989 - DNA, 266 bp, Zea mays
cgggagcagtcgacgcgccgtcactgaatcctcagatcacggctagccgtaatcacacgccactctgctgactcccggcgagcagtgtaacattttccttcagccatgggcaaggagaagactcatatcaacattgtgtcattggacatgtcgactctggcaagtcgaccaccactggccacctgatctacaagctcggcggtattgacaagcgtgtgattgagaggttcgagaaagaggccgcggagatgaacaagcggtcattc

SEQ ID NO: 57990 - DNA, 266 bp, Zea mays
gaacagttgagtgggcatagggttgggtggaaaaaggctcttcactatttaacagaacatttttcaggtggtactaaaattggaaagcaagcaaaccagccaattgttttgctgatcgatgaacttgatcttcttatactagataccaatcggtgtcgtataacattcttgactggcctaccaaaccagattcaaatctagttgttataggtataggaaacacgatggatcttccagacaagttattgcctcgtatatcaagtcgg

SEQ ID NO: 57991 - DNA, 274 bp, Zea mays
attcggctcgagactgcttggtttggatgttggtagtgttctggaagtgaccaactgttttccgttccctatcagggaagaggatgatgaagcagatgcagatggtgccaattatcagcttgagatgatgaggtgtttgagggaagttaagttgacaacaatactattggatcctatcagtcttgcttgcttggatcttttcaaactgtggaactgattgaaacatttatgaactatcaggagagcatcaggagatgtgtgccatggtctatga

SEQ ID NO: 57992 - DNA, 267 bp, Zea mays
caaatgggcaggctccttcgccaggtgctcgtgttgtctatgtagatggcacatttgatcttttccacgctggccatgttgagttcctcaggagtgccagacaacttggtgactttcttcttgtgggtatctatgacacgagtcgatcagggatagaagaggctgtcgtcctataatgcatctccatgagcgtactcttggtgttcttgcctgccgttatgttgatgaagtcattattggtgcaccatgggaagtttctaaggacat

SEQ ID NO: 57993 - DNA, 273 bp, Zea mays
  unsure (1)..(273): unsure at all n locations
gagcaataccaaaagtcatcagaangaggtttccaactggggttncgccncnctgtggttcaattggtctgtgggctggtttnattattggtttngtcacagaatactacactagcaatgcatacagtcctgcaagatgtgcggattcgtgcagaactggtgctgccactaatgncattntnggtcttgctcttggatacaagtctgttatcatcccgatttncgctattgctgtnagcatctnatgtcantttctccantgctgcgatgtac

SEQ ID NO: 57994 - DNA, 261 bp, Zea mays
caggacaagatcaggcccctgtggaggcactactttcagaacacacagggacttatttttgttgtagacagcaacgacagggaacgtgttgttgaggctagagatgagctccacaggatgctgaatgaggatagctgcgtgacgctgtgctgtctgtatctgcaaacaaacaagatcttcccaatgctatgaatgctgctgaaattactgacaagcttggtctgcattccctgcgacagcggcactggtacatccagagca

SEQ ID NO: 57995 - DNA, 268 bp, Zea mays
cgacttcgctctcaaactcgaggctgcttgcgttgagaccgtggagtccgggaagatgactaaagatctggcgattcttgtccatggatcttccagcgtcacgagaagccattacctgaacaccgaggagttcatgacgcagtcgctactgagctccgatcaagactgggagccaactgagcctacaagaaactttgcatggcgactttgaatgcttcgtcaccgtcaccgatctgctagtcgtcttttctgttatgaagcagtgaat

SEQ ID NO: 57996 - DNA, 265 bp, Zea mays
tgtggcgattggccatgtcgactctggcaagtcaaccaccaccggccacctgatctacaagcttggaggcattgacaagcgtgtgattgagcaggttcgagaaggaagccgctgaaatgaacaaacggtcctacagtacgcttgggtgcttgattagctcaaggctgagcgtgagagaggtatcaccattgatatcgctctgtggaagtgtgagaccaccaagtactactgcactgtcattgatgctcctggacatcgcgacttc

SEQ ID NO: 57997 - DNA, 258 bp, Zea mays
tgaggggcaaatttcctccaacaacattgaaatcggaattattcgagctgatcgtgagttcagagttttaagcccagcagagatcaaggatttcttggaagaggtggagtaagctgtctgttgatgatactattcagacaacaatagcagtgtcacttatgagcagccagcctgaagattgtcttggttttattactctgtaaactgatttgctccagcgccatgtggtgggtacatttgaagctccttcacgcatac

SEQ ID NO: 57998 - DNA, 261 bp, Zea mays
gaaaccaggaatgaaggttttagatgtgggctgtggaataggtggaccactgagagagattgcaagatttagctcaacttcagttaccggattgaataacaacgaataccagataaccaggggaaaggagctcaccgtttagcaggaattagtggaacatgtgattttgtcaacgcggacttcatgaagatgccgttcgatgacaacacttttgatgctgtttacgccattgaggcaacatgtcatgcacctgatccagtt

SEQ ID NO: 57999 - DNA, 154 bp, Zea mays
cgattttaaaatccaatacagcagtattgttcgcctctttcttttgccgaagtcaaacaaccctcatacatttgtttgtatcactcttgatccaacaaatccgtaaaggacaaacatggtatcctcacattgttatccagtttgagacagaggc

SEQ ID NO: 58000 - DNA, 305 bp, Zea mays
tcggaattttgctcgagctcgagccgctcgagccggttggtggtcttgcttactatgtaactgccccaattaagttgggctgatgtccttgcaaatccattccatgcactgttttatgtggtcttcatgctgtcagcctgtgctctgttctcaaagacatggattgaagtttccggttcatcagcaaaggatgttgctaagcagctcaaggaacaacaaatggtgatgccaggccatcgtgagtcgaacttgcagaaggacttaaccgatacatccccactgctgctgcatttggtggtgtatgc

SEQ ID NO: 58001 - DNA, 246 bp, Zea mays
atcgacatacgcatgaatctcaaggcgaggagggtggagctaaagacaaggcaagacacaccagatctcagcaactttcagaaatgtgttgactttgtgcatgcttttatgctcgggttcgacattgctgatgccgtcgccttgttgcgtcttgatgatctgtatgtggattcctttgaagatcaaggacgtgaagaccttgcgaggggagcatctgtcgcgcgctattggcgcttatcagggaag

SEQ ID NO: 58002 - DNA, 288 bp, Zea mays
gtgctttcagggctggtttgataaatgaagcccatggttgcttgactgagctctaatctactgggaagggtgaaagaattgcttgcacaaggtgtgcaacaaagccgataccatgaaaaaactcccgaacaggaaagacttgagaggagaaggcaaatgccttaccatatgcatataaacctggagcttttggaagccacacacttgatctgtgcgatgctgattgaagtccccaatatggctgccagcacctatgacaagcggagactatgagccaaacattccgaa

SEQ ID NO: 58003 - DNA, 291 bp, Zea mays
gaaaggaagtacagtgtctggatcggtggctctattttggcttctctcaacactttttcagcagatggtggatctccaagggagagtatgacgaaactggtccgggcattgtccacatgaagtgcttctaagtttttttgggaaatttttccaaaaaaaaaaaagaagtttctggggaattcgcacatggtaggtcaggcgttaccggctcattgtgaaccaatacatgaactgccatgataaggttataagcagaaataccagtagcactggctccaattcctgaagatg

SEQ ID NO: 58004 - DNA, 281 bp, Zea mays
ttcatctattaaaacaagtaagacaatagaaaggcttggaagcaatggtgttccacccaagaacaagccgattccaagtgaggcaacgagtcaggaagcgcaccatggtcggatgaacgaagaagaaaaatctgttgcatggaatggatgtatgttattagattaaaataacaaaatttatgtatggatagaatcacaaatgaattctgaaacattttctcataacagtaaaaaaacaaaatttatgtatggatagaatcacaaatgaattctgaaacatt

SEQ ID NO: 58005 - DNA, 197 bp, Zea mays
gatttatgatcagtatggtgaagatgcccttaaggaaggaatgggctgtggatgatcccatgtttgatcccattggagatctactcatcattttttggacctcttttggaggagttggtggaagcagcaggggaagaaggcaaaggaggggagaagatgtagttcacccacttaaagtttctctggaagatctttac

SEQ ID NO: 58006 - DNA, 266 bp, Zea mays
acggcgcccacgctcacgctcaccggccggaagatggaagccgacaagctgcagaccgtcgacggctgtgccatgttcaccggagggttcttcttcggtggtatctccggcgtgctctgggcatacttcctcctctacgtgctcgacctcccctactacttcatgtagactacgaattcatgcagctgcatctatgtcatatagctccgcctccgaacctcctctctgcgtgcaaaggtatgccatttcagcagtgacgagcatcg

SEQ ID NO: 58007 - DNA, 283 bp, Zea mays
caaggatgatgagcgtggtggatacccacctgagcgtgtccactctcgccggcattccaggcacttgccgccagagtactaccagagcttcagatgcactaccaagggcgatgtgtatagctatggcgttgtattgctcgagctgctcactgggaaaccgcctacagattcaacggctttcggcgaggacaacaatctcgtaggatgggtcaaacaacactcaaagtcgaagctggcagatctgtttgaccctgtactactggtggaggatccggccttggag

SEQ ID NO: 58008 - DNA, 142 bp, Zea mays
ggaaattgtctctctcttatgactacaactggagctaaaggtggtccggttaacatgaatccagataacatcattaacaaggccagcaagagctagaaggaaagcgtgttccacggatggtttctgggaagactttaccgag

SEQ ID NO: 58009 - DNA, 280 bp, Zea mays
tcctactgggtgaatgaggatagtacctacaagtactttgagatcatccttgtggacgtttgccaacaaggccatcaaaactgacccgaggatcaactggctatgcaaccctgtgcacaagcaccgtgagctccgtggcctcacctcagcaggcaagaagtaccgtggcctgcgtggcaagggccacacccaccacaagaacaggccctcaaggagagccacctggaagcgcaaccagaccctctccctccgcgactaccgctgagcagctcgtcgggtg

SEQ ID NO: 58010 - DNA, 288 bp, Zea mays
agcactggaggatggccgcaccctggcggattacaacatccagaaggagagcactctccacctggtgctccgcctcaggggtggcatgcagatttttgtgaagacattgactggcaagaccatcaccttggaggtggagagctctgacaccatttacaatgtgaaggccaagatccaggacaaggagggcattcccccagaccagcagcgtctgatctttgcgggcaagcagctggaggatggccgcactctcgcggactacaacatccagaaggagagcacccttct

SEQ ID NO: 58011 - DNA, 298 bp, Zea mays
ggagtctgctcaaacttcctgtgtgacttgaaaccaggcgccgatgtgaagatcacaggaccagtgggcaaggagatgctcatgcccatagactccaatgcaacaggcatcatgctcgcaacggggaccggtattgctccgttccgctcctacttgtggaagatattcctggaagagcacgaggactacaagttcaacggccttacgtggctgtgcttgggagtcgcgacgagcgacagcctgctgtacaaggaggagcttgagtaggtgaaggagatggcgccgggcaacttcggct

SEQ ID NO: 58012 - DNA, 292 bp, Zea mays
ggctgctcaagatgaggagtttgaagttatggatggtgaggatgacgatgatgaagacaatgatgatgaagacgaagatgacgaggatgatgatgatgatgatgattacgattcaaagaagaccaagggaactgccggaggggaagggcagcagggcgaacgacctgcagagtgcaagcagcagtgaggtgctgcacaatgaatgttggcaggcattgtttgtggagcattagtttggttctgcttgatgctcaaggtcattgagttggtttgtggaacttcgagggggcgc

SEQ ID NO: 58013 - DNA, 294 bp, Zea mays
ctgaggttggtccagtccatgcgccaaggtttcccaagcctaaggaagaaggctggtggctggtgattggggacagctccacaaaccagttactggcaatcaaaagagtggcactccagaagagggcgagagtgaaacttgagttctctgctccggcagaggctgggagaaaggactacatgatttacttgatgtcagactcttacttgggctgcgatcaggagtatgaattcaccgttgatgtcaaggatgctggaggggattgatgatgaagactgtgacactatgtcgcat

SEQ ID NO: 58014 - DNA, 288 bp, Zea mays
tgtatttgcagtcgctctcacagatcatgaatggttctatggacgagctggctcgatgcccaggaatcggtgagcggaaggtaaggcggctctatgataccttccatgagccgttcaaacgggttcctgcccgaccacgaccaaacctcgtagtacccgataccccggaccgggagaaagcaaaaggccaaccttcgtctacagatggcagcagtttgcaagatgcggtagagaagccagatgcgtcgaagaagacgaagaaaggctctgatgtaagatcaccctcac

SEQ ID NO: 58015 - DNA, 282 bp, Zea mays
catggacctgttcaggaagtgcatggagcctgttgagaaatgcctgagggatgccaagatggacaagagcagcgtccatgatgttgtccttgttggtggctccactaggatccccagggtgcagcagctgctccaggacttcttcaacggcaaggagctgtgcaagaacatcaatcctgatgaggccgttgcctatggtgctgctgtccaggctgctatcctcagtggtgagggcaacgagaaggtgcaggacctgcttctgcttgacgtcactcctctctc

SEQ ID NO: 58016 - DNA, 282 bp, Zea mays
ggtcaagtctctcaaatttgtcaccaacaaacgtacttacggaccgtacggcagggacgagggcaccccgttccgtgtcaaggtgatgaacaacggccacgtcgctggcttctttggccgctctggagattgcctggacgcgatcgggctctacgtgatccccaactaataactaaaacgatggatcggatcatctgcatgcatgcatatgcagtatgctgcttgcctgcctgtaacgaatatgaatgcataaaataacgcccctgctgctcccatatgcat

SEQ ID NO: 58017 - DNA, 268 bp, Zea mays
gccccccgccttgccaccccactgttcccgccatccttggatctccagccatgtacggcgtatacgaggtttcggcaatcgtcatagatgtgggctcttacagctgcaaggcgggctacgcaggcgacgacaccctcaaggccgtcttcccatcggttgttgtctcaattgaacaaactgaagacacagatgaccccaagccagagaaggaagctgactctgcatcagattctaagaacggtgccaagcccatggatgttgacaaagc

SEQ ID NO: 58018 - DNA, 285 bp, Zea mays
cttctacatgctatggacctcagtggtttgttgcttttgtattcttcccttggggatgctgaaggcattaacaaattggcatctgtagccaaagaacaaggaaagaacaatgttgctttcctttgtttcttcatgctaggaaagctggaagagtgtcttcaattgctaatagaaagcaatcgtattccggaagcagcattgatggcaagatctcatcttcccagcaaagtccctgagattgtagcattgtggaaaaaggatctccagaaggtaaactcaaaagca

SEQ ID NO: 58019 - DNA, 277 bp, Zea mays
agcgatttgccatgcccaacaccaggattatgatccatcagcctgtcggaggtgcaagcgggcaggccctagatgtagaggtccaagcgaaggagatattgaccaacaagaggaatgtcattcggatcgtatcaggcttcacaggccgcattcctgagcaggtagagaaagacattgacagatttcgttacatgggccctctcgaggctgtcgattatggactcattgatggcgtgatcgatggagacagtattatcccacttgagcctgtcccgga

SEQ ID NO: 58020 - DNA, 277 bp, Zea mays
cccgcggcaacggcaccggcggcgagtccatctacggcgagaagttccccgacgagaagttcgtgcgcaacacaccgcccccggtgtgctctccatggccaacgccgggcccaacaccaacggctcccagttcttcatctgcaccgtcgcgaccccttggctcgacggcaagcacgtcgtcttcggccaggtcgtcgagggcatggacgtcgtcaaggccatcgagaaggtgggcacccgcaacggctccacctccaaggtggtcaaggtcgctgac

SEQ ID NO: 58021 - DNA, 188 bp, Zea mays
ctcctcctgtacataagcctgaaaaaaaatgggttcagttgtttatggaactctgccaaatttgcttttgcatgccatgtaaaaatccagctagctcttgccaagcttcccctgcgcagttcaacaggactgcgattgatattcggtgtaatggaagtatttatcggaacaatcagcaatgttatgct

SEQ ID NO: 58022 - DNA, 278 bp, Zea mays
  unsure (1)..(278): unsure at all n locations
agtgaagcgcaggcccagatgaatgaggagctgtccggatggaagcttgtggtcagtgatgtgttccgtgcgccaagcaacccgatgctgctttgtatcatggttggggacggtgttcagatccttgggatggcggttgtgaccattctctttgctgggcntcggttcatgtccccagcctcccgtggtactctgatcacgggcatgctgttcttctatctggtccttggaatcctggctggatatgttggtgttcgcgtatggaagacgatcaagtg

SEQ ID NO: 58023 - DNA, 274 bp, Zea mays
agcagctctagggagttatggggcttatcttgctgatggctctgagtacagtggggattatggtgaagctggtacgaaagagttcctgaaggactttcatcggcggaggcttcaggttcttgctgaagcaggcccggatttgattgcttttgaaacgatccccaacaaattggaagctcaggcatatgttgaactccttgaggaatgtaacatcaatatcccttcatggctttccttcaactcaaaagatggagtgcatgttgtgagtggtgat

SEQ ID NO: 58024 - DNA, 272 bp, Zea mays
gtcgctgctcccacctctagcccgacaggtgaagccgccgcctgtgttatgtccatagccaccgcaggagactgagatggggggttttgtcaagacccacaagaccaatgcgtacttcaagcgtttccaggtgaagttcaagagaaggcgcgctggcaagacagactacagggccaggataaggctgattaaccaagacagaaacaagtacaatacacccaaatacagatttgttgtgcgatttaccaacaaggacatcacagcacaaatca

SEQ ID NO: 58025 - DNA, 276 bp, Zea mays
ccagcgtaccctcctgcccgtccaccgagacgtcaagcggatgaatactcggggagtgagagggaggagtcagagtacgaaacggatggtgaggatatcgaacattcaccgcctcgtggaagaagggaggacgagctggatgaggaggaagaatatgaggaagatgttgaagaagaagaagaagcgcctctgtcggatgaagaaatggaggcaccgaaacgtaagagagaatcagggggtggtgggcaaaggcgcgaggagctggtgtctgaggag

SEQ ID NO: 58026 - DNA, 273 bp, Zea mays
tgttgcggccctagttagctatttgtcttttgtgtactatctgaggcaagagattgattggctaggatctggcgaacacttgcctgtgtaggctgttcatctgaagggggaaatttgcacgagacacctcggatattacaacaatggatagattcaagttgattaaggaagttggcgatgggactttcgggagtgtatggcgtgctataaataaacagaatggtgaagttgttgctgttaagaaaatgaagataaagtattattcttttgagg

SEQ ID NO: 58027 - DNA, 273 bp, Zea mays
caagtgggtgattaattctatagataagattcggagactatgtatacggaaaggtagaaaggacgtatatggtggcaattgccttgtgtcgtgggacattgtgacaatgcctttggatctcggtgggcttgggatttctaacctgctgtaccagagttgggctctgccagctaaatggctatggctagtctaaactgatcctaccaagccgtggtctggtttggacttgcctattcaacaaattgtcaagagattctttactgcttctattgt

SEQ ID NO: 58028 - DNA, 275 bp, Zea mays
gaaggtctgactgccccaactgaggtccaatccgcagcaattcctataatagcacaaaagcatgatgttgtgatccagtcatatactggctcagggaaaactcttgcttatcttcttccaattctttctgatataggccctctgaagaggactatggaacaagaccattctgagaaaagatcaggtatagaagcagtcatcgttgctccttcgagagaattaggaatgcagattgtgcgagaagtggagaagattttgggtcctaatgacaaaag

SEQ ID NO: 58029 - DNA, 274 bp, Zea mays
gcctcctgagaactggaacggtggtgttgggtttgtgtctaaggaaatgatccaatctcattgtccagcgcctgctgaggacattcagatcctgagatgtggtcctcctccgatgaacaaggccatggctgcacaccttgacgagctcaactacacaaaggagatgcagttccagttctaagcaatgttaagtttgcaaataataattagtgaccgacatggttcttcggtcacaggaatagtacctgactctgctcgttagctgatatcagga

SEQ ID NO: 58030 - DNA, 273 bp, Zea mays
gggatgttagagggggtccccctggtcgtagaccacgcagagaatttgtatggagctatggtttgccagattcagttggagaaaagagagagagatcagaggatcgcagaggcagggacttcgttcgacgcgactggggtcacgatgatgatgaggatttccagcagactaggcgtcatggcacccggagacatcgcagtctctctggctgggcgcgttcttcgcggtgtcgtggaggtccgggggattgcatcagttcgagcggcagaaaca

SEQ ID NO: 58031 - DNA, 273 bp, Zea mays
ctctctcttgctcgcactcgcggagatcgaagagaagcgcaggaggccccagcactagcgccgccccgccgccgcatcagacatggcgctggccgctcgcctcgtctcgcgctcccgtcagctatattcggttcaagccactttggggaatggaggtgtcactcaagttcgctcctttgccaagtatgcagctccagctgaccgtcctcctgtcggtggggatgatctcctgaagggcatattctttgaggtaaagaagaagtttgagacagc

SEQ ID NO: 58032 - DNA, 272 bp, Zea mays
attttgaagagatgaaattcagtttgtattttctaggttacgaggatgtgaccttagcccctgatgatcatatcaagcggactgaatggacttttaggcaaaaagctactcttgagctcacccacaactggggcacggaaaatgaccctgaattcaaaggttaccataatgggaactcagaccctcgtggttttggtcatataggagtaactgtggatgatgtccacaaggcatgtgaacgctttgaacgtcttggggttgagtttgtgaag

SEQ ID NO: 58033 - DNA, 275 bp, Zea mays
ctcaacatggacctgttcaggaagtgcatggagcctgttgagaaatgcctgagggatgccaagatggacaagagcagcgtccatgatgttgtccttgttggtggctccactaggatccccagggtgcagcagctgctccaggacttcttcaacggcaaagagctgtgcaagaacatcaatcctgatgaggccgttgcctatggtgctgctgtccaggctgctatcctcagtggtgaaggcaacgagaaggtgcaggacctgcttctgcttgacgt

SEQ ID NO: 58034 - DNA, 272 bp, Zea mays
gtcttccttcccgcggtctctccgccgcctcccagatccggcggccatggcaaggaacccgggctgcaccgtcttcataggtaacttggatgacaaggttcctgagagggttctgtatgaaattcttattcagatctctgggcaagacaaaccctcattaaatggcaatatccctgtaactcctaggttaaactctgtaccacagccaaagcctcatcaacctatgaggtctagtgatactcctttgccacagcatgcagcagtgaatggca

SEQ ID NO: 58035 - DNA, 263 bp, Zea mays
cactgctcttcgtgaacgcctgattcaggtgctattcatggatggggcattccagtggaaacgactagaaaaccttatagttcttgccaaggagaatgtgtccaagatgagtagcaattccgcactgaaaaagaatagtttgcaagctgtaagaaatcgacagttggagagcaaacttgatctcactctaacaataaaagatggagcacggatgttccttatcgatgctgcgtatcaggagacaacttatactgggctttcac

SEQ ID NO: 58036 - DNA, 249 bp, Zea mays
aacctctcaaaccctagccgcctcctgcaagtttcagagctcaggaatctgcgccatggcgagtgagacggagaccttcgcatttcaggctgagatcaaccagctgctctcactcatcatcaacaccttctactccaacaaggagatcttcctccgcgagcttatctccaactctacagatgcgctggacaagatcaggttcgagagtctcactgacaagagcaagctcgatgcgcaccttgagctttc

SEQ ID NO: 58037 - DNA, 261 bp, Zea mays
gccgccgccatgtcgaagcgaggcaggggaggttcggcggggaacaagttccgcatgtcgctgggtctgccagtggccgcgacggtgaactgcgcggacaacacgggcgccaagaacctctacatcatctccgtcaagggcatcaagggccgcctcaatcgcctcccgtccgcctgcgttggcgacatggtcatggccaccgtcaagagcgggaagcccgacctcaggaagaaggtgatgcccgccgtcatcgtccgccag

SEQ ID NO: 58038 - DNA, 239 bp, Zea mays
gccgccgccatgtcgaagcgaggcaggggaggttcggcggggaacaagttccgcatgtcgctgggtctgccagtggccgcgacggtgaactgcgcggacaacacgggcgccaagaacctctacatcatctccgtcaagggcatcaagggccgcctcaatcgcctcccgtccgcctgcgttggcgacatggtcatggccccgtcaaaaagggaagccgacctcaaggagaaagtgatgcc

SEQ ID NO: 58039 - DNA, 270 bp, Zea mays
ggcgccgccatgtcgcagcgaggtcctcagcgttcggcggggaacaagttccgcatgtcgctgggtctgtcagtggccgcgacggtgaactgcgcggacaacacgggcgccaagaacctctacatcatctccgtcaagggcatcaagggccgcctcaatcgcctcccgtccgcctgcgtaggcgacatggtcatggccaccgtcaagaaggggaagcccgacctcaggaagaaggtgatgcccgccgtcatcgtccgccagcgcaagccg

SEQ ID NO: 58040 - DNA, 270 bp, Zea mays
atttatacctgtcacctaaatttccactctcacggtttagtgagcccctatattatgaatggggtttttggcaccgactcttctatcagtacatgtcaggctttaccgctcgttggaaatattactttatatggtcaatttcagaagcctcaattatcatatctggtctaggctttactggttggtcggaatcttctcccccaaaagccaaatgggatcgtgcaaaaaatgttgatgtattaggtgttgaattagctggaagttcagttc

SEQ ID NO: 58041 - DNA, 271 bp, Zea mays
ctggactttgataagtttaaagatgtcgtagagaagttcagagtgaaggctctgccgacgttcctcctgatcaaggagggcgaggagcagcgcagggtcgtcggtgccaaggtcgaggagctcaacatggcattatcagttatcggttatcctaggacattattcggtcacattcttacttcatcacattattctcgtatatttttaagctggagatatgtcttataaatacaaatggctaattaatgcattttcgatttacaaagattga

SEQ ID NO: 58042 - DNA, 269 bp, Zea mays
tgacatgcaacctctaccatggaattgcacggatcttgaccaagaccttcatgtctgatttccctcatgtcgagaggtatttctggaccatggttaaccagcctaacttcaagaaggtcattggtgaggtcaagcaggcagagtctgcacctcctattccgaaaaaggctgctccttctaaggagccaaaggcaaaggatgtcaagaaggaggctccaaaggaggcccccaagccaaaggtggttgaggcaccagcagaagaggaagca

SEQ ID NO: 58043 - DNA, 267 bp, Zea mays
tgatgaacctgggattctcccaccctgttcggatggccattcctgaaggcctggcggtcaaggtggaggagaacacaaggatcaccgtgagcggctatgacaagagcgcgatcggtcagtttgctgctaccataaagaagtggaggccacctgagccatacaggggaaagggtatcagatatatggatgaagttgtccgaaggaaggaaggaaaagccggaaagaagaaatagaaagtgtttttttgccctctccttacttcatttc

SEQ ID NO: 58044 - DNA, 265 bp, Zea mays
gtcagcctgtgctctgttctcaaagacaaggattgaagtttctggttcaaaatcaaaggatgttgctaagcagctcaaggaacaacaaatggtgatgccaggccatcgtgagtcgaacttgcagaaggaacttaaccgatacatccccactgccgctgcatttggtggtgtatgcattggcgcaatgaccgtcctggctgatttcatgggtgcgattggttcaggaactggtatattgctcgctgtgacaatcatataccaatac

SEQ ID NO: 58045 - DNA, 154 bp, Zea mays
cagcccatcacatggtatcctcacctccgtatgctcggcttcagctcgagggacgaatctggtgagcgtatcattgctggagctggtaagcttcaccttgagatttgcctgacggatctgcacgaggacttcatcggaggtgctgcaattattg

SEQ ID NO: 58046 - DNA, 265 bp, Zea mays
accgtatcagctatgcacggtgacatgccccaacaagaaagggatgccattatgggtgagttcaggtctggcgcaactcgtgtgctaataactacagatgtttgggctcgaggactggacgttcagcaggtttcacttgtcataaattatgatctcccaaataatcgtgagctttacatccatcgcattggtcgttctggtcgttttgggcgcaagggtgtggcgatcaatttcgtgcgcaaggatgacatccgtatactgagag

SEQ ID NO: 58047 - DNA, 102 bp, Zea mays
atcccaccggaccagcagcggttgatcttcgctggcaagcagctggaggatggccgcacccttgcggattacaacatccagaaggagagcaccctccacctg

SEQ ID NO: 58048 - DNA, 251 bp, Zea mays
gtacatgaggagggcgacttggagggaggtcctagaggtagtaagtcacttgtttactccatgatgacaatagcaagcagatcgcggtggtgcctatggatgctacaacaagaaagatcaaaagttcttttggatggatgcagctagatattttgttatgtattttctccaaaagagaaatttgcaacgttgtgagtgatattataattgtgatgcttttgtgaatatataattgtggtgcttttgtgttt

SEQ ID NO: 58049 - DNA, 265 bp, Zea mays
ggaaaaatggttctacttgataaattgctgcccaagctaaaggagcgtgattccagagtccttattttttcactgatgaccaggcttttggatatcttggaagattatcttatgtataggggatatcagtattgtcgaattgatggaaatacaggtggagaagatcgtgatgcatccattgaagccttcaatagtccaggaagtgagaagtttgttttcttactttcaactagggcaggtggccttggtatcaacttggccactg

SEQ ID NO: 58050 - DNA, 266 bp, Zea mays
tgtagattgctcaaaacctttatgagggtatcaacctttcctcagaagaaacaactgggttaataacgtacataagaactgatgggttccatatttctgatggagctgtggaggacattcgttcactagttatagaaagatatggtcagaagtacgtttcggaggacattaggaagtatttaaagaaggtgaaaaatgctcaagaagcccatgaagccattaggcccaccagtataaggaggccgccatcatcattggttggaata

SEQ ID NO: 58051 - DNA, 267 bp, Zea mays
ctcctcctgtacataagcctgaaaaaaaatgggttcagttgtttatggaactctgccaaatttgcttttgcatgccatgtaaaaatccagctagctcttgccaagcttcccctgcgcagttcaacaggactgcgattgatattcggtgtaatggaagtatttatcggaacaatcagcaatgttatgctaaaaaaaaaaaaaaaaaaaaaaaaaaaaaaaaaaaaaaaaaaaaaaaaaaaaaaaaaaaaaaaaaagggggggggggcg

SEQ ID NO: 58052 - DNA, 263 bp, Zea mays
tgatgaacctgggattctcccaccctgttcggatggccattcctgaaggcctggcggtcaaggtggaggagaacacaaggatcaccgtgagcggctatgacaagagcgcgatcggtcagtttgctgctaccataaagaagtggaggccacctgagccatacaggggaaagggtatcagatatatggatgaagttgtccgaaggaaggaaggaaaagccggaaagaagaaatagaaagtgtttttttgccctctccttacttca

SEQ ID NO: 58053 - DNA, 262 bp, Zea mays
tgatgaacctgggattctcccaccctgttcggatggccattcctgaaggcctggcggtcaaggtggaggagaacacaaggatcaccgtgagcggctatgacaagagcgcgatcggtcagtttgctgctaccataaagaagtggaggccacctgagccatacaggggaaagggtatcagatatatggatgaagttgtccgaaggaaggaaggaaaagccggaaagaagaaatagaaagtgtttttttgccctctccttacttc

SEQ ID NO: 58054 - DNA, 288 bp, Zea mays
gtacgatgctgctggggaacttggccatgtccgtgacattatcaagtggggttcagattacttcttgaagacctttaattccacagccgatagcatttgatcgtgtcattgcgcaggtgggaagtactgcaacatcgcctggctcaaggcagcccaatgctcgttattgttggatgaggccagaggacattgactacccacgtccagtggttgagtgccatgcttgttcagatcttgctgcagaaatggctgcggcattagctgcagcgtcgattgtattcaaggaca

SEQ ID NO: 58055 - DNA, 287 bp, Zea mays
ccgccgccgaatccgagactctgatctcgggttcaccgcagcgcacagagcacccctgactcccggcccgatccgcgctctcctctccgacgcttcaatcatggcaggaatggcacccgagggttctcagtttgatgctaagcactatgattctaaaatgcaggagctgaccagcactggtgagactgaggagttcttcacttcatatgatgaagtttttgaaagttttgatgacatgggccttcaagagaatcttctgagaggcatttatgcatatggttttgaga

SEQ ID NO: 58056 - DNA, 286 bp, Zea mays
cattgccattgcaaaaacattgatacatgcagaagtggtttttgtttttgtttcagcttctggccactagaagctgctgcagactgccaagcgcacaacttttcagcccgattctataataatcaatttagtcaaaaccgttcaaaatcaacgtgaacacagaatcgaccgagtcgttgagaacttgcgatagtaggaaaccgtcactttctacatcctaaacatatagacttttttatcttcctccgcatgtagtctccacaatactcattctctccacagccag

SEQ ID NO: 58057 - DNA, 286 bp, Zea mays
ggatcactccaaattcaaaagaaagggtgaagatctcttctatgagcacaccttgtctctgaccgaagcactatgtgggttccaatttgttcttacacatctggacaacaggcagcttctcatcaaatcagaccctggtgaagttgttaaacctgaccaattcaaggcgattaatgatgaggggatgccaatttaccagaggcctttcatgaaggggaagctgtacatccatttcacggtggagttccctgactcgttggcaccagagcagtgcaaggctctcgag

SEQ ID NO: 58058 - DNA, 288 bp, Zea mays
ggaagaacaagaaggatatcactggcaacccgagggctctccggaggctgaggacctcttgtgagagggccaagagaactctgtcttccactgcccagaccacctttgagattgactcgctgtacgagggcattgacttctactccaccatcacccgtgccaggtttgaggagctcaacattgacctgttcaggaagtgcatggagcctgttgagaaatgcctgagggatgccaagatggacaagagcagcgtccatgatgttgtccttgttggtggctccactagga

SEQ ID NO: 58059 - DNA, 294 bp, Zea mays
tttcaattctgttggtttctatcagatgacaaagctggctattattccctgtactgttatactggagacccttttcttcaggaagaaatttagtcggaacatcaagctttcccttagtgtgctccttcttggtgttggtgttgcaactataactgatctgcaactcaaccttgtgggatctgtattgtccctactggcaatcatcacaacctgcattgctcagatcatgacaaatacaatacagaagaagttcaaggtatcttcgacacagctcctgtaccaatcgtgcccata

SEQ ID NO: 58060 - DNA, 300 bp, Zea mays
ccttcactgcaccacttgagtttgctctacatgggaacaaatgatatgcaaatactgtttccatatgctactgcacttaagaagttagaccttcagtttacattcctttccacagaggatcattgtcagatagttcaacgctgctccaatctggaaaccttagaggtgagggatgtcataggggatcgtggactacaagttgttgcacagacctgcaagaaattgcataggctcagagtagagagaggagatgatgatcaaggaggtcttgaggatgaacaaggtaggatttcacaggtg

SEQ ID NO: 58061 - DNA, 286 bp, Zea mays
ggtttttcttgtcaggttgctgaacgtgctttgttcttgtggaacaatgatcatattgtaagcttgatagcacaaaatcgtgttgttatatttccaattatatttgaagctcttgagaggaatatacagagccactggaatcaagcagttatggtctcactgcaaatgtgcgcaagatgtttttggacatggacagtgaactatttgaagagtgccagcagcagtacatggagaaacaagcgaaagccaaagagatacaggaacaacgagaatcagcatggagaca

SEQ ID NO: 58062 - DNA, 284 bp, Zea mays
ggagcacaagatatatatgcagatgtaatagcttgttcctgaccaattcctcgctgtattatgctgattgtgggagcacagtgttctgtagtggtcaggcgctaaagaacattgcgccaaccttattcatgaaagcatgccaagcccttacaaataatcgctggatgcacttttgttctccttacacacatgaggaagagataaaagaattcatttccctccggcaaggtatcaacagcactcaatgatctcgacgatactattttatggaggtggagttacag

SEQ ID NO: 58063 - DNA, 203 bp, Zea mays
ctccacacggagttgtgccaaattagaccgaggcgtccgtgaacttgaatcagttcctcgggatgttgtgcctgagaataaatcccaccgaggcgtctgtgaacttaattcaattcgtcaggaagctgtgccttagaataaattcgacgggtgtccaattttcttgtcaaaaaaaaaaaaaaaaagggcggccgccgattatt

SEQ ID NO: 58064 - DNA, 294 bp, Zea mays
gttactgcttactctccgctgggttcgtcagagaagaacctagcgcacgacccgctcgtcgaaaaggtagccaacaaactggacaagaccccggggcaggtgctcctcaggtgggcgcaccagagggggacaagcgtcatccctaaatcgaccagggacgaaaggatcaaagagaacatccaggtgttcgggtgggagatccctgaggaggacttcagggccctgtgcggcatcaaagatgagaagcgcgtgctgaccggagaggagctcttcgtcaacaagacccacgggccg

SEQ ID NO: 58065 - DNA, 293 bp, Zea mays
caacctggattgccgcagccaagttgctcagcttgcgctaaagcatcgccagaacaagaggcagcagcagaggattatagcattcatcggaagtcctgtgaagtacgacaagaaaattttggagacaatcgggaagaagctgaaaaagaacaatggtgctcttgacattgttgactttggtgaatctgatgatgaaaagcctgagaaactggaagcattgatcgctgctgttaacagcagtgatagcagtcacattgttcatgtccctcctggtgaaaatgctctctctgatg

SEQ ID NO: 58066 - DNA, 297 bp, Zea mays
tggagagcacgggattcgtgacaagggaggccttcattgatttctgggtgaataacaatctgatgagtatggatagtgcaacccaagtgttcacaattctgaagcaacagaatcacaattacctcacaaaggaggattttaaaccgattctgaaagaccttttggacaaccatcctggtctggagtttttaaagagcacacctgaatttcaagaaagatatgctgagactgtcatatatagaatattctattgcttgaatcgaattgggagtggacatctaacacttagggagctga

SEQ ID NO: 58067 - DNA, 279 bp, Zea mays
ggtgaagccgccgccgctgcagtgtccatagccaccgcaggagactgagatggggggttttgtcaagacccacaagaccaatgcgtacttcaagcgtttccaggtgaagttcaagagaaggcgcgctggcaagacagactacagggccaggataaggctgattaaccaagacaaaaacaagtacaatacacccaaatacagatttgttgtgcgatttaccaacaaggacatcacagcacaaatcatctctgctagtatagcaggtgatatggttcttgc

SEQ ID NO: 58068 - DNA, 285 bp, Zea mays
ggaagcccacaccccatatgaccctgacaagatccaggaagctgataaacttgtcatagaggagcttacaaatctttcagagctcaagcatgcttacagagaaaaacatcctaagccaatagctgcatcccctcaagattcacgcttgctctctgaaatacaagagcagcagaatttgttgaagacctacgaggtcatggtaaagaagttccagtcccagatccagactagagacactgagataacccatttacagcagcaaattgatgaagctaaacttcggaa

SEQ ID NO: 58069 - DNA, 286 bp, Zea mays
ggagatggaaaaggtggagagagcatttatggtggaaaatttccagatgaaaacttcagattactgcacaatcagcctggtgttctgtccatggcaaattccggcccagacaccaatgggtcacagttttttattacattcaaggctctacctcatcttgatggcaaacatgtggtctttgggaaggtggtcagtggaatagctttgcttaaaaagcttgaagcagttggtagtgaaactggaaatccttcttatcaagtgaaaattgtagactgtggtgaagttt

SEQ ID NO: 58070 - DNA, 277 bp, Zea mays
ggtcaatccatggaatatagaggcaacagcagaggcgatgaatgaggccatttcaatgccagaacaggaaaaacagttgaggcatgagaaacattaccgttatgtcagcagccatgatgttgcttattggtcaaagagcttcatcctagacttggaaagggcttgtagggaccactttaagaggacatgttggggcatagggttgggttttggtttcagggtggtggccttggacgctcatttcagaaagcttaacatggattcaattgttaatgct

SEQ ID NO: 58071 - DNA, 275 bp, Zea mays
cctcgcctcgccttggtgttcacgccgtcgctagcgcctgccgcggcgaacttctgtgctccccggcgccgggctcgggtcgtcgtcggccaggaagatggctggcggcttcagggtactgcatctggtcaggccttttctggctttcgtgccagaggtgcagagcgcggataggaagataccgttcagagaaaaagttatatacactgttatttccctcttcattttcctggtctgcagccagctcccactctatggcattcattcaacaactg

SEQ ID NO: 58072 - DNA, 279 bp, Zea mays
cgaaccgtctgctgttgcttggtgttgatgacatggatatcttcaaaggaattagcttgaagcttttggcgtttgagcagctcctaatgcagcatccggagtggcggggaagggtggtgcttgttcagatcgccaatccagcaagggggcggggaaaggatgtgagggaggtacaggaagagagcgatgcaatggtgaggcgcatcaacgacgcgttcgggcagccaggttaccagccggtgatactgatcgaccagcctctgcagttctatgagagga

SEQ ID NO: 58073 - DNA, 138 bp, Zea mays
gggttggcttctcctccccctccggttcgggttcgggttcgtgaggttctccggggttcgggttcgtgggtgaacggatcgagatggcggcgtcggatgttgagtaccgctgcttcgtcggcggcctcgcctgggcca

SEQ ID NO: 58074 - DNA, 286 bp, Zea mays
caaggagagatacaaggaactgagtgattatgatagaattataaaaaatattgaaaggggggaagcaaggatatcccgcaaggatgagattatgaaggctattgggaagaagctagaccgctacaagaacccatggttagagttgaaaattcagtacggccaaaataaagggaagttctataacgaggaatgtgaccgctttatgaactacccaagagttggctaggcggtgtgatacccttatccgactggttgagaaagaaaatcaagaatatgatgagcaaga

SEQ ID NO: 58075 - DNA, 276 bp, Zea mays
gggaagcggaattgaacaagagggagaaggaactaaaacggagagaggaggctgcagcgagagctggcattgtcattgaggagaaaaattggcctccttttctgccactcatccatcatgatatcaccaatgagataccgagtcaccttcaaagaatgcaatatgttgcatttgcgtcgtttcttgggttggtttgctgcctcttctggaatgtcatagcagttactacagcttggatcaagggggaaggcgttaagatctggttgttggcaataa

SEQ ID NO: 58076 - DNA, 278 bp, Zea mays
ccaggacttcttcaacggcaaggagctgtgcaagaacatcaatcctgatgaggccgttgcctatggtgctgctgtccaggctgctatcctcagtggtgagggcaacgagaaggtgcaggacctgcttctgcttgacgtcactcctctctctctcggtctggagactgccggaggagtgatgaccgtccttatcccgaggaacaccaccatccccaccaagaaggagcaggtgttctccacctactcggacaaccagcctggtgtgttgatccaggtgt

SEQ ID NO: 58077 - DNA, 281 bp, Zea mays
gctgttgttacatggcaagttctgttcgtctctgtgccgatgatggttttggcactcaggttgcagaagtactatttagcctcagctaaggaactgatgaggatcaatggcactaccaaatcagctctggctaatcacttgggcgagtcggttgcagggtctataacaataagggctttcgaggaagaagatcgtttctttgagaaaaattcggaacttgttgacaagaatgctgcttcatatttctataattttgcagcgactgaatggctgattcaacg

SEQ ID NO: 58078 - DNA, 299 bp, Zea mays
gaccctccaatcccagaaactgtaagaaatgctattgctgtgcttcaggatcttggtgctttaacacaagacgaacaattaacagaattaggagaaaagctgggttccctgccagtccatccatccaccaccaagatgctcctgtttgctatattcatgaactgcctggatccagcattgacattggcatgtgcagctgattacagagatccatttgtccttccagtagcgcctgatgagaggaaaagggcagctgcagcgaaagttgagcttgcttcgttgtatggtgggttcagtga

SEQ ID NO: 58079 - DNA, 299 bp, Zea mays
gacaagttgcgaaaaaagaacaacaaaaaaggaaacgaaaacgagcgggggagctcgcggaccccaaaaccctaaccccgcggacccacctggcggcggcggcggcggcgatggcggacggcggaggagaaggaggacctcctgcggcgtcggcggcgctcaaggaccaggggaatgagcagttcaaggcggggagctacctcacggctgccgcgctctacacgcacgccatcaagctcgaccccgacaacgccaccctctacagcaaccgagctgcagattcctgcagttggttaagc

SEQ ID NO: 58080 - DNA, 293 bp, Zea mays
gtaacattttccttcagccatgggcaaggagaagactcatatcaacattgtggtcattggacatgtcgactctggcaagtcgaccaccactggccacctgatctacaagctcggcggtattgacaagcgtgtgattgagaggttcgagaaagaggccgcggagatgaacaagcggtcattcaagtatgcctgggtgcttgacaagctcaaggccgagcgtgagagaggtatcacaattgatattgctttgtggaagttcgagaccaccaagtactactgcactgtcattgatg

SEQ ID NO: 58081 - DNA, 293 bp, Zea mays
catcttctgctcgctggtgtcccctccctctcacccatggcttcggcggcggcggcaactcaggtggggacttacttcctgcggaactactacaacctgctgcaacaaacccccgatgtcgtccaccagttctacagcgaagcagcaccatggtccgcgtcgacgacctcaccggcacgaccgcggctgccaacaacatgatggacatacactcactcatcatgtctttgaacttcacccaaattgagatcaagactgccaattttgtgaactcatggggcgatggggtgcta

SEQ ID NO: 58082 - DNA, 290 bp, Zea mays
catgatccaaatgactttgaagttggaaagcggcataaccttgaattcatcaatatcttcacagacgatggaaaaataaatagcaatggaggtgcaaaatttgatggaatgccaaggttcaccgctcgagttgctgttattgaggcgctgaaggaaaattctcgtataaggacacaaagaagaatgaaatgagcttgggtgtttgttcaagaactaatgatgtagtggaacctatgataaaaccacagtggtttgttaatagcaaccacatggccaaggcgggccttgac

SEQ ID NO: 58083 - DNA, 292 bp, Zea mays
agaatttctccaggactgctagagaacttgtaaaccgaatgcagaagattgatagcgattattatcctgagacactccaccaaatgtttgttgtgaacgctggcagtggattcaagtggatctggaacagtgtgaagggcttccttgacccaaaaacttcatccaagattcatgtgctcggttcgaactaccagagtaggcttcttgaagtaatagattcgagtgagttgccagaattccttggtggttcatgcacatgtagtgacaagggtggttgccttggatcgaacaa

SEQ ID NO: 58084 - DNA, 290 bp, Zea mays
gcacaggggaacttggtacagccatccatggtatcagaatatgacctgggaggagaaggggacctgttcaaagctccagaagccatcatcgaggaaccgctgctcctgaactgtctgtctgattctgttcatttgttgctgtgtaggctgggcttgtgccaagcttgaatcctcttgtgaaggagtttctcaatgctgctgatgacaagcggaaggaagtcctctctaaaatagaagaggatgttgctaagctcagcggttctgcagccaactaagaagctacaagtgaa

SEQ ID NO: 58085 - DNA, 290 bp, Zea mays
ctgctccattctcagccgccgccaatcccttcccgtgctccgcaaccgctgagtgagaagaagagatggccggcaagggcgatggcccggctatcggcatcgatctcggcacgacgtactcttgcgtcggcgtgtggcagcacgaccgcgtcgagatcattgccaacgaccagggtaaccgcaccacgccctcgtacgtcgccttcaccgactccgagcgcctcatcggagatgcggccaagaaccaggtcgccatgaaccccatcaacaccgtctttgatgccaagcgt

SEQ ID NO: 58086 - DNA, 291 bp, Zea mays
agcgaggatgacatccacaagagcgtaaaatacaatgtgtgggcaagcacaaccaacggaaacaagaagcttgatgctgcttaccaagaagctcagtcaaagggatctgcatgccctatattcttgttcttctcagtgaatacaagtgggcagtttgttggtgttgctgaaatgactggcgccgttgattttgagaaaaccctagagtattggcaacaggacaagtggaacggctccttctctgttaagtggcacattgtgaaggacgtgcccaacaatattctcaagcac

SEQ ID NO: 58087 - DNA, 221 bp, Zea mays
catggttgcaaaatttgatggcattcttgggctaggctttcaggaaatatctgttgggaatgcaacacctgtgtggtataacatggtaaaacaaggtctcatcagtgaccctgttttctctttctggtttaaccgacatgctggtgaaggagaaggtggtgaaattgtgtttggtggaatggattctagtcactacaagggtgatcacacctatgtcccag

SEQ ID NO: 58088 - DNA, 107 bp, Zea mays
ctctcagcacttttcagcagatgtggatctccaagggagagtatgacgaaactggtccgggcattgtccacatgaagtgcttctaagtttttttgggaaatttttcc

SEQ ID NO: 58089 - DNA, 285 bp, Zea mays
cacaaactcgtcgcttccgctccacaggatcctctgcgccacccacaaccgtgcgaccgtccgtgctgccggcgaccccgatccgccgacccgtcccgtcccaccacaccctaccgccgctcgcagctatgtcgccgtcggagccgacgcgcgaggagagcgcgtacatggccaagctggcagagcaggcggagcggtacgaggagatggtcgagttcatggagcgcgtcgcgcgctccgccggcggcgccggcgaggggaggagctatccgtggaggagcgcaa

SEQ ID NO: 58090 - DNA, 290 bp, Zea mays
ctgttacttctcccgccgccgccaatcccctcccgttctccgccaccgccaatcccctcccgtcctccgccacctctgctgagagcgagaagagatggccggcaagggtgatgggccggcaatcggcatcgatctcggcacgacctactcttgcgtcggtgtgtggcagcacgaccgtgtcgagatcatcgccaacgaccagggtaaccgcaccacaccctcgtacgtcaccttcaccgactccgagcgcctcatcgtagatgcggccaagaaccacgtcgccatgaacc

SEQ ID NO: 58091 - DNA, 289 bp, Zea mays
ccagtgagtacgtaggagtttcaacaggaaactggggttgtggtgcttttggtggaaaccctgaaatcaagagcatgattcagtggattgctgcatcacaggctcttcgcccttttgttaattactacacttttgagaacgtgtctctgcaaagattagaggaggtgatccagtggatacgacttcatggctggacggtcggcgagttgtggcatatgctcatggagtactcatctcagaggctgggaggagaaacgcacaagggttttttggcttggttgcttcccaa

SEQ ID NO: 58092 - DNA, 282 bp, Zea mays
atcaacatgaaggtggtttggatgcattttcacgcggttacgaaaagcttggatgtactcgcagcgctgaaggtatcacttacagagaatgggctcctggagcatactctgcagcattagtaggtgacttcaacaactggaacccaaatgctgatgctatggccagaaatgagtacggcgtttgggagattttcctgcctaacaatgctgatggttcccctgctattcctcatggctcacgtgtaaagatacggatggacacaccatctggtgttaaggatt

SEQ ID NO: 58093 - DNA, 285 bp, Zea mays
accagatcgggagcttgggcagtatgaagacctggtagctagggtcacaaacttccataatgaggacaagggcttcatggttttggatggtgatgtttttgatgttccaattaggaaggacattgttcaccgagtagtaaggtggcagcttgctaaaagacagcaggggacacactcaactaaaactatcagtgaagtgagtggcactggaagaaagccttacccgcaaaaaggaaccggaaaagcacgacatggaacactgcgcggtgcccagtttcgtggtgg

SEQ ID NO: 58094 - DNA, 284 bp, Zea mays
ggagcctgttgagaaatgcctgagggatgccaagatggacaagagcagcgtccatgatgttgtccttgttggtggctccactaggatccccagggtgcagcagctgctccaggacttcttcaacggcaaggagctgtgcaagaacatcaatcctgatgaggccgttgcctatggtgctgctgtccaggctgctatcctcagtggtgagggcaacgagaaggtgcaggacctgcttctgcttgacgtcactcctctctctctgggtctggagactgccggaggag

SEQ ID NO: 58095 - DNA, 283 bp, Zea mays
cctgatgcaacatacagcattctcattgataatgaagataagcaaactggcagcatctacgagcactgggatattcttccccctaagaaaatcaaggacccagaggctaagaagcctgaggactgggatgacaaggagtacattcctgaccctgtggacacttagccagagggctatgatgatattcccaaggaaattcctgaccctgatgctaagaagcctgaggactgggacgatgaggaagatggtgaatggactgcccctaccattcccaacccagaat

SEQ ID NO: 58096 - DNA, 284 bp, Zea mays
ggctgttgctctcccccaaccccgcgcgcgggggtgcgataaaccctagtcttcgccgtcgtcgcaggagggcccgcgatgtcgcacttcgggaggtcaggcccgccggacatccgcgacaccttctcgctcctcgtcctcaacatcagctttaccaccacggcgcacgacctcttcccgctcttcgagcgctacggcaaggtcgtcgacgtcttcatcccgagggacaggaggaccggggactcgaggggtttcggttcgtgcggtacaggtacgccgacgag

SEQ ID NO: 58097 - DNA, 272 bp, Zea mays
cctgaacccggctactccatatgtgaaaagacaatcgcgcactgggagtggagagatggcgggagtggcgtgtacccacctgacacgtggctggatggtggagtaccgtactctcgggtggcgcggaccggttcacgtagtggaggacccatgggaatggtagacatatgcaagggttaagtgctacatatgtcgtgtggctggagatccctagctgggtattaatcgattcggatcgccgttacttctcggatatgaagactggatcgctg

SEQ ID NO: 58098 - DNA, 272 bp, Zea mays
  unsure (1)..(272): unsure at all n locations
ggctaggaagatcgagactagacagattgtggtcgaagagattagaaaggaggagcacatcgagaaggcactgaacgaagaggccaacatcgaggatgtcgatacagacgacgagttgaacgaagcagaggagtacgagtcgtggaaaaacaaagaaatagcaaggattaagagggacagggaggaaagagatgcgaggttgaaggagaaggaggagatcgaganaagtcaggaatatgaccgaggaggagcgtcgcgaatgggagcggaag

SEQ ID NO: 58099 - DNA, 283 bp, Zea mays
cacaaggttccgtcccactgcatgcgtcaagagactgtctggttttcttgttctgatttgtcatttgctggtgctcaaagccggcttggtttcctcgaaggatcagcatctactcttgattgtggactttgtcgcatctgatatcaacttcataaatctttatccaagatggcgctgcaaaacattggtgcttcaaacagggatgatgccttctacaggtacaagatgcccagaatgattaccaagatagaaggccgtggtaatggtatcaagacaaatgttg

SEQ ID NO: 58100 - DNA, 281 bp, Zea mays
ttctcctcctcgcctcctctccctagtctccacgacacaagggagagtgacggaaagcgacgcggcgcgagctgaggagggccaaggcgaagaggggaagcaccgcaccaggacccttgttcgccgccgccgcctctgatctccgcgaggttgtcaggattcaatatgtcgaccagcacattcgctacttcctgcacgctgttgggcaatgttagaacaacgcaggcctcccagacagcggtgaagagccttcgtctctaagcttcttcagccaagttacg

SEQ ID NO: 58101 - DNA, 277 bp, Zea mays
gtcccacattgttggataccctcgcatgggccccaagagggagctcaagtttgcacttgagtctttctgggatgggaagatcaccgctgaggatctggagaaggttgctaccgacctcagggccagtatctggaagcagatggctgatgctgggctcaagtacatccccagcaacactttctcgtactatgaccaggtccttgacaccactgccatgctcggcgctgtccccgaacgttactcatggactggaggagagattggatttgacacctac

SEQ ID NO: 58102 - DNA, 281 bp, Zea mays
gccaagcgtctcattggcaggaggtttagtgatgcctctgtccagagtgatattaagctgtggcccttcaaggtcattcctgggcccggtgagaagccaatgatagttgttcagcacaagggggaggagaaacagtttgcagccgaagagatctcctccatggttctcatcaagatgcgtgagatcgctgaagcttaccttggcagcacgatcaagaatgctgttgtcacggtccctgcctacttcaacgactcacagaggcaggccacgaaggatgctgg

SEQ ID NO: 58103 - DNA, 302 bp, Zea mays
tgctggagaaaaaagcagccgctgagcttgagagagccaaggagttctcaaaagctaagaataaaagagcggctatccaatccttgaagaggaaaaaactttatgagcaacaaattgagcagcttggaaattttcagttgagaatccatgatcagatgatcatgttagaagcagctaaagctacaacagagactgttgatgcattgagaactggagctgcagctatgaaagcaatgcaaaaagcaacaaacattgatgatgtagacaagaccatggatgaaattaatgaacagactgaaaat

SEQ ID NO: 58104 - DNA, 297 bp, Zea mays
ctcttggattgttccctcgaccttggccacctaaagttgatacttcataaggtagcagattcttcaaagttttggagtatttccgcttaataggtcaagtgatcgcaaaagtcctgcaagatggcagacttttagatttgcctttatcaacagcgttttataagcttatacttggacaggaacttgatttgtttgacatagtgtcatttgattctgagtttgggaagacattgcaagaactgcaagttcttgttgaacgaaagcagttccttgaatccacttctggcaagaaccagc

SEQ ID NO: 58105 - DNA, 290 bp, Zea mays
ggaaattagcaaggatgagatctctgatgctcttgagagaatcattgctggccctgagaagaaaaatgctgttgtttccgaggagaagaagaggctcgtcgcttaccatgaggctggccatgcccttgtcggcgccctcatgccagagtatgatccatcagccaagatttccatcatccctcgtggccaggctggtggactcacattctttgctccaagcgaagaaaggctagaatctggattgtacacagggagctatcttgagaaccaaatggctgtagccttggtgg

SEQ ID NO: 58106 - DNA, 294 bp, Zea mays
  unsure (1)..(294): unsure at all n locations
caagttggaaaacaagaatggttcaacatcacacaagaaaaacggtttctcaagaccactcttgaaatgtgcagaagaggtcctactgaatggcgatgttgcaagtacatctgggaaatccattgcaagcttacaggtggaagcatctgatttggcaaacttccttaccatggatcggaatgggggttaccgaggttcacaaactcttctaagatctgtattatcagagaaacaagagctgtgcttcctnngttgtctcattgctctggcagaagctcatagcttctcctgaaa

SEQ ID NO: 58107 - DNA, 300 bp, Zea mays
ccacactctccctcgcctgtggctctgctatgatgcttttctcgtgggccacccgtcttgttgaggcccctaagaccgacctaggacttctggaaagttcttttcccggttgctgtggcgcatacaattggccatgttgctgctacagtgagcatgtctaaggtggcagtgtcattcacacacataattaaaagcgcagaacctgcattcagtgttttggtgtcaaggttcttccttggggagacgtttccaattccagtatatctttctcttcttccaatcattggtggttgtgctcta

SEQ ID NO: 58108 - DNA, 291 bp, Zea mays
aggagttcatggaagctcttgctgccggcgctgatgtgtccatgattggccagttcggcgtcggtttctactctgcctacctcgtcgccgatagagttgtcgtgaccaccaagcacaacgatgacgagcagtacgtgtgggagtcccaagcgggcgggtcgttcactgttactcgtgacacgtcaggggagcagcttggcaggggcactaagatcacactgttccttaaggacgatcagctggagtaccttgaggagcgtcgcctcaaggatctggtcaagaagcactctg

SEQ ID NO: 58109 - DNA, 288 bp, Zea mays
cggctcgagacttgatcaatgagccgaagaggccttcagacaagcccctgcgtctccccctacaggatgtgtacaagattggtggtattggaactgttcctgttgggcgtgttgagactggtatcatcaagcctggtatggttgttacctttggtcctagtggccttactactgaggtgaagtctgttgaaatgcaccatgaggctctccaggaggcccttcctggtgacaatgttggcttcaatgttaagaatgttgctgtgaaggatctgaagcgtgggtatgtgg

SEQ ID NO: 58110 - DNA, 291 bp, Zea mays
gttgccaaagaattccctcccctagccgccgccgccgccgctcgtctccctgagaggtgccgggaccgaggaactggccgagtactaggtagagaatcggtttttcttgtctcagcccggggtctgctgcgtctggtggtggtgaaggggagaaattcgtgagatctgttccggatcaggcgtgcgagctcgggaatcaggggtttcacacatagcttcgtcgatttgaatttgatgtactaatggagtctaagggtggcaaaaagtctagcagtagtcgttctatgatgt

SEQ ID NO: 58111 - DNA, 288 bp, Zea mays
ctccaatccagaaaccctagccgccgtagcttgcgcgtcttgctctgtcttccccaatccagaaacgaggaacctagccgccatctctcctcctctcccgagagatctcctctgccgatggatgttcgtccgagccaattggtttgtgatgctgtagaagcggcgcgtgctgctgccgtcgctgcttcggaggcgagatgcgcggcagttattgcagagaaggaggccaaggctgcggaggagttcgccgccgttgccgtcaacaaggtcgaagcagtaaaggtctcc

SEQ ID NO: 58112 - DNA, 289 bp, Zea mays
ccgtgaaccaagatagccaaggtgcgcagggaaagaaagtgcagtccagcaatggcttggaggtttgggctgggccgctcagcaacaacaggaaggccgtggttctctggaaccggcagggataccaggcaaccatcaccgcacagtggtcgagcatcgggctcgcttcttccactgctgtcactgctcgcgatctatgggcgcactcgtcgttctcggctcaaggccagctatcagcttcggtgccacctcacgactgcaagatgtatgtcttgacgccgaactagct

SEQ ID NO: 58113 - DNA, 295 bp, Zea mays
caactcgccgtctgccttctgcgcctccatttcggcctctgtcccttgcaagttcaatctcacctccaaccatgggtaaagagaagtcccacatcaacattgtggttattggccatgtcgactctggcaagtcgaccaccacaggacaccttatctacaagcttggaggcattgacaagcgtgtgatcgagaggttcgagaaggaggctgctgaaatgaacaagcggtccttcaagtacgcgtgggtgctcgacaagctcaaggctgagcgtgagagaggtatcaccattgatat

SEQ ID NO: 58114 - DNA, 157 bp, Zea mays
ccccgtaagggatgctgcctggcaaggcctcggtgtcccacctcgtctgtggcgtggggcgctggagcccggtctggttgggttgggaagccctttaaactactgtcacttgcattttaccttttccatcgctgtttattgtgagtggtactatatc

SEQ ID NO: 58115 - DNA, 278 bp, Zea mays
cccggctctccgtcccttgggagttgggccttggcatttccttaagatagagaaggcgggaaatcggcttcctactccccgtccttatcgccagccgaaccgacattggtttctccccccttctcgccttgctccttctcccccctagtctagaggcgttcgctcgccaatcccttcggcccgcccgctcgacgtgatcccaccggcagccatggatccatacaagcaccgcgcgtctagtgggagcaactccgagcttctggaccaccaactccggc

SEQ ID NO: 58116 - DNA, 286 bp, Zea mays
caggaagcaagtcgacgctgccattgctaaagcgaaggagtgtccactgcctgatccatctgagctcttcacaaatgtttatattaatgactgcggtttggagtcgtttggtgtagacaggaaggaggtgaggaccgttcttccgtaggctggcaaacaaaaaaaaggttctactgatacagtacgaagaagtttgctgcgtatgtatatggacgcatcacaccgcagtagtttcctcacttgtggttatggtcctatggaccccgggttataatttcctctgctc

SEQ ID NO: 58117 - DNA, 282 bp, Zea mays
agcgaatcctccgggccgccgcggcggcgtctccccgggcgcccctagcacagctcgcgttccggtggaacagagaagagaggcgagaggatggagatccagtcgtctggccgctccatcgaggggctgatggagaaggtgctgtccgtgaacatctctctcctcggactacttcaaggagctcttcaagtacaagacctaccacgaggtcgtcgacgagatctacaaccaggtggaccacgtcgagccctggatgaccggcaactgccgcgggccctcctc

SEQ ID NO: 58118 - DNA, 281 bp, Zea mays
acaaccccagggctctccggaggctgaggaccgcttgtgagagggcgaagaggactctgtcttccactgcccagaccacgattgagattgactcgctgtatgagggcatcgacttctactccaccatcacccgtgccaggtttgaggagctcaacatggacctgttcaggaagtgcatggagcctgttgagaagtgcctgagggatgccaagatggacaagagcaccgtccatgacgttgtacttgttggtggctccactaggatccccagggtgcagcaa

SEQ ID NO: 58119 - DNA, 281 bp, Zea mays
agcctttggtataagattggagaatgtacttatttgcaaagacgccaatgctaagtttaattttggagataaaggttatttggcatttgaacatataacatgggctccataccagaccaagctgatagacaccgggcttctgacccctgttgagatcgactgggtgaacacgtaccactcagactgccggaagatcttggagcctcatctgaacgagcaggagaagcaatggctgatgaaagctactgagcccgtagctgcaagaggctgagccttttcgt

SEQ ID NO: 58120 - DNA, 286 bp, Zea mays
gtgggcccacgatgatcagagctgcagccaagaaccataaggatgttcttattgtggtggatcataatgattatcctgctttactggagtaccttaaaggaaagcgagacgatcagcagttccccacgatgttggcatggaaagccatgcagcatgtcgcctcttatgattctgcagtgtcagaatggttgtggaagcaatcaaataaaggagagatgttccccccaagctttactgtgccactggagctgaagtctacactccggtatggcgaaaatcctcatca

SEQ ID NO: 58121 - DNA, 282 bp, Zea mays
atgagatctggtttgctttgtcctggattttggatcagttcccaaagtggtccccaatcaaccgtgaaacataccttgatagactggctttaaggtatgaccgagaaggtgaaccatctcaattagctcctgttgatatctttgtcagtactgtggatcctatgaaggagcctcctcttgtcactgcaaatactgtgctttccatccttgctgtcgattatccggttgacaaggtatcttgctatgtttcggatgatggagctgctatgctgacttttgatg

SEQ ID NO: 58122 - DNA, 282 bp, Zea mays
caaggaccagggcagctgcgggagttgctgggctttctcaacaatagcggctgtggaaggcatcaaccagattgttactggcgacatgatctccttgtctgagcaggagcttgttgactgtgacacttcatacaaccaggggtgcaatggaggtctgatggactatgcgtttgagttcatcatcaacaatggcggaatcgacaccgaggaggattacccttacaagggcacggacggacggtgtgatgtcaacaggaaaaacgccaaggttgttactatcga

SEQ ID NO: 58123 - DNA, 156 bp, Zea mays
ctcccattcctcgcgcggcgaccacccgattcgaagcgtgcggagagaccgaagaagcgggagagatggctcgtaccaagcagactgctcgcaagtccacgggagggaaggctcccaggaagcagcttgccaccagggctccccataagtctgccc

SEQ ID NO: 58124 - DNA, 214 bp, Zea mays
cggaatatatgtatggggggagtcttggatcaatgccaagacacaggctgaatgctaccattatcttttagatgcttgcatcaagctctatcagctaggtattgattggacaacccctgtacatggttcaataaacaatccaaggagaccgcacagcattttgagagatgaaatttgtaatggatgtcatgctgctgattcatcaaagtgtgtt

SEQ ID NO: 58125 - DNA, 186 bp, Zea mays
ccactaggatccccagggtgcagcaactgctccaggactgcttcaacggcaaggagctgtgcaagaacatcaaccccgatgaggctgtcgcctattgtgctgctgtccaggctgccatcctgagcggtgagggcaatgagaaggtgcaggacctacttctgacgggacgtcacccctctgtcccgg

SEQ ID NO: 58126 - DNA, 122 bp, Zea mays
tcaccactgacctgcttgctcgtaggattgatgttcagcaggtgtccctggtcatcaactatgatcggcgcacgcagccaggggagtacgtgcatcgtattggtcgtaggggacgttttggt

SEQ ID NO: 58127 - DNA, 168 bp, Zea mays
gcaagacctggacagaagtggcacgtcttctacgccactgagtacccagagcaaccaatggttaaccttgagatgtgcatgactggtctggacaagaagaaagcgtgtgtctttttcaagactaatgctgatgggaacacaacatgtgccaaggaaatgacaaagctc

SEQ ID NO: 58128 - DNA, 284 bp, Zea mays
cggcatcaagaaccaggccgggagcgggtgcgagggcaagaacttctacacccggagcgcgttcctgagcgccgtcaacgcgtacccgggcttcgcccatggcgggacggaggtggagggcaagcgcgagatcgccgccttcttcgcgcacgtcacgcacgagaccggacatttctgctacatcagcgagatcaacaagagcaacgcctactgcgacgcgagcaacaggcagtggccgtgcgcggcggggcagaagtactacgggcgcggcccgctgcagatct

SEQ ID NO: 58129 - DNA, 287 bp, Zea mays
caagtatccagtgccaatttttgaccagttaattgatgagttggcccattctaaatggtttagtaagctcgatctccgagctggttatcaccaaatcctcttgaagcctggcgaagaatataaaacagcttttcaaactcatattggtcacttgagtttcgggtgatggcgtttgggttaactggtgctcccaatacatttttaagtgccatgaatgaaactctgaaaccggtgttgcgaaaatgtgccctggtattctttgatgatatactgatttacagtaagac

SEQ ID NO: 58130 - DNA, 291 bp, Zea mays
aaaatggtctatggatgcctgtaaacccagagacaaagaagacatacggttactgtttcattgagtatagtacccctcaggaagctgagctggctagggaaaaaaccaatgggtacaaactcgacaagtctcacatctttgcagtcaatttgctcatgatttcgagaagtacatgaaagttcctgacacatggacccctgctgaaattaagccatacactgctggagaaaatcttctgaagtggctaactgatgaaaaggcccgagatcaatttgtcattcgtgctggcac

SEQ ID NO: 58131 - DNA, 291 bp, Zea mays
tagagaacaacgagaacaagcctgtcacgaacagccgcgacactcaagagatacacctagaacaaggccttcagatgctcaagatattcaaggagcatgtcagcaagacgtccatcctggatgacttcgccttctatgagagtcgccagaagctgatgcaggataagaggtcgaaacagcagcaggtccaaaagcaggtctgggacagtaggacccccatttctgtcactggaagcgagcaacagcaggaagctgccaatgggaagcccaatccgtctgtaccaaacggtg

SEQ ID NO: 58132 - DNA, 289 bp, Zea mays
ggcagatcaaggtctggttccagatccgcagatgccgggagaagcagcggagggagtcctctcgtctgcagaccgtcaaccggaagctgggtgccatgaacaagctgttgatggaggagaacgaccggctgcagaagcaggtgtcccgtctcgtcttcgacaacgggtatatgaagaatcggctaccacagtccttctgtagccaccaccgacacaagctgcgagtctgtggtgacaagtggtcagcacaagcagcagcaaaacccagcagttctgcatcctccacaaa

SEQ ID NO: 58133 - DNA, 285 bp, Zea mays
ctgtagttctgttcctcttcctccccactcactcctgcgcttcctcgccgcgcggttccttctccctgatcctcctttggcttcgcggttcatggcgatgtggagggccgccgctagcagctggtcgaccgggcgctcggctcaagggccgcgcacacgtctacaggcagcaagaagatagtcggggtgttctacaaggccggggagtatgccgacaagaaccccaacttcgtcggctgcgtcgagggtgcactcggcatccgcggctggctcgagtcgcagggc

SEQ ID NO: 58134 - DNA, 286 bp, Zea mays
ttccgcttcaaagatacaccaaagctttgtctacgctacaaaggtcatcccttgtggagaagtctagacagaagcctgaagaaaggatgaccgttctaaatgatgcactgcaacgcagtaactacgattctgaccccatgttgagggcattggtgtttcagttgctccaaaatttacccaagttgaaggaaggatccttcaagccccaaagctgaaagccggcaatggtgatgatatcttttcacgaaatggacggtggaatttcactaataggaagttttatgaa

SEQ ID NO: 58135 - DNA, 279 bp, Zea mays
tgcagatcttcgtgaagaccctgaccggcaagactatcaccctcgaggtggagtcttcagacaccatcgacaatgtcaaggccaagatccaggacaaggagggcatcccaccggaccagcagcgtttgatcttcgctggcaagcagcggaggatggccgcacccttgcggattacaacatccagaaggagagcaccctccacctggtgctccgtctcaggggtggtatgcagatctttgtgaagacactcactggcaagacaatcaccttgaggtggag

SEQ ID NO: 58136 - DNA, 291 bp, Zea mays
cctttatccacaaccacttggcatttttagtaaaataccataaggatgaaactacagatctctctagaattgttggatttgaggtcaaaccattcagtatcaatcaccagtttgaagggccgtggaatgataaaaacactcgtttaatcacagtgatcctcatgccagcaagcttgtggtaaactcagatactcctcaggaggttgaagccgggaaggaaatcatatttacctatgatgtaggcttcgaggagagtgatatcaagtgggcttctcgctgggacacctactt

SEQ ID NO: 58137 - DNA, 293 bp, Zea mays
gactagttctagcctgcttctgctggacgtcacccctctgtccctgggtctggagactgctggaggagttatgacagtgctgatcccgaggaacaccaccatccccaccaagaaggagcaggtattctccacctactcggacaaccagcccggtgtccttatccaggtctacgagggtgagaggacccggacacgcgacaacaacctgctgggcaagttcgagctctccggcatcccccctgcaccccgtggtgtgccacagatcaccgtgtgctttgacatcgacgccaacg

SEQ ID NO: 58138 - DNA, 292 bp, Zea mays
gccatgtgctccctgacctgaaggaggaggatggcagcctcagcctggatggtgcagacagcactggcgtggtggccaagctctcaccagccaaccagcggaaatgtgagcgtgtactgctggccctattctgtcacgaaccctgccgcccctgcatcagtgtctaccgactccaccttctccctggaccagcccggtggcaccctggatctgaccctgatccgtgcccgcctccaggagaagttgtcacctaccctacagctccccacaggagtttgctcaggatgtgggc

SEQ ID NO: 58139 - DNA, 270 bp, Zea mays
caagaagccagctgaagatgagtggggtaaaaccccagacgccatgaaagctgccatggccctggagaaaaagctgaaccaggcccttttggatcttcatgccctgggttctgcccgcacggacccccatctctgtgacttcctggagactcactccctagatgaggaagtgaagcttatcaagaagatgggtgaccacctgaccaacctccacaggctgggtggcccggagctgggctgggcgagtatccttcgaaagctcatctcaag

SEQ ID NO: 58140 - DNA, 287 bp, Zea mays
gggatatactgggagagacgtacaaggaccatgagaacatcgtcatcgccaagatggactcgactgccaacgatgtggaggccgtcaaagtgcacagcatccccacactcaagttctttcctgccagtgccgacaggacggtcatcgattacaacggggaacgcacgctggatggttttaagaaattcctggagagcggtggccaggatggggcaggggatgatgacgatctcgaggacctggaagaagcagaggagccagacatggagagagacgatgatcagaaa

SEQ ID NO: 58141 - DNA, 285 bp, Zea mays
caagaagccagctgaagatgagtggggtaaaaccccagacgccatgaaagctgccatggccctggagaaaaagctgaaccaggcccttttggatcttcatgccctgggttctgcccgcacggacccccatctctgtgacttcctggagctcacttcctagatgaggaagtgaagcttatcaagaagatgggtgaccacctgaccaacctccacaggctgggtggcccggaggctgggctgggcgagtatctcttcgaaaggctcactctcaagcacgactaagag

SEQ ID NO: 58142 - DNA, 261 bp, Zea mays
gggaagcggcggcaggcgccatgtccggccgcgaaggtggcaagaagaagccactgaaacagcccaagaagcaggccaaggagatggacgaggaagatatggctttcaagcagaaacaaaaagaggagcagaagaaactcgaggagctaaaagcgaaggccgcggggaaggggcccttggccacaggtggaattaagaaatctggcaaaaagtaagctattacctgtgcctgaggagatggtgaccctttatttcatctgt

SEQ ID NO: 58143 - DNA, 274 bp, Zea mays
ctctgttacttctcccgccgccgcgaatcccctcccgttctccgccatcggcaatcccctcccgtcctccgcgacttctgctgagagcgagaagagatggccggctaaggtgatgggccggcaatcggcatcgatctcggtacacctactctcgcgtcggtgtgtggcagcacgaccgtgtcgagatcatcgcctaacgaccagggtaatcgcaccacaccctcgtacgtcgccttcaccgactccgagcgcctcatcggagatgcggccaaga

SEQ ID NO: 58144 - DNA, 234 bp, Zea mays
atctacaagcgtgtggctttattgttgatgctacatgttacagatttgactaatgggaatgctgagctaggaagctagctaacaagctcaatcattccccttagtcaaatctgtaacctgtagcatctacaagcgtgtggctttattgttgaaatcctgatgtttatcgttctctataaacacaaaactgaacaaataacctcgctgctatgaataaactcaggtgttcagtgt

SEQ ID NO: 58145 - DNA, 278 bp, Zea mays
acgggattcaactgccggtgtgggaacttgtactgcgcactccaccgctactccgacaagcacgactgcaagttcgactaccggactgctgccagggacgccattgccaaggctaatccggtggtgaaggcagacaagctcacaagatctactcgggggttccctacggttgggtatcaggaagattgtaaaccgcggtaactcgtcatgcggaactgctgccttgccccccgcgcctttctcttccatgtttgctgctacaatcttgttgttgggca

SEQ ID NO: 58146 - DNA, 283 bp, Zea mays
gcagaccctgcagggaattcaccccaagaacatccaaagtgtgaacgtgaagtcccccggaccccactgcgcccaaaccgaagtcatagccacactcaagaatgggcggaaagcttgcctcaatcctgcatcccccatagttaagaaatcatcgaaaagatgctgaacagtgacaaatccaactgaccagaagggaggaggaagctcactggtggctgttcctgaaggaggccctgcccttataggaacagaagaggaaagagagacacagctgcagaggcca

SEQ ID NO: 58147 - DNA, 262 bp, Zea mays
cggcattgatctgaagaaagagtcttatcttcgcaagtcatattgcagatttctgcaggatttggggatgagacttaaagtacctcaagtgacaattgctactgctatagtgttctgtcatcggttctttcttcgtcaatcgcatgccataaatgatagacggacaattgcaacagtatgcatgttcttggcgggaaaagttgaagaaacacccagactctgaaggatgtcatacttctttcatatgagatcatccacaaaa

SEQ ID NO: 58148 - DNA, 288 bp, Zea mays
  unsure (1)..(288): unsure at all n locations
ccacaagagtgtaaaatacaatgtgtgggcaagcacaaccaatggaaacaagaagctcgatgctgcttatcaagaagctcagtcgaagggttctgcgtgccctatattcttgtttttctcagtgaatacaagtgggcagtttgttggtgttgctgaaatgacgggggctgtcgattttgagaaaaccctggggtattggcaacaggacaagtggatggttccttctctgttaagtggcacattgtcaaggacgtgcctaacaacattctcanacacatcatcctagag

SEQ ID NO: 58149 - DNA, 290 bp, Zea mays
caacacctcgttttcctggattatccagcgagggacgccggtttgttgctcgtcctcctccctggttgcccgaggcggcggtggcggggcgaccatgtacagatcggcgggggtcgcgatggcgtggaacgtgttccggttctgcacggctctgcgtgggctaggttccatcatgatcctgctcgtcctcgcgatcgtcggcgtcacctactacgtgtcgtcctctgcaactacggccccgccctgttcaccggcggcggcaccactctcgccgcgctcgccgtcctgct

SEQ ID NO: 58150 - DNA, 280 bp, Zea mays
atagcccttgactatgagcaagagttggaaactgccaagaacagctcctcagttgaaaagagctatgagctacctgatggccaagtaatcaccattggtgcagagagattcagatgccctgaggtcctcttccagccatccatgattggtatggaggctgccggaatccatgagacaacatacaattcaatcatgaagtgcgacgtggatatcaggaaggcctctacggcaacattgtgctcagtggaggttcgactatgttcccgggaatcgctgatcg

SEQ ID NO: 58151 - DNA, 277 bp, Zea mays
gtcctaaaaggaggcaaactatgcttttctctgctacaatgacagaagaaattgatgaacttgtaaagctttcactaaacaagcctgtacgccttgaagctgatccttctctgaaacggcctgcaacattgactgaagaggttgttaggatgagacgagcacgtgagtcaaatcaagaagctgttcttcttgcactctgtttgaagactttcagcgaagtgttatcatttttagtgggacaaagcaatctgcacacaggttaaaaataatatttggt

SEQ ID NO: 58152 - DNA, 285 bp, Zea mays
ggcagtttttcgctatctctggcttctatgtggtttttaaattttttaatttgactgctgatgcgactctaggtgatgttcaaaaaagaggtcaggaattttgtgaaaaaccatggaaagttgcaaagagtagtgttcctccacagccttttgtagaacaatattgcttcagagctccttatatttcatcactactgagagagggattgcagttaaagatagtcaggtgataattggctctggcagtattacttggactcatggagttgctttgctggaggctgg

SEQ ID NO: 58153 - DNA, 287 bp, Zea mays
tgaagcagcatggccaagccgtgtggggtgcgcctgagcggggaagcccgcaaacaggtggaggtcttcaggcagaatcttttccaggaggctgaggaattcctctacagattcttgccacagaaaatcatatacctgaatcagctcttgcaagaggactccctcaatgtggctgacttgacttccctccgggccccactggacatccccatcacagagcctccaaccaaggatgatgagatggaaacagataagcaggacgagacagaagtctctaagtgtggatt

SEQ ID NO: 58154 - DNA, 286 bp, Zea mays
tatgtatcaaatgtttctaatgggattgacaccttcagcattcgggagccacttggtgtttgcgctgggatatgcccatttaattttcctgctatgattcccctatggatgtttcccatagcagttacgtgtggcaatacttttgttcttaatctctcggaaaaggacccaggggctgctatgatgcttgcggagctagcaatggaagctggtttgcctaagggtgttttgaacatcgttcatggcaccaatgatgttgtcaataatatttgtgacgatgaggata

SEQ ID NO: 58155 - DNA, 287 bp, Zea mays
tgggcagtttgttggtgttgctgaaatgacgggggctgtcgattttgagaaaaccctggggtattggcaacaggacaagtggaatggttccttctctgttaagtggcacattgtcaaggacgtgcctaacaacattctcaaacacatcatcctagagaacaacgagaacaagcctgtcacgaacagtcgcgacactcaagagatacacctagaacaaggccttcagatgctcaagatattcaaggagcatgtcagcaagacgtccatcctggatgacttcgccttct

SEQ ID NO: 58156 - DNA, 285 bp, Zea mays
agacttttcaacgagaggaactatgggttagccacaaggatttgggggcaaatggtgtcacaggggtgtagtcctgatgttgtcacttatactacttctgtgcgggcatactgcaatgaaggcaggcttgatgaagcagaaaatgttgtgacgtcagatgaaaaaatgtaggaccattgtagatgcaatggcatataacactttgattgatgccatacaagtattggacagacagatcgtgcagttacaatcttgaagcacatgacgggtgttgcttctatgcca

SEQ ID NO: 58157 - DNA, 287 bp, Zea mays
gggcaatgggtgccataatggctgagctgttgacactccatcctctctttcctggaaccagtgaagcagatgagattcacaagatatgcaatgtcatcggtagtccagatgagcaatcttggcctcaaggattgtctcttgcagaagcaatgaagtatcagttcccacagaccaaaggcagtcaattgtctgaggtgatgacaacagctagtagcgaggcaattgacctcatctcatcactatgctcatgggatcctagcaagagaccaaaggccacagaagtcctc

SEQ ID NO: 58158 - DNA, 285 bp, Zea mays
caagatccaagaggagcttgacattgatgtgcttgtgcatggagagccagagagaaatgacatggttgagtacttcggtgagcaattatctggttttgcgttcactgccaacggatgggtgcaatcctatggatcacgctgtgtgaagccacccattatctacggtgatgtcagccggccgaaccccatgactgttttctggtccaagatgcacagagcatgacccctcgtcccatgaagggaatgttgactggtccggtcacaatcctcaactggtcattcgtc

SEQ ID NO: 58159 - DNA, 275 bp, Zea mays
ctcttccccgcctcctgaatctgttgacgcagaaccacaagaaaagcattaagaaagaggcatgctggactatttcaaatattactgctggaaacaaagatcagatacaggctgtcataagtgccggtatcatcgctcctttgttgcaactgcttcaaacagcagagtttgatatcaagaaggaggctgcttgggccatctcaaatgctactctggtggttctcatgagcaaatcaagtacttggtgtctgagggctgcatcaagccattgtgtg

SEQ ID NO: 58160 - DNA, 281 bp, Zea mays
atgattgagaggtccaccaaccttgactggtacaagggcccaaccctacttgaggctttggacttgatcaatgagccgaagaggccttcagacaagcccctgcgtctccccctacaggatgtgtacaagattggtggtattggaactgttcctgttgggcgtgttgagactggtatcatcaagcctggtatggttgttacctttggtcctatggccttactactgaggtgaagtctgttgaaatgcaccatgaggctctccaggaggcccttcctggtgac

SEQ ID NO: 58161 - DNA, 288 bp, Zea mays
caaggacagcagcgggcagcatgtggacgtgagccccagcagccagcgcctgcagctcctggagccttttgacaagtgggatggcaatgacctggaggacctgcagatcctcatcaaggtcaaagggaagtgtaccactgaccacatctcagctgctggcccctggctcaagttccgtgggcacttggataacatctccaacaagctgctcattggtgccatcaacattgacaacggcaagggcaactccgtgcgcaatgccgtcactcaggagtttggccccgtccc

SEQ ID NO: 58162 - DNA, 284 bp, Zea mays
catcgatatggtgtaaccaggcaagagcaagatcaggccgccgctgagtcttataggagagctgctgcagccacggcctctggaaaattcaaggatgagatcgtccccgtgccaacaaagatcgttgatcctaaaactggagaggagaaggaagttgtgatatttgttgatgatgggattaggccagggaccacagcatctggattggcgaactgaaaccagtttttaaaaaggatgggactacaactgcaggcaattccagtcaagtgattgatggtgctgga

SEQ ID NO: 58163 - DNA, 281 bp, Zea mays
cggagaccagggaggtcatggagttcgacgccgccgacgtccgcccgcacctcgagtgggttgacggcgagtggcgctccccagataacatggagatacccaagacaatgccatatgcaaaaggaatgcaaattgaagtttccaagtcacaagacaattctgttgttgcttggtcacctgcagttgtcgcaaagactatctggaagaaaacctattagtcgactacactctttcaaagtgttacggtactacattgtctgaggagattgttgatgtgaagc

SEQ ID NO: 58164 - DNA, 99 bp, Zea mays
cggaccagcagcgtttgatcttcgctggcaagcagctggaggatgccctccttgtcctggatcttcgtgaagaccctgaccggcaagactatcaccctc

SEQ ID NO: 58165 - DNA, 278 bp, Zea mays
gtttgatgagaatgccaagattggccaagccactgtggcttctggcatacctgctggctggatgggcttggactgtggtcctgaaagcagcaagacagtatgctgaggctgtcactcgggctaagcagattgtgtggaatggtcctgtgggggtatttgaatgggaagcttttgcccggggaaccaaagctctcatggatgaggtggtgaaagccacttctaggggctgcatcaccatcataggtggtggagacactgccacttgctgtgccaaatgg

SEQ ID NO: 58166 - DNA, 142 bp, Zea mays
ggcaagcctcctgctccagaagcagctcaaggatcttgcgaagaaccccgtggatgggttctccgcagggcttgtagacgatagcaacgtcttcgagtggcaggtcaccatcatcggcccgcccgacaccctatatgatgga

SEQ ID NO: 58167 - DNA, 315 bp, Zea mays
  unsure (1)..(315): unsure at all n locations
agcagccttgcaatgagtgcaaggggactggagagagcatcaatgagaaggaccgctgtccagggtgcaagggtgagaaggtcattcaagagaagaaggttcttgaggttcatgttgagaaggggatgcaacacaaccagaagatcaccttccctggtgaagctgatgaagcgcctgatactgtcactggagacattgtattcgtcctccagcagaaggatcactccanattgcaaaagaaagggtgaagatctcttctatgagcacaccttgtctctgaccgaagcactatgtgggttccaatttgttcttaca

SEQ ID NO: 58168 - DNA, 236 bp, Zea mays
ctcttctgatgtatgcctggaaagttggccctgctttggcatgtggaaatactctcgtgctcaagactgctgaacaaacccctctatcggctttgtatatctccaaattgttgcatgaggctggactacctgagggtgttgtgaatgtcgtttctggttttggccctactgctggtgctgctcttgctagtcacatggatgttgataagatcgcatttactggatctaccgatact

SEQ ID NO: 58169 - DNA, 304 bp, Zea mays
gtggtttgacaccaactaccactttattgtccctgaattgggcccaaacaccaagttctcctatgcttctcacaaggctgttaacgaatataaggaggctaaggcgctcggtgttgataccgtgccagtacttgttggaccagtctcgtacctgttgctctcaaagcctgccaagggtgtggagaagggattccctcttctttcccttcttagcagaatcttcccagtctacaaggaggtcattgctgagttgaaggcagctggggcttcatggattcagtttgatgagcccatcttgtcctcg

SEQ ID NO: 58170 - DNA, 234 bp, Zea mays
gctaaggatggatgttggcacgttcgatatcaagtatctcgatgatgaccatgagtgggtaaagctcgcgtgcaatgcagacttggaagaatgcatggagatctcgcggctttctggcagccatgtcattaggctactggttagcgatatttcagcacactttggcagttcttgtggaagctctggttgatatgcgtgccaccttttggcttgaatcatgtagactcgaaagtt

SEQ ID NO: 58171 - DNA, 310 bp, Zea mays
gcacctcctcgccaacgtgctcggctgcgtcccggccgatctgagcagggacgactggctcgccgcgctcccaagggcgctcgtcgccgggttcgtcaagaccgacaaggattttcaaactaaagctcattcctcggggacaaccgtgacacttgccataattgctggctccgttgtaactgttgcgtccgttggtgactcacgttgtgtccttgatgctgcgggatccatctactatttgtcggctgaccaccgctttgacgctaatgaagaggaggttggacgtgtaaccgaatgcggaggtgaagtt

SEQ ID NO: 58172 - DNA, 308 bp, Zea mays
ctcgtacttctctttcatggatgatcttattgacaaaatgggggacaatgaagaagcccctctcgacatcaagttgtcttatctaccacggagcatggtcgttgccttaatcgccgttccagtggatgtgctgctgataagcgcagtggctttgtggaaaagcccctgcatgttgttcaaaggatggcagaggttatgtgaggatctagttggaagggaagggccgttcttagaaactgtctgcgtgccttttgctggtttggccattgtgttatggccacttgcggtgattggggggttacttgctt

SEQ ID NO: 58173 - DNA, 312 bp, Zea mays
ccctgtcccgctagcggctagtccgaccaggcgatccccacccatttcctcccccaaaaccccagagccgagaagagcgcaagatgttcggcttcgggcaccacggccagaacccgccggctcacggcggcgtgcaccagcccaccttcaagatcttctgcaagtccgacgaggggtactgcctcaccgtccgcgacggcaacgtggtgctggcccccgccaacccgcgcgacgagcaccagcactggtacaaggacatgcgcttcagcacccaggtcaatgtacgaggaggcaacctgcgttcgccctggt

SEQ ID NO: 58174 - DNA, 316 bp, Zea mays
ggacctcaagtgttacgtattacagtaagccagagtatttgagaatggagcatgctcttcttcatgaaatacgagggtcacttgctatgccagtttatgatcccagcaagggttcttgttgtgcagttcttgaacttgtcacaaacaaggagaaacctgattttgatgcagagatggacattgtttgtgatgccttgcagggtgtgaacttgcagacaacaacagatcgcagcaatcagaaggtttactctgaaaatcagaaatatgcttctacagagattttggatgttctaagagctatttgccatgcacatat

SEQ ID NO: 58175 - DNA, 310 bp, Zea mays
ggcccgcccaggaaatggcgtcgatgcagagctggcgcaaggcctacggcgccatcaaggacaccacaaccgttagcctcgccaacctcaactcggacttcaaggatctggatgtggcgatcgtgaaggcgactaatcacgtggagtgcccacccatggagcgacacctgcgaaaggttgttgctgcgacatccatcgccaggcctagggcggatgtcgcctactgcatccacgcgcttgcccgccgtcttgccaagacccgcaactggattgttgctctgaaagcacttgtagtaatccatagacttct

SEQ ID NO: 58176 - DNA, 226 bp, Zea mays
gccacctgaatggcggggaaaaggccaatggtgcgagggacaccagaattgggaaggtccgcatccgcctctcgacactcgaaactgatcgggtgtatacccactcataccctcttattgttctgacacctggtggtgttaagaagatgggtgaggtgcagctcgctgtccgtttcacgtgttcatcactgctgaacatgatgcatctgtactcacagcccttgct

SEQ ID NO: 58177 - DNA, 306 bp, Zea mays
gcagagcaaaggttttgagtcacagcagaagattttttccgaggagtttgaacttgttactcaagctctttttacagatccaagtgaccaaagtggatggttctatcacctctggcttttagctcaaacatctagtccagataacccacagctgattgcttcatggccttctaatgctgcaaagctcagtttctcttttatcaaggaaaaggctgagcagcacacactgtcatccgtctggtcaaggactgtacccattgttctttattttaatgagcctgtcaaaggattaaatcattcaagtgt

SEQ ID NO: 58178 - DNA, 307 bp, Zea mays
gattagagggagcgccctgcccaagcaaagagaaaccgcggcgcgagaagagggaggaagggcagacgggcgagcaggatgagagagatcatcagcatccacatcggccaggccgggatccaggtcggcaacgcctgctgggagctctactgcctcgagcacggcatcgagcccgatggcaccatgcccagtgatacctcggttggcgtcgcacatgatgccttcaacacgttcttcagcgagaccggttctggcaagcatgtgccgagggccatcttcgtcgaccttgaacccactgtcattgatg

SEQ ID NO: 58179 - DNA, 312 bp, Zea mays
catattttcccctcgtgtccgccgcacgcaccgccggaaccctagcctcagccgccacaggcagccgggatggagaaaggagcctcggaggcgtcggccccctgcgctcgctgcggcaagcccgcgcagctccaatgccccaaatgtgctgaacttaagctaccgcgtgagaacgcagctttctgcacacaggactgttttagggcagcatggagctctcacaaatctgttcacccaaagcctggtgcactggcatcccagcagtctccggaaggttggaaatattgtttgagaaaagggcggggacgtgca

SEQ ID NO: 58180 - DNA, 184 bp, Zea mays
gtggcaaaaagtctagcagtagtcgttctatgatgtatgaagctccccttggctacatcattgaggacgttcgacctgccggagggtgaagaagttccagtctgctgcttactccaactgcgcgaagaagccatcctgatatcccttttggcttcctcattctagtagtttaggatttcttttc

SEQ ID NO: 58181 - DNA, 303 bp, Zea mays
gcagagcaaaggttttgagtcaaagcagaagattttttccgaggagtttgaacttgttactcaagctctttttacagatccaagtgaccaaagtggatggttctatcacctctggcttttagctcaaacatctagtccagataacccacagctgattgcttcatggccttctaatgctgcaaagctcagtttctcttttatcaaggaaaaggctgagcagcacacactgtcatccgtctggtcaaggactgtacccattgttctttattttaatgagcctgtcaaaggattaaatcattcaag

SEQ ID NO: 58182 - DNA, 280 bp, Zea mays
atttctgctaacttgtcagtagagcagctaggaaaagtcaagggtgtaattgagtgccccaacccagacaatgacatacggaggtttgatgctaacatgcgcttgttcctccctataattgacaatgaaaaaagtcctttgactatcaacaatacacttcttcagtcatgttaccttcgatacactgaatgggcttgtggagttgcagtttacacaggcaattgaaacaaaatctggaataattaggggagctgcggagcccaagttcactgctgctgat

SEQ ID NO: 58183 - DNA, 154 bp, Zea mays
gcagagcaaaggttttgagtcaaagcagaagattttttccgaggagtttgaacttgttactcaagctctttttacagatccaagtgaccaaagtggatggttctatcacctctggcttttagctcaaacatctagtccagataacccacagctg

SEQ ID NO: 58184 - DNA, 306 bp, Zea mays
cggcgagcagtgtaacattttccttcagccatgggcaaggagaagactcatatcaacattgtggtcattggacatgtcgactctggcaagtcgaccaccactggccacctgatctacaagctcggcggtattgacaagcgtgtgattgagaggttcgagaaagaggccgcggagatgaacaagcggtcattcaagtatgcctgggtgcttgacaagctcaaggccgagcgtgagagaggtatcacaattgatattgctttgtggaagttcgagaccaccaagtactactgcactgtcattgatgcc

SEQ ID NO: 58185 - DNA, 287 bp, Zea mays
gtcctctgttacttctcccgccgccgccaatcccctcccgttctccgccaccgccaatcccctcccgtcctccgccacctctgctgagagcgagaagagatggccggcaagggtgatgggccggcaatcggcatcgatctcggcacgacctactcttgcgtcggtgtgtggcagcacgaccgtgtcgagatcatcgccaacgaccagggtaaccgcaccacaccctcgtacgtcgccttcaccgactccgagcgcctcatcggagatgcggccaagaaccaggtcgc

SEQ ID NO: 58186 - DNA, 300 bp, Zea mays
cttccccacttcggcctcggcagttccgcgtgccggccggagcctcgtctcgcttcgcatctcgcacttcgcgccttcgccgctgcgattcctcagcagctcctcggccgctccacccacccctgcgccggcgagatggagctcaagcccggcatgtcggcgctcgtcaccggcggcgcctctggcatcgggaaagcactttgtattgcttttgcaaggaggggtttatttgtgactgtcgttgatttctcagaggaaaatggaagagaagttgctacattagttcaaaaagaaaatagc

SEQ ID NO: 58187 - DNA, 307 bp, Zea mays
ctcgagccgctcgagccgtgctgaaaagcatcgacggctgctcaacgttttcattagacaaaacccaagcatactggagaagtcactttctatgatgttgaaagtgccaaggctgatagattttgacaacaaacgtgcttactttcggtcacgtatcagacagcagcatgatcagcaccttccagctcctctacacattagtgttcgcagggcttatgttttggatgactcatataatcagttgagattacgtcgtacccaggatctcaaaggtcgtttgactgtgcaatttcaaggggaagagggc

SEQ ID NO: 58188 - DNA, 285 bp, Zea mays
cctagtcctctgttacttctcccgccgccgccaatcccctcccgttctccgccaccgccaatcccctcccgtcctccgccacctctgctgagagcgagaagagatggccggcaagggtgatgggccggcaatcggcatcgatctcggcacgacctactcttgcgtcggtgtgtggcagcacgaccgtgtcgagatcatcgccaacgaccagggtaaccgcaccacaccctcgtacgtcgccttcaccgactccgagcgcctcatcggaattcggccaagaaccag

SEQ ID NO: 58189 - DNA, 304 bp, Zea mays
cgccaatcccctcccgtcctccgccacctctgctgagagcgagaagagatggccggcaagggtgatgggccggcaatcggcatcgatctcggcacgacctactcttgcgtcggtgtgtggcagcacgaccgtgtcgagatcatcgccaacgaccagggtaaccgcaccacaccctcgtacgtcgccttcaccgactccgagcgcctcatcggagatgcggccaagaaccaggtcgccatgaaccccatcaacaccgtctttgatgccaagcgtctcattggcaggaggtttagtgatgcctctg

SEQ ID NO: 58190 - DNA, 304 bp, Zea mays
cagcaggccaggcagacccaggtccgagccgccgcgattcgcgacggagacgctgatgtcatccagaagccccttctaccttcatttgagtcagctgaaatgcgtaatctcgcagagacattgttgagggatattattcgcgggagcccagatgtgaaatgggagagcatcaaaggactggaaaatgcaaaacgccttctaaaagaggctgttgtcatgcccataaagtacccaaaatacttcactggtctcctatctcccatggaaaggaatcttactttttggccccccagggacaggaaag

SEQ ID NO: 58191 - DNA, 302 bp, Zea mays
caatcccttcccgtgctccgcaaccgctgagtgagaagaagagatggccggcaagggcgatggcccggctatcggcatcgatctcggcacgacgtactcttgcgtcggcgtgtggcagcacgaccgcgtcgagatcattgccaacgaccagggtaaccgcaccacgccctcgtacgtcgccttcaccgactccgagcgcctcatcggagatgcggccaagaaccaggtcgccatgaaccccatcaacaccgtctttgatgccaagcgtctcatcggcaggaggttcagtgatgcgtctgtcc

SEQ ID NO: 58192 - DNA, 307 bp, Zea mays
gactgctgcaagcttcagagctcaagagtcagggcgccattgcgacagagacggagaccttcgcctttcaggctgagatcaaccagctgctctcactcatcatcaacaccttctattccaacaaggagatcttcctccgggagctcatttccaactcttccgatgcgttggacaaaatcaggttcgagagcctcactgacaagagcaagctcgatgcgcagccggagctgttcatccacattgtaccagacaaggcttcgaacacgctctccatcatcgacagcggcatcggcatgaccaagtccga

SEQ ID NO: 58193 - DNA, 307 bp, Zea mays
ggatcagggcagcagctggccagcggaggcaacgacaaccttctgcacatttgggatgtgtcgatggcatcatccatgccatctgctggccgcaaccagtggctgcataggctcgaggaccacatggccgccgtgaaggcactcgcgtggtgcccgttccagagcaacttgctggccaccggcggcggtggcagcgaccgctgcatcaagttctggaacacgcacaccggtgtgtgcctgaactcggttgataccggatcacaggtgtgcgctctgctgtggaacaagaacgagagggagctgctga

SEQ ID NO: 58194 - DNA, 302 bp, Zea mays
aaagagtactctctccctcctaccacacacagcctccggactgctccggacgcgcgcctcagatctactccaacacctccgcagcggcggcgcccgcgggtggaggagcaggagaggcggcgccatggtcgggaccgggaagagggagcggatagcgatacggaggatcgacaacctggcggccaggcaggtgaccttctccaagaggcggcggggcctgttcaagaaggccgaggagctctccatcctctgcgacgccgaggtcggccttgtcgtcttctccgccaccggcaaactcttcc

SEQ ID NO: 58195 - DNA, 216 bp, Zea mays
gacaagaaattcattcagggccggatgagacaggatagcaaaggtgtggaagactttggggatgtcataagagatggaggtggtgctcttgcaaaaggcatcttcagaggtgtcacaggcatattgacaaagcccatcgagggtgcaaaatcttctggtgttgaaggttttgtgcaaggagttggaaagggtataattggcgcactgcacaaccag

SEQ ID NO: 58196 - DNA, 175 bp, Zea mays
ttgagcccttacagttaaatgtgcttgactatcttttaggggttgctgatttgtccggagagcttatgaggctcgcaataggccgtatatctgatggggaagttgaatatgcaaaaactatctgtgcttttgtgcgggatatttacagggagctgacccttgtggtgcctttaat

SEQ ID NO: 58197 - DNA, 217 bp, Zea mays
catattttcccctcgtgtccgccgcacgcaccgccggaaccctagcctcagccgccacaggcagccgggatggagaaaggagcctcggaggcgtcggccccctgcgctcgctgcggcaagcccgcgcagctccaatgccccaaatgtgctgaacttaagctaccgcgtgagaacgcagctttctgcacacaggactgttttagggcagcatggagct

SEQ ID NO: 58198 - DNA, 301 bp, Zea mays
caaatcccctgtcccgctagcggctagtccgaccaggcgatccccccccacttcctcccccaaaaccccagagcggagaagagcgcaagatgttcggctttgggcaccacggccagaacccgccggctcacggcggcgtgcaccagcccaccttcaagatcttctgcaagtccgacgaggggtactgcctcaccgtccgcgacggcaacgtggtgctggcccccgccaacccgcgcgacgagcaccagcactggtacaaggacatgcgcttcagcacccaggtcaaggacgaggagggcaa

SEQ ID NO: 58199 - DNA, 301 bp, Zea mays
tgcctctgaatcaacagataactggtttagtgttgatgagaagccacctatcgcatatgctcgagtggagatcctggaaggtgctgatatgaagccatctgatcctaatggactagctgatccatatgtgaaaggacaacttggaccctaccgttttcgcacaaagatccataagaaaactcttgatccaaaatggctcgaggagtttaaaataccaataacttcatgggaagcactcaatcttcttcatcttcaagtccgagataaggatcccatttttgatgacgctcttggcgattgt

SEQ ID NO: 58200 - DNA, 281 bp, Zea mays
agacttttcaacgagaggaactatgggttagccacaaggatttgggggcaaatggtgtcacaggggtgtagtcctgatgttgtcacttatactacttctgtgcgggcatactgcaatgaaggcaggcttgatgaagcagaaaatgttgtgacggagatgaaaaaatgtaggaccattgtagatgcaatggcatataacactttgattgatggccatacaagtattggacagacagatcgtgcagttacaatcttgaagcacatgacgggtgttgcttctat

SEQ ID NO: 58201 - DNA, 308 bp, Zea mays
agtgacgcgagcacgagcatccatcgtttcgccttcttccccatcgcgtgccctcgccgcagccatcttccatggcggaccagctcacggacgagcagatcgcggagttcaaggaggccttcagcctcttcgataaggatggcgacggctgcatcactaccaaggagcttggaactgtgatgcgctcccttggccagaaccccactgaagcagagctgcaggacatgatcaacgaggttgatgctgatggcaatgggaccattgacttcccagagttcctgaacctgatggcaaggaagatgaaggac

SEQ ID NO: 58202 - DNA, 151 bp, Zea mays
ctcgagcgcgctgaaatccagaggaacccctggtgattggagccatatcattaagcatattgggatgtttactttcactgggctgaatagcgaacaagtcgcattcatgaggcaggaataccacatttatatgacatctgatgggaggatc

SEQ ID NO: 58203 - DNA, 287 bp, Zea mays
tgcccacaggcggccaaaccgcaccctccttcccgtcgtttcccatctcttcctcctttagagctaccactatataaatcagggctcattttctcgctcctcacaggctcatctcgctttggatcgattggtttcgtaactggtgagggactgagggtctcggagtggattcatttgggattctgttcgaagatttgcggaggggggcaatggcgaccgcggggaaggtgatcaagtgcaaagctgcggtggcatgggaggccggcaagccactgtcgatcgaggag

SEQ ID NO: 58204 - DNA, 286 bp, Zea mays
ctcttctgatgtatgcctggaaagttggccctgctttggcatgtggaaatactctcgtgctcaagactgctgaacaaacccctctatcggctttgtatatctccaaattgttgcatgaggctggactacctgagggtgttgtgaatgtcgtttctggctttggccctactgctggtgctgctcttgctagtcacatggatgttgataagatcgcatttactggatctaccgatactggagaaattattctcgagttggctgcaaagagcaaccttaagacagtgac

SEQ ID NO: 58205 - DNA, 187 bp, Zea mays
ccactaccacccatctcgtcgtccgccgattcgatccggttcttccaacccaggggcagtgatggcgacgaagaggagcgtgggcaccctcggcgaggcggatctgaaggggaagaaggtgttcgtgcgcgccgacctcaacgtcccgctcgacgatgcccagaagatcaccgacgacacccgcatc

SEQ ID NO: 58206 - DNA, 294 bp, Zea mays
cgggagcagtcgacgcgccgtcactgaatcctcagatcacggctagccgtaatcacacgccactctgctgactcccggcgagcagtgtaacattttccttcagccatgggcaaggagaagactcatatcaacattgtggtcattggacatgtcgactctggcaagtcgaccaccactggccacctgatctacaagctcggcggtattgacaagcgtgtgattgagaggttcgagaaagaggccgcggagatgaacaagcggtcattcaagtatgcctgggtgcttgacaagctc

SEQ ID NO: 58207 - DNA, 290 bp, Zea mays
ctgctctctccctcttcctctcccccgcggcggagccataaaccctaggcctcgccgtcgtcggaggcgccgccgcgatgtcgcactttggaaggacgggtccgccggacatccgcgacaccttctcgctgctcgtcctcaacatcagcttccgaaccacggccgatgaccttttcccgctcttcgagcgctgcggcaaggtcgtcgacgtcttcatcccgagggaccgcaggaccggggactcgaggggtttcgcgttcgtgcggtacaagtacgccgacgaggcgcag

SEQ ID NO: 58208 - DNA, 282 bp, Zea mays
cctgatgcaacatacagcattctcattgataatgaagataagcaaactggcagcatctacgagcactgggatattcttccccctaagaaaatcaaggacccagaggctaagaagcctgaggactgggatgacaaggagtacattcctgaccctgaggacaagaagccagagggctatgatgatattcccaaggaaattcctgaccctgatgctaagaagcctgaggactgggacgatgaggaagatggtgaatggactgcccctaccattcccaacccagaa

SEQ ID NO: 58209 - DNA, 279 bp, Zea mays
ctagtcccctgctccattctcagccgccgccaatcccttcccgtgctccgcaaccgctgagtgagaagaagagatggccggcaagggcgatggcccggctatcggcatcgatctcggcacgacgtactcttgcgtcggcgtgtggcagcacgaccgcgtcgagatcattgccaacgaccagggtaaccgcaccacgccctcgtacgtcgccttcaccgactccgagcgcctcatcggagatgcggccaagaaccaggtcgccatgaaccccatcaacac

SEQ ID NO: 58210 - DNA, 253 bp, Zea mays
cggccgacggctccgaccaccggtacaagatgtacgagcccgtcccgctctacgccaacaaggtcggccccttccacaatcccagtgagacatatcgttacttcgacctgcccttctgctctcctgagaaagtgaaggagaagagcgaggcccttggcgaggtcctcaatggggatcggctagttgatgcgccttacaagcttgatttccgttcggaagttgagtccaaggcggtttgctcaaagaagcttac

SEQ ID NO: 58211 - DNA, 280 bp, Zea mays
gtggcctggtgattgtgttttccctgactatacatctgaaaaaacacgagcttggtgggctagtttggtaaaggacttcatctctattggtgttgatggaatatggaatgatatgaatgaacctgctgttttcaaaactaccacgaagacaatgcctgaaagcaatattcataggggagatgctgatattggtggtgttcaaaatcattcatactatcacaatgtctacggaatgctaatggcaagatctacttataaaggaatggaaatgggcaatgca

SEQ ID NO: 58212 - DNA, 280 bp, Zea mays
ggccatcaccggcgcgactgccatggacgcgcccttcttccgctcgctggggctctccgacaagatctggaacaacgggcccatcagcttccagctggagtggttccagcaggtcgcgtccgccgtgtgcgggtggggcaggcgcacttgccgactgcaagagctacctggccaactccctgttcgtgttcggcgagttcggcggcaacgactacaacgccatgctgttcggcaactacagcgcggaccaggccagcacgtacacgccgcaggtcgtggc

SEQ ID NO: 58213 - DNA, 294 bp, Zea mays
ccaaactaagtttgaagagtttgtagctgggcatccagagttgaatcctggcatagatttggctgttactgttttgacaacgggattctggccaagctacaaaacttttgacataaaccttcctgcggagatggtgaaatgtgtagaggttttcaaggaattctatcaaacaagaacgaagcacaggaagctgacatggatttattccttgggaacctgcaacatcaatgctaagtttgatgctaaacctattgagctcattgttacgacatatcaggctgcattactactact

SEQ ID NO: 58214 - DNA, 204 bp, Zea mays
atgctacacaggaggctactccatgatgatgggaaaggcgtcgccgaggcgctaaatgaaacagtctgtctcgataagcaatgtgaaggactcattatacaaggaaaatactatgtcaaaatagacccacaaggagaaggagctcggtggcgtcggacatttggccaggaaatatactcccctctccttcttgctttcacagag

SEQ ID NO: 58215 - DNA, 273 bp, Zea mays
ctgatgtttatgggtttggcattctcctgttggaactgattactggtcctaaaaccttgagcaatggacatggccagtctcagaaaggcatgattctagactgggttagagagctaaaggaggacaagagaccggataagctggtcgacagggatctcagagattcatttgatattcttgagctggagtgttcagttgacgtgatcatccaatgcacgcagacgaaccctatgctgcggcctaagatgtccgaaattctgcacgctcttgaag

SEQ ID NO: 58216 - DNA, 284 bp, Zea mays
ggggaatgggagccaatgggaggctgggacatggtggtgttgaagataagaaaaaaccaactcttgtggaagcattaaaagatcgtcacgttaaaagtatagcatgtggttctaatttcacgacctgcatttgtatacataagtgggtttcaggtgctgatcagtctgtctgctcaggttgtaggcaaccatttggcttcacaagaaagagacataattgttacaattgtgggcttgttcattgccatgcatgtagttcaaaaaaagttctgaaagctgctttg

SEQ ID NO: 58217 - DNA, 288 bp, Zea mays
caaagaagctgattgctggtgacgcgtttgtctacctgaggagcgagaccggacagcagcgtgtgggagtgaggcgcctcgtgcagaagcaaagcacaatgccagcatctgttatatcaagccaaagcatgcatcttggggtgcttgcaagtgcatccacacgctattaggactcattccattttcctagtgtattatagaccaaggttaagccaaagccaatacatcgtcaggctgaacaagtacctggaatctagtaaaattggattcgatgtgggcatgaggttt

SEQ ID NO: 58218 - DNA, 273 bp, Zea mays; identical to SEQ ID NO: 58215

SEQ ID NO: 58219 - DNA, 278 bp, Zea mays
gtcgaaaagctactctcgcgagctttaagaggtgaggaagacaaaaatgtggagataaagctgaagacatttgggtcagagcaatctaagggtgcaatatttgttattgtcaatgcttgttccagcagagattacacacaaaatattgttggtgtctgttttgttggacaagatgttacaggacaaaaggtggtcatggataaatttatcaacatacaaggggactacaaagctattgtacacaatcctaatcctctgctacccccaattttcgcatc

SEQ ID NO: 58220 - DNA, 148 bp, Zea mays
cggctcgagaaacaaagatcagatacaggctgtcataagtgccggtatcatcgctcctttgttgcaactgcttcaaacagcagagtttgatatcaagaaggaggctgcttgggccatctcaaatgctacctctggtggttctcatgag

SEQ ID NO: 58221 - DNA, 129 bp, Zea mays
ctcggctctcgcatcgatgaagaacgtagcaaaatgcgatacctggtgtgaattgcagaatcccgcgaaccatcgagtttttgaacgcaagttgcgcccgaagccttctggcggagggcacgtctgcct

SEQ ID NO: 58222 - DNA, 276 bp, Zea mays
gggccagcgccctaacgtccagcagctcaagctcatggggcagatccacccgacggggctcacgcccaacctgcttaagctcttcgaaccgcgtccagcgctcgagtacaagcccccgctggagaagcgcaaattgccggcctacaccgggatggcacaatttgtgtcgcactttgctgagcccgaggatccagagtatgctccgccagtacccaagtgtgagaccagggcagagaagaaggctagaattcgcaataataagctcgagcaaggcgc

SEQ ID NO: 58223 - DNA, 281 bp, Zea mays
gaagccctagcaaacaggttttccttatatctactcgagcaggtaatttaggtgtaaaccttgttagtgctaaccgcgtggtgatatttgatccaagttggaaccctgcccaagacttgcaagcacaagacagatcatttcggtatggacagagacggcatgttacagtatttcgcctacttggtgccggttcacttgaagagctcatttattctaggcaaatatataaacagcagctttccaacattgcagtctctggaaaaatagagaggcgttacttt

SEQ ID NO: 58224 - DNA, 289 bp, Zea mays
aaaacatgcaaaatacctcgaaatgctttctatagcatttgctggagatagtgataaggggatgatggacgtgatgaacgggtgcaagaatctgaggaagcttgagatcagagacagtccatttggcgatgttgcactcttgggaaatgttgccaagtatgagacaatgcgatccctttggatgtcttcatgcaatgtcacattaaaggggtgccaggtccttgcatcgaagatgccgatgctcaatgtggagatcatgaatgaactagatggaagtagtgaaatggag

SEQ ID NO: 58225 - DNA, 153 bp, Zea mays
gatgcatattgccttctgaactttggtgacagtatcacaactgaccacatctcgcctgccggaaacattcacccagacagcgcagctgcaacatatctgaaggagcgtggtgttgaaaggaaggacttcaactcatatggtagccgaagagga

SEQ ID NO: 58226 - DNA, 300 bp, Zea mays
agtcgacgcgccgtcactgaatcctcagatcacggctagccgtaatcacgccactctgctgactcccggcgagcagtgtaacattttccttcagccatgggcaaggagaagactcacatcaacattgtggtcattggacatgtcgactctggcaagtcgaccaccactggccacctgatcctacagctcggcggtattgacaagcgtgtgattgaggagttcgagacaaagccgcggagatgaacaagcggtcattcaagtatgcctgggtgcttgaccagctcagggcgaccgtgagag

SEQ ID NO: 58227 - DNA, 297 bp, Zea mays
gggagttccggtctggctcctcccgtgtgctcatcaccaccgacctgcttgctcgttctattgatgttcagcaggtgtccctggttctcaactatgatctccccacccagccagagaattacctgcatcgcattggtcgtagtggtcgtttcggtaggaaggtcgttgccatcagctttgtgacccgcgacgacgagcggatgctgttcgacatccagaagttctacaacgtgttgattgaggagctgctggcaacgtcgctgacttccgtgatcatttgaagaagaccgactaaag

SEQ ID NO: 58228 - DNA, 307 bp, Zea mays
gccttgctgaatttgggatcgttacacagtgtgtggcaccaactagagtcaatgatcagtatcttacaaatgtcttgttaaagattaacgcaaagttgggtggcttgaattcgttgctccaaattgaaacatgcccagcaattcctctcgtatccacggtcacaactataatcttgggtatggacgtatcacacggatctcctggacattctgatataccgtctgttgctgctgttgttagttctcgtgaatggcctcttatctcaaaatacagagcatctgtccgcaccaatcaccaaaaatggaa

SEQ ID NO: 58229 - DNA, 271 bp, Zea mays
tccacaagattgtaaaatacaatgtgtgggcaagcacaaccaatggaaataagaagctcgatgctgcttatcaagaagctcagtcgaagggttctgcgtgccctatattcttgtttttctcagtgactacaagtgggcagtttgttggtgttgctgaaatgtcgggggctgtcgattttgagaaaaccctggggtattggcaacaggacaagtggaatggttccttctctgttaagtggcaattgtcaaggagtgcctaacacatttcaaa

SEQ ID NO: 58230 - DNA, 306 bp, Zea mays
ccccggcgaagttgttaaacctgaccaattcaaggcgataaatgacgaggggatgcctatttaccagaggcccttcatgaaggggaagctctacattcatttcacggtggagttccccgactcgctggcaccagagcagtgcaaggctctcgagtcggtacttccgccaaagccttcgtccaagctgacagacatggagatagatgaatgcgaggagacaaccatgcatgatgtgaacaacatcgaggaagagatgcgcaggaagcaggctcatgctgctcaggaggcgtacgaggaggacgacga

SEQ ID NO: 58231 - DNA, 259 bp, Zea mays
gatcgctgaagcttaccttggcagcacgatcaagaatgctgttgtcacggtccctgcctacttcaacgactcacagaggcaggccacgaaggatgctggggtgattgctggcctcaatgtgctgcgtatcatcaatgagccaaccgctgctgcttttgcctatggtcttgacaagaaggcaacagcgtcggtgagaagaatgtcctcatctttgaccttggaggtggtacttcgatgtctcctcttcctattgaggagg

SEQ ID NO: 58232 - DNA, 134 bp, Zea mays
gatcattcacaaaagctccagagatgatctaactagctatatgtaaatgatctagttgtgaatggtattataattgtgatgattttgtgaatatataattgtggtgcttttgtgtttaaaaaaaaaaacaaagg

SEQ ID NO: 58233 - DNA, 302 bp, Zea mays
tgccccttatatactgaaacgccggaaatccctgacctcagtatttgaaattattgatcgtgtacccaagattgatccagatgatgccagcggcctgaaaccacctaacgtgtatgggagcattgaattcaggagtgttgaattttgctacgctacacgcctcgagatgatggttctgagtaattttagcctcagagtgagtggaggacagactgttgctgtagtaggtgtatcaggatccgggaagagcccaataatttctttgatcgagaggttctacgatccaactgctgggcaagttt

SEQ ID NO: 58234 - DNA, 303 bp, Zea mays
cagatctctatatctcaacaatccttcagaagttgagtttctgcaggaagtacttattctaagtggtgttaatcatgaaaatattctgcaattttatggggcatgcacaaaacatccagactattgcattgtaacagaatacatgcctggagggaatatatatgactttcttcacaagcaaaataacttcttggacctccataaaattctaagatttgctatcgatatctcaaaaggactggattatctgcaccagaatagcattatacacagagatttgaagtctgcaaatcttctgctagg

SEQ ID NO: 58235 - DNA, 122 bp, Zea mays
  unsure (1)..(122): unsure at all n locations
accgaacttctntgcacctagttcgagaagctcggccatcgaccgcggtaggcgaacgagcttccctgcggcgttcccccccttctcggggcagatgattgtcaccctgatgagggagtcgt

SEQ ID NO: 58236 - DNA, 296 bp, Zea mays
atcaatgctagctttgctgttcaccaggatgttgatggaagggcaacagatgtagctctagggtggtcagtagctttaggttctcctttcacatttgctactactctagagcaggagtaccggagtgacatttttggcgagcgaggtattttgcctggtgctgtccatggcatggtggaggctcttttcaggagatacacagaacaaggaatggacgaggactcagcatataagaatactgtagagagcatcactggaattatatcgaaaactatttcaaagaggggtatgcttga

SEQ ID NO: 58237 - DNA, 294 bp, Zea mays
caccaggagcatgtgttgcctatgatccctagtggtggggctttcaaggatatgatcctggatggtgatggcaggactgtgtactgatctaaaatccagcaagcaactgatctaaaatccagcaagcaccgcctccctgctagtacaagggtgatatgtttttatctgtgtgatgttctcctgtattctatctttttttgtaggccgtcagctatctgttatggtaatcctatgtagcttccgaccttgtaattgtgtagtctgttgttttccttctggcatgtgtcataagag

SEQ ID NO: 58238 - DNA, 100 bp, Zea mays
ggcatgccgacctgctcctatgcaggttacctggattggctaccccaacacaacatgtttgccaacaatagactaccgaatctcagactcattgactgat

SEQ ID NO: 58239 - DNA, 293 bp, Zea mays
caagctggtccagccactgtctgtgcagttccagattgggagtgttgcgcataggtacccgttccaccagcagcagtcgaggcagaagctgcaggccgagatgttcaggaggagcaacagtgggatcagcctcaagttcgatatccctagccccagcggtggtgctgctggcaccatgtcgtctgcgagatcattcatgtcgtcgttgagtatagacaggagcatggcgagcttggatgggaagcggccgttccatttggtaggcaccccggtggcgagcgacccagcagatg

SEQ ID NO: 58240 - DNA, 187 bp, Zea mays
ctggcaagcattattgcaggatctgctttagagcagctaaaaagctatattcatcagtcagcaaatgaaataccaaggacgattggtgaagcaattccaatgaaggcaaccttttttataacatatacaatggttgatggttgggctggggtagctggtgagatattgagattgaagccactagtga

SEQ ID NO: 58241 - DNA, 302 bp, Zea mays
ctggtgtaccctccatcttctcctattttgtcactaatctccctgccttccatgaagttctagtctttctctgtgtgaagtcagtgccagtgccatatgtttcaccagatgagcgataccttgtgggtaggattggacctaaagaatatcggatgtaccgttgcattgttagatatggttacaaagatgtgcagagagatgatgacaattttgagaatatgttagttatgagcatcgcaaagtttattatgatggaagcagaagatgcttcttcagcaagttatgatatcgctaacgaagga

SEQ ID NO: 58242 - DNA, 293 bp, Zea mays
cccgtgccgtcgcctcgcctatccgatctgccacctcctcccgtctcgcacgttccttcccaactccgcagcgtagctctccgcggcgcgatccagatccaggtttttcagcatgggcctggtgaaggaaggcatcgacatggaggagggaacccttgagatcggcatggagtacaggactatatctggtgttgctgggcctctggtcatattggataaagtaaagggcccaaagtaccaagaaattgtaaacatccgacttggagatggcacaatcgccgtggtcaagtcct

SEQ ID NO: 58243 - DNA, 248 bp, Zea mays
tacgccgtcatcttcccgttcatcgccttcttcggcgccttcgcctacgtgctctaccccatgcgcgacgccatccaccccactgcgctcgccgatcgcctcctcgcctcgctcgggcccagcttcctcggacccgttgccatcctccgcgtctggagcttctgcctcttctacgtcatggccgagctctggggcagtgtcgtcatatccgtccttttctgggggtttgcaaatcagattcctacagt

SEQ ID NO: 58244 - DNA, 289 bp, Zea mays
  unsure (1)..(289): unsure at all n locations
gaattcccaggcaggcaggtcggcgaggagggcaggaagaccgaagaccgagccgtgcgggggctcgtcacgggaacgggacaggaccccaaaatctcagatccttcctgcccgcccgcccgtgcccgtcgacgcgtcgttcttgccggccgcgccacacctccgccctctcnctcctccaggggatcggatacgccacaggctgcgcgatggtgctgtgggtcttcggctacggctccctcatctggaaccccggcttcgacttcgacgacaaaatcctcggcttcat

SEQ ID NO: 58245 - DNA, 288 bp, Zea mays
gctgatgaagagcagagggaagcccttttcagagactgaaatccgaaactggtgctttcaaatatttcaagctctgagtcacatgcaccagcgtggatattttcaccgtgaccttaagcctgaaaatttgcttgttacaaaggaactcatcaagatagcagattttggatttgctcgtgaaatttcttctgagccaccttatacggaatatgtgtccactcgttggtatcgtgcccctgaagttcttcttcaagctactgtttataatgctgcagttgacatgtgggc

SEQ ID NO: 58246 - DNA, 191 bp, Zea mays
gagtggggctacagcaaccgcgtcgtcgacctgatccgccacatgttcaagacccagtagagagagatatttctgcctccctatcgagggtcgtccccgatggcctttggtcgcagacatctttgctgcttgtctatgctgagaataaatgtgaacggtgcccctggacgctggatccatgctggttttgg

SEQ ID NO: 58247 - DNA, 287 bp, Zea mays
  unsure (1)..(287): unsure at all n locations
cccggggcggaagaagagagagaagacgtctctctcctctcggcgtccccgttccccaacctctcgtctgctgcctgcctgcctgcctgcctgcaaaaaggagactgtcatggcgtctaagcgcatcctcaaggagctgaaggacctgcagaaggcctnnnntacctcatgcagtgcaggtcctgctggtgaggacatgtttcattggcaagcaacaattatgggaccacctgacagtccctatgctggtggtgtttttttagtgaaattcatttcccgccagatta

SEQ ID NO: 58248 - DNA, 289 bp, Zea mays
cgaatcccaggcaggcaggtcggcgaggagggcaggaagaccgaagacagagccgtgcggggtgtcgggacgggaacgggacaggaccccaaaatctcagatccttcctgcccgcccgcccgtgcccgtcgacgcgtcgttcttgccggccgcgccccacctccgccctctcctcctccagggggatcggatacgccacaggctgcgcgatggtgctgtgggtcttcggctacggctccctcatctggaaccccggcttcgacttcgacgacaatatcctcggcttcat

SEQ ID NO: 58249 - DNA, 140 bp, Zea mays
gaggacagcaagagtcctaagggccgtcagaagttgttctcaaatgaggagaagattcttctgaacaagcgagtgcctgatctggaaacagctacttctagtaaatggcttccacttcacacccttgctgcatctggtga

SEQ ID NO: 58250 - DNA, 280 bp, Zea mays
gggaaattgacattggagttcctgatgaagttggccgtctcgaggttctccgcattcacactaagaacatgaaactagctgaagatgttaatttggaactcatttcaaaagatacccatggatatgttggtgctgatcttgctgccctttgcactgaggctgcttttcagtgcattcgtgagaagatggacatcatagatcttgaggatgagacaatcgatgcagagatattgaactcaatggctgttacaaatgaccatttcaagactgcgcttggaac

SEQ ID NO: 58251 - DNA, 286 bp, Zea mays
cttcaataactaggactggacaagagcttttggacatggttgacagtttgcccattgttgcgataaagagcctaaaagtatctgacttccaaggaacgatagctctctgcccagccaccagttttgagttgtattgagagcaaaaattcacatgctttccgaatgcaaatattgttctcataatttctcccagcagcaactaagccatttatcgcatggagggtcccatagataaaacatattccccaagtgccataccttgcagatttagaagagtggtcgttgt

SEQ ID NO: 58252 - DNA, 284 bp, Zea mays
cggaggagaagctggagaaggaccgtatggatgcggataaggcggaggaaggcaacgttagacaaccaaatgctggcaatggtcttgatttggagaagtactcatggactcaacagttgcctgaggttaacatcactattcctgttcctcaaggaacaaaatcaagatttgtggtcgttgatataaagaagaaccatctgaaggttgttctgaagggccagccacctatcattgatggtgagctctataagccagttaaggttgatgattgcttctggagcata

SEQ ID NO: 58253 - DNA, 145 bp, Zea mays
ctcgagccgatggtgcacaccatgtcgctcgtccacgacgacctcccctgcatggacgacgacgacctccgccgcggcaagcccacctgccacgtcgtctacggcgagcccatcgccgtcctcgccggggacgcgctgctctcgc

SEQ ID NO: 58254 - DNA, 278 bp, Zea mays
gtcacaggcgcccatcacctccactgggttccggtgggatcggcagtgggtggtggtgaacgccaaagggcgagcatacacccagagggtggagcccaagcttgctctggtccaggtggagttgccgccggaggcttcgctgagaactggcagtccacgcccgacgaccacctggttatcagagcacccggaatggacacactgaagatacctctaataacggaacacaccacaatcgatgatgtctctgtctgggagtggtctggctctgcgtatga

SEQ ID NO: 58255 - DNA, 279 bp, Zea mays
gcaaattgctacagccaatggccctactggctataatagggattacctgttctcaatggagaaggcattagccagcattagccacgaagatgattcgatcatagagcttgcaaacgaggtgaggaaggtgctcaacagaacaaaggagaccaagattactggtgccaatgcttccatgaaatcacatgcccctcttgtgcacctgtccgcgcttccagaaggcaccgttgtggactcgagatagcgacctctactcggaatttactttcagctcttgca

SEQ ID NO: 58256 - DNA, 284 bp, Zea mays
aagagggccccctttgatctctttgacaccaagaagaagcaaaacaacatcaagctctatgtgcgcagggtgttcatcatggacaactgcgaagagctgatccctgagtggctgagcttcgttaagggtattgttgactctgaggaccttcccctcattatctctcgtgagactcttcagcagaacaagatcctgaaggtgatcaggaagaaccttgtgaagaagtgtgttgagctcttctttgagattgctgagaacaaggaggactacaacaagttttacga

SEQ ID NO: 58257 - DNA, 226 bp, Zea mays
gagaaacttcagaatcttgttaatgatgctctagacagaggtgccgaaattgccgtcagagggagctttggcaatcttggtgaagatgcagttgatcaatttttcccaccaactgtcctggtgaatgttgatcacacaatgaaaattatgcaagaagagacatttggacctattataccaatcatgaaattcagttctgatgaagaggctatcaaacttgcaaacg

SEQ ID NO: 58258 - DNA, 180 bp, Zea mays
cgggggtgcagagagatcgagatccggaggccgcgagtgggagcgccaccaccagcgtctgcggcaatggcgggcacggtgacggtcccggggtcgtcgaccccctccacgccgctgctcaaggacgagctcgacatcgtgatcccgtcgatccgcaacctcgacttcctggagatgtgg

SEQ ID NO: 58259 - DNA, 132 bp, Zea mays
caagaacatgatcactggtacctcccaggctgactgtgctgtccttatcattgactccaccactggtggttttgaggctggtatctccaaggatggccagacccgtgaacatgctctccttgcgttcaccct

SEQ ID NO: 58260 - DNA, 276 bp, Zea mays
ttttgtcttcgcttgcttcctttcgaaagtccttgcgtcacactcgccgatcgatcgagtctctccggattccagagaggcccaactgccgaagccatcgatcgccgccacctcttcgagcagaatagttgagaatggctgacgaggatatccagcctgacgtatgtgacaatggcactggaatggtcaaggccggtttcgctggtgatgatgcgccaagagctgtcttccccagcattgtgggaagacacgcccacaccggtgtcatggtcggca

SEQ ID NO: 58261 - DNA, 276 bp, Zea mays
caacagggatggaaagcctcaccttgtgaaattccattggaagcctacttgtggtgtgaaatgcttgctcgacaatgaagctgtgactgttggaggcacctgccacagccatgcgacgaaggatctatatgattccatcgcagctgggaattaccctgaatggaagctctacatccagactattgatcttgaccatgaggataagtttgactttgacccgctcgatgtcaccaagacctggcctgaggatatcatccgctgcagccgttggacgga

SEQ ID NO: 58262 - DNA, 238 bp, Zea mays
tgttcatggtccatctggccacgatccccatcaccggcaccggcatcaacccggccaggagcttgggcgctgctgtcatctacaacaacgacaaggcctgggatgaccactggatcttctgggtgggtccattcatcggcgccgccatcgcaccggcgtaccaccagtacgtgctgagggccagcgccgccaagctgggatcgtctgcctccttcagccgctagatcgatggcctccg

SEQ ID NO: 58263 - DNA, 319 bp, Zea mays
ctagtcctctgttacttctcccgccgccgccaatcccctcccgttctccgccaccgccaatcccctcccgtcctccgccacctctgctgagagcgagaagagatggccggcaagggtgatgggccggcaatcggcatcgatctcggcacgacctactactgcgtcggtgtgtggcagcacgaccgtgtcgagatcatcgccaacgaccagggtaaccgcaccacaccctcgtacgtcgccttcaccgactccgagcgcctcatcggagatgcggccaagaaccaggtcgccatgaaccccatcaacaccgtctttgatg

SEQ ID NO: 58264 - DNA, 218 bp, Zea mays
caaattgagaagacaattcagtatcttattggctctggaatggatcctaggactgagaataatccttatcttggtttcatctacacctccttccaagagcgggcgaccttcatctcgcatgggaacactgctcgtcatgccaaggactttggcgacttaaagctcgcacaaatctgtggcatcatcgcctcagatgagaagcgacatgaaactgggta

SEQ ID NO: 58265 - DNA, 303 bp, Zea mays
gctcgacaaggacgaccgacgacgcacgcggagatccgagcgactgcaaatattgaaaactgaactgtaagatggcatcagcagagctttcccgtgaggaaaatgtgtacatggcgaagtcgctgagcaggcggagaggtacgaggagatggttgagctcatggagaaggtagccaagactgttgactcggaggagctcactgtggaggagcgaaacctcttgtctgttgcatacaagaacgtcattggagcccgccgcgactcatggcgcatcatctcctccatcgaacagaaggacgaggg

SEQ ID NO: 58266 - DNA, 306 bp, Zea mays
cgaaaagaatgtccgagcattgttcacgttagcggctaaagtatcaccaaccatcattttcgtcgatgaagttgatagcatgcttgggcagcggaacagagctggagagcatgaggcaatgaggaagatcaagaatgaatttatgacacactggcatggcctcttgtcaagaccggatcagagaattcttgttcttgctgcaaccaaccggcctttcgatcttgatgaggctataatccgtaggttcgagcgaagaatcatggtaggtctgccatcgatgggaagtcgggaactcataatgcggcg

SEQ ID NO: 58267 - DNA, 286 bp, Zea mays
gcgcaatgatcggtattgttcgatgaggtcagaggacattgactacccacgtccagtggttgagtgccacacttgttcagatcttgccgctgaaatcgatgcagcattagctgcagcgtcgattgtattcacggacaacaaggcttactcacagaagctgtgtacatagcgctaccactctcttccagttcgcaaggtgacggcgtgggacgtatagcgcaggtggatcgtatgctgcaaagttctaaaattcaactagctactcggatgagtttctgtggggtag

SEQ ID NO: 58268 - DNA, 303 bp, Zea mays
gtttggatccgaatgaatcagataacaatgggcatacagcactgcatatagctgcttccaaaggagacgaacaatgtgtcaagcttcttctagactacggagctgatccaaatcctagagactctgaaggaaaagtgcctctatgggaggcattatgtgacaagcataatgcagtgatagagctattagtagagagtggtgcagagctatcatctggagacacggccttgtatgcttgcatcgctgttgaggaaaatgatgctgagctgcttgagaacgttatccgttatggtggcaacataa

SEQ ID NO: 58269 - DNA, 306 bp, Zea mays
aaggacagggaggagcaggcggagttcaagaagatgtacagcctcatcgacgagtacaagttgaagggccatatccggtggatctcggcgcagatgaaccgcgtccgcaacggggagctgtaccgctacatttgcgatacgaagggcgcattcgtgcagcctgcgttctacgaagcgttcggcctgactgtgatcgagtccatgacgtgcggtctgccaacgatcgcgacctgccatggtggccctgctgagatcatcgtggacggggtatctggcctgcacattgacccttaccacagcgacaag

SEQ ID NO: 58270 - DNA, 309 bp, Zea mays
ggaaagcttatgacaatggtgtccgagaaggtgcatttggtttgctattgaattcagttgtccttggcgttggttcattcctcgttgatccactatgccggatgattggtgcaagattagtttgggccattagcaacttcacggtgtttatgtgcatgatggctacaacgatactaagttggatctcttctgatctgtactcaagcaaacttcatcacatcatcggggcaaataaaacagtcaagatcacggcattggttgttttctctcttctcggattgccactctccatcacttacagcgttccgt

SEQ ID NO: 58271 - DNA, 307 bp, Zea mays
agcggtcgcgcccccgccaagttcccgttggactcgctgcagccggggagcgctgccgccatgatgctcgccggggctgctgccgcttcgcaggccaccatgccgccgtccgagaaggactactggtctctgctcgccctgcactaccagcagcagtcggagcaggagcggcagttcccggcttctgcttacgaggcttacggctccggcggcgtgaacgtggacttcacgatgggcaccagtagcggcaacaacaacaacaacaccggcagcggcgtcatgtggggcgccaccactggtgcagtat

SEQ ID NO: 58272 - DNA, 292 bp, Zea mays
cctggccatactcatgtcccctgatacagtttcagctaatgactcgtcagtcataacacaggagggcaagcgaagatgctgaagctggcacggcggatgacggagaacttctgcgccggggtcagcgcgtcatctgcacgtgaatggagtaagctggacggcgctgcaggcagcatcggggaggatatgcgggtcatggcacggaaaagcgtggacgagcctggggagccgccggccgtggtcctaagcgcaccacatcggtgtgggtcccctggctccgagaaactcttca

SEQ ID NO: 58273 - DNA, 143 bp, Zea mays
ctcaaaagaacagaggttgctgaagacttagtgctcgaaaaaacatcttgccctctgggtgtgctgttgattgtttttgagtccaggcctgatgccttagtccagattgcgtctttagcagttcgaagtggcaatggtcttct

SEQ ID NO: 58274 - DNA, 300 bp, Zea mays
aggagatccacatcggcggacaccgcggctggcgcctgcgcgtgctggaggccttcgtcatcatcctcgccttcacgcagctcctctacgtgctcatgctccacacgggcctcttcggcggcacggtggctaccgggaccacgactacggcgtcggtggcgcggccggcgagcccaagggggtcaccagggtctgaggattctgatcgatgcagctcgtacatgtgtcatcatatcaggcgctgctggagtgtgatgacgtaataagtagtacccatatatatatatatggtgtgtgttg

SEQ ID NO: 58275 - DNA, 302 bp, Zea mays
gatagatgaatgcgaggagacaaccatgcatgatgtgaacaacatcgaggaagagatgcgcaggaagcaggctcatgctgctcaggaggcgtacgaggaggacgacgagatgcctggcggacccaaagagtgcagtgcgctcaacagtaaggcgactaccaaaatgggattcaaggcactttggttgctcttcaattatgcgagtgcgcctgtggactgtatggttctatggttttgctgtcgctgagctacaaagtaggaagctgatgcgcccctggctctgcaagcgggggaatgtatcc

SEQ ID NO: 58276 - DNA, 298 bp, Zea mays
  unsure (1)..(298): unsure at all n locations
gcatatgttggcgatgaggcacagtccaagagaggtattctcacgctcaagtacccgattgagcacggtattgtgagcaactgggatgacatggagaaaatctggcatcatactttctacaacgagcttcgtgttgcaccagaggagcacccgtgtagancactgaggctcctttgaacccaaaggccaacagggagaagatgacccaaattatgtttgagactttcaatgttcctgccatgtatgttcaattcccaagcagttctatcactctatgctagtgggcgtactactggta

SEQ ID NO: 58277 - DNA, 299 bp, Zea mays
aaacgctaccatgcttgaggaagggcttgcccggctcgaaagaagcaagagatgggacactagggagaggaagacggctctccagaacctggaacagttccaggacaaggcaaagaaggaaaggctgcggatttggcagtacggagatgttgaatctgacgaggacgagcaggccccgcctgcaaggaagcctggaggtcgtcggtagagactgggcagtgtaaggctgcagtctggcatgctatgaaagttttggacaaccacaaatgttggactctgccgggagttatagatgagga

SEQ ID NO: 58278 - DNA, 303 bp, Zea mays
aagctttgtcgggatccacaccccaaaattgatttctggatctagtgaagggggtgcggctgtattcaagcttctgtacaatggtcaacctgcttgtttggcacaatcccctcagttatacaagcaaatggctatctctggtggttttgagcgagtatttgaggtcggccctgtgtttagagcagaaaattcaaacacacacaggcatctatgtgagttcgttggtcttgatgctgaaatggagattaaggagcattattttgaggtctgtgacattatagatggcttattcgtatcaatatt

SEQ ID NO: 58279 - DNA, 294 bp, Zea mays
gctagctacatggactcctgctttcacgttctcatacaggcactcctgcactgtgctccttcgtctcctcctcccctgcctgccatcaactgccaaggttcatgttcaggtggcactgccagcagaagtgatccgttgacttcagcttctggcaacctgtgctgctgtgttcaagtcgaccagtcgactgtggccatcagggagcagtttggcaactttgacagcgtgcttgagccaggatgccactgcatgccttggttcgccggcaagcgtgtagctgggcaactcacactc

SEQ ID NO: 58280 - DNA, 289 bp, Zea mays
gagaagttctcacgtatattttatggaaacgattcattttatgtcttgttcaggctacatcagatcttatatgacagactactttcagcaatcactaactctatcaccgctgactagaaatggcagaattccaaggatacaaaccctcctgatctatagtcacagtttatgagtgcgctttacaacttgctcgatggttcttctgacaacacaaaatttgaggacgactgccgagatattattctgactcaatcatatgatctctttactttagataaattgatttata

SEQ ID NO: 58281 - DNA, 292 bp, Zea mays
gaagcgaagaactacagctacagcctggaggtagggggcacggggcgcaagatggtctggcagggggtgccgcggagcatcagggacagccaccggaaggtccgggacagctacgacgggctcatcatccagaggaacatggccctgatcctctcgggtggcgacaggaaggagctcaagctgcgtgtcaccgggcggatctggaaggaacaatgagcttgatgggtcagctagtacgtctgtcccgctccgctgctgccctgaactcatgaatcgcatcgcaaagagcttt

SEQ ID NO: 58282 - DNA, 287 bp, Zea mays
gaagcgaagaactacagctacagcctggaggtagggggcacggggcgcaagatggtctggcagggggtgccgcggagcatcagggacagacaccggaaggtccgggacagctacgacgggctcatcatccagaggaacatggccctgttcttctcgggtggcgacaggaaggagctcaagctgcgtgtcaccgggcggatctggaaggaacaatgagcttgatgggtcagctagtacgtctgtcccgctccgctgctgccctgaactcatgaatcgcatcgcaaaga

SEQ ID NO: 58283 - DNA, 292 bp, Zea mays
aggagatccacatcggcggacaccgcggctggcgcctgcgcgtgctggaggccttcgtcatcatcctcgccttcacgcagctcctctacgtgctcatgctccacacgggcctcttcggcggcagcggtggctaccgggaccacgactccggcgtcggcggcgcggccggcgagcccaagggggtcaccagggtctgaggattctgatcgatgcagctcgtacatgtgtcatcatatcaggcgctgctggagtgtgatgacgtaataagtagtacccatatatatatatatgg

SEQ ID NO: 58284 - DNA, 159 bp, Zea mays
gatttcgtgtctagaggccatcaaagatttatttccacacgactcaaatccgttttatgctggatttggaaatagagacacagacgagcttagctacctcaaggttggtattcctatgggcaagatcttcataataaaccccaagggtgaagtcgcagt

SEQ ID NO: 58285 - DNA, 298 bp, Zea mays
ccgttgctcgcctcgggtcaaaccctaagcagggagttgatttatccgctgcagccatgagtaagttgcagtctgagtctgtcaaggatgccatctcccagattgttggggatgccaaggagaagaataggaagttcactgagactgtggaacttcagattggtctgaagaattatgatccacagaaggacaagcgtttcagtggctctgttaagttgccccatatccctcgtcccaagatgaaggtgtgcatgcttggtgatgcccagcatgttgaggaggccgagaagatgggact

SEQ ID NO: 58286 - DNA, 307 bp, Zea mays
attttaacaccaaatgtctatgagtacaagcgtcttgttcagaaggttcttaactgtgacgtagatgaggaaagtgcttctgagcagctaatcgcactttgccaaaaaattggtgatgtaacaataatgcagaaaggaaaagctgatgtcatcagtgacggtaaaacagttacacaagtgagtacttttggttccccaagacggtgtggtggtcaaggtgacatcctttctggaagtgtggcagtatttgcatcatgggcacgacactttgtcttgacaaacgaagaacctacagagaaaagagtta

SEQ ID NO: 58287 - DNA, 138 bp, Zea mays
attctagaagccgtatagaactcatggtgaaggcaaggagtcagtttaaagatcgaagcacagcaacgaatgttgacattggagtgcctgttccttcagatgctataaacccagatatgagaacttcaatggggtctg

SEQ ID NO: 58288 - DNA, 295 bp, Zea mays
tggacactgtgatcgggaggatattcaacaacatatcctctttaaaatccgcctacattcagctgcaggaagcccacaccccatatgaccctgacaagatccaggaagctgataaacttgtcatagaggagcttacgaggctttcagaactcaagcacgcttacagagaaaaacatcctaagccaatagctgcatcccctcaagattcacgcttgctttctgaaatacaagagcagcagtacttgttgaagacctacgaggtcatggtaaagaagttccagtcccagatccagtc

SEQ ID NO: 58289 - DNA, 299 bp, Zea mays
gggacagcaacctccagatcgcgtgcttcgaggtccacgccgacaggaacgagaaggtgttcctggccggcgccgacaacgtgctgcagaagctcgaccgggtcgccaaggcgctgtcattcgcctccaaggcggaggaggtggacgaggtgctcgagctcgcggcgcgagaatggggttccttcctggccccaaggagagcggcggccacgaggagcgggagcaagaggaggaggaggaacgcgaagaacgccacggcggccgtggggagagggacgccacggacgtgaggagcggga

SEQ ID NO: 58290 - DNA, 297 bp, Zea mays
caatttcgctctcctgggtctgttcacgttgtgcttgagcttcagcatcggtgtggcttgtgctaacacccaagggataatcgttctggaggctttagtgctgacggctggcgtggtggtttctctgactgcgtatgctttctgggcgtcaaagaagggcaaggaattcgggtacctggggcctatcctgtcttccgcgcttactatcctcgtcctaactagctttcttcaggttttcttcccactgggacccgtgtcggtgggcttgttcggtgggctacgagctctggtcttctc

SEQ ID NO: 58291 - DNA, 293 bp, Zea mays
gtcggctgccgcagactggtagtagccggcgcgccgtcaccgtatcctcagatcagaggcgagcagaaaccacaccactctactgacgcccgacgagcagtgtaacattttccttcagccatgggtaaggagaagactcacatcaacattgtggtcattggccatgtcgactctggcaagtcgaccaccactggccacctgatctacaagcttggaggtattgacaagcgagtgattgagaggttcgagaaagaggctgccgagatgaacaagcggtcattcaagtatgcgtg

SEQ ID NO: 58292 - DNA, 131 bp, Zea mays
  unsure (1)..(131): unsure at all n locations
gaagctattactggttatggccttggnggttcttctatggctcttttcggccgcgttggtggtggtatttataccaaggctgctgatgttggtgctgaccttgtggggaaggtagaaagaaacattcctnc

SEQ ID NO: 58293 - DNA, 292 bp, Zea mays
agacggccctgattatcacatatgatgagcatggtggattctatgaccatgtacctacgccggtcgttggagtgccccagcctgatggaatagttgggcctgatccatactacttcaagttcgaacggcttggggtgcgtgttcccacctttctcatctcaccttggatagagaagggcactgtgatccatgaaccaaatggtccacaggatagctcgcaatatgagcattcgtccatccctgcaacagtaaagaagctattcaatttacattctaactttctgacaaagag

SEQ ID NO: 58294 - DNA, 292 bp, Zea mays
ccagagctaacccttggcatcatccctggatttggaggtactcagcgtttgccgaggcttgtaggtctatccaaagcgattgaaatgatgctgcaaagtaagttcattgcggcaaaggaagggaaggaacgtggtttgattgatgccctttgctctcctgatgaattgataaagacatcacgtctttgggctctggaaattgctaattgccgtaaaccttggatgagatctcttggcagaacagataggcttggatcactatctgaagctcgtgctgtattaaatgcagcaa

SEQ ID NO: 58295 - DNA, 289 bp, Zea mays
tggaatttcaagagcaccattgcgcatgcttgaaaataatatccctatgaatcaccaacatgtgggatctgccccagctgtcaatccatcaatttgggatagacgacatggatatgcaggggagatgatggaaacaccaggattccacccaggtattactggaagcatgggtttccctggcagcacacatctgcatcagttggagaccaatggtatgtttcctcacaatggagggactttcatggacccagctatgtctcctgtgcacatgagtgctcgctctcctcag

SEQ ID NO: 58296 - DNA, 286 bp, Zea mays
tggtattatcgctcctttgttgcaactgcttcaaggagcagagtttgatatcaagaaggaggctgcttgggccatctcaaacgctacctctggtggttcccatgagcaaatcaagtacttggtgtctgagggctgcatcgtgccgctgtgcgaccttcttgtttgccctgatccgagaattgtaacagtttgtctggagggtcttgagaatattcttaaagtaggggagcacgacaagaccatgggcgcaacaggtgacattaatgttttcgctcagatgattgac

SEQ ID NO: 58297 - DNA, 290 bp, Zea mays
atcggcttcatcatcagcgctaacaattaaggagtcaatgcaatttctttgtgtgctgaaaaaatcataaacaggccatgccgcagctgactgacagaacgaaactccccaacatagttgacccagtgatcagggacacgatggacccaaagcatctgtaccaagtggcagcagtggcggttctctgtgtgcaaccagaaccaagttacaggccgctgattactgatgttctccactcccttgtccctttagtgcccgtggagctcggagggacgttgagggtcgcagag

SEQ ID NO: 58298 - DNA, 285 bp, Zea mays
tgacggccgtattggcccacgtgatgatccgaaggtgcgctcccagatcctctctcaggagtttgggtgggacaaggacctggccaagaagatttggtgttttggacctgagaccactggcccgaacatggttgtagatatgtgcaatcgagtgcagtatctcaatgaaatcaaggattctgttgtggctggtttccagtgggcatcaaaggagggtgcactggctgaggagaacatgcgtggaatttgctttgaggtatgtgatgtcgttcttcatgctgatgc

SEQ ID NO: 58299 - DNA, 284 bp, Zea mays
ctcgtggccacgactgccgctgccgccctacgccaggtgtccaggtcatctccggcccattcgccggcgacgagcaccccactagatcgaccgagatatggacggcctgtggcatctgggggacgagctccgcgggcagcccaaggtggtggaggaccgccagtggtcgctcatgacgtccaagctggcagagatcaccaggtccaggggcgagaggatgaacgatctcgactacgccaggatgaacgccgcccccgacgccaagcagtggggcaaggcggcgt

SEQ ID NO: 58300 - DNA, 287 bp, Zea mays
caactggtgactcagacggaaaaagtaaatcagctggagataagagctcaactagaaaactgaagcatgatgtcatcgcagccattggtgatcttattgatgagattgactcatgctatgagccgatttctgagcaagctgtggaacttattcaccaaaatgaggtaatcctaactctaggtcgttctagaaccgtcaaggagttcctgtatgccgcgaaagataagaaacgatcttttcgtgtatttgttgctgaaggtgctccaagatatcagggccatgttctc

SEQ ID NO: 58301 - DNA, 286 bp, Zea mays
gttacttctcccgccgccgccaatcccctcccgttctccgccaccgccaatcccctcccgtcctccgccacctctgctgagagcgagaagagatggccggcaagggtgatgggccggcaatcggcatcgatctcggcacgacctactcttgcgtcggtgtgtggcagcacgaccgtgtcgagatcatcgccaacgaccagggtaaccgcaccacaccctcgtacgtcgccttcaccgactccgagcgcctcatcggagatgcgagcaagaaccaggtcgccatgaa

SEQ ID NO: 58302 - DNA, 125 bp, Zea mays
acagaggcaggccacgaaggatgctggggtgattgctggcctcaatgtgctgcgtatcatcaatgagccaaccgctgctgctattgcctatggtcttgacaagaaggcaaccagcgtcggtgaga

SEQ ID NO: 58303 - DNA, 280 bp, Zea mays
caggccgggagcgggtgcgagggcaagaacttctacacccggagcgcgttcctgagcgccgtcaacgcgtacccgggcttcgccatggcgggacggaggtggagggcaagcgcgagatcgccgccttcttcgcgcacgtcacgcacgagaccggacatttctgctacatcagcgagatcaacaagagcaacgcctactgcgacgcgagcaacaggcagtggccgtgcgcggcggggcagaagtactacgggcgcggccgctgcagatctcgtggaactac

SEQ ID NO: 58304 - DNA, 291 bp, Zea mays
cgcttgagaagatgttcagtggcttcagtactggcaaggatggcttatctgagtaccgcaaggatggtgaatatgttctgacttacgaggacaaggatggagattggatgcttgttggcgatgtaccatgggagatgttcgctgactcttgccgcagctcaggatcatgaaaggatcagatgcaattggacttgctccaagggcagctgataagtccaagaatcgcaactagaatggttgcttcttacagtccagagcaagagggagatatccagtgactgtagggatctt

SEQ ID NO: 58305 - DNA, 141 bp, Zea mays
agctctcaaacctagccgcctcctgcaagtttcagagctcaggaatctgcgccatggcgaatgagacggagaccttcgcatttcaggctgagatcaaccagctgctctcactcatcatcaacaccttctactacaacaagg

SEQ ID NO: 58306 - DNA, 151 bp, Zea mays
gttcggagcgcacacacacacaaccagatctcccccaaatccacccgtcggcacctccgcttcaagatgcagatctttgtgaaaaccctgactggcaagactatcaccctcgaggtggagtcgtctgacaccattgacaacgttaaggcca

SEQ ID NO: 58307 - DNA, 310 bp, Zea mays
gctactgccattctatggaaatttgtcaccgtgatcttaaacttgagaacaccctccttgatgggagtccaacacctcgtgtgaaaatttgcgactttggttactcaaagtctgctttgctgcattccaaaccaaaatcaacagttggaactccagtatacatagcccccgaggttctttccagaaaagagtatgatggaaaggtagcagacgtttggtcctgtggtgtcacgctgtacgtgatgctcgtgggatcatatccatttgaagatcctgaggatccaaggaacttccggaatacgatcagcag

SEQ ID NO: 58308 - DNA, 312 bp, Zea mays
gtttctcaaagccgagaataatcgcagtggcagcggaaacatagctgagttgccagaccaaggaagcctgagaagaatagattcaaatgccgatgaatctgatgggaaggatgaactggatgagcaagacgaggaagactccgacgaggacgatcccaaatttcagcaggatacagcctgtgagtataggaaactcatcaccatccaagctggcaaaccaaaaggccatttgcgggatgcgctaaaagtggatccagacaaagtcaggcggctttctttgagcgagacacagttagctaaagcgacaatctc

SEQ ID NO: 58309 - DNA, 309 bp, Zea mays
attgtaaggatgaccttgcacaattctacctgatggactgcataatccaagtctttccagacgaataccatttacaaacattggaaacgttattgagcgcatttccccagcttcagccaagtgttgatataaaaacagtactctctcaacttatggacagattgtctaactatgctgcctcaagtcctgaactgttgccagagttcttgcaagttgaagcttttgctaagttcagtaatgctattggaaaggtgatagaagcccaacctgacatgccagttgttggagccataactctatatgtatcac

SEQ ID NO: 58310 - DNA, 308 bp, Zea mays
  unsure (1)..(308): unsure at all n locations
caggtgacagatatctgaagccatggataattccagtcccggaggtaacaatagttccgcgggctaaggatgatgagtgccttattcttgctagcgacggcctttgggacgtaatctcaaatgaagaggtatgtgaagttgctcgcaagcggatacttctgtgggacaaaaagaatggcacaagctcatcatcagccccacgggttggtgattccgcagacgcagctgctcaagcggctgccgaatgcttgtcaaagcttgctcttcagaaggggagcanagacaacatcactgtcgttgtagttgac

SEQ ID NO: 58311 - DNA, 305 bp, Zea mays
  unsure (1)..(305): unsure at all n locations
gatggcacttacatcagagggaaagctttacggatggggatggaacaagttcggacaagtcggagtcggcaacaacgacgaccacagctcncccggacaagtcagttttccagaggatcagaaaatctcccaggttgcatgcggatggaggcatactctggcctcctccgagaagaaaaatgtcttctcctgggggaggggcactagcggacagctcggcaacggtgaaatagtcgacaggaacacgcctgtgctgatcgatgccctgagctcagacggttctgcctgcaagaagctggagtcat

SEQ ID NO: 58312 - DNA, 298 bp, Zea mays
cagcctgtgccgagacaaggacaatgtggtgtacctatgcagcgggtatgaccggcgcacccttcatgagtggttccctgtgagaaccttggcatagccgcggacatggctacttcctgaggtgtaagagggacgcggaatggaagacctgtgtcgctgccacagactgcagctggaagcagatcgcggagccggtgatgtgcctgtacagggagacgacggacggctcaaccatcgaggacagggagacggtgctcgtgtggaactacgaggacgcggaccccgacttcgggtcgtg

SEQ ID NO: 58313 - DNA, 310 bp, Zea mays
ctatcgaggatcttgcacagttgatttatgacctccatcagataacatcctaaagctaaagtatctgtacagcttgtgtctgaagctggaattggaactgtagcttctggagtttcaaaggcgaatgcagacataattcagatatcaggtcatgatggtggtactggaactagcccaatcagctccatcaaacatgctgggggtccgtgggaacttggtcttacagaaacaaatcagacacttatacaaaatggattgagagagagggtagtacttagggtggacggtggattcaggagtggtcaagatg

SEQ ID NO: 58314 - DNA, 303 bp, Zea mays
gcttgacctagcatctactctcgaggttggatctggtgggactactcgcacttcaagcgatgcctccagcacctgcaacacaagatcggtgctgaccatcgctttccagttctcatacgagaatcacctacgagaaagcgtcgcagcgatggccaggcaatatgtcaggactgtggtggcatcggtgcagagggtggccatggcaatagctccttcccgtcttggtggacagcttgagatgaagcaaactcctggttcccctgaggcgcacacgcttgcgaggtggatcggcaagagctacag

SEQ ID NO: 58315 - DNA, 147 bp, Zea mays
ttggcatttccttaagataaaaaaggggggagatcggcttcctactccccgtccttatcgccagccgaaccgacattgttttctccccccttctcgccttctccttctcccccctagtctagaggcgtttgctccccaatcccttcg

SEQ ID NO: 58316 - DNA, 307 bp, Zea mays
ggaacagaagtgtctaatgaggatattgtcaggcctagagtcccattggaggcatgcttgtcaagtttttcagggccagaggagattccagatttgtatagcactgcattaaattcaaagactaccgtcactaagacagctggtttcactacctttactgattacattgtgctgcacatgcgtaagtttgtaatggaaacaggatgggtgccaaagaaactcgatgtttatatagatgtgccagatacaattgatatcacacatatgcgcagaaaggattacagcctggggaagagctgctacctga

SEQ ID NO: 58317 - DNA, 304 bp, Zea mays
tctgaaacacatgtggaagagcccaaatggcacaattaggaacattataaatggcactgtgttcagagagcctattatatgcaaaaacgttccaagacttgttccaggatggactaagcccatctgcattggaaggcatgccttcggtgatcaataccgagctaccgatgcagttctgaaggggcctgggaagctgaagctagtttttgagggaaaagaagaacagattgatctggaggtattcaacttcactggtgctggaggagttgccttgtctatgtacaacaccgacgagtcaatccga

SEQ ID NO: 58318 - DNA, 308 bp, Zea mays
cgtgaggagctggagaagaggcatgggcggtactggattgccgacggggcaatcgactcgtcctccactcccactctctctcaggtgcgagcaaggagcacgagcgcgagcccagccatacgacctcggcaggacacctcacagcatcggatccagcaactccagactcagctagatgatgagaggaggcaacgtgaggagctggagaagaggatgtcggatttgttcgcgtacgtgcagagccttggcgccgcacagggtcatgctccaccacctccgttgttccctgcaactgaccctgctgagtt

SEQ ID NO: 58319 - DNA, 297 bp, Zea mays
atttgcacaacaaggatgacttttcaagcatcaattccagtgagtacgtaggagtttcaacaggaaactggggttgtggtgcttttggtggaaaccctgaaatcaagagcatgattcagtggattgctgcatcacaggctcttcgccctttagttaattactacacttttgaggacgtgtctctgcaaagattagaggaggtgatccagtggatacgacttcatggctggacggtcggcgagttgtggcatatgctcatggagtactcatctcagaggctgggaggagaaacgcaca

SEQ ID NO: 58320 - DNA, 302 bp, Zea mays
gtgccctcaaagaccgaagcagccctgcactgaccgtgaaagctacctacaatggcgacaccgtccggttcaagtttgtgccagcaaggggctggtaccacttgctggaagagatagcaaagaggttcaagctgacggctggagcattccagctcaaatacaaggacgatgaggacgagtgggtgatcctggcgaacgatgccgacctccaggagtgcatggacgtcctggactcgatcagctcacgcaacatgaagctgcaggtgcgcgacctctcctgccacgtgggcagctcgggcagc

SEQ ID NO: 58321 - DNA, 301 bp, Zea mays
  unsure (1)..(301): unsure at all n locations
gtctatgacaggaacaagggcaacaccaacacacacatcaaccttaaatgtttcatggtcggtaatccactaactgacgaatactacgactcaaaggggctggctgaatatgcttggagccactcagtagtgtcagacgaagtttacgagcgtaatnagaaggtctgcgacttcagggtctcaaactggaccgatgactgcgatacagcgatgagcgccgtgttcagccagtaccaggagatcgacatctacaacatctacgcgcccagatgcaacctccctccgtcgtcagctgcacttg

SEQ ID NO: 58322 - DNA, 292 bp, Zea mays
ctgggccgccgccgcttggtgctgaggctttcgttggtctcctcggcggcgacgagcacccaccagcagttctgtagaaatggctgatggtgacgacatccagcctcttgtctgcgacaatggcaccggaatggtcaaggctggtttctctggggacgatgcaccaagggcggttttccctagcattgttggacgtcctcgccacactggtgtcatggtagggatgtggacagaaggatgcatatgttagcgatgacgcacagtccaagagaggtattctcacgctcaagta

SEQ ID NO: 58323 - DNA, 304 bp, Zea mays
ctcgagcggtttaatggttcgattgatgcagatacggtgaacaagcaggtgaagccacacacaattacctccacgctacaggaaatgttctcggagctgcgtgggctgtattcaagattagaaaagccctcgaccctaagggtaatatgaagaagtcttatgtcagccaagcagcgcacgccgtagctaaagaatcagttgcgaggcaaaagaagaagtgaactggcctggtcggtggttccattgtacctgtaatatgatatgtttgatgttgcagtatgttagcaatataggaactaagttg

SEQ ID NO: 58324 - DNA, 305 bp, Zea mays
caaggagaagtttgagggcctctgcaaggtcatcaaggaggtgctgggcgacaaggtggagaaggtggtggtctccgaccgcgtggtggactccccctgctgcctggtgaccggcgagtacggttggaccgccaacatggagcggatcatgaaagcccaggcgctgagggactccagcatgtctgggtacatgtcctccaagaagacgatggagatcaaccccgagaacgccatcatggaggagctccgcaagcgtgccgaggctgacaagaacgacaagtccgttaaggaccttgtcatgctgc

SEQ ID NO: 58325 - DNA, 307 bp, Zea mays
cgtcgtcgctcgcgctctccgcccggatcggagcgagagtaggggcgtgtcggcggtgaaagcgactgcgtcaccatggcggacgaggagcattcggagaggagagaggaggcctccgagcttgcccccttcgacccgaccaagaagaagaaaaagaagaaggttgtcatccaagaaccttctgatgaagtggacaagcttgcagagaagacagaaacactggcagtcgcagaacccgctgaacttaacttcactggaatgaagaagaaaaagaagaagccggtggatcttgattcaactcttgatg

SEQ ID NO: 58326 - DNA, 305 bp, Zea mays
attcatttcacggtggagttccccgactcgctggcaccagagcagtgcaaggctctcgagtcggtacttccgccaaagccttcgtccaagctgacagacatggagatagatgaatgcgaggagacaaccatgcatgatgtgaacaacatcgaggaagagatgcgcaggaagcaggctcatgctgctcaggaggcgtacgaggaggacgacgagatgcctggcggagccaaagagtgcagtgcgctcaacagtaagcagactaccaaaatgggattcaaggcactttggttgctcttcaattatgc

SEQ ID NO: 58327 - DNA, 302 bp, Zea mays
aaggaagtccttacaaggttcccagatatatcgtcagtccagcttagaatgccgaaccttcactttctgcctgtcaacttggggaccaaagaagctccgctggtgaagtttgctgatgatgtgtacctgccgacggacgaaccacacgggaccattgaacgcaaccttgagccgtcccatgtcaaagctgtaaaaaaatttgtagtcgtcaggctgatattagactcctgcttcgtctccccagcattcccaggctaaaatggacagtaagctgtaagggaaagataaactatcataaatcg

SEQ ID NO: 58328 - DNA, 301 bp, Zea mays
aaggatggggagaacaaggtcttcagccctgaggagatcagtgccatgattcttggcaagatgaaggatactgctgaggcgtaccttggcaagaagatcaacgatgctgtcgtcactgtccctgcatacttcaatgatgcgcagaggcaggcaaccaagtatgctggtgtcattgccggcctcaatgttgctaggatcatcaatgagccaactgctgctgctattgcctatggtttggacaagaagggtggcgagaagaacatccttgtctttgaccttggtggtggtacttttgatgtca

SEQ ID NO: 58329 - DNA, 299 bp, Zea mays
cctctcacaagagggccaagagaactctgtcttccactgcccagaccaccattgagattgactcgctgtacgagggcattgacttctactccaccatcacccgtgccaggtttgaggagctcaacatggacctgttcaggaagtgcatggagcctgttgagaaatgcctgagggatgccaagatggacaagagcagcgtccatgatgttgtccttgttggtggctccactaggatccccagggtgcagcagctgctccaggacttcttcaacggcaaggagctgtgcaagaacatcaat

SEQ ID NO: 58330 - DNA, 301 bp, Zea mays
cgagaggtttgagaaggaggctgctgaaatgaacaagcggtccttcaagtacgcgtgggtgctcgacaagctcaaggctgagcgtgagagaggtatcaccattgatatcgctctgtggaagtttgagaccaccaagtgctactgcacggtcattgatgcccctggacaccgtgacttcatcaagaacatgatcactggtacctcccaggctgactgtgctgtccttatcattgactccaccactggtggtgttgacgctggtatctccaaggatggccagacccgtgaacatgctctcctt

SEQ ID NO: 58331 - DNA, 303 bp, Zea mays
ggagtatcatcaactgcaataaattcctttatgcgtggaatcgggataacgagaagtgacaatagcttaattcgtgatgatcgtctagactatcacatcagggacgagcttaacaaaacagcccctcgaaccatggttgttttgcgacctctaaaggtggtaaaaactaacttggaagaaggaaaagtactagaccttgatggcaaaatgtggcctgatgcttctgatactgatgcttcctcccactataaggttccgttctcaagaactgtctacattgagagaactgattttcgcctaaag

SEQ ID NO: 58332 - DNA, 302 bp, Zea mays
gggttgctaccgtgcagtgcctatcgggtactggttctttaagagtcggaggtgaatttcttgcaaggcactatcacgagcgcactatctacatcccacaaccaacctggggaaatcacccaaaagtcttcaccctatctggcttgaacgttaggagatgaacgctattatgatcctgcaacatgcagccttcacttcgaaggactcctggaagacctcggttctgctccttcaggttcaattgtactgctgcatgcctgtgctcacaaccctactggagtagatcctaccatcgaacagtg

SEQ ID NO: 58333 - DNA, 297 bp, Zea mays
aattccacgacctgaccccagcgatgctccagttgctggtgttggaaaggtgtttttggaatatgcagatgtcgagggctcgaccaaagcaaagacggggatgcatgggcggaaatttggcgggaaccaggtggtggccgtgttctatcccgaggacaagtacgctgctgagcagtatgactgaaagtagtagaacctgttctagagttgcaacacacaatgtgtgtgttttttttaaaatctttgagggtacgttttctcttgaatttgaatcttatctagttataagtttggtgc

SEQ ID NO: 58334 - DNA, 302 bp, Zea mays
ctcctcctcgcctcctctccctagcctccacgacgcaagggagagtgacggaaagcgacgcgcgcagcgaggagggccaaggggaagaggggaagcaccgcaccaggacccaagttcgccgccgccgcctctgatctccgcgaggttgtcaggcttcaatatgtcgaccagcacattcgctacttcctgcacgctgttgggcaatgttagaacaacgcaggcctcccagacagcggtgaagagtccttcgtctctaagcttcttcagccaagttacgaaggttccaagcctgaagacctcca

SEQ ID NO: 58335 - DNA, 301 bp, Zea mays
agcgcgtccacctcccaaacccctactcccccaggaagcaatggcttcccccacccagggccaggtcatcacctgcaaagcggcggtggcgtacgagccgaacaagccactcgtgatcgaggacgtgcaggtggcgccgccgcaggccggcgagagtccgcgtcaagatcctattcaccgcgctctgccacaccgaccactacacctggagcggcaaggatcctgagggtcttttcccttgcattcttggccacgaagctgccggaattgtggaaagtgtcggtgaaggagtaactgatgt

SEQ ID NO: 58336 - DNA, 298 bp, Zea mays
gtgctctgttctcatcttctgctcgctggtgtcccctccctctcacccatggcttcggcggcggcggcaactcaggtggggacttacttcctgcggaactactacaacctgctgcaacaaacccccgatgtcgtccaccagttctacagcgaaccagcaccatggtccgcgtcgacgacctcaccggcacgaccgcggctgccaacaacatgatggacatacactcactcatcatgtctttgaacttcacccaaattgagatcaagactgccaattttgtgaactcatggggcgatgg

SEQ ID NO: 58337 - DNA, 295 bp, Zea mays
tcgtgatggtccagatggaagcttagcaactgttactgagtttatggttaatgggtctctcaaacagttcctgaggaaaaaagacaggacaatagatcgccggaagagagtaatattagccatggatgctgcatttggcatggaatatttgcacgggaagaatatagtccattttgacctgaagtgtgagaatctactggtgaacatgagggatccacagcgaccaatctgcaagatcggtgatctcgggctatcaaaggttaaacagcatactttggtatctggtggtgttaga

SEQ ID NO: 58338 - DNA, 298 bp, Zea mays
ggctagggtgttcacgcctgccgcggcgaacttctgccctccccggcgtcgcgctctggtcgtcgtcggccgggaagatggctggcggcttcagggtacttcatctggtcaggccctttctggctttcttgccagaggtgcagagcgcggataagaagtcatcattcagagaaaaagttatctacactgttatttctctcttcatttttctggtgtgcagccagctcccactctatggcattcattcgacgactggagctgatcctttctactggatgcgtgttatccttgcatcaaa

SEQ ID NO: 58339 - DNA, 339 bp, Zea mays
  unsure (1)..(339): unsure at all n locations
ctcacaggtacggaacgtcagcacggccgccggctcgagggcgccgtcacgtcaccaccaccaaccttggtagcagccgccgtccggtcatcaccaccaccttggtagccgccgccgaagcgcgccgcgggcgcgggcgctcgcgatggctaaccgcacggaccccctcgcgaagagcatccatgggacgaacccantaaacctggtggagaagatcgtgcgctccaagatctatcagagcacctactggaaggagcaatgcttcggcctcaccgcagagacgctagtcgacaaggccatggagctcgaccacaccggcggaacctacggcggcaaccg

SEQ ID NO: 58340 - DNA, 90 bp, Zea mays
ccaagatccaggacaaggagggcatcgccccagaccagcagcggctcatctttgctggcaaacagcttgaggacgggcgcacgcttgctg

SEQ ID NO: 58341 - DNA, 298 bp, Zea mays
taaaaggcctattatgggcttgcaaagaagctccatccagacacaaataaaggtgatgcggatgcagaacgcaagtttcaagaggttcaacgagcttatgagactctaaaggatgaacaaaaaagatcattatatgatcaggttggccctgatcagtatgagaaaactgcttctggcggaggcggaactggcttcgagggtggttttggaaatccatttgaggatatttttggtggtggcggtggcggtggtggaatgaatgatttctttaggaacatttttggggatagggacttta

SEQ ID NO: 58342 - DNA, 296 bp, Zea mays
ggcaaagcaatttgaggcactggcctcagttgaggacaagatactcagaaaaataagggacaaagaggcggaagtggagaccataaacaaaaggaactctgaactagaggaccagattaagcatttgggagtggaagttggtgcttggcagcatagggccaagtacaatgaaagcatgatcaatgcactcaagtacaacttggaacaggtttgtgctcaccagagcaaggatttcaaggaaggctgcggcgatagcgaggtagatgacacggcgtcctgtcgcgatggtggtgcta

SEQ ID NO: 58343 - DNA, 299 bp, Zea mays
gttgatcaataatccgtcacgtgtcaatgagtatctaccaatcaccggtctggctgaattcaataagctgagcgctaagcttatctttagcgctgacagccctactattcaggagaatagggttgctaccgtgcagtgcctatcgggtactggtactttaagagtcggaggtgaatttgcttgcaaggcactatcacgagcgcactatctacatcccacaaccaacctggggaaatcacccaaaagtcttcaccctatctggcttgaacgttaggagctaccgctattatgatcctgca

SEQ ID NO: 58344 - DNA, 279 bp, Zea mays
accgaagcctacttggatatctctggaagttctattaaacccagtgatagagtctatccagaggagatgatccatactgggatatccagcattgatgtcatgaattccattgctcgtggacaaaagattccactgtttactgctgctgggctccttacaatgaaattgctgctcagatttgtcgtcaggctggtcttgtgaagacattggagaaaggagagcatgctgagggtggtgaagatgacaactttgctattgtgtttgctgctatgggagtga

SEQ ID NO: 58345 - DNA, 297 bp, Zea mays
ctgaagagtgtctttcctgatgacctggaccctgatggtggcactaccagccaatatgagcagagttcgtgcctcttgcgacagggaagtatcacaatgccgcctgagctcagcaggagaactgtggacgaggtgtggaaggacatccaggatgcacaaaacagaaatgttggggagagtggtcggcggaagcgggagcggcagccaacgcttggagagatgacgcttgaggatttcttggtgaaagctggggttgtcgccgaaggatatctgaaggacttgaatggcataggcagt

SEQ ID NO: 58346 - DNA, 294 bp, Zea mays
catctattggagcattcactgtccaatgtgctaaatgttttaaatggaggcttattccaacaaaagagaaatacgaagaaattcgtgaacgtattatacaggaaccttttgtatgcaaaagagctcgtgaatggagacctgatataacatgcactgacccagaagatatatctcaggacggtagcaggctttgggctattgacaaacccaatattgcacaaccccctcatggatgggaaaggcagattaggataagaggtgaagggggtaccaaatttgctgatgtatactata

SEQ ID NO: 58347 - DNA, 292 bp, Zea mays
ggcgtgatagagccatcgatgagcaaagtaaagatcattcagtttgccacggaggctgccattactatcctgaggattgacgacatgatcaagcttaccaaggaagaagagggtaacgaagagtaagcagcccaccagtagtgggctagtggattcccatgggatggttgccatagcatgtagcacttgttttttcacttatcgtttacttttgcttgctgtgagcattcgtttgtaggaaaagtgagaacggatgtgtatcaatccgtgttgggtgacgatgactcacgga

SEQ ID NO: 58348 - DNA, 294 bp, Zea mays
aactgaccctagtaaataccttgatggtactcgggtgtatgtgcaaggatcaatgtgggatggtcttgcgaatggtaaaggggacttcactgatggtccatatgagattcagtatccagagagttttttcaaggacagcttctacaaatatgggttacatcctgaagttgggtctgtaggggttccagttgccgcaacaattagggccacaatgcctccagtaggatggagcattccgattttaaagaaaagaattgatgggtacatcgaagaagtaccaaatccaatatggga

SEQ ID NO: 58349 - DNA, 291 bp, Zea mays
ccaggacaaggagggcatcccaccggatcagcagcgtttgatcttcgctggcaagcagctggaggatggccgcagacttgcggattacaacatccagaaggagagcacgctccacctggtgctccgtctcaggcgtggtatgcagatctttgtgacgatacctcgtggcaagacaatcacccttgaggtggagtcttcggataccattgacaatgtcaaggccaagatccaggatcaggagggcatcccacccgaccagcagtgcctcatcttcgccggcaagcagctgga

SEQ ID NO: 58350 - DNA, 290 bp, Zea mays
cacgccgcgtcggtggccaagaccttcctgacatcagatgttgtggtcgtcgatatcaaggagccggaggtgcacctgtcgcaaacccgatggacaactctggctatggatactgatgagatgctatggccatgccccatgggacgaaggtgatcaccatattaattttttggtaggcgaggagtcgggtcgaggtagctttttagacgaccgaaaggcgaaaataagttgaggatctgcatcccaaatttgtgatgtaaactgagacagaacagcagccaaatgaagca

SEQ ID NO: 58351 - DNA, 289 bp, Zea mays
tttggggatactgcaccgtgaagcaactgatgacaaggtcacagtggaggctgcagaggctactctcaagtacaacgtggctattaagtgtgcgaccattactccagatgaaactcgggttaaggagttcaatctgaaacacatgtggaagatcccaaatggcacaattaggaacattataaatggcactgtgttcagagagcctattatatgcaaaaacgttccaagacttgttccaggatggactaagcccatctgcattggaaggcatgccttcggtgatcaatac

SEQ ID NO: 58352 - DNA, 290 bp, Zea mays
gccttgctgtggagccatggctgcaaagatacgcgtggtgatgaagtcttttatgagccaaagcaaccaggtcgtagggcttctgccattcacaaagaaggtcggactacctgaatcgcgagccttgtacaccgtgctgcggtcgccgcatatcgatatgaagtccagggaacagttctcgatgcatgtcaagaaacagtttgtggaactgacagccaaaccgcacgagctccacaagaagttcttctggctaaaacgcctgcgcatacctggggcccagtacgaggtgc

SEQ ID NO: 58353 - DNA, 303 bp, Zea mays
  unsure (1)..(303): unsure at all n locations
atctgctggtggaggacaatgtttggaattgctgtagttccatccattctgctggctgtaggaatggccttttcgcctgaagagcctcgttggctaatccagcaaggaaagggtactcaagcagaattagctgtaaaaagactgtatagagaagaaatggttaccgaaattatgtttgatctgagagctagtggccaaagttcttcggagtccgaagccggctggtttgatcttttcagcaagcgttactgggaagttgtgagtgtgggggcagcactgttntagtccagcagttgctggtat

SEQ ID NO: 58354 - DNA, 163 bp, Zea mays
gatgaatgaagactatctctgtgccaaactacacttagtagatcttgctggatcagaacgggctaagagaactggttcagatggcctgcgcttcaaggaaggtgttcacatcaaccgaggacttctcgctctcggcaatgtcataagtgctcttggagatgag

SEQ ID NO: 58355 - DNA, 306 bp, Zea mays
cactggtcttcttcaacccaaggaccgcatcatggggctggagccaccgtcgggcggccatgttagccatggttactacacgcccagtggcaagaaggtgtcaggtgcctctattttcttcgagagcatgtcgtacaaggtgaacccacagactgggtatattcattacgacaagctcgaggagagagcaatggatttccacccgaaaattctcatatgtggtgggagctcttaccccagagagtgggactttgctcggatgagattggttgctgataagtgtggtgcagtgcttctttgcgatat

SEQ ID NO: 58356 - DNA, 222 bp, Zea mays
ccaggccggagaaccatcgcctgcatttcgatctgtttcaccgcaattcgcattgttagtcgtgtattggagttatgtgtacttggtttccaagaactttggttccttctcgttttttttccttgtttgagagtttttgggcagcgctggcctggttcctagtatggtgggaattggctgcaccttttgcttcgaataaaaatgcctgctcgttcacctgtc

SEQ ID NO: 58357 - DNA, 294 bp, Zea mays
cgtcgtcggcaacttggcgatggaggagaagcagatccagcagaacatccagatgagcgtgaacttccttgtttcccttctgaagaagaactggcagaatgtgagatgcctctacgtcaagagcaccatggggaagccatacagggtgttcaagatatgctcttttgtgaagtctgctaggttctggcaccgaggttttattgaattaaactcttgttaaggatatgtttttggacgatctgatatttcgtcctggcgctactatgtttcagaatggtggtactactataagta

SEQ ID NO: 58358 - DNA, 295 bp, Zea mays
  unsure (1)..(295): unsure at all n locations
gttgatcaataatccgtcacgtgtcaaggagtacctaccaatcaccggtctggctgaattcaataagctgagcgctaagcttatctttggcgctgacagccctgctattcaggagaatagggttgctaccgtgcagtgcctatcgggtactggttctttagaagtcggaggtgaatttcttgcaaggcactatcacgagcgcactatctacatcccacaaccaacctgggganatcacccaaagtcttcacctatctggcttgaacgtaggagctacgctatatgatctgcacat

SEQ ID NO: 58359 - DNA, 293 bp, Zea mays
accaccacttactctcgtgcgctctccgtgggaacgaagactcgcagccggcggcagcggcaggttctcctagatctccggcatcatcagtaacacatggctgacggtgaagacattcagccccttgtttgtgacaatggaactggcatggtcaaggctggttttgctggtgacgatgcgccaagggctgttttcccaagcattgtcggacgccccgtcacatggtgtgatggtcgcatgggcagaggatgcgtatgtggtgacgagctcatcaagagtgtatctgatttgag

SEQ ID NO: 58360 - DNA, 301 bp, Zea mays
  unsure (1)..(301): unsure at all n locations
ttcttggtggctcaagaaataatccctcgtaacctccaacattgttgaaggttacgacggattatttcttcgtggccatatgccaacctgggcttttgtttgtcgacagcgatttcgggtgcatccacagttatgcgacgctccaancgtcgcctnttttgtgctccacaatgtcaattgttgccgtggccttatttatgtgacatctcagggttttctgaagatatgtcagttgccatctgcatataactatgacaccgtactggctgttcaaaaggtcccttgcatggcactcacatca

SEQ ID NO: 58361 - DNA, 275 bp, Zea mays
gtcgatccaagatgcagatcttcgtcaagactctcactggaaagactatcaccctcgaggtggagtcctctgacaccattgacaacgtcaaggccaagatccaggacaaggaaggcattcccccggaccagcagcggctcatcttcgctgccaagcagctcgaggacgggcgcacacttgccgactacaacatccagaaggagagcaccctccacctggtgctccgcctcaggggtggcatgcagatcttcgtgaagacctcactgctagacatc

SEQ ID NO: 58362 - DNA, 294 bp, Zea mays
  unsure (1)..(294): unsure at all n locations
caactattggagcaatcactggtcaatgtgctaaatgttttaaatggaggcttattccaacaaaagaggaatacgaagaaattcgtgaacgtattatacaggaaccttttgtatgcaaaagagctcgtgaatggagacctgatataacatgcaatgacccagaagatatatctcaggacggtagcaagctttgggctattgacaaacccaatattgcacaaccccctcatggatgggaaaggcagatttaggatagaggtgaanggggtacaaatttgctgatgtatactatac

SEQ ID NO: 58363 - DNA, 270 bp, Zea mays
  unsure (1)..(270): unsure at all n locations
ggtttgaggagctcaacatggacctgttcaggaagtgcatggagcctgttgagaagtgcctgagggatgccaagatggacaagaagaattaacatgacgttgtacttgttggtggctccactaggatccccagggtgcagcaactgcttcangacttgttcaacggcaaggagctgtgcagaancatcaaccccgatgaagctgtcgctatggtgctgctgtccggctgccacctgagcggtgaggaatgagaggtgaggactgttctgt

SEQ ID NO: 58364 - DNA, 291 bp, Zea mays
gccctatttgcttggaaagaccattgtgcccacagatcacatcatgcggacacatatattgctttccatgcattttacgttatctaatgatgggcaaagatgattatagaggtgagtgttggaagaagtgtcctctgtgtttcatgatgatatcatcaaaggatttgtatacaatacaaattactcaagtccagaatgtccgtgctggtgacgttgtcacatatacactgtagaaggtgtcaagaaattcgctcactccttccatcaaaagctcctccagtgaaagtgcta

SEQ ID NO: 58365 - DNA, 286 bp, Zea mays
gttgagactggtatcatcaagcctggtatggttgttacctttggtcctagtggccttactactgaggtgaagtctgttgaaatgcaccatgaggctctccaggaggcccttcctggtgacaatgttggcttcaatgttaagaatgttgctgtgaaggatctgaagcgtgggtatgtggcctccaactccaaggatgaccctgccaaggaggctgctagcttcacgtcccaggtcatcatcatgaaccaccctgggcagattggcaacggctatgccccagtgctgg

SEQ ID NO: 58366 - DNA, 290 bp, Zea mays
ccagcttgatggttttgaagcttcaaacaaaattaaggttttgatggcaacaaacagaatagacattttggatcaagcccttttgaggcctggccgcatagacaggaagattgagtttccaaatcctaacgaggactcacgtttcgatattctgaagatccattcaaggaaaatgaacttgatgcgtggtatcgatctgaaaaagatcgcagagtagatgaatggggcctcaggagctgagctcaaggccgtctgtacagaggctggaatgtttgctctccgtgagagaa

SEQ ID NO: 58367 - DNA, 287 bp, Zea mays
atccaggacaaggagggcattcccccagaccagcagcggctcatctttgctggaaagcagcttgaggacgggcgcacgcgtgccgactacaacatccagaaggagagcaccctccacttggtgctgcgcctcaggggaggcatgcagatcttcgtgaagaccctgaccggcaagactatcaccctcgaggtggagtcttcagacaccatcgacaatgtcaaggccaagatccaggacaaggagggcatcccaccggaccagcagcgtctgatcttcgctggcaagca

SEQ ID NO: 58368 - DNA, 286 bp, Zea mays
cgcctaagctgcgacgaccatccatcgaacaggaaggatgacgggctccatggatctcccggccaagggcgggttcagcttcgacctgtgccgccggaacaacatgctggagaagaacgggctcaaggtcccgggattcaggaagaccgggacaaccgccgtcggcctcgtctttcaggatggggttgttcttggggcagacacaagggcaactgagggccccatagttgctgataagaactgtgagacaatccactttatggcaccgaatatatactgctgtgga

SEQ ID NO: 58369 - DNA, 291 bp, Zea mays
gcttgacctagcatctactctcgaggttggatctggtgggactactcgcacttcaagcgatgcctccagcacctgcaacacaagatcggtgctgaccatcgctttccagttctcatacgagaatcacctacgagaaagcgtcgcagcgatggccacgcaatatgtcaggactgtagtggcatcggtgcagagggtggccatggcaatagctccttcccgtcttggtagacagcttgagatgaagcaaactcctggttctcctgaggcgcacacgcttgcgaagtggatcgg

SEQ ID NO: 58370 - DNA, 282 bp, Zea mays
gaggtcctagatctggccggttcaagaaccagaaactgtacggtcagactatcactattgctgtgaaagggcagtctctcccttctaatgaaagcaagcatgatagtgctgtgcctgatagagcatagtacaatagcgatgtcttccctgaggagtacgatgctgcaaagttctttgtcattaaatcgtacagcgaggatgacatccacaagagcgtaaaatacaatgtgtaggctagcacaaccaacggcaaccagatgcttgatgctgcttaccaagaag

SEQ ID NO: 58371 - DNA, 282 bp, Zea mays
ggctactgaatattgcgtggcgcatggaggaggaaagcgctgttccgtgcccggctgcaccaagagtgctcgtggccgcactgactgctgtgtgaagcacggtggcggcaagcggtgcaaggttgagaactgtggcaagagcgcccaggggagcacggacttctgcaaagcccatggcggaggaaagcggtgcacatggggcacaggctgtgaaaaattctcccgtggcaagagtggcttctgtgcggcacatggtaccttgatggccaggcagcgagaaca

SEQ ID NO: 58372 - DNA, 108 bp, Zea mays
cgtgaggtgctggcgaagaggcatgggcggtactggattgccgacggggcaatcgactcgtcctccactcacactctctctcaggtgcgacgcaggagcacgatcgcg

SEQ ID NO: 58373 - DNA, 282 bp, Zea mays
ctgcaacgtgccggagttccgcaacaccacagtcaaccatgacctgcatttcatttcctgggacaacccaccgaagcagcaccctcactacctcacgctcgctgacttcgacggcatggttaacagcaacgcgccctttgcaaggaagttcgggagagaagagcccgtgctggacaagatcgaccaggagctactgggccgccggcctgatgggtttgtgcccggtggatggacgtatctactgaatgcgacgactgaggaagggagacccttcgccgttga

SEQ ID NO: 58374 - DNA, 281 bp, Zea mays
gtgcgcactggcacgtaccgccagctcttccaccctgagcagctcatcagtggcaaggaggatgccgctaacaatttcgcccgtggccactacacaattggcaaggagattgttgatctgtgccttgaccgtatccgcaagcttgctgacaactgcaccggcctccagggcttcctggtcttcaatgccgttggtggtggcactggctctggccttggttctctcctccttgagcgcctgtctatggagtacggcaagaaatccaagctgggcttcactgt

SEQ ID NO: 58375 - DNA, 278 bp, Zea mays
gtgccctcaaagaccgaagcagccctgcactgaccgtgaaagctacctacaatggcgacaccgtccggttcaagtttgtgccagcaaggggctggtaccacttgctggaagagatagcaaagaggttcaagctgacggctggagcattccagctcaaatacaaggacgatgaggacgagtgggtgatcctggcgaacgatgccgacctccaggagtgcatggacgtcctggactcgatcagctcacgcaacatgacgctgcaggtacgcgacctctcc

SEQ ID NO: 58376 - DNA, 291 bp, Zea mays
gcaagcgcgagatcgccgccttcttcgcgcacgtcacgcacgagaccggacatttctgctacatcagcgagatcaacaagagcaacgcctactgcgccgcgagcaacaggcagtggccgtgcgcggcggggcagaagtactacgggcgcggtccgctgcagatctcgtggaactacaactacgggcccgccgggagggacatcggcttcaacgggctcgccgaccccaacagggtggcgcaggacgccgtgatcgcgttcaagacggcgctctggttctggatgaacacgt

SEQ ID NO: 58377 - DNA, 278 bp, Zea mays
cctttgtttcctctgcttcggattctgatgttcttaaccaggtgcaagaaaggtttgaggtagacataaaggaactgcctgagcaaattgacacctcgacctacatgccatcataaatgggaaggacaactgagaagagaggaggatagggccgtgagcagccgtctggagatggttacctttgaactatccgatctggaggatttgatttgcctcctttgtgtactttaaaaagggcagccaggatgatgatctgtattttaagacaatgctgtctg

SEQ ID NO: 58378 - DNA, 280 bp, Zea mays
gcaggacctgcttctgctggacgtcacccctctgtccctgggtctggcgactgctggaggagttatgacagtgctgatcccgaggaacaccaccatccccaccaagaaggagcaggtattctccacctactcggacaaccagcccggtgtcctgatccaggtctacgagggtgagaggacccggacacgcgacaacaacctgctgggcaagttcgagctctccggcatcccccctacaccccgtggtgtgccacagatcaccgtgtgctttgacatcgac

SEQ ID NO: 58379 - DNA, 279 bp, Zea mays
gccggcccgatgggtgtgacacatttcttaatcctctcaaaccctcaaagcctgccacatttgcgctttgccaaatcaccgcaggcccaacattcacatttcagatagaggagtactcacttgcggcggacattgcaaactctcagaagcgcccaaggtccccaccagggatattcaaaaactcaccactggttatacttggtgggttgacaggtctcggcaaccctttcaggagtttggtcgaatacttccaacatatgttcccttccgttgacccaa

SEQ ID NO: 58380 - DNA, 277 bp, Zea mays
cctgaacagactttgcccagttgatgtttttttgaaggcaatgctggatgttccatttgtgttcaagagagtagatgccatgctttacattgccagcttctatttggagatcaatcggctgagaatgtcgtatgctactcttgagggggcttgccaggagatgagaagcagcaggctgttccacaaagtccttgaggctgttgtgaatttcggcaatttcatgagcaccaattcggggtctccaagttcaaaaggcttggagccaaacactgttctg

SEQ ID NO: 58381 - DNA, 279 bp, Zea mays
ctttgagaaaagaggtctggaaattcttgttggggtatcatgaatatgattcaacatatgctgagagggaataccttgctgtcatgaaacgagcagaatatgaagtcataaaatctcagtggaagagtatctcagccacccaagctaaaagattcaccaagtttagggaaagaaaaggcctaattgacaaagatgtggtgagaacagataggtccattccctattatgaaggagatgacaatcagaatgttgtagttttacgtgatattctgttaacat

SEQ ID NO: 58382 - DNA, 105 bp, Zea mays
aggagttcaagaggaagaccaagaaggatatcactggcaacccggggctctccggaggctaaggacctcttgtgagagggccaagagaactctgtcttccactgc

SEQ ID NO: 58383 - DNA, 273 bp, Zea mays
acgagaaacaagttgagttggctgaagcagtaaaactgcccatgtttcttcacatgcgtgctgctggtgaagacttctgtgaaatcatgacacggaatttgcacagattccctggtggggttacacattccttcactgactcagcagaagatcgggacagtgtactatctcttgagaagatgtttataggtgttaatggttgctctctgaaaactaacgaaaagcttgaggttctacgaggcatcctcgtcgagaggtcgaggatagaaacag

SEQ ID NO: 58384 - DNA, 298 bp, Zea mays
tcgttagcgtacgaagtcggaattcgtcgagctcgagcggaaagaattctctctgtccttgatgcttctggctctggtcgtgttgaactgggcatgttcttcgctaccatgctccaatctgttctggccctgtggatatgcgcaagcgtatcgtctttgatgcactcctttggcgtcctgctagcgaaggcagcaatggccagataaggaggagtgatgcgttaacctacattaagctcctacgagctgtttatataccaggcatggggctagtgacatgctcgaaatgcttggggag

SEQ ID NO: 58385 - DNA, 301 bp, Zea mays
catggcaccataatgctgccaaccgtgtggcatattccaaaccagctgatcctatcacttgtgcaacatttactcaagagtcattgaaggtagagcaagcgtttcacaagctcacgagcacaaacaccagcccctgatatttggacctgcaagtattgtttgtggtggtctaaccagtgaaagggaaagaatgacagcgcaagtttttcagcctagctacaggatgccaacaatgagcattgaagaagctggtttgcgcgagatgaaaatgatggagaaatggcaagaaaggaccgctgag

SEQ ID NO: 58386 - DNA, 292 bp, Zea mays
tagtggacaggtcatatcagaaattgtggaggcctgccgctcacatgatataacagatcttattctagtccatgaacccgtggtcaacctgatggtttgattgtctcccatctaccacatggtccaactgcatactttgggttgctcaatgtggactgccgtcatgatatcaaggacaggaagacgatgggcaaaatgtcagaagcttacccccatttaatactggacaacttctcaacccagattgcagataggactgcaactattctgaagcacctctttcctgtcccaa

SEQ ID NO: 58387 - DNA, 298 bp, Zea mays
gactggtacaaaggcccaaccctgcttgaggctcttgaccagatcaccgagcccaagaggccttcagacaagcccctgcgtctgcccctccaggatgtgtacaagattggtggtattggaactgtaccggttggtcgtgtggagactggtgtcatcaagcctcggtattgtagtcacctttggtccaactggcctgactaccgaggtgaagtctgttgagatgcaccacgaggcacttcaggaggctcttccgggtgacaatgttggcttcaacgtgaagaatgttgctgtcaaggat

SEQ ID NO: 58388 - DNA, 296 bp, Zea mays
atccagaatcctgatgttagtacacttaagttgatttctgtgtacattgcaattggattcatcacagtgttcttctgctgtttagatcgatagcacttgttgttcttgggatccaaacatgaagatctttattttcccagttactcaactcattgttccgtgcgccaatgtcctttttttgattccacccctcttggaaggatacttagccgggtatcttcagatttgagcattgttgatcttgatgttccatttggattgatagcttgctcttggtgccagcataaatgcatata

SEQ ID NO: 58389 - DNA, 299 bp, Zea mays
atgtgacacacacacaagcagatctcccccaaatccacgcgtcggcacctccgcttcaagatgctgatctacgtgaaaccctgactggcaagactatcaccctcgaggtggagtcgtctagacaccatggacaacgtcaaggccaagatccaggacatggagggcatccccccaaagcagcagcggctgatctctgccggcaagcagcttgtggacggctgcacgctggctgactacaacatcgagaaggagagcacactccacctggtgctccgtctcagtggtggtatgtagatctt

SEQ ID NO: 58390 - DNA, 295 bp, Zea mays
acgtacttcacacttgtactgaaatataggtttatccaatataggtttcgcatgcgtcgccatgtgtttgagcgtccgttcttgctgtgcaacaagtggatccgtacttcgttcaacgtccaagctgtgcgggtgagctaggcctatctgcccttcagaaagttgttgctgccgtacgtatccttgcatacggtgttcctgcggatgccgttgacgagtacgtacgaattggagaatctacagcacatgaggctttgaaacacttttgcactgccatacaaactgcttttggggg

SEQ ID NO: 58391 - DNA, 299 bp, Zea mays
taacgccgtccttcacctccgccgccgaatccgagactctgatctcgggttcaccgcagcgcacagagcacccctgatcccggcccgatccgcgctctcctctccgacgcttcagtcatggcaggaatcgcacccgagggttctcagtttgatgctaagcatctattgattctaaaatgcaggagctgctgagcactggtgagactgaggagttcttcacttcatatgatgaagtttttgaaagttttgatgacatggccttcaagagaatcttctgagaggcatttatgcatatggtt

SEQ ID NO: 58392 - DNA, 148 bp, Zea mays
atcgtcgactagaaacttacgtatcctagtggcacggcgactgcttatctcatcaacggtttgcacacgccagaggtgtgaagcttgcaaagaaacaagtgaagactctggggaaattcttcttgatgagcttcctctggggcttctt

SEQ ID NO: 58393 - DNA, 243 bp, Zea mays
agcaacaacatccttgtgatgtacgactgctacacgccagccggcgagccaagcggcaccaactagaggcacaacgcgacaagagcatcagcagccctgaggtcaccgccgaggaaccgtgatatggcatcgagacacgacaacacccgcctccaatcacgcacgaactgggcctgtgggtggcgaagcggtagcatccccagacctcatgaggccttaccactgtggaagcagcgccgaaaa

SEQ ID NO: 58394 - DNA, 272 bp, Zea mays
aaacctttcagaaatcccaaatttcaggttattgctgaagcagctggttaccatggaggtcatccagtggacagattgtgggaattctctaagcacgaatttgaagtcgagaagaatctgctaggaggagctttgggtgccaaagctgcagaagatttgaatctaagaataattgaacataagatcttggttgtgtctaagtactattcgagggttaccagaaagaggcttgctgatctgctctgcctgagtttgcaggaggcagagaagca

SEQ ID NO: 58395 - DNA, 274 bp, Zea mays
acctagtcctctgttacttctcccgctgccgccaatcgcctcccgttctccgccaccgccaatccgctctcgtctccgccagctctgctgagagcgagaagagatggccggcaagggtgatgagccggcaatcggcatcgatctcggcacgagctactattgcgtcggtgtgtggcagcacgagcgtgtcgagatcatcggcaacgaccagggtaaccgcaccagaccctcatacgtcgccttcaccgactccgagcgcctcatcggagatgcg

SEQ ID NO: 58396 - DNA, 289 bp, Zea mays
cgtactgaggtgctccttgcattggaatacctgcatatgcttcggattatataccgtgatctcaaaccagaaatgtcctcgttcgggaagatggccacatcatgctgtcggacttcgatctatctcttcgctgttcagtgagcctaacggttgtcaagtctgcaaatcctggcctagatgcattgcagaggaacaatgcagcgtactgtgcccagcctgcttgcatcgaaccatcctgcattcagccctcctgtgtagctccaaccacttgctttggcccccggttctt

SEQ ID NO: 58397 - DNA, 289 bp, Zea mays
cagagaagaaagaagaagaacccgtagctctcaatgcatttgaactgatttcaaggtcagcaggcctaaatgctgggaacctatttgactcggagcaggaattcaaaagagaaacgaggttcacgtcaaaatgtccaccgaaagaaatcattcgcgagattgaggaagctgcaaaacctctaggatttggtgtccagaagaaaaactacaagttgaggctagagaaagtaaaagcagggaggatgggaaacctgaatgttgctacggagatactacgaggttgcgccct

SEQ ID NO: 58398 - DNA, 292 bp, Zea mays
cgaagacgaggaccagctagactgcggacggacttcgggcatggagggccagttccaggttggcaaggaggagtcatccaagcatggtagatggacgacagtgaagaggaccagaggcttcctcatcatcgtgagcccaaagaattcattcctctcgacaaactttccgaactaggaatattaagctggcgcctaaatgctgatgattgggagaatgatgagaacctcaagaaaattcgtgaagccaggggttactcttacatggacatttgtgatgtgtgcccagagaagt

SEQ ID NO: 58399 - DNA, 296 bp, Zea mays
ccgcaatcgcgaccgcgacccgcaggtgacatacatactgtgcgagctccggaagccggaagcaccggtgacgaagcttccgtgtcatcactcatcaggatctcagggttttatttcgtttcgcgggcgttgggaatccatccatggcgaggaagatgctcatcgacggggaggtggcggccgtcgcggatggtgggcactatgactacgatctcttcgtcatcggggcgggcagctgcggcgttcgcggctctcgcaccgccgcctccttcggagctaaggttgcgatttgtgag

SEQ ID NO: 58400 - DNA, 282 bp, Zea mays
atgagtttgaggaatatgaggagccaccggtacttggaaggaagacttatcttgtagcagataaatcaggttcgtaccatcaatgggcccaatgtgaagattgttccaaatggaggaaacttccaatagatgctctgttgccctccaaatggacctgctctgacaagaaatgggatccagagaggtgttcttgcgaatctgcacaggaaataagtatagaggagcttgcagaattcattcctataaaacctgccaaaaagcccaaattgaagatagaatctg

SEQ ID NO: 58401 - DNA, 267 bp, Zea mays
aaagcacaaccctggaggttgagagctcggacaccatcgacaatgtgatggcgaagatccacgacaaggaggcatccccccggacgagcagcgtctgatcttcgccggcaaacagctggaggatggccggaccttagtagactacaacatcaaggttgagagcacgctccagctcgtgctccgtctccgtggtggtcagtaagtcacgggtcgtctaagctgccgatgtgcatgcgtcgcctggtgcatgtctcgagatggtggttg

SEQ ID NO: 58402 - DNA, 293 bp, Zea mays
atgaccaaaatggtcttagcaaaggctctggatttgttgctttctcaactcgtgaggaagcatctcaggcttaactgaaatgaatggcataatgacatctggaaaaccattgtatgttgcatttgcacagcgctaagaagacagaaaagcgatgttgcaggcacagttttctcagatgcgccctgctgtaccaatgacacccactctagcaccacgccttccattgtactctccgatggctcctcagcaactcttctatggacaagcgccaccagctatgatgccccctcagc

SEQ ID NO: 58403 - DNA, 144 bp, Zea mays
tcagtcgacgcgccgtcagtgaatcctcagatcacggctagccgtaatcacacgcgactctgctgactccggcgagcagtgcaacatcttccttcagcgattggctaggagaagactcatatcaacattgtggtcattagacat

SEQ ID NO: 58404 - DNA, 286 bp, Zea mays
ttcagcttgaaactgaagatgttgcccatgtggtgtctggatggtagcttgttcatggagacgtattccccctcctgcagactccgacttactctgtgtctgtgttgggtctggtgttcagttcttcggtatgctactagtaaccatgatctttatctgttctgggtttcctttcgccatcaaaccggggaggactgatgactgctatgctgctcacttgggtcttgatggggttgttcgccggatatgcttcttcacgcctgtataagatgttgataggttcggt

SEQ ID NO: 58405 - DNA, 282 bp, Zea mays
  unsure (1)..(282): unsure at all n locations
atcctctgttacttctcccgccgccgccaatcccctcccgttctccgccagcgccaatcccctcccgtctccgccacctctgctgagagcgagaagagatggccggcaagggtgatgggccggcaatcggcatcgatctcggcacgacctccgaggngcgcgggtgtgtggcagcacgaccgtgtcgagatcatcgccaacgaccagggtaaccgcaccacaccctcgtacgtcgccttcaccgactccgagcgcctcatcggagatgcggccaagaaccag

SEQ ID NO: 58406 - DNA, 275 bp, Zea mays
acaatgccattctctatgggcccggcgagcatcccgatcatgttgttgtcatcaagtacgtgccgtacggggagacagtaagagggctatggacgagtacacatcagagatcttcatgggcggcaagagcaccatcgtgctgcacaactcctgcgaggactcgctcctcgccgcgcctatcagccttgatctggtgctcctggctgagctcagcaccaggatccagctaaaacctgagggaacggacaagttccactccttccacccggtggcca

SEQ ID NO: 58407 - DNA, 291 bp, Zea mays
cggctcgagctgatgaaaaacagtagggatgggaaaagctatagcacaaatcttgcatatacacctccaaatatttaagaaatggaagagtaacatcagaaagtgtcatattcagctttggcactatactgctggacctcctaagtggaaatcgtatacctccttcccgtgctcttgatatgataaatcgcaacaatatccaagtactgatggattcacatttggagggaaactactcaacagatgaggcaaccacattggttgacctggcctcccagtgcctacagtatg

SEQ ID NO: 58408 - DNA, 288 bp, Zea mays
cacaagcgagcgagggacccggggcggaagaagagagagaagacgtctctctcctctcggcgtcgccgtacccaacctctcgtctgctgcctagcctgcctgcctgcctgcaacaaggagtttgtcatggcgtctaagcgcatcctcaaggagctgaaggacctgcagaaggacccccccacatcatgcagtgcaggtcctgctggtgaagacatgtttcattggcaagcaacaattatgggaccacctgacagtcgctatgctggtggtgttttcttagtgaacatt

SEQ ID NO: 58409 - DNA, 138 bp, Zea mays
aaatcattgttcagtgctgatgcaatttctcgagcaaagcagattcttgcaactattcctggaagggaactagggcatatagtcgcagtctaggtatcaaaggactgcgtgatgcaattgctgctggaatcatgtcac

SEQ ID NO: 58410 - DNA, 284 bp, Zea mays
aaaacccctggacccacccgaaagaccagtaacatacctccctgagaatgcttgtgatgctcttgcagcatctgtggcattcaggatggtgaagggacgtggttgggtggtatgtctgatacggaaagctttgtggatacattggatcggtggggcaaaatacagtatcaccggaagagctaagcttggtggtatacgagttgtgtcatagctgtagataccagactgtgatgctagtcatcccagctgatcctagtcagctcgattcggctgagcgcgtagtc

SEQ ID NO: 58411 - DNA, 270 bp, Zea mays
gtcgagatcatcgccaacgaccagggtaaccgcaccacaccctcgtacgtcgccttcaccgactccggcgcctcatcggagatgcggccaagaaccaggtcgccatgaaccccatcaacacggtctgtgatgccaagcgtctcattagcaggaggtttagtgatgcctctgtccagagtgatattaagctgtggcccttcaaggtcattcctgggcccggtgagatgccaatgatagttgtacagcacaagggggaggagaaacagtttg

SEQ ID NO: 58412 - DNA, 292 bp, Zea mays
cacacacaccacaccacacctcctcgcttccactccgctcgtctgacatctcgtcgcgtcctttcgtttcgaagcctcgcgagccccgacgatggccaccgccgcggtgtcggtcgacgagaagctcgacaagctcgcgccgaggtcgccaagctcgaccagagtagcgagaacgagaagtccgggttcatcagcctcgtgtcacgctacctcagtggggaagcggacagatcgagtggagcaagatccagaccctacggatgaggtggtggtgcctacgataccgtcgcgt

SEQ ID NO: 58413 - DNA, 294 bp, Zea mays
agaagtttcgagtaccctcgcgcgtcttctgtacatcgtccaactaatgatgaagatatggcatttatgccggtaatcgagcttagagagcttattaggacaaagcaaataacatcacgtgaactatacagaatatctctgaggagattaaagatgtacaatcgctgaactagaagctgttattacatatactgaagattcagcatacaaacaagccacggaggcagatgacttgctggcacaaggcgaatatcttggtccttagcatggcattccatatggcctcaaagatat

SEQ ID NO: 58414 - DNA, 293 bp, Zea mays
gtgggcagtttgttggtgttgctgaaatgactggcgccgttgattttgagaaaaccctagagtattggcaacaggacaagtggaacggctccttctctgttaagtggcacattgtcaaggacgtgcccaacatattctcaagcacatcatccatcgagaacaatgagaacaagcctgtcacaaacagccgtgacactcaggagatacgcctcgaacaaggccttcagatgctcaagatattcaaggatcatgtcagcaagacttccatcctcgacgactttgccttctatgag

SEQ ID NO: 58415 - DNA, 296 bp, Zea mays
atctcacctccaaccatgggtaaagagaagtcccacatcaacattgtggttattggccatgtcgactctggcaagtcgaccaccacaggacaccttatctacaagcttggaggcattgacaagcgtgtgatcgagagttcgagaaggaggctgctgaaatgaacaagcggtccttcaagtacgcgtgggtgctcgacaagctcaaggctgagcgtgagagaggtatcaccattgatatcgctctgtggaagtttgagaccaccaagtactactgcacggtcattgatgcccctgga

SEQ ID NO: 58416 - DNA, 299 bp, Zea mays
cgcgcgctccgtccgctgactggaagtggtctacacagaaggttaccatattgttaagttaaagttggatcattggaacaatgccgccccataagattgagactgggcatcaagatgtggtccatgatattgccatggttactacgggaagcgcctagctacagcctcctctgataacacaataaagatcattggcgtaagtggaacctcacaccagcagcttgcaaccttgagtggacaccagggcccagtatggcaagtcgcatgggctcatcccaagtttggttccatgcttgcat

SEQ ID NO: 58417 - DNA, 293 bp, Zea mays
atgagtttgaggaatatgaggagccaccggtacttggaaggaatacttatcttgtagcagataaatcaggttcgaatcatcaatgggcccaatgtgaagattgttccaaatggaggaaacttccaatagatctctgttgccctccaaatggacctgctctcacaacaaatgggatccagagaggtgttcttgcgaatctgcacaggaaataagtatagaggagcttgcagaattcattcctataaaacctagcaaaaagcccaaattgaagatagaatctgatgctatcgatg

SEQ ID NO: 58418 - DNA, 288 bp, Zea mays
atcgtcgactacaaacttacgtatcctagtggcacggcgactgcttatctcatcaacggtttccacacgccagagggtgtcaagcttgcaaagaaacaagtgaagactctggggaaattcttcttgatgagctcctctggggcttcttccagtggtactacactggtggagataattgtggattccagaacttccctacattaggccttcaagcttataagaacaagttttacttcgatttctctcctacctatgttggagttgggatgatctgcccccacattgtga

SEQ ID NO: 58419 - DNA, 290 bp, Zea mays
ggcaacaacatccttgtgatgtgcgattgctacaccccagccggcgagccaatccccaccaacaagaggtacaacgccgccaagatcttcagcagccctgaggtcgccgccgaggagccgtggtatggtattgacaggagtacaccctcctccagaaggacaccaagtggccccttgggtggcccatcggtggcttccccggccctcagggtccttactactgtggaatcggcgccgaaaagtcgttcggccgcgacatcgtggacgcccactacaaggcctgcttgtat

SEQ ID NO: 58420 - DNA, 294 bp, Zea mays
gcgtttatatgagcaccttcagaagtttctgaaagctaatggtgccaagaaggtttctggtggtataatcacaccatataagttgcagttgaaatgccttcagcgggaattcaaggatgttatgaatactgaggaaggaaggatatctacatatatacagttgatgcttttcaaggccaggagcgtgatatcattattatgtcttgtgtccgtgcttcaaaccatggtgtaggttttgtcgctgatatacgtcgtatgaatgtagctctaactcgagcaaggagagctctatgg

SEQ ID NO: 58421 - DNA, 291 bp, Zea mays
ccgcgcctctacatttcttctctctctgctcctccgcctccgcctgatccatccaagacagggatcgccatgtcggactcggaggagcaccacttcgaatcgaaggccgacgctggggcgtccaagacctaccgcagcaggctggcaccgtccgtaagaacggcttcatcgtcatcaagaaccgtccctgcaaggttgtggaggtttctacctccaagactggtaagcatggccacgccaaatgccactttgtcgccatagacatattcaatgggaaaaagcttgaagata

SEQ ID NO: 58422 - DNA, 287 bp, Zea mays
caaatggaatttataaaaatgctaaggttgctttctgcatacataatattgcctatcaaggtagatttgccagagcagacttcgatcttcttaatctacctgacagtttcttgccatcatttgattttattatggacatgttaagcctgttctagggagaaagcttaactggatgaacgcagggatcattgagagtgatctggttctaacagtcagtccacattatgtcaaggaactcacttctggcccagataagggtgttgagttggatggtgtccttcgcacaa

SEQ ID NO: 58423 - DNA, 294 bp, Zea mays
ataaaattgtacggacatttggagagaagagagtagaggataatttgaagaaccacgtggacctttgcaggatgcttgatattgtcgcattggaaaagggtgctgatgtggctggtggtaggggtttctatttaaggacgaagttacaggtgatggcgaggacaaatatctcatagctacatcagagcagcctttatgtgcttatcacttaggtgatcgaatctaccctgctgaacttccaatcaaatatgctgggtactccacatgcttccggaaggaagctggttctcatgg

SEQ ID NO: 58424 - DNA, 289 bp, Zea mays
agccagcacgttccaggagagctccaggagtttgcttcagaagtaccggcccagatctttctccgagcttgttgggcatggtgttattgctcagtctctttcgggtgccgttttgaaaggaaagcttgccctatctacctcttccattgtccgcatgtcgtgggcaagacgtccacggctagaacgtttgcagcagcgctgaattgccgttccccaggtgagaaccagccatgtggacgctgtgacgagtgcatgcccatattctcgggaagcagcagcagtgtggtag

SEQ ID NO: 58425 - DNA, 290 bp, Zea mays
cacaagcgagcgagggactcggggcggaagaagatagagaagaggtctctctcctctcggcgtccccgttccccaagctctcgtctgctgcctgcctgctctgcctgcgctgcaaaaaggagtttgtcatgcgtctaagcgcatcctcaaggagctgaaggacctgcagaaggacccccccacatcatgcagtgcaggtcctgctggtgaggacatgtttcattggcaagctacaattatgggaccacctgacagtccctatgctggtggtatttttttagtgaacattc

SEQ ID NO: 58426 - DNA, 285 bp, Zea mays
gcagtcgacgcgccgtcactgaatcctcagatcacggctagccgtaatcacacgccactctgctgactcccggcgagcagtgtaacattttccttcagccatgggcaaggagaagactcatatcaacatgtggtcattggacatgtcgactctggcaagtcgaccaccactggccacctgatctacaagctcggcggtattgacaagcgtgtgattgagaggttcgagaaagaggccgcggagatgaacaagcggtcattcaagtatgcctgggtgcttgacaag

SEQ ID NO: 58427 - DNA, 296 bp, Zea mays
gtccagaatcctgatgttagtacacttaagttgatttctgtgtacattgcaattggattcatcacagtgttcttcttgctgtttagatcgatagcacttgttgttcttgggatccaaacatcaagatctttatttcccagttactcaactcattgttccgtgcgccaatgtcctttttttgattccacccctcttggaaggatacttagccgggtatcttcagatttgagcattgttgatcttgatgttccatttggattgatgcttgctcttggtgccagcataaatgcatatag

SEQ ID NO: 58428 - DNA, 311 bp, Zea mays
ctcgacgtagcgagtaactggaatcggtcaacggaactctcaaaccttagcgcttctgcaagtttcagagctcaggaatctgcgccatggcgagtgagacggagaccttcgcatttcaggctgagatcaaccagctgctctcactcatcatcacaccttctactccaacaaggagatcttcctccgcgagcttatctccaactcttccgatgcgctggacaagatcaggctcgagagtctcactgacaagagcaagctcgatgcgcacctgagcttttcatccaccttgtcccagacaaggccacgaacac

SEQ ID NO: 58429 - DNA, 296 bp, Zea mays
tgttgctatcaaaatccttgacaaggagaaggttaagaggcacagattggttgagcagattaagcgtgaaatttgtatcatgaaattagtaaggcaccctaatgttgttcgactgtttgaggtgatgggaagaaagcaagaattttcatcgttttggaatatgttaccggcggagagcttttcgaaatcattgctactaatggaaggttgaaggaagacgaagcacgtaaatacttccagcaactgattaatgctgttgattactgccacagtaggggagtgtatcacagagactt

SEQ ID NO: 58430 - DNA, 147 bp, Zea mays
ccttgtcacttcttcgatctgacaggcaatataagggaactcccaggctgccaagttatcttcgttggcctcacattcagactgatcaagttcatggtctaagtttgagagagataggtggtttcactaagcattgcgagctccctc

SEQ ID NO: 58431 - DNA, 284 bp, Zea mays
  unsure (1)..(284): unsure at all n locations
aggatccccaacaacgtgaagtcgagtgtgtgtgacattccaccaattggcctgaagatgtcctccacattcgttggcaactcaacctccatccaagagatgttccgccgcgttacgagcagttcaggccatgttcaggaggaaggctttcttgtaacgctacacaggcgagggtatggatgagatggagttcaccgaggcagagagtaacatgaacgacctggtggccgagtatcagcagacaggggtnccactgccgaggatgaggagtacgaggaggagga

SEQ ID NO: 58432 - DNA, 280 bp, Zea mays
attctaggtgcaggatactcgttttctgttgacatgtggtcatttgcgtgtatcgcttttgagctcgcaaccggagaaatgctatttacacccaaggaaggccatggatacagtgaagatgaggtcacttggctttaatgatggaactacttggcaaggtgccgaagaagattgcaaccacgggaacacgatcaaaggaatattttgaccgccatggagatctgaagcggataagaaggctgaaattatcatccattgaacgtgtccttgttgacaaata

SEQ ID NO: 58433 - DNA, 287 bp, Zea mays
cactctctccgtccgcgaatccgtaaatggaaggggacgaaatgctcagggtgaagctcggcaggcagggccttgaggtgtccaagcttggcttcgggtgcatgggcctcactggagtgtacaacgccctgttcctgaccaagctgggatcgacataatcaagcacgcgtttgaggccggcatcaccttcttcgacaccgctgatgcctatgggccacacaccaacgaggtcctgctcggaaaggcattgaaacattttcctcgtgagaaggtgcaaattgccacca

SEQ ID NO: 58434 - DNA, 308 bp, Zea mays
gagcgcccaataaagagcgattgtgttctgcaatggagtcctaatttggctgcggtgcgagaagtacagcgccaggtttatgctggaaagcatgtctactgcatttcggtaggtgtctgaggtgagagcaaagctgccggcaccaaacttgtatccccatctggccgtaccaagggtgcccacttatgactgcatgaagaagtctgtagtccattccatgtttcttggatatatccatgacagttaccttcctcacatgtaacaccttgcacaggcgatcccacaggctcattatgtcacggccagtg

SEQ ID NO: 58435 - DNA, 304 bp, Zea mays
gaataacatggtggactttgccttcccgtacctgttgcagttcatccgtgaatacactagcaaggtggatgatttagtgaaggacaaaatcgagtcacagaatgaagaaagagccaaagagaaggaggagaaagatcttgtggctcagcagaacatgtatgcgcaactgcttcctcttgccctgcctgctccgccaatgcccggcatgggtggccctccacctccgatgggcggaatgggcatgcctccgatgggcgggatgggcatgccgccgatgggccctggtccgatgccagcattcggg

SEQ ID NO: 58436 - DNA, 303 bp, Zea mays
tgaagacatctgccgcgacgtccaccgctccgacccggactggaagatcatactgctcaggtacttcaaccccgttggcgctcatccaagcgggtacatcggcgaagacccctgcggtgtcccgaacaacctgatgccctacgtgcagcaagtcgctgttgggaagtgacctcacctcacggtctacgggacggactacagcaccaaggatgggactggggtgcgtgattacatccacgttgtcgacctggctgacggcacatagcagccctgaggaagctccacgaagactccgacaaaata

SEQ ID NO: 58437 - DNA, 301 bp, Zea mays
cgtcagctccgtccgctgtctggaagtggtctacacaggaggttagcatattgtgaacttagagttggatcactggacaaatgcagccccatcagattgagactgggcatcaagatgtggtccatgatattgccatgcgattactacgggaagcgcctagctacagcctcctctgataacacaatagagatcattggcgtaagtggaacctcacaccagcagcttgcaaccttgagtggacaccagggctcagtatggcaagtcgcatgggctcatcccaagtttggctccatgcttgcat

SEQ ID NO: 58438 - DNA, 298 bp, Zea mays
gcaatgccattctctatgggcccggcgagcatcccgatcatgttgttgtcatcaagtacgtgccgtacgtgggagacagtaagagggctatggacgagtacacatcagagatcttcatgggcggcaagagcaccatcgtgctgcacaacacctgcgaggactcgctcctcgccgcgcctatcatccttgatctggtgctcctggctgagctcagcaccaggatccagctaaaacctgagggaacggacaagttccactccttccacccggtggccaccatccttagctacctcaccaa

SEQ ID NO: 58439 - DNA, 295 bp, Zea mays
ccgcaatcgcgaccgagacccgccagtgacatacatacggtgcgagcggcggaagccggaagcaccggtgacgaagccttccgtgtcatcactcatcaggatctcagggttttgtttcgtttcgcgggcgttgggaatccatccatggcgaggaagatgctcatcgacggggaggtggcggccgtcgcggatggtgggcactatgactacgatctcttcgtcatcggggcgggcagcagcggcgttcgcggctctcgcaccgccgcctccttcggagctaaggttgcgatttgtg

SEQ ID NO: 58440 - DNA, 283 bp, Zea mays
cgtcgacacaagcgggcgaggggacccggggcggaagatgagagagaagaccgtctctctcttctcggcgtccccgatccccaacctctcgtctgttgcctgctgccctgctgcctgcaaaaaggagtttgtcatggcgttaagcgcatcttcaagagctgaaggacttccagaagaaccccccacatcatgcatgcaagtcctgctgtgaggacagtttcatggcagcaacattatgggacactgacattcctatgctgtggtgtttttagtgacatcattt

SEQ ID NO: 58441 - DNA, 155 bp, Zea mays
aaatccttggagtatggaagatgtggctgatgcattatacagtgtaacagacctgacacgatatgagaagaatctgcgccatgaaaagcactatcgctatgtcaggtctcatgatgttgcttactgggcacgcagctttgaccaggatctggata

SEQ ID NO: 58442 - DNA, 295 bp, Zea mays
ggcatgcagatctttgtgaaaaccctgaccggcaagactatcaccctcgaggtggagtcctctgacaccattgacaacgtcaaggccaagatccaggacaaggagggcatccctccagaccagcagcggctcatctttgctgggaagcagcttgaggacgggcgcacgcttgccgactacaacatccagaaggagagcaccctccacttggtgctgcgcctcaggggaggcatgcagatcttcgtgaagacctgaccggcaagactatcaccctcgaggtggagtcttcagacac

SEQ ID NO: 58443 - DNA, 300 bp, Zea mays
gaacaacgatctgttccgcaagactatgggccctgtcaagaaggccatggaggacgctggccttgagaagagccagatccacgagatcgtcctggttggtggaagcaccaggattcccaaggtccagcagctcctgaaggactacttcaatggcaaggagcccaacaagggtgtgaaccctgatgaggctgttgcctttggtgccgcggtgcagggaagcatcttgagcggcgagggtggtgacgagacaaaagatatcctcctccttgatgtggctcctctcaccctgggtattgagac

SEQ ID NO: 58444 - DNA, 297 bp, Zea mays
agaagtttcgagtaccctcgtgcgtcttctgtacatcgtccaactaatgatgaagatattgcatttatgtcggtaatcgagcttggagagcttattaggacaaagcaaataacatcacgtgaacttacagatatatttctgaggagattaaagatgtacaatcctgttctagaagctgttattacatatactgaagatttagcatacaaacaagccaaggaggcagatgacttgctggcacaaggaaaatatcttggtcctttgcatggcattccatatggcctcaaagatataatt

SEQ ID NO: 58445 - DNA, 298 bp, Zea mays
gtgggcagtttgttggtgttgctgaaatgactggcgccgttgattttgagaaaaccctagagtattggcaacaggacaagtggaacgactccttctctgttaagtggcacattgtcaaggacgtgcccaacaatattctcaagcacatcatcctggagaacaatgagaacaagcctgtcacaaacagccgtgacactcaggagatacgcctcgaacaaggccttcagatgctcaagatattcaaggatcatgtcagcaagacttccatcctcgacgactttgccttctatgagagccg

SEQ ID NO: 58446 - DNA, 301 bp, Zea mays
tctctctctgctcctccgcctccgcctgatccatccaagacagggatcgccatgtcggactcggaggagcaccacgtcgaatcgaaggccgacgctggggcgtccaagacctacccgcagcaggctggcaccgtccgtaagaacggcttcatcgtcatcaagagccgtccctgcaaggttgtggaggtttctacctccaagactggtaagcatggccacgccaaatgccactttgtcgccatagacatattcaatgggaaaaagcttgaagatattgttccttcatcacacaactgtgaca

SEQ ID NO: 58447 - DNA, 147 bp, Zea mays
gatgacgcaaattatgtctgagacttacaatgttcctgccatgtatgtcgcaatccaagcagttctatcactctatgctagtgggcgtactactggtagtgatcttgactctggtgatggtgtgagccacactgtgcccatttacga

SEQ ID NO: 58448 - DNA, 288 bp, Zea mays
  unsure (1)..(288): unsure at all n locations
atagcttccgaagtcctaattcgacctgaggcgattcggaaggacgggtttgcctaacctctggttccggcggccatggcggtggcggccctggcagctcaacctcgacgaggccacgtcatggggctccgccacgtagactgtttcaagagctcgagcagatcggcgagggcactacgggcaagtgtacatggcgaatgagacgggccacaacgagatcgtcgcgctcaagaagatccgcatggactacgagcgcgaatggtcccgatcnacgccatacgcgagatc

SEQ ID NO: 58449 - DNA, 295 bp, Zea mays
ggatccccagggtgcagcagctgctccaggacttcttcaacggcaaggagctgtgcaagaacatcaatcctgatgaggccgttgcctatggtgctgctgtccaggctgctatcctcagtggtgagggcaacgagaaggtgcaggacctgcttctgcttgacgtcactcctctctctctgggtctggagactgccggaggagtgatgaccgtccttatcccgaggaacaccaccatccccaccaagaaggagcaggtgttctccacctactcggacaaccagcctggtgtgttgat

SEQ ID NO: 58450 - DNA, 297 bp, Zea mays
gctcgccgccgccccgccgtgttgctcgccgacaccgccccgccggcagccaaaatgccgttcaagaggttcgtggagatcgggcgagtggcccttgtaaactacggcaaggagtatggccgcctcgtcgtcatcgtcgacgtcgtcgaccagaacagggctcttgttgatgcccccgacatggttcgttgccaaatgaacttcaagcggctttccctgactgacatcaagattgacattaaacgtgtcccaaagaagactacactgatcaaggcaatggaggaagctgatgtgaaa

SEQ ID NO: 58451 - DNA, 290 bp, Zea mays
cgtgaagactctgactggccagactatcaccttgaagtcgagtcttctgataccagtgacaatgtcaaggccaagatccaggacaaggagggcatccctccggaccagcagcggctcatttttgccggcaagcagctcgaggacgggcgcacgctgccgactacaacattcagaaggagagcaccctccacttggtgctgcgtctcaggggtggcatgcagatcttcgtgaagacacttactggcaagacgatcaccttgaggtggagtcctccgacaccatcgacaatg

SEQ ID NO: 58452 - DNA, 299 bp, Zea mays
cagcatcgtatcaggccactatccaagggtttgaatcaaagggcttttcaaaagaacaaagtgaaaacttgttaacaaagagtgttcagattgcactggaagcccgtgagatgttcttgaaggaacatttggagaaatccactcctatacagcattctattctggttgcagcagctctagggagttatggggcttatcttgctgatggctctgagtacagtggggattatggtgaagctggtacgaaagagttcctgaaggactttcatcggcggaggcttcaggttcttgctgaagca

SEQ ID NO: 58453 - DNA, 297 bp, Zea mays
agaaaccctagttcgaacgcgccgccgtcaccgtcgtcgctcgcgctctccgcccgcatcggagcgagagtaggggcgtgtcggcggtgaaagcgactgcgtcagccatggcggacgaggagcattcggagaggagagaggaggcctccgagcttgcccccttcgacccgaccaagaagaagaaaaagaagaaggttgtcatccaagaaccttctgatgaagtggacaagcttgcagagaagacagaaacactggcagtcgcagaacccgctgaacttaacttcactggaatgaaga

SEQ ID NO: 58454 - DNA, 295 bp, Zea mays
atggactcaacagcgaatgcgttggcaatggccaaagatcctgaagctgccttctttaaaaggttggaaggtctccaaccctgcgaagtttcagctctcaaatctggaacccatatatttgctgtatatggtgacaattttttcaagccagctagctatatgattgaagcgatgtgcgcaaagagttatgaagacacaacagagaggctgaaagagatagaatctaaaattctagctaagcgaaatgatctgcgtcaatttgaaactgagtacagaaaagctttggcacgatttc

SEQ ID NO: 58455 - DNA, 287 bp, Zea mays
caactcgccgtctgccttctgcgcctccatttcggcctctgtcccttgcaagttcaatctcacctccaaccatgggtaaagagaagtcccacatcaacattgtggttattggccatgtcgactctggcaagtcgaccaccaacaggacaccttatctacaagcttggaggcattgacaaagcgtgtgatcgagaggttcgagaaggaggctgctgaaatgaacaagcggtccttcaagtacgcgtgggtgctcgacaagctcaaggctgagcgtgagagaggtatca

SEQ ID NO: 58456 - DNA, 287 bp, Zea mays
cctggacctccacgccatcgaggcagtgaagctgggctcattcgtgcaatcgtgctcaagtctggcatcaactcccccatctaccgggacctccacgcgctcgtctcccacccacgcctgctctccgttgttgcctcgctcctccatatgctcggcctcgtctgcaacgtcccctacacagcgctcccgtcgtcgtcctctgcgtcgaccgctccatccccatgctcatgcgccgcaaggaggccaagccttacgacatgattgaggataggcactggagagtttga

SEQ ID NO: 58457 - DNA, 294 bp, Zea mays
caatatgtcgaccagcacattcgctacttcctgcacgctgttgggcaatgttagaacaacgcaggcctcccagacagcggtgaagagcccttcgtctctaagcttcttcagccaagttacgaaggttccaagcctgaagacctccaagaaactggatgtctccgccatggctgtatacaaggtgaagcttgtcgggcctgaaggtgaagagcacgagtttgatgctccagacgacgcctacatccttgacgcggccgagactgccggtgtggagttgccatactcgtgccgtgc

SEQ ID NO: 58458 - DNA, 290 bp, Zea mays
tggagctgaaggctgagccggatactgatgaggtgtacgcccaactcaccctgctccctgataagaagcaagatgagaatacatctgcaagagtggagaatgaggaggcagaggaggaggtggtgcctcatgtgccaccagccacaagtgaggggcttcgcatccattccttctgcaagacattgactgcctcagacacaagcacacatggtggtttctcagtgttgcgccggcatgcagatgagtgcctcccaccactggatatgagtcaacatcccccaaatcaagaa

SEQ ID NO: 58459 - DNA, 295 bp, Zea mays
ctagtcccctgctccattctcagccgccgccaatcccttcccgtgctccgcaaccgctgagtgagaagaagagatggccggcaagggcgatggcccggctatcggcatcgatctcggcacgacgtactcttgcgtcggcgtgtggtagcacgaccgcgtcgagatcattgccaacgaccagggtaaccgcaccacgccctcgtacgtcgccttcaccgactccgagcgcctcatcggagatgcggccaagaaccaggtcgccatgaaccccatcaacaccgtctttgatgccaag

SEQ ID NO: 58460 - DNA, 271 bp, Zea mays
catggcaccataatgctgccaaccgtgtggcatattccaaaccagctgatcctatcacttgtgcaacatatgctcaagatgtcattgaaagtagagcaagcgtttcacaagctcacgagcacaaacaccagcccctgatatttggacctgcacgtattgttggtggtggtcaaccagtgaaagggatagaatgacagcgcaagtttttcagcctagctacaggatgccaacaatgagcattgaagaagctggtttgcgcgagatgaaaatg

SEQ ID NO: 58461 - DNA, 300 bp, Zea mays
cgagaaacaatttgagttggctgaagcagtaaaactcccatgtttcttcacatgcgtgctgctggtgaagacttctgtgaaatcatgacacggaatttgcacagattccctggtggggttacacattccttcactgactcagcagaagatcgggacatgctatataatgatgagaagatgtttataggtgttaatggttgctctctgaaaactaacgaaaatcttgaggttctacgaggcattcctgtcgagagttgatgatagaaacagttctccatattgtgacataagaatactcat

SEQ ID NO: 58462 - DNA, 295 bp, Zea mays
ctcgagccggaaagaattctctctgtccttgatgctctggctctggtcgtgttgatctgggcatgttcttcgccaccattgctccaatctgttctggccctgtggatatgcgcaacgtatcgtctttgatgcactcctttggcgtcctgctagcgaaggcagcaaatgacagataaggaggagtgatgcgttaacctacattaagcttcttcgagctgtttatatacccacgcatggggctagtgacatgctcgaaagcatggggagtctgaccctaccatggtatcacacggaa

SEQ ID NO: 58463 - DNA, 280 bp, Zea mays
aaaatctgtcaaggatttcgcacactacaaatctggagtgtacaagcacatcaccggtggcattatgggtggccatgccgtcaagttgattggatggggaaccagtgatgctggagaagattactgggtatgttgttctatctccatattttgttctgtacattgtcaaacggtgaggccctaagttgttttgtatgatcttatcgtctttgcagcttctggcaaatcagtggaatagaggctggggcgatgatggatacttcaagatcataaggggcaa

SEQ ID NO: 58464 - DNA, 301 bp, Zea mays
catggcaccataatgctgccaaccgtgatggcatattccaaaccagctgatcctatcacttgtgcaacatttgctcaagatgtcattgaaggtagagcaagcgtttcacaagctcacgagcacaaacatcagcccctgatatttggacctgcaagtattgttggtggtggtctaaccagtgaaagggaaagaatgacagcgcaagtttttcagcctagctacaggatgccaacaatgagcattgaagaagctggtttgcgcgagatgaaaatgatggagaaatggcaagaagaccgctgag

SEQ ID NO: 58465 - DNA, 302 bp, Zea mays
tgttgctatcaaaatccttgacaaggagaaggttagaggcacagattggttgagcagattaagcgtgaaatttgtatcatgaaattagtaaggcaccctaatgttgttcgactgtttgaggtgatgggaagtaaagcaagaattttcatcgttctggaatatgttatcggcggagagcttttcgaaatcattgctactaatggaaggttgaaggaagacgaagcacgtaaatacttccagcaactgattaatgctgttgattactgccacagtaggggagtgtatcacagaacttgaagctc

SEQ ID NO: 58466 - DNA, 292 bp, Zea mays
ggcagacatttgttgggccgcccgagaatgtgagggaccatgtaatggctgccacaagagccctcaacaagggtgatcaccaaaaggctttcagtgtcataaattcgttggagatttggaagcttttgaggaacagagagcatgttcttgagatgttggagcttgagatcaaggaggaagctcttagaacctatctcttttcatactcgtcttcgtacgagtccttaagccttaaccagctcactaccatgtttgatctcagcgagcagcatgcccacagcattgttagcag

SEQ ID NO: 58467 - DNA, 293 bp, Zea mays
attcggagcgtagtggatgatgaagctgggaaatcaaatggtggtctcaagagtgatccaatgtgcaatgcttgtgagatggctgtggtatggatgcagaaccaacttgcccagaacaagacacaggagctcatcctgaactacattaatcagctttgcgagaaccatccgagtccgatgggagaatcagccgtggactgtggcagtcttgcgtccatgcctgacattgcgttcaccattggaggcaagaagttcactgaaaccagagcagtacattctgaagttggtgaagg

SEQ ID NO: 58468 - DNA, 289 bp, Zea mays
ctcgcctccacgagccttcacaaattgcctctcagatcttctcataatcttactcaagccctagccaaatcccagacccatcccagccctagcgacaccaaccagctcgccagcgaccatggggaacccggagaagctgatgaatcagatcttcgacctcaagacacacctccaagtcgctgcagcggcaggcgcgcaagtgcgagaaggaggagaaggagcagaagctcaaggtcaagaaggcgatcgagaagggcaacatggacggcgcccgcatctacgccgagaa

SEQ ID NO: 58469 - DNA, 277 bp, Zea mays
ctcgagccgaatcggctcgacagcacttagttttcacagctgagtgtctgtcgcgtgcaccagcggaagttcttggaaggagcagccacggaacgacatataaagctgttctacaaagcgggcatgtcctgacagtgaaatggctgcgtgttggccctgtgaagcataaaaaggaattcacaaaggagataaagaggatcggcactatcaggcatccaaatatagttccatggagagcttctattggggcctaaggagcagagagttaattattctg

SEQ ID NO: 58470 - DNA, 296 bp, Zea mays
  unsure (1)..(296): unsure at all n locations
caagcatgagagttgtgggcagtgcagccttgccgagaggggacaccctggctctggatgatcatggagaggctcaaggttggtgacgcgaagctggaggaaattgacatgcttcatgaggtcacgaagcaaatcgaagggcatactatctgtgtgcgaacangacgctgcggcatggcctgtgcaggggcttatcaggcacttcaggccagagttggagcggaggatccgcgagcgagctgaaagggagctgttggcggcttctgcataatgtgccagccatgtgcccctgtact

SEQ ID NO: 58471 - DNA, 292 bp, Zea mays
tgaagattatcatatctggaaaaacaatgggatgaataatgagctacacaacagcatcagctcagcaattcttcatactcgcagaattcttggcatcttggaagccgttttctccctgaagccatcatcagttggtacctcatggagctatagctcaaatgaaatagttgcagcagctatggttgctgctcatgtttctgagttatttcgtcggtccaggccatgccttaatgcactctctgcactaatgagatgcaagtgggatgctgagatttcgaccaggcatcatctc

SEQ ID NO: 58472 - DNA, 288 bp, Zea mays
gaagctagcttttcatcgatatgggcttgtactgcatgctggcagtagtaacaaaaatgcattcaaaacactaattgccgcggattacagcggcatcaaggttgagttggtaaaagactttcaaatgggggtttccaacaaaacaccagagttcctcaagatagaccctattgggaaggttcctgtcctggagacacctgatggtcctgtctttgagagcaatgcaatagcaagatatgttactcgcttgaaggtaacaacccactttacggatcttcatgattgatt

SEQ ID NO: 58473 - DNA, 284 bp, Zea mays
atatcattgttcagtgctatgcaatttctcgagcaaagcagattcttgctactattcctggaacggcaacaggtgcatatagtcacagtcagggtatcaaaggactgcgtgatgcaattgctgctggaatcatgtcacgtgatggattccatgcaaatgcagatgacattttcattacagacggagcaagtcctggggtccacatgatgatgcaattactgattaggaatgagacagatggcattctgtgcccattcctcagtaccctttgtatcacctccata

SEQ ID NO: 58474 - DNA, 295 bp, Zea mays
gaaacggtcgaagatgacggcgcgccccggagaccgtcggcgagggcacccatttcctcgtgccctggctgcagaagcccttcatcttcgacatccgcacgcgcccgcacaacttctcctccaactcggggaccaaggacctgcagatggtcaacctcacgctccgtctcctctcccgccccgacgtccagcacctccccaccatcttcacctccctcggactcgagtacgacgacaaagtgctcccctccatcggcaacgaggtgctcaaggccgtcgtcgccagttcaatgcc

SEQ ID NO: 58475 - DNA, 293 bp, Zea mays
gtgaccaaaatggtcttagcaaaggcctggatttgttgctttctcaactcgtgaggaagcatctcaggctttaactgaaatgaatggcaaaatgatatctggagaaccattgtatgttgcatttgcacagcgcaaagaagatagaaaagcgatgttgcaggcaaagttttctcagatgcgccctgctgtaccaatgacacccactctagccccacgccttccaatgtactctccgatggctcctcagcaactcttctatggacaagcgccaccagctatgatgccctcagcca

SEQ ID NO: 58476 - DNA, 291 bp, Zea mays
cggtgctggagatctataacgaggagatctacgatttgctcgtgggaagcggggccactgctaaaggaaacacccccaaggcaaaactggaagtaatgggaaaaaaagcgaagaacgcaagttatatatctggaaatgaagctgggaggatatcaaaagaagtgtttaaggtggaaaaacgaagaactgtgaagagcacactttgcaatgagagaagttcacggagccattgcatgattatcctggatgtcccatctgtgggaggaagattaatgcttgtgacatggctgg

SEQ ID NO: 58477 - DNA, 288 bp, Zea mays
gcaaacgcgaaaccctagcctgagctctatctccggtcacagctggtcagatgtggatgcggacgcggacgcagcgagggatgctttgctgattgattattgctttgtgggtaggttagcgacgaaggatgagcaggcgctggagccgcacgatctacgtcgggaacctccccggcgacatccgggagaaggaggtggacgatctgttctacaagtatggtaaaattgttgacattgacctgaaggtccccccaagaccacctggttatgcttttgtgagtttgaaga

SEQ ID NO: 58478 - DNA, 286 bp, Zea mays
cgggagcagtcgacgcgccgtactgaatcctcagatcatcggtagccgtaatcacacgccactctgctgactcccggcgagcagtgtaacattttccttcagccatgggcaaggagaagactcatatcaacattgtggtcattggacatgtcgactctggcaagtcgagcaccactggccacctgatctacaagctcggcggtattgacaagcgtgtgatttagatgttcgagaaagaagccgcggagatgaacaagcggtcattcaagtatgcctggtgcttgac

SEQ ID NO: 58479 - DNA, 274 bp, Zea mays
ggctcagccctctcgtcgccgtcctctcccattcgcaacgccacgcttgtcaccgccgaaatggccccgaagcgaggtggcagggcaccggtgccggccaagaagaagacggataaagtgacgaaccctctgttcgagataaggccgaagcagttcggcatcggcggcgcgttgcctcccaagaaggacctgcaccgattcgtcaagtggcccaaggtcgtgcgcatccagcgccagcgtcgcatcctcaagcagcgcctcaagtgcctccggg

SEQ ID NO: 58480 - DNA, 288 bp, Zea mays
ctcgagccgcaacgaaaagtcggtgctgctggtgtagtcagccaggagtgcaagactgttgtttctcaatacggacaacagatcctagatcttctgctagctgagacgcaaccagcgaagatctgttctcaggttggcctgtgcacttttgatggcactcacggtgttagcactggaattcgtagcgtagtggatgacaaagctgggaaatcaaatggtggtctcaagagtgatccaatgtgcaatgcctgtgagatggctgtggtatggatgcagaccaactggccc

SEQ ID NO: 58481 - DNA, 283 bp, Zea mays
  unsure (1)..(283): unsure at all n locations
aaatcattgttcagtgctgatgcaatttctcgagcanagcagattcttgcaactattcctggaagggcaacaggtgcatatagtcacagtcagggtatcaaaggactgcgtgatgcaattgctgctggaatcatgtcacgtgatggattcctgcaaatgcagatgacattttcattacagacggagcaagtcctggggtccacatgatgatgcaattactgattaggaatgaggaagatggcatgatgaccctacntctcagtacctttgtatcagctccata

SEQ ID NO: 58482 - DNA, 176 bp, Zea mays
gtcgagatcatcgccaacgacagggtaaccgcaccacactctcgtacgtcgccttcaccgactccgagcgcctcatcggagatgcggccaagaaccaggtcgccatgaaccccatcaacaccgtctttgatgccaagcgtctcattggcaggaggtttatagatgcctctgtccag

SEQ ID NO: 58483 - DNA, 312 bp, Zea mays
tgctgctgatcgaaagcggaaggaagtcctctctaaaatagaagaggatgttgctacgctcaggggttctgcagccaaatctcgcgtctagaattgccgctagatgggggaagtgagcggctcctggtctcttcgatccaatctaagaagctacaagaggctgccgaggagagcagcgatgacttggctaacccaccgaaggaagaggagaagcttggtgctgtccctcatggcctgtccaccgactctgaggttgcccagatggaagccgagtctatctctaggaagactctcaggagctcagccgagaag

SEQ ID NO: 58484 - DNA, 316 bp, Zea mays
cggatccgacggccccgcgcgcgcgttctcacccgaccctgctcttcgcctcggctgctctaccagtctacctctaccccgcgccccctccgagatcggaatcgcggcgccccgccgccctcctccgccatggcgccgtctctgctcgggggcttcaccaagtcgctggccatgacggtgctctccgaggtcggggacaagaccttcttcgccgccgcgatattggctatgcgccatcccaggaaactggtcctggcaggctgtttgactgcactaatagtgatgacagctctatcagcttctctaggttgggttg

SEQ ID NO: 58485 - DNA, 317 bp, Zea mays
aggagatccacatcggcggacaccgcggctggcgcctgcgcgtgctggaggccttcgtcatcatcctcgccttcacgcagctcctctacgtgctcatgctccacacgggcctcttcggcggcagcggtggctaccgggaccacgactacggcgtcggcggcgcggccggcgaggccaagggggtcaccagggtctgaggattctgatcgatgcagctcgtacatgtgtcatcatatcaggcgctgctggagtgtgatgacgtaataagtagtacccatatatatatatatggtgtgtgttgacgtaccacgtatact

SEQ ID NO: 58486 - DNA, 319 bp, Zea mays
ccctcacttgactcctcagctaccacccccgtctcccccctccatgtgggcggcctcgagctctgcttaaatcacagctgtgttcgtttgttgggtgatccgcccccctgtcggattctttcacctccgagctctgggacagggagatctgtggtgtcgcagcctcgcctttgttgtacgcgcgcgtgtgggcactcagcagcaccttcagaaatggattttttcacagagtacggcgaggggagcaggtacaagatagaagaggtcatagggataggcagttacggtgtggtttgctctgccttggacactcatactg

SEQ ID NO: 58487 - DNA, 312 bp, Zea mays
gccaccgccacctacgcaacaccagacgctccagcagtccagcactcggagctcgcgcgcccgacggcccaccatgatcatccccaagaagaaccgcaatgagatctgcaagtacctcttcaaggagggcgtgctgtatgccaagaaggactacaacctggcgacgacccacagattgatgtgcccaacctccaggtgatcaagctcatgcagagcttcaagtccaaggagtatgtcagagagaccttctcctggcagtactactactggtacctcaccaacgatggcattgagcacctacgcaactacctg

SEQ ID NO: 58488 - DNA, 312 bp, Zea mays
attgcagaggcattaagaaatgaggacaggatccatattattgatttccagattgcccaagggacacagtggataacactgatacaagcgctagctgcaaggcctgggggtccaccacacgtgcggatcactggaatagatgacccagtgtcagagtatgcccgtggtgaaggtctggactttgtagggatgatctggaaaagcatgtctgaggaattcaggatacctttggagtttaccccactgcccggtatttatgcaactcaagttacaaaagaaatgctggacattaggtcaggcgaacacttgctg

SEQ ID NO: 58489 - DNA, 308 bp, Zea mays
ctctttttaagcatttgcccaaaggatggattagctggggaaattactgtgatatggtttttaaagaaacaaaagatgaggtttggcttgagtatgcagtcagttgttttttccagggcatcaaatatggagtttcaaactcaaggagccatctagctcgaattctctaccttcttagctttgatggacaaaatgaacctgttggaagagctttggataaatatcttgagcagctgcctcactgggtttggctttcatggatacctcagttgttgttgtcgttacagagaagtgaagcccaacactgt

SEQ ID NO: 58490 - DNA, 311 bp, Zea mays
aaacgctaccatgcttgaggaagggcttgcccggctcgaaagaagcaagagatgggacactagggagaggaagacggctctccagaacctggaacagttccaggacaaggcaaagaaggaaaggctgcggatttggcagtacggagatgttgaatcggacgaggacgagcaggccccgcctgcaaggaagcctggaggtcgtcggtagagactgggcagtgtaaggctgcagtctggcatgctatgaaagttttggacaaccacaaatgttggactctgccgggagttatagatgaggacttactgagggg

SEQ ID NO: 58491 - DNA, 298 bp, Zea mays
cggattggtccgccctccttgtgctccgccggcaatggcgtccaccgccgtcaagctcatcgacatcgcagtcaacttcacagatggcatgttcaagggcatctaccacggcaagcagtgccacgccgccgacatcccggccgtactcgcgcgcgcgtgggctgcaggcgtcgatcgcatcattgtcaccggaggctccctgaaagagtccagagaggcattgcagatcgccgagaccgacgggagactgttctgcactgtgggagtgcacccaacaagatgcggggaattcgaggag

SEQ ID NO: 58492 - DNA, 312 bp, Zea mays
aggagatccacatcggcggacaccgcggctggcgcctgcgcgtgctggaggccttcgtcatcatcctcgccttcacgcagctcctctacgtgctcatgctccacacgggcctcttcggcggcagcggtggctaccgggaccacgactacggcgtcagtcgcgcggccggcgagcccaagggggtcaccagggtctgaggattctgatcgatgcagctcgtacatgtgtcatcatatcaggcgctgctggagtgtgatgacgtaataagtagtacccatatatatatatatggtgtgtgttgacgtaccacgt

SEQ ID NO: 58493 - DNA, 218 bp, Zea mays
gtcctctgttactactcccgccgtcgacaataccctcccgttctccgcaaccgccaatccgctcccgtcctccgccacctctgctgagagcgataagagatggccggcaagggtgatgggccggcaatcggcatcgatctcggcacgaactactcttgcgtcggtgtgtggcagcacgaccgtgtcgagatcatcgccaacgaccagggtaaccgcac

SEQ ID NO: 58494 - DNA, 154 bp, Zea mays
cggaaacctctcaaaccctagccgcctcctgcaagtttcagagctcaggaatctgcgccatggcgagtgagacggagaccttcgcatttcaggctgagatcaaccagctgctctcactcatcatcaacaccttctactccaacaaggagatctt

SEQ ID NO: 58495 - DNA, 128 bp, Zea mays
ctggacatcgcgacttcatcaagaacatgatcacgggtacctcccaggctgactgtgctgtcctgatcattgactccactactggtggttttgaggccggtatctctaaggatggccagacccgtgag

SEQ ID NO: 58496 - DNA, 305 bp, Zea mays
gtttggatccgaatgaatcagataacaatgggcatacagcactgcatatagctgcttccaaaggagacgaacaatgtgtcaagcttcttctagactacggagctgatccaaatgctagagactctgaaggaaaagtgcctctatgggaggcattatgtgaaaagcataatgcagtgatagagctattagtagagagtggtgcagagctatcatctggagacacggccttgtatgcttgcatcgctgttgaggaaaatgatgctgagctgcttgagaacgttatccgttatggtggcaacataaac

SEQ ID NO: 58497 - DNA, 248 bp, Zea mays
gatcttcctatcgaatcgaaaatgctaacgagggctctagatgaagcgcacggtaaagttgagaattacttttttgacatcaggaagcagttgtttgagtatgatgaggtattgaatagccagagagatcgtgtatatgcggaaagaagacgtgctcttgcatctgacagtcttcaatcacttattgtggaatatgctgaattgacaatggacgacatattaggggctaacataggacctgatactcc

SEQ ID NO: 58498 - DNA, 129 bp, Zea mays
cgtcctcatggacctcgagccaggcaccatggactccgtgcgctcgggccccttcggccagatcttccgccccgacaatttcgtcttcggccagtccggcgccggcaacaactgggccaagggccacta

SEQ ID NO: 58499 - DNA, 306 bp, Zea mays
atccagaaaagctcctccggcattcattttatcaatttcaggctgaccgttctcttcctgatcttgagaagcaaatcaaggaactggaatcagagagaaattccatggtaattgaggaagcggagagcttgaaggattattacgatctcttacagcagcacaggagtttaaagaaggatgtccatgatattgttctctctcccaaacatgtgctgcctttcttgcaacctggaaggcttgtccgcattgaatctagtacatatgagcgaactaacttttccgattgatgaaatgtcacatggggaa

SEQ ID NO: 58500 - DNA, 300 bp, Zea mays
gctcgacaaggacgaccgacgacgcacgcggagatccggcgtactgcaaattttgaaaactgaactgtaagatggcatcagcagagctttcccgtgaggaaaatgtgtacatggcgaactcgctgagcaggcggagaggtacgaggagatggttgcgttcatggagaaggtagccaagactgttgactcggaggagctcactgtggaggagcgaaacctcttgtctgttgcatacaagaacgtcattggagcccgccgcgcctcatggcgcatcatctcctccatcgagcagaaggagga

SEQ ID NO: 58501 - DNA, 144 bp, Zea mays
aattgatcaaacacgtatgtggaaggtgggtgaaagggtccgttcaaccaggccacaaggtgatcttggcccactgcatcccttcactgctggagtgtatgttgcactaatgatggctcagattgaggtccttaggaagacggg

SEQ ID NO: 58502 - DNA, 312 bp, Zea mays
cgcttgagaagatgttcagtggcttcagtactggcaaggatggcttatctgagtaccgcaaggatggtgaatatgttctgacttacgaggacgaggatggagattggatgcttgttggcgatgtaccatgggagatgttcgctgactcttgccgcagctcatgatcatgaaaggatcagatgctattggacttgctccaagggcagctgataagtccaagaatcgcaactagaatggttgcttcttacagtccacagcaagagggagatatccagtgactgtagggatctttgtggaaaccggaaaacgtct

SEQ ID NO: 58503 - DNA, 311 bp, Zea mays
ccacctccaaggctcgtggtgtagcttgccactctcacaaatcaagcattcatgcactgatctcgacattcagatcccaactgccttcgatgccttcgctgaggccaatgctggggactcagctgcggcagaaggtcgaacgactacgatcacgagcgcatccagcagcgtaaaagtcgcaagagcctgactaccgtccacggattgaagaaggagttcagctacagcaagatcctcatcgatctcaagaaagagttctgctgcaatggtacagtcgtccacgacccagcacttggacaggtcattcagct

SEQ ID NO: 58504 - DNA, 312 bp, Zea mays
caggccgggagcgggtgcgagggcaagaacttctacacccggagcgcgttcctgagcgccgtcaacgcgtacccgggcttcgccatggcgggacggaggtggagggcaagcgcgagatcgccgccttcttcgcgcacgtcacgcacgagaccggacatttctgctacatcagcgagatcaacaagagcaacgcctactgcgacgcgagcaacaggcagtggccgtgcgcggcggggcagaagtactacgggcgcggcccctgcagatctcgtggaactacaactacgggcacgccaggaaggacatcggctt

SEQ ID NO: 58505 - DNA, 299 bp, Zea mays
agcattgagcctggtgtggagcactatgttgggatcattgaggtcttggggaagtcagggcatctcaacgaggctctggagttcattgagaaactgcctttcgagcccaatgccatggtgtgggagtcactcttgaacctggcccggatgaatggagacattcaccttgaggaccgggcagaggagttgttggtgtcgcttgatccatccaaggcaaatcctaagaagctctcaagcccacctcccacgaggcgctgggaattaacatgcttgatgggaggacaagctagtagagtaca

SEQ ID NO: 58506 - DNA, 307 bp, Zea mays
acagaggcaggccacgaaggatgctggggtgattgctggcctcaatgtgctgcgtatcatcaatgagccaaccgctgctgctattgcctatggtcttgacaagaaggcaaccagcgtcggtgagaagaatgtcctcatctttgaccttggaggtggtaacttcgatgtctcctcgcctactattgaggaaggtatctttgaggtcaaggccacagctggcgacacccatcttgggggtgaggactttgacaacaggatggtcaaccactttgtcccagagttcaagaggaagaacaagaaggatatc

SEQ ID NO: 58507 - DNA, 305 bp, Zea mays
gttcatcatggacaactgcgaagagctgatccctgagtggctgagcttcgttaagggtattgttgactctgaggaccttcccctcaatatctctcgtgagactcttcagcagaacaagatcctgaaggtgatcaggaagaaccttgtgaagaagtgtgttgagctcttctttgagattgctcagaacaaggaggactacaacaagttttacgaggctttctccaagaacctcaagcttggcatccacgaggactcgcagaacaggaccaagatcgccgagcttctgagataccactccaccaaga

SEQ ID NO: 58508 - DNA, 305 bp, Zea mays
caactggtgactcagacggaaaaagtaaatcagctggagataagagctcaactagaaaactgaagcatgatgtcatcgcagccattggtgatcttattgatgagattgactcatgctatgagccgatttctgagcaagctgtggaacttattcaccaaaatgaggtaatcctaactctaggtcgttctagaaccgtcaaggagttcctgtatgccgcgaaagaaaagaaacgatcttttcgtgtatttgttgctgaaggtgctccaagatatcagggccatgttctcgcaaaagagctggttgag

SEQ ID NO: 58509 - DNA, 283 bp, Zea mays
ctgactggcaagactatcaccctcgaggtggagtcgtctgacaccattgacaacgttaaggccaagatccaggacaaggagggcatccccccagaccagcagcggctcatctttgctggcaaacagcttgaggacgggcgcacgcttgctgactaccacatccagaaggagagcaccctccaccttgtgctccgtctcaggggaggcatgcagatctttgtgaatacactgaccggcaagactatcaccctcgaggtggagtcctctgacaccattgacaacg

SEQ ID NO: 58510 - DNA, 159 bp, Zea mays
agacggccgtattggcccacgtgatgatccgaaggtgcgctcccagatcctctctcaggagtttgggtgggacaaggacctggccaagaagatttggtgttttggatctgagaccactgggccgaacatggttgtagatatgtgcaaaggagtgcagta

SEQ ID NO: 58511 - DNA, 306 bp, Zea mays
ggccaagatccaggacaaggagggcatccctccagaccagcagcggctcatctttgctgggaagcagcttgaggacgggcgcacgcatgccgactacaacatccagaaggagagcaccctccacttggtgctgcgcctcaggggacgcatgcagatcttcgtgaagaccctgaccggcaagactatcaccctcgaggtggagtcttcagacaccatcgacaacgtcaaggccaagatccaggacaaggagggcattcccccagaccagcagcggctcatctttgctggcaagcagcttgaggacgg

SEQ ID NO: 58512 - DNA, 299 bp, Zea mays
ctaattagaggctcctccgcgctctcggcgggggtttagctgccgtggcctgaggatttgtagaagacatggcctcgacgttcggtgccacttctacagttggccttatggctgctccaacggggaagaatgtgcgccttcagaggagggctaacttcagagtaaaaccggctaaggagctgtacttcaacaaggatgggtcagctatcaagaagctccagactggagtcaataagcttgcagacctagttggagttacactcggaccgaagggaaggaatgtcgttttggagagcaag

SEQ ID NO: 58513 - DNA, 301 bp, Zea mays
ccttgacaatacccaaattgatgatttcaagcttaatattgatcttaatgttgaactacgaaggtatcagcaagaagggatcaactggcttgcattcctccgtcggtttaagttacatggaattttatgtgatgacatggggctcggtaagactctccaagcatctgctattgtagcaagtgacattgcagaagcacgtgcacggaatgatgaaaaaattctgacatctttgattatctgcccttctacattagtggcccactgggaatatgaaatagagaagtacatagacagctctatc

SEQ ID NO: 58514 - DNA, 153 bp, Zea mays
accctcttccataaggcacttaaagaagcctttgaggtcttctgtaacaaaggtgtctctggcagttcgaatgctgagttgttggctaccttctgcgacaatattctgaagaaaggctgcagtgaaaagctcagtgatgaagccattgaagat

SEQ ID NO: 58515 - DNA, 153 bp, Zea mays
aggtattatcgctcctttgttgcaactgcttcaaggagcagagtttgatatcaagaaggaggctgcttgggccatctcaaacgctacctctggtggttcccatgaacaaatcaagtacttggtgtctgagggctgcatcgtagccgctgtgcg

SEQ ID NO: 58516 - DNA, 302 bp, Zea mays
  unsure (1)..(302): unsure at all n locations
acgaatttcaagagcaacattgcgcatgcttgaaaataatatccctatgaatcatcaacatgtgggatctgccccagctgtcaatccatcaattagggatagacgacatggatatgcacgggagatgatggcaacaccaggattcgatccagggagtcncggaagcatgggtttccctggcagcacacatctgcatcagttggagaccaatggtatgtttcctcacaatgagcggactttcatggacccagctatgtcacctgagcacatgagtgctcgctcatctcagcagagggggcata

SEQ ID NO: 58517 - DNA, 307 bp, Zea mays
acactcttccataaggcacttaaagaagcctttgaggtcttctgtaacaaaggtgtctctggcagttcgaatgctgagttgttggctaccttctgcgacaatattctgaagaaaggctgcagtgaaaagctcagtgatgaagccattgaagatgaccttgagaaggttgtgagattgctggcatacatcagtgataaagacctgtttgccgagttctataggaagaaacttgccagaagattacttttcgacaaaagtgctaatgatgagcatgagagaagtattctgacaaagctcaagcaacagt

SEQ ID NO: 58518 - DNA, 301 bp, Zea mays
ggatcggggctcaggcaagatgaacaggaagccaggagactgggactgcagggcgtgccagcacctcaacttcagccgccgagacatatgccagcgctgcagcgagccacgtggagttgctgatcgtggcggcggaggaggaggaggcgactacgccagcttcggtggccgcggtggctcctccttcggcggcggctttggcgctgctggctctgacgtccggcctggtgactggtactgctcctgcggcgcgcacaacttcgccagccgctccagctgcttcaagtgctccgcctacaag

SEQ ID NO: 58519 - DNA, 302 bp, Zea mays
agacggccctgattatcacatatgatgagcatggtggattctatgaccatgtacctacgccggtcgttggagtgccccagcctgatggaatagttgggcctgatccatactacttcaagttcgaacggcttggggtgcgtgttcccacctttctcatctcaccttggatagagaagggcactgtgatccatgaaccaaatggtccacaggatagctcgcaatatgagcattcgtccatccctgcaacagtaaagaagctattcaatttacattctaactttctgacaaagagagatgcatgg

SEQ ID NO: 58520 - DNA, 151 bp, Zea mays
atagacaccccctccacaccctctttccccaacctcgtgttgttcggagcgcacacacacacaaccagatctcccccaaatccacccgtcggcacctccgcttcaagatgcagatctttgtgaaaaccctgactggcaagactatcaccct

SEQ ID NO: 58521 - DNA, 295 bp, Zea mays
caatttcgttttcctgggtctgttcacgttgtgcttgagcttcagcatcggtgtggcttgtgctaacacccaagggaaaatcgttctggaggctttagtgctgacggctggcgtggtggtttctctgactgcgtatgctttctgggcgtcaaagaagggcaaggaattcgggtacctggggcctatcctgtcttccgcgcttactatcctcgtcctaactagctttcttcaggttttcttcccactgggacccgtgtcggtgggcttgttcggtgggctaggggctctggtcttc

SEQ ID NO: 58522 - DNA, 294 bp, Zea mays
aggcttttatcaccgcttttcgctctggtgctgttatgggctttctgcttgcatcaagtgggcttgtggttctgtacatcaccattaatgtatttaagttgtattacggtgatgactgggagggtctttttgagtctatcactggctatggccttgtcgggtcgtccatggctctctttggaagagttggtggaggcatctacacaaaggctgctgacgttggtgctgatcttgttggaaaggtcgagaggaacattcctgaggatgatcctaggaacccagctgtgattgctg

SEQ ID NO: 58523 - DNA, 295 bp, Zea mays
aggacagcaacctccagatcgcgtgcttcgaggtccatgccgacaggaacgagaaggtgttcctggccggcgccgacaacgtgctgcagaagctcgaccgggtcgccaaggcgctgtcattcgcctccaaggcggaggaggtggacgaggtgctcggctcacagcgcagaaggggttccttcctggccccaaggagagcggcggccacgaggagcgggagcaagaggaggaggaggaacgcgaagaacgccacggcggccgtggggagagggaacgccacggacgtgaggagcgg

SEQ ID NO: 58524 - DNA, 284 bp, Zea mays
attctagaagccgtatagaactcatggtgaaggcaaggagtcagtttaaagaaagaagcacagcaacgaatgttgaaattgaagtgcctgttccttcagatgccacaaacccaaatataagaacttcaatggggtctgctgcatatgctatggagagagatgcaatggtttggaaaataaaatcattccctggtggcaaggaatacatgtgcagagcagaatttagtcttcctagcataacagcggaagaaggggctccagaaaagaaggcgccgatacgggtg

SEQ ID NO: 58525 - DNA, 297 bp, Zea mays
attttaacaccaaatgtctatgagtacaagcgtcttgttcagaaggttcttaactgtgacgtagatgaggaaagtgcttctgagcagctaatcgcactttgccaaaaaattggtgatgtaacaataatgcagaaaggaaaagctgatgtcatcagtgacggtaaaacagttacacaagtgagtactattggttccccaagacggtgtggtggtcaaggtgacatcctttctggaagtgtggcagtatttgcatcatgggcacgacactttgtcttgacaaacgaagaacctacagag

SEQ ID NO: 58526 - DNA, 294 bp, Zea mays
gggttcgagaccgccgacctgccctccaagaagggctacctccgtttcaccaaggtttagctagccgacgtacggcacggacatctagctcgtctgtcagtccgcgtcgaccggggtgcgcggatcttttgtgcctgctggtggtttctctgactagtactagtatatatataggctctatgtatgtgcgtactatgccgtgccgtgttgtctcgtgtagtggtggcaaccggttcgtggcactaccgcgctagtattgtccacccatatcaatgtcctcttctgaacttagcg

SEQ ID NO: 58527 - DNA, 149 bp, Zea mays
aggttcgagaccgccgacctgccctccaagaagggctacctccgtttcaccaaggtttagctagccgacgtacggcacggacatctagctcgtctgtcagtccgcgtcgaccggggtgcgcggatcttttgtgcctgctggtggtttct

SEQ ID NO: 58528 - DNA, 139 bp, Zea mays
cgcttgagaagatgttcagtggcttcagtactggcaaggatggcttatctgagtaccgcaaggatggtgaatatgttctgacttacgaggacaaggatggagattggatgcttgttggcgatgtaccatgggagatgtt

SEQ ID NO: 58529 - DNA, 142 bp, Zea mays
gatttcgtgtctagaggccatcaaagatttatttccacacgactcaaatccgttttatgctggatttggaaatagagacacagacgagcttagctacctcaaggttggtattcctatgggcaagatcttcataataaacccc

SEQ ID NO: 58530 - DNA, 300 bp, Zea mays
gatctctgggccacaaaggtttcagatatcccttgaagtgcactaaaaccttccaacggtacctttgaaggttttagtgcacttcaacagttctctgggccacaaaggtttcagatacataaggcctacggcagcacgaaccatctgccttcagctcatacttgctttaagtactagacttgcctgagtacacatccaaagagcagctccaggagcggttactgttggcaatccacgaagcaaatgaaggtttcggatttggctaatcagttatactcgtttgtccgtgccctgagaact

SEQ ID NO: 58531 - DNA, 299 bp, Zea mays
agagaatttacgaaaaaagttacataatacaattcttgagttgaagggaaacatcagagtattttgtagagttaggcctttgctgccaaatgaatcaggagcagtatcatatccaaagaatggagaaaacttaggccgaggcattgagttgttacataatgcacagggaattcgtttacttttgataaagtatttgatcattcggcgtcacaagaacatgtgttcatagaaatatctcaacttgtccaatggccctagatggctataaggtctgcatatttgcctatgggcaaactggt

SEQ ID NO: 58532 - DNA, 286 bp, Zea mays
aggcatcggagattgcctcgggagcgcgtttcctggtcaactaaggccggcatgaagggctgctcagagcgcttgctgtttctgctgctgctgctggcatcgtcgtcgttactgtccgctgtgattgccgcgcacagacttgccccgccgacctcgacagcaaatgcatggtggcgcgtctgatgatgattgggagggggatttcttccccggcgtcccgaaaatcaagtatgagggtccaacaagggtgaccctcttgcttataagtggtataacaaggaggaag

SEQ ID NO: 58533 - DNA, 297 bp, Zea mays
  unsure (1)..(297): unsure at all n locations
ttctatccctttccaagagataatatactgcaacctcgggaacccccaggtccttggtcagccgccactaactttctttcgtgaggttctctccctgtgcgacaacccagccctcatggacagagatgaagctcgtgccttattcagcccttgtagcataagaagggcaggaggatcctaaactcgatccccagcaaagacactggtggatatactgattgccggggaatcaaatgcctgcgtcaagnagtagcagatgggattaccgcaagagacggttttccatcgacagcggac

SEQ ID NO: 58534 - DNA, 295 bp, Zea mays
  unsure (1)..(295): unsure at all n locations
tttcccgtcctgtccttccacccggcggcttaaaccctagttctcactcccatcgccgcttcagctccgccgctgcagatggagttctggggtctcgaggtcaagcctggttccactgttaagtgtgagcctggatatggctttgtgctgcacctttctgaggctgtcttggggaatcgaagaagagtgataatgccttgatgtatgtcaaaattgatgatcagaaacttgccattggaaccctcttngttgacaagaacccacacatacaatttgatctgattttcgataaaga

SEQ ID NO: 58535 - DNA, 300 bp, Zea mays
  unsure (1)..(300): unsure at all n locations
cggaaggtttcgaggaactcccgggctcgaggagatcgggacgatgatgggagggcgcgctctgctgctgctcctggtctcggcgctgctcgttcagatccgcgcctctgacccgctgctgtacgagccgttcgatgaggacttcgagggaagatggatcgtctccaaagcgatgaataccaaggtgtatggaagcatgccaagagtgatgggcatgaggactatggtctccttgttagtgacaaagcnnggaaatacgccataatcaaggagcttgatgagccagttaccttaaatgat

SEQ ID NO: 58536 - DNA, 302 bp, Zea mays
  unsure (1)..(302): unsure at all n locations
ggcatgccgacctgctcctattcaggttacctggattggctaccccaacacaacaggtttgccaacaatagactaccgaatctcagactcattgactgatccacctatgacaaaacaaaagcatgttgaggagttggtgcgccttcctgaaagcttactttgttatactcttccccagaagctggtcctgtttgtccaacgccagcaatttcaaatggtttcgtcactattgggagctttaacaatctaggncggattacaccgaaagtgtagcaagtttgggccagagtatcatgttcagt

SEQ ID NO: 58537 - DNA, 242 bp, Zea mays
tgaacctgagtttgactacctaaaaagtttggaaatagaagagaagattaacaagatcaagtggtgccaaacaaccaacaatgcactctttctcttgtctacaaatgacaaaacaatcaagtattggaaggttcaagagaaaaaggtgaaacgcgtttcagtgatgttttggacacctcccaaagttcagacaatggttcaacttcaagtccgggtaccagtagttgcagagctcttcttcc

SEQ ID NO: 58538 - DNA, 227 bp, Zea mays
ccagcagctaaggcccttcggcccaaattcaacgtgtttgtcaaaaatgtatctgctcatctgggagtagctgtgccacacattgagttgaagcatgtgattgctgctacaattggtcttaagggtcttggaagcctcctttttattttgagcagctctctcggtcttatctcctgctgctgtaccttgctttgatcactcctatcatccatgatttctacaactac

SEQ ID NO: 58539 - DNA, 292 bp, Zea mays
ctatcttggccctgctcctctgcaggatatggcaaggcaaattgctacagccaatggccctactggctataatagggattacctgttctcaatggagaaggcattagccagcattagccacgaagatgattcgatcatagagcttgcaaacgaggtgaggattggctcaacagaacaaaggagaccaagatcactggtgccaatgcttccatgaaatcacatgcccctcttgtgcacctgtccgcggttccagaaggcaccgttgtggactcgagatagcgactctactcgg

SEQ ID NO: 58540 - DNA, 295 bp, Zea mays
  unsure (1)..(295): unsure at all n locations
taattgaggaaactgggagtggtgttaccacagatcaactcaaagactatgtctggaagacactaaagagtggaaaggttgttcctgggtttggtcatggagttctgcgtaagaccgacccacggtattcatgtcaaagggagtttgccctgaagcatttgccaaggatccacttttccaattggtgtccaagttgtatgaagttgtacctcctatcctcactgagctgggcaaggtcaagaagncatggccaaatgttgatgctcacagtggagttttgctgaaccactttgga

SEQ ID NO: 58541 - DNA, 286 bp, Zea mays
  unsure (1)..(286): unsure at all n locations
ccagtctccactctggaactcccctcatcctccacatcgccaccgcatcggaactaggaaggcgaacganaggcgcggcgcggatcgagcgatggcggtggcccctactacggcggcggcgctggagcagctaagcagcagcaagatgttcgatggcttcaattcggcttccgccaccagagcgccacccttggctgcgccatgactttctcaatctacctgcccccgtccccggcgtccaacttgccgtgctgtactggctctcgggtctcacctgcaccgacga

SEQ ID NO: 58542 - DNA, 289 bp, Zea mays
tgcgccttatatactgaaacgccggaaatccctgacctcagtatttgaaattattgatcgtgtacccaagattgatccagatgatgccagcggcctgaaaccacctaacgtgtatgggagcattgaattcaggagtgttgaattttgctacacctacaggcctgagatgatggttctgagtaattttagcctcagagtgagtggaggacagactgttgctgtagtaggtgtatcaggatcggcgaggagcacaataatttctttgatcgagaggttctacgatccagct

SEQ ID NO: 58543 - DNA, 117 bp, Zea mays
gatcattcacaaaagctccagagatgatctaactagctatatgtaaatgatctagttgtgaatggtattataattgtgatgattttgtgaatatataattgtggtgcttttgtgttt

SEQ ID NO: 58544 - DNA, 284 bp, Zea mays
  unsure (1)..(284): unsure at all n locations
ctcgagccgtgcagatctttgtaaagaccctgactggaaaaaccataaccctggaggttgagcgctcggacaccatcgacaatgtgaaggcgaagatccaggacaaggagggcatccccccggaccagcagcgtctgatcttcgccggacaacagctgacggatggccgcaccctagcagactacaacatccaaaaggagagcaccctccaccttgtgctccgtctccgtggtggtcagncagtcatgggtcgtttaagctgccgatgtgcctgcgtcgtctgg

SEQ ID NO: 58545 - DNA, 197 bp, Zea mays
ctaggatccccagggtgcagcaactgctccaggacttcttcaacggcaaggagctgtgcaagaacatcaaccccgatgaggctgtcgcctatggtgctgctgtccaggctgccatcctgagcggtgagggcaatgagaaggtgcaggacctgcttctgctggacgtcacccctctgtccctgggtctggagactgct

SEQ ID NO: 58546 - DNA, 217 bp, Zea mays
aatccagccaggccaggctcctcccattcctcctctcccacgagctctcaccgctcctcgcggcggcaaaaacccccttgaattccctacgcgcccgcctccaatcccgccagtccggcggcgacccagggatccatggagaggtacgaactgctcagggacatcggttccggcaacttcggggtggcgcggctgatgcggaacaaggacaccaggg

SEQ ID NO: 58547 - DNA, 286 bp, Zea mays
  unsure (1)..(286): unsure at all n locations
tccacaagagtgtaaaatacaatgtgtgggcaagcacaaccaatggaaataagaagctcgatgctgcttatcaagaagctcagtcgaagggttctgcgtgccctatattcttgtttttctcagtgaatacaagtgggcagtttgttggtgttgctgaatgacgggggctgtcgattttgagaaaaccctggggtattggcaacaggacaagtggaatggttccttctctgttaagnggcacattgtcaaggacgtgcctaacaacattctcaaacacatcatccta

SEQ ID NO: 58548 - DNA, 232 bp, Zea mays
  unsure (1)..(232): unsure at all n locations
ccaatcagtactgatgggcaggtttctctcacagttctgcgtgggcccatattggatgaagtgcaccagcagataaattcatggatttttcagattaccaggctttacaaggagaaggactttttggaaactgaatttatagttgggcccataccagtagatgatggaaatgganaagaagtagcaattgaaattgttacaaacatggttacaaacaaaacattctacactg

SEQ ID NO: 58549 - DNA, 208 bp, Zea mays
attctgagcgtagtgcatgatgaagctgggcaatcaaatggtggtctcaagagtgatccaatgtgcgatgcttgtgagatggctgtggtatggatgcagaaccaacttgcccagaacaggacacaggagctcatcctgaactacgttaatcagctttgccagcgtcttccgagtcagatgggagaatcagccgtggactgtggcagtc

SEQ ID NO: 58550 - DNA, 232 bp, Zea mays
ccgttgctcgcctcgggtcaaaccctaagcagggagttgatttatccgctgcagccatgagtaagttgcagtctgagtctgtcaaggatgccatctcccagattgttggggatgccaaggagaagaataggaagttcactgagactgtggaactcagattggtctgaagaattatgatccacagaaggacaagcgtttcagtggctctgttaagttgccccatatccctcgt

SEQ ID NO: 58551 - DNA, 130 bp, Zea mays
tcctcccttgccccgccgtcgcatcctcttcgaagttcgaatcgaatcgcgccgcgatcacccacctcatggcggacaaggagcctgtcgtggagcggccagaggcgggtgaggaggaggaggacgcctc

SEQ ID NO: 58552 - DNA, 270 bp, Zea mays
  unsure (1)..(270): unsure at all n locations
gatgcatattgccttctgaactttggtgacagtatcacaactgaccacatctcgcctgccggaaacattcacccagacagcgcgtgcaacatatctgaaggagcgtggtgttgaaaggaaggacttcaactcatatggtagacgaagaggaaggatgagatcatggctaggggaacctttgccaacattcgtctcgtgaataagttcttgaagggtgaggttggacccaggncatccatgttccatctggggataagctttcagtttttg

SEQ ID NO: 58553 - DNA, 206 bp, Zea mays
ctcctctctctctgggtctggagactgccggaggagtgatgaccgtccttatcccgaggaacaccaccatccccaccaagaaggagcaggtgttctccacctactcggacaaccagcctggtgtgttgatccaggtgtacgagggcgagaggacccgacccgcgacaacaacctgcttgggaagttcgagctctccggcatcccac

SEQ ID NO: 58554 - DNA, 296 bp, Zea mays
agttcatggtccatctggccacgatccccatcaccggcaccggcatcaacccggccaggagcttgggcgctgctgtcatctacaacaacgacaaggcctgggatgaccactggatcttctgggtgggtccattcatcggcgccgccatcgccgcggcgtaccaccagtacgtgctgagggccagcgccgccaagctgggatcgtctgcctccttcagccgctagatcgatggcctcccgccggacaaggacagccggaggcgtgaactgtagatataccagaggctggacaaggac

SEQ ID NO: 58555 - DNA, 245 bp, Zea mays
gcacggaggcgaaggaggagcagcagcagcaggcggcgccgaggagcggcatcccactcagtgcttgcaaccatggctaggggattgaagaagcacttgaagaggctcaatgcgcccaagcattggatgctcgacaagcttggcggagcttttgctcccaagccatcttctggacctcacaagtccagggagtgccttcctctgatcctcatcatcaggaacaggctcaagtatgctctgaacta

SEQ ID NO: 58556 - DNA, 292 bp, Zea mays
caagaacatgatcactggtacctcccaggctgactgtgctgtccttatcattgactctgcactggtggttttgaggctggtatctccaaggatggccagacccgtgaacatgctctccttgcgttcacccttggagtgaagcagatgatttgctgccgcaacaagatggatgcaaccactcccaaatactccaaggcacgttatgaagagattgtgaaggaagtctcatcatacctcaagaaagttgggtacaaccctgataagatcgcctttgttcccatttctggttttg

SEQ ID NO: 58557 - DNA, 291 bp, Zea mays
gtgatagaggacaatcatgttatcaatggaaagcaagttgaaattaagagaaccataccaaaaggttcggtgcaatctagctctaaggatttcaagactaaaaagatatttgttggtgggcttccgtcaacactaacagaagacgaattcaagagtttctttgcaagatatgggactgtggtggaccaccagattatgtttgatcatgaaaccaaacgttcccgaggcttgggatttatagtttgcgcttctgagcaagttgtagatgatttgttagcgaatggagatatg

SEQ ID NO: 58558 - DNA, 288 bp, Zea mays
gagaaacttcagaatcttgttaatgatgctctagacagaggtgccgaaattgccgtcagagggagctttggcaatcttggtgaagatgcagttgatcaatttttcccaccaactgtcctggtgaatgttgatcacacaatgaaaattatgcaagaagagacatttggacctattataccaatcatgaaattcagttctgatgaagaggctatcaaacttgcaaacgactcaaaatatggtcttggctgtgctgttttttctggcaaccagaagcgtgccatcagaata

SEQ ID NO: 58559 - DNA, 279 bp, Zea mays
gttcagggacatcgagctgctggtcgcagtattgtgattgactggcagcagcaatctggttatctgtatgcatctggtgacatgtcttccatcttggtatgggatcttgacaaggaacaacttctcagcaccattcagtcaactgctgatactgccatttcttccctgtctacatctcaggttcgctccggacactttgctgctggttttgctgatggttctgtcaggatataggatgtcgctctcctgataggtcgtctatgtggccaggcacatgcc

SEQ ID NO: 58560 - DNA, 131 bp, Zea mays
aagagggcccctttgatctctttgacaccaagaagaagcaaaacaacatcaagctctatgtgcgcagggtgttcatcatggacaactgcgaagagctgatccctgagtggctgagcttcgttaagggtatt

SEQ ID NO: 58561 - DNA, 154 bp, Zea mays
gcagcaaatattttctgacttagagaagtactgtccttcacattgcatccttgctactaacacatctacaattgatcttaatctgattggggagaaaacaaaggctcaagatcgtattgctggtgcacacttctttagtcctgcgcatgtgatg

SEQ ID NO: 58562 - DNA, 298 bp, Zea mays
agcatccacctccgtcgtgctgtcgcgactcagcttcagcctctcctccatcggagtgagagctgggttgcagtcggtgagcccagccagctcaacaatgcgcttggcgtaggcggtctggcgaagtgtgatcccggagtctccctggtgcacctcaagttccaggtagaaggagagatgccccaggtcactcatttggaaggtggccttcatctcttccttgaacgttgccacctctgcatccttagcgccggtgatcaccaagtcgtcgacgtagacacccaccagcagggcactt

SEQ ID NO: 58563 - DNA, 295 bp, Zea mays
gaggcccaagggcacgcacaaggccaccattgtctggctccatggacttggggacaatggagccagctggtctcaactactggaaactcttccccttcctaatataaaatggatatgccccactgcaccttcaagacccgtgtcagtgtttggcggcgttcccctccacagcatggtttgatgttgctgatctttctgaggatgctcctgatgacattgagggaatcgatgcctcagcagcacatgttgcgaatttgttgtcaactgaacctgctgacatcaaacttggtgttgg

SEQ ID NO: 58564 - DNA, 289 bp, Zea mays
aaccagatctcccccaaatccacccgtcggcacctccgcttcaagatgcagatctttgtgaaaaccctgactggcaagactatcaccctcgaggtggagtcgtctgacaccattgacaacgttaaggccaagatccaggacaaggagggcatccccccagaccagcagcggctcatctttgctggcaaacagcttgaggacgggcgcacgcttgctgactacaacatccagaaggagagcaccctccaccttgtgctccgtctcaggggaggcatgcagatctttgtga

SEQ ID NO: 58565 - DNA, 287 bp, Zea mays
gaataaaccgcagcaaatcttctccggcaccggcagcgcccaaatccggcaatccgctgctccgaatggactcaggttacaatccccggacggtggaggaggtgttccgggacttcaagggccgtcgtgccgggataatccgcgcgctcaccactgatgcggaggatttcttcaagcaatgcgacccggaaacagataacttgtgcctgtatgggtttcctaatgagagctgggaagtaaatttgcctgctgaagaggtgccacctgacctctcagaaccagcatta

SEQ ID NO: 58566 - DNA, 280 bp, Zea mays
tccgcctctctagctggcctgtcgaggaccctcgccatcctccccaggcgcaccaccatacggtccaaacccccagcggcggcgctaggatttgagtctcagcgcgccggcaccgccaccgccaccggggtgatggcagggcaggagcgtaggacaaccgatctggaggagggatgggcgtttatgcagaagggtatcaccaagctgaagaacatcctcgagggcaagcccgagcctcagttcagctccgaggactacatgatgctctacacgacgatat

SEQ ID NO: 58567 - DNA, 275 bp, Zea mays
accgagggcgtggaggttcggctggtaacaagttccggatgtcactgggtctaccagtggcagctactgtgaactgtgccgataacactggagccaagaacctgtacatcatttctgtgaagggaatcaagggtcgccttaacaggcttccttctgcctgtgttggtgacatggttatggcaaccgtgaagaagggaaagcctgaccttagaaagaaggtgatgccagctgttattgtgaggcagcgcaaccatggcgccgaaaggatggtgtct

SEQ ID NO: 58568 - DNA, 284 bp, Zea mays
cagatctcccccaaatccacccgtcggcacctccgcttcaagatgcagatctttgtgaaaaccctgactggcaagactatcaccctcgaggtggagtcgtctgacaccattgacaacgttaaggccaagatccaggacaaggagggcatccccccagaccagcagcggctcatctttgctggcaaacagcttgaggacgggcgcacgcttgctgactacaacatccagaaggagagcaccctccaccttgtgctccgtctcaggggtggtatgcagatctttgt

SEQ ID NO: 58569 - DNA, 285 bp, Zea mays
ctgggccgccgccgcttggtgctgaggctttcgttggtctcttcggcggcgacgagcacccaccagcagttctgtagaaatggctgatggtgaggacatccagcctcttgtctgcgacaatggcaccggaatggtcaaggctggttttgctggggacgatgcaccaagggcggttttccctagcattgttggccgtcctcgccacactggtgtcatggtagggatgggacagaaggatgcatatgttggcgatgaggcacagtccaagagaggtattctcacgct

SEQ ID NO: 58570 - DNA, 284 bp, Zea mays
gaaagggaaccttgttaccattgctcaccggttgccttactcttcaattagtttctatgcctatgagagatacaagaatttgcttcagatgctaccgggtcttgagaagaatggtggatttggtgcagatgttggtgttagattgctaggtggtggtttatcaggaatcactgcagcttctgtgacgtatccactggacttggtgcggacacgtcttgctgcccagacaaatactgcctactacaggggcatatctcatgctctttatgcgatctgcagagatg

SEQ ID NO: 58571 - DNA, 293 bp, Zea mays
tcagctcaggccttctcaagagctggttgccaaggatttgcatggagccaagtggaaatttcgtcatatatataggggtcagcctcgtaggcatctcttgactactggatggagttcatttgtcaataaaaagaaactggtttctggggatgcggtcttatttctccgaggtgatgatggtgaactaaggctgggcgtacggagggccattcagcttaaaaatgaggccctttttgacgatttcagttgcgacagtacaaaacggcatacattgttggctgtagctgattcct

SEQ ID NO: 58572 - DNA, 290 bp, Zea mays
ccgcatcgcgtccttcgcgaacggaggcgccgccacgtcggtggaggacctcggccaccacgcggggtattaccgcctcgccaacacccacgacgccaggatgttctacttcttcttcgagtcgaggggccacaaggacgaccccgtggtgatctggctcacgggcgggcccggctgcagcagcgagctcgcgctcttctacgagaacggccccttcaacatagcggacaacttgtcgctcgtctggaatgattttggttgggacaaggcatcaaatcttatctatgtcg

SEQ ID NO: 58573 - DNA, 148 bp, Zea mays
cacataccaagaaattgctggaagcaaaaatactgttggacagtatgagagtcatactgcctttactctgcctggtctgtaccgagttgtccatgggattgatgtcttcgatccaaagttcaatatagtctctcctggagctgacatg

SEQ ID NO: 58574 - DNA, 286 bp, Zea mays
cattggcaggaggtttagtgatgcctctgtccagagtgatattaagctgtggctcttcaaggtcattcctgggcacggtgagaagccaatgatagttgttcagcacaagggggaggagaaacagtttgcagccgaagagatctcctccatggttctcatcaagatgcgtgagatcgctgaagcgtaccttggcagcacgatcaagaatgctgttgtcacggtccctgcctacttcaacgactcacagaggcagggcacgattgatgctggggtgattgctggcctc

SEQ ID NO: 58575 - DNA, 231 bp, Zea mays
gagtggggctacagcaaccgcgtcgtcgacctgatccgccacatgttcaagacccagtagagagagatatttctgcctccctatcgagggtcgtccccgatggcctttggtcgcagacatctttgctgcttgtctatgctgagaataaatgtgatcggtgcccctggacgctggatccatgctggttttggaaaaaaaaaaaaaaaaaaaaaaaaaaaaaggggggccccc

SEQ ID NO: 58576 - DNA, 279 bp, Zea mays
ggcgtgtttggtatcgattatgagggccacggcaagtccatgggtgccaggtgctacatccacaagtttgagagcctcgtggccgactgcgacatgttcttcaagtccatctgtgacatggagggatacaggaacaagagccggtttctatacggcgagtccatgggcggaccgtggctctactgctgcacaggaaggatccgaccttctgggacggtgcagttcttgtggcgccaatgtgcaagatatcggagaaagtgaagccgcacccggtggtgg

SEQ ID NO: 58577 - DNA, 279 bp, Zea mays
ctcgagccgctccactttccacattccagttccactccgcctccgctgccggtcgccgactccgaaactccgacagtccgaccacaaggtcttgtgcgggatccacagaaggatgagtgaagaggataagactgctgcttctgctgagcagccgaagagggcccctaagctcaatgaaaggatcctctcttctctgtccaggaggtccgtagctgctcatccatggcatgatcttgagatcggtcctgatgctcctgctgttttcaatgttgttgttga

SEQ ID NO: 58578 - DNA, 146 bp, Zea mays
gctgatgaagagcagagggaagcccttttcagagactgaaatccgaaactggtgctttcaaatatttcaagctctgagtcacatgcaccagcgtggatattttcaccgtgaccttaagcctgaaaatttgcttgttacaaaggaac

SEQ ID NO: 58579 - DNA, 283 bp, Zea mays
ctcgagccgcttgttcacatccttgccctttgccatgtcatctgaacgattgtccttcttgtacagtccttgttaaaagaccatgccattgtggtgctatggtgcatgcttttgaatgtgtgttttataacaacttaaatgcaaaggatcagattaaaataagatcttgtggtggcccatgtcataggtcagtttggctcctaactgtttccgtatcgaaaattgtacaatttttctgttgttactaaactcctatcacaaatttccttaaatttatttgatt

SEQ ID NO: 58580 - DNA, 278 bp, Zea mays
gacgtgaaaatgccttgccatttgattctatcaaagctagcagacaagtgcccttccgccgtccttgctgtcctggactccatagttgaaccaatcgagaaaactataagccacaaacccaagggggatgcagtgaagcaggaggttgatcggaacgaggacatgatccgcagcgctctcagggcaatatcttctctaagccgcataagcggcagcgactacagcatacggttcaagaatctgatgaacaagataacggccacccccgcgctcgccga

SEQ ID NO: 58581 - DNA, 273 bp, Zea mays
taacaattcggggtggttccttgtagccttcgtagaaggcgcaagtcagagacccttcgtgctcagtatattgatgtcagggagctcaggatttgtgctggaacatggaatgttgcaggcagacttccacctaatgatttggatatccaagaatggttggatatggaagagccagctgatatatatgttcttggatttcaagaaattgttccactaaatgctgggaatatatttggcgctgaagacaaccgcctgtagcaatgtgggagcata

SEQ ID NO: 58582 - DNA, 271 bp, Zea mays
cccgtgccgtcgcctcgcctatccgatctgccacctcctcccgtctcgcacgttccttcccaactccgcagcgtagcctctccgcggcgcgatccagatccaggtttttcagcatgggcctggtgaaggaaggcatcgacatggaggagggaacccttgagatcggcatggagtacaggactttatctggtgttgctgggcctctggtcatattggataaagtaaagggcccaaagtaccaagaaattgtaaacatccgacttggagatgg

SEQ ID NO: 58583 - DNA, 325 bp, Zea mays
caggatgtcgcaccgtaagttcgagcacccgaggcacggctccctcggcttccttcccaggaagcgctcctcacgccaccgcggcaaggtgaagtcatttcccagggatgaccccaagaagccttgccatctcagtgccttccttggctacaaggctggcatgactcacattgtccgtgaggttgagagctcaggatccaaactccataagaaggaaacttgtgaggctgttaccatcattgaaacccctcctcttgtcattgttgggctcgtggcatatgtgaagactcctcgtggcctccgcacactcaactctgtttgggcc

SEQ ID NO: 58584 - DNA, 317 bp, Zea mays
ccatgacacaacaggctacccggcatgctcggcgtgtctatgtgggtggacttcctccaacagctaatgagcagaccgttgccatattcttcaatggagttatggctgctattggaggaaacacagctggtccaggtgatgctgttcttaatgtctatataaaccatgacaagaaatttgcttttgtggagatgacatctgtggaggaagcaagcaatgcaatggctttagatggcataatgtttgagggagcaccagtgaaggttagaagaccaacggactataatcttccctagcagctgctcttggcccgagcc

SEQ ID NO: 58585 - DNA, 313 bp, Zea mays
gctgaggtgctttggtccaactgagttctctgttgccgtgaccatcttcggtgatcgggacaatgcgaagacctgggggacgaaactggatgctgaggtatatgcttgcagcaatatggttgagcaggtgctgccgtttggtggcttgctcatctatcagagcttcactgttacggccgaaacgacccatgggtcgccgaggtcagtcctgcatgacttcgctggtgacattgtcaagaatcgctcagagagtgatgctccctgggaagctgatgctgtggatgagagcgaggaaagagatgtaaagaagatg

SEQ ID NO: 58586 - DNA, 317 bp, Zea mays
gaccaaagccgggcatacgcccccaagtccaaaagccctctccgccccgctctcccactcgtaggtgttctccccgtctccgcccgcactcgctcgtccgcgcgcaggaaggttgacctgtcgggggccggcgagcccggtaagtaagagtgaaaatggatggaagtagtaaagggagtgggcattctgaagcattaaggaactacaacctgggaagaactttaggtatcggtacatttggaaaagtgaagattgcagagcataagcttactggacatagggttgctataaagatcatcaactgccgccaaatgaga

SEQ ID NO: 58587 - DNA, 303 bp, Zea mays
actttctgtgctatttgacgaatataaggatgcacaacaaacagcctagtgcacttgacattaagaattagtgaattactccattcgctggggcaagatgttccagggtctggtggttctaactggactgaccatgagacattgcttcttttggaagcttttagacttttcaaaggaaaagaatggcatgagattgctgagcatgttgctacaaaaacaacagaacagtgcatgttacacttccttcaaatgccaatttctgaaccgtttcttgatggcgatgatttcaatgaaacaccccag

SEQ ID NO: 58588 - DNA, 310 bp, Zea mays
gctactgccattctatggaaatttgtcaccgtgatcttaaacttgagaacaccctccttgatgggagtccaacacctcgtgtgaaaatttgcgactttggttactcaaagtctgctttgctgcattccaaaccaaaatcaacagttggaactccagcatacatagcccccgaggttctttccagaaaagagtatgatggaaaggtagcagacgtttggtcctgtggtgtcacgctgtacgtgatgctcgtgggatcatatccatttgaagatcctgaggatccaaggaacttccggaaaacgatcagcag

SEQ ID NO: 58589 - DNA, 313 bp, Zea mays
tgaagccttctgaattgacagaggaacagcggcaacttctttcatctaatgttctctgtcaggaccagctgaaaaagattttacatgacactgatcttgaaagcattgaacagtgctatatggagatgaacacagtagagttcaaccttgagcaagctctgaatacggttcttatgcaaggcattcctttgggcaaggaaaaacagatttcaattgaacgtaattggcctgtggaagtatcatgcatgtacctttatggggacaatttaaggcttcagcagatcctagcagactatctagcatgcgcccttca

SEQ ID NO: 58590 - DNA, 309 bp, Zea mays
gtaattcgtgagctcggcagaagctgtcagcaaatggttccacagcttggcttcggagggcccagatataaacattgagcctaacgatggcgttaggagtcaattgatgaaagtagataccaaacctccttagtatctccgcaacaatatcgtggagagggaatctaagcccagctttcaaaaaactcttgaaaataacaatctcatccttccttggcttcggggtggtttcttcttccccgaagcggagtagcttcttctggtcctcattgaaataactgctttcaccacttcgaaagtcacttttga

SEQ ID NO: 58591 - DNA, 319 bp, Zea mays
cgtgtgcttctactgctcctcgatttgatcaccgattaggggaggcggtttaccagtgagcacgcgcgagagataggataggaggaaagggaagctagcggcttcgctctcgcggggagatggcgcaggcggtggaggagtggtaccggcagatgcccatcatcacgcgctcctacctcaccgccgctgtcgtcaccaccgtcggctgcaccctcgaaatcatttcgccgtatcacctgtaccttaacccgaagctcgtggtgcagcactacgagatttggcgcctcgtcactaacttcctctacttccgcaagatgga

SEQ ID NO: 58592 - DNA, 316 bp, Zea mays
tgagggagctagaagaatagcatttaagcatatagaaacctttgtgctcactttctcagatccacaaatgttctctatggctgctgcctcctcagccccagcagcgctgtctcatgttgctgaagcagtgtttatacacgaagctggacacctgagatgcagtcgctctgacattggtagatttgtttccatgcttcggaatccttcaccaattcttcgtgcttgtgctgcctttgcccttcttcagttcacaatcccaggaggtcggcatgcagtgcatcacgcaggtctcttgcaggaagcaggggcaggtcgg

SEQ ID NO: 58593 - DNA, 316 bp, Zea mays
cacacgatgtctgctgcctacgcctgcttcctggaccacgccgtgggcagcctttctgaagggaaatacgccgattttgtggtggtaccttctacatcgtgggacgaattctccagcgatttagccggggcatgtcctggcgacgtacgtgagcggcaggcaagcttatccatgacagatagcagttgtgtaagtgttggagaccaaaaagagcagcgcggacagtccggccctgaggccggaaggccggacgatccgcggtccggacagtccgcggtgatggcgcggacggtctgcgcgtgcgcagagtcagtta

SEQ ID NO: 58594 - DNA, 305 bp, Zea mays
tcgccgtctcgcacgttcctttccccaactccccagcgcgtctccgcgccgcgatccagatccaggttgttcagcatgggtctggtgaaggaaggcgtcgacatggaggagggaaccctagagatcggcatggagtacaggactgtatctggtgtggccgggtctctggttatcttggataaagtaaagggcccaaagtaccaagaaattgtaaacatccgacttggagatggcaccactcgccgtggtcaagtcctgaagttgatggagaaaaagtgttgtgcaggtttttgaaggaattctgg

SEQ ID NO: 58595 - DNA, 313 bp, Zea mays
cgccgtctgccttctgcgcctccatttcggcctctgtcccttgcaagttcaatctcacctccaaccatgggtaaagagaagtcccacatcaacattgtggttattggccatgtcgactctggcaagtcgaccaccacaggacaccttatctacaagcttggaggcattgacaagcgtgtgatcgagaggtttgagaaggaggctgctgaaatgaataagcggtccttcaagtacgcgtgggtgctcgacaagctcaaggctgagcgtgagagaggtatcaccattgatattgctctgtggaagtttgagacca

SEQ ID NO: 58596 - DNA, 145 bp, Zea mays
tgaagggaatatgtttcttcactgactttcttgtcgttggggagaaccaacaaacatttgatcttgaaggggacagtggaagcctcataatcttaacaggacaagacggtgagaagccgcaacctataggaattatatggggtgg

SEQ ID NO: 58597 - DNA, 313 bp, Zea mays
cctccacccacggcactcgcaagcagcgctcattagtcactagggttttaaactttccccccgatccgcctcgccgccggcgtcgtcctccgccggaaatccaccaccctacacccagccggagacgactatggtgggtttcggctcgatggcgggctacgggatccagtcgatgctcaaggaaggccaccgccacctctccgggctcgaggaggccgttctcaagaacatcgacgcctgccggcgagctgtccgccattacgcgcacctctctcggcccgaacggaatgaacaaaatggttatccatcactt

SEQ ID NO: 58598 - DNA, 310 bp, Zea mays
catcttgttaatatgagaggaaggtatttccgggatctgtccattgtgagggcgggcgaaggggaaaagacttgtccacaccctgaagaaaatgaagttgtggtataccgaagctttttgaaagccggattgcgattccccttgagcagcttcgtcgtggacgtgttgaaaatcttcgaagtctatcttcatcaacttactccagaggctattataaggctaaatatcttcgtgtgggccacgagaagccaaggtctgaagcctgacgcaagaagcttctgtaatgttcatgaattattatatgaaacaa

SEQ ID NO: 58599 - DNA, 301 bp, Zea mays
tgatcatccagatgttgcagcaactctcataaatgttgcaatgatgtaccaggatgccagtaatatgaatactgctcttaggtatcttcaagaagcccttatgaagaatgaacgacttcttggccctgaccatgttcaaacagccgtatgctatcatgctctagagagtgcattcagttgtatgagcttatataagctttcaattcagcatgaaaagaagacctatgatatactggtaaaacattaggggaaatgctcacggactaaagatcagaaaatggttgaatacattaagttcgag

SEQ ID NO: 58600 - DNA, 307 bp, Zea mays
gaaagatttatgatggagatgggttcaactacatcaaagaatcttttgaaaatggtactcttcaccttattgggttgttgagtgatggtggtgtccactcccgccttgaccaactgcagttacttctgaaaggtgtcagtgagagaggagcaaaaataattcgtgtgcacatccttaccgatgggcgtgacgttttggatggcagcagtgttggtttcgtggagaccctagagaatgatcttttggagcttcgaggcaagggtattgatgcacagattgcttctggtggtggaaggatgtatgttac

SEQ ID NO: 58601 - DNA, 296 bp, Zea mays
gcttggtaatgatggcatccttcttcatattgacctcgctaaaggaaatcgccgtcttggtggttctgctcttgcacaagcatttgatcaaattggaaatgattgcccagacattgatgatgttctgtacctgaagaaggtatttgaggccattcaggaattgctcagtcagcgtcttatttcagcaggccatgacataagcgatggtggccttattgtgagtgttcttgagatggcatttgctggtaattgtggttttaagcttgacatagacttggaagataggagccttcttg

SEQ ID NO: 58602 - DNA, 339 bp, Zea mays
  unsure (1)..(339): unsure at all n locations
aatcactgcagcgtacgaagtcggaatacagtcgacgtgncactttctcagtcccccctagccgccgcctaccgctcgcgctctcctcgcgttcgggaaggtcgtttcgccatggcctcagagacggagacgttcgccttccaggcggagatcaaccagctgctctcgctcatcatcaacaccttctactcccaacaaggagatcttcctcagggagctcatctccaactcctccgatgccttggacaagatcaggtttgagagtttgacggacaagaccaagctggatgcacagccagagctgttcatcaacattgtccccgacaaggccacaacacg

SEQ ID NO: 58603 - DNA, 314 bp, Zea mays
cgagactctgatctcgggttcaccgcagcgcacagagcacccctgactcccggcccgatccgcgctctcctctccgacgcttcagtcatggcaggaatggcacccgagggttctcagtttgatgctaagcactatgattctaaaatgcaggagctgctgagcactggtgagactgaggagttcttcacttcatatgatgaagtttttgaaagttttgatgacatgggccttcaagagaatcttctgagaggcatttatgcatatggttgagaaaccatctgcaattcagcagagaggaaattgttcccttctgc

SEQ ID NO: 58604 - DNA, 314 bp, Zea mays
ggagataagaccgcgggacatcacgatgatgccttcagcaccttcttcagccagactggtgctgggaagcacgttccccgtgcaatcttcgttgatctagaacccactgtgatcgatgaggtgcgcactggcacgtaccgccagctcttccaccctgagcagctcatcagtggcaaggaggatgccgctaacaatttcgcccgtggccactacacaattggcaaggagattgttgatctgtgccttgaccgtatccgcaagcttgctgacaactgcaccggcctccagggcttcctggtcttcaatgccgttgg

SEQ ID NO: 58605 - DNA, 304 bp, Zea mays
ggctactgaatattgcgtggcgcatggaggaggaaagcgctgttccgtgcccggctgcaccaagagtgctcgtcgccgcactgactgctgtgtgaagcacggtggcggcaagcggtgcaaggttgagaactgtggcaagagcgcccaggggagcacggacttctgcaaagcccatggcggaggaaagcggtgcacatggggcacaggctgtgaaaaattctcccgtggcaagagtggcttctgtgcggcacatggtaccttgatggccaggcagcgagaacaagaggcggcgaagaatgtagga

SEQ ID NO: 58606 - DNA, 310 bp, Zea mays
cttgagctcgcaaccatgaaattgtcccaagaactggcagagcaattgcgcctggttatggaaccaactcttgctagtaagcttcaaggggattatagaactggaaagagaataaacatgaagaaggttattccatatattgcgagtcatttccgcagggacaagatatggttgcgtcgaactaagcctaataaacggaattaccaagtggttattgctgttgatgactctagaagtatgtctgagggtaaatgtggaaaatttgctatcgaggcattagttactgtgtgccgtgctatgtcacagcttg

SEQ ID NO: 58607 - DNA, 307 bp, Zea mays
ggaggccgccaagaacggggccgccgccgcggatggccacaagcctggccccgtgccattcttcgccgcggggattagttcggtgcttcaccccaagaacccatttgctccaacattgcattttaactaccgttactttgagacggatgcaccaaaagatgcacctggtgcaccaagacaatggtggttcggcggtggtactgacttgactccttcatacatcattgaagaggacgtgaagcatttccattctgttcaaaagcaagcatgtgataaatttgatccaagttttcacccaagattcaaa

SEQ ID NO: 58608 - DNA, 289 bp, Zea mays
ggctcctgctagtgctagctcgtccagatgaacgcgcgcgtcggctactacaagcagtactgccagcagctccgcgtcgacccagggcccaacctcacttgctaggcgacggcgtccacgttgtacccatggctcctgctagtgctagctcgtccacaataaatgctcggcgtcgcaccctcgcgaaaagtaaaccaagagtttactgactagtacgagctagctagcatgcagtaataataatcatcgtaataataataataaaacgactgggctgagccactttgtt

SEQ ID NO: 58609 - DNA, 302 bp, Zea mays
gttgaccatcctgttgaactcctggacgaagtggttgaccacttcttcctcttgaactcctggacgaagaacaagaaggatatcactggcaaccccagggctctccggatgctgaggaacgcttatgagaggcgcaagaggactctgtcttccactgctcagaccacgattgagcattgactcgctgtatgagggcatcgacttctactccatcatcacccgtgccaggtttgaggagctcaacatggacctgttcaggaagtgcatcgagcctgttgagaagtgcctgatggatgccaaga

SEQ ID NO: 58610 - DNA, 252 bp, Zea mays
gagaattatacaaaagatttcaaaaacaaagatgtgacgaggaggcaaatagctgtggcaacataccttatcgataaactagcccttagggctggcaatgaaaaggacgacgatgaagctgatactgttggttgctgtacgctgaaggttgataatgttacatgtatgcctccaaatcagattcagtttgactttctgggtaaagaatctaattgaatctttacccacgtagtcgcactggatctgatgtag

SEQ ID NO: 58611 - DNA, 303 bp, Zea mays
caccgaattccctgcgattcctctcccctcgcctcctcgtctccccctaggggatcgtcggagaggaatcgcaaagagggccgtctcatccgagttaaggaagccatggagcacaaggaggctgggtgccaggcccccgagggacccatcatctgcatcaataactgtggcttcttcggcagcgcggcgaccatgaacatgtgctccaagtgccacaaggagatgataacgaagcaggatcaggccaagctggctgcctcctctatcgacagcatcgtgaacggcagcgacgccgtcatggag

SEQ ID NO: 58612 - DNA, 305 bp, Zea mays
ctcctcgcgagcccaaacccccaacctaaacctttcacccgccgccgccgccaccaccagcactgccactccgccaccaccgtcccgaagccccctcccagcgccatcgacttcatctcggattgaagcaatgtcgtcggacgatgaggtcacggaggagaaggagctcgacctctcctccaacgacgttgtcaccaagtacaaggctgccgccgaaatcctcaacaacgctctgaagattgttgtgtctcagtgcaagccaaaagtcaagattgttgacctttgcgagaagggcgactctttca

SEQ ID NO: 58613 - DNA, 301 bp, Zea mays
aggagttcaagaggaagaacaagaaggatatcactggcaacccggggctctccggaggctgaggactcttgtgagagggccaagagaactctgtcttccactgcccagaccaccattgagattgactcgctgtacgagggcattgacatctactccaccatcacccgtgccaggtttgaggagctcaacatggacctgttcaggaagtgcatggagcctgttgagagatgcctgagggatgccaagatggacaagagcagcgtccatgatgttgtccttgttggtggctccactaggatcc

SEQ ID NO: 58614 - DNA, 296 bp, Zea mays
atggcaagaagggagggcactccactgggatacccgatacagcattgctattgaggcagccaaggggctttgctacttccaccatgactgttcacctttgatacttcaccgggatgtcaagtcaaataatatacttcttgactccaactttgaagctcatgtggtcgacgtgcggctagcaaaattcttgcaggactcgggggcatctgaatgcatgtctgccatcgctggctcatatggctacatagcgccagaatacgcatacacattgaaggtggacgagaagagtgatgtct

SEQ ID NO: 58615 - DNA, 222 bp, Zea mays
tgaacgcctctccctcgaggacatgcgcaagatccttcaagccaatgagcaagatgcttctggatcggaggatgcggtcgttccaagatgtgaggatatgatgttctatgggcctctcgagaagtgcccagtatgtgagggtcagcttgaatttaaggagtggaaattccatctcactgggaactacagcgagtgggcacgctgtactttcagtactagcgc

SEQ ID NO: 58616 - DNA, 277 bp, Zea mays
tgaacctgagtttgactacctaaaaagtttggaaatagaagagaagattaacaagatcaagtggtgccaaacaaccaacaatgcactctttctcttgtctacaaatgacaaaacaatcaagtattggaaggttcaagagaaaaaggtgaaacgcgtttcagtgatgaatttggacacctcccaaagttcagacaatggttcaacttcaagtccgggtaccagtagttgcagagccctcttccaatggtgttgcacaggaaaatgtacagtccaaaca

SEQ ID NO: 58617 - DNA, 270 bp, Zea mays
  unsure (1)..(270): unsure at all n locations
tggtgaggatccacatacaggaattgtggcatcaatcagcaatgacaatccagcacttatttcttgtgtggcgngtgagcgtctggagttccaggatactgatctagttgttttctctgaagtgcatggactgacggcttttagtggtggaaccccaaggatttttaattctgcaagcccttattcttttactctagaagaagacaccacctcatatggcacttatattagaggtggtattgtcactcaggtgaagccacgaagttctta

SEQ ID NO: 58618 - DNA, 292 bp, Zea mays
attcatttcacggtggagttccccgactcgctggcaccagagcagtgcaaggctctcgagtcggtacttccgccaaagccttcgtccaagctgacagacatggagatagatgaatgcgaggagacaaccatgcatgatgtgaacaacatcgaggaagagatgcgcaggaagcaggctcatgctgctcaggaggcgtacgaggaggacgacgagatgcctggcggagcccaaagagtgcagtgcgctcaacagtaagcagacttaccaaatgggatcaaggcacttggttgct

SEQ ID NO: 58619 - DNA, 266 bp, Zea mays
ttcccgcatccctcggaaaactccgggagctccgggacctcattctgtggcagaacttgttggagggcgagattccggcgtccctggaaaatttggtcaggctcgagcatctcatcctcgactacaacgggctcaccggtggcatcccgcgggaactctccaagtgcaaggagctgaactggatatcttggcgagcaacagctgtctggtccgtcccgagttggcttgggcagctcagcaacttggccatcttgaagctgagcaac

SEQ ID NO: 58620 - DNA, 241 bp, Zea mays
aaggaagtccttacaaggttcccagatatatcgtcagtccagcttagaatgccgaaccttcactttctgcctgtcaacttggggaccaaagaagctccgctggtgaagtttgctgatgatgtgtacctgccgacggacgaaccacacgggaccattgaagcaaccttgagccgtcccatgtcaaagctgtaaaaaaatttgtagtcgtcaggctgatattagactcctgcttcgtctcccc

SEQ ID NO: 58621 - DNA, 288 bp, Zea mays
aaggatggggagaacaaggtcttcagccctgaggagatcagtgccatgattcttggcaagatgaaggatactgctgaggcgtaccttggcaagaagatcaacgatgctgtcgtcactgtccctgcatacttcaatgatgcgcagaggcaggcaaccaaggatgctggtgtcattgccggcctcaatgttgctaagatcatcaatgagccaactgctgctgctattgcctatggtttgggacaagaagggtggcgagaagaacatccttgtctttgacttggtggtggt

SEQ ID NO: 58622 - DNA, 287 bp, Zea mays
aggctgccaagaaggagaggcttctgaagagggcccaagctgagaatgaaggataaactgttgagtcgaagaaaccaattgttgtgaagtatggccttaaccatgtgacttacctcattgagcagaacaaggctcagcttgttgtcatcgctcacgacgtggatccgatcgaacttgttgtgtggcttccagccctgtggcaggaagatggaggtccttactgcattgttaaaggaaagctcgccatggatcgattgttcacaagaagaatgcatcagtcttgtgtc

SEQ ID NO: 58623 - DNA, 296 bp, Zea mays
cgagaggtttgagaaggaggctgctgaaatgaacaagcggtccttcaagtacgcgtgggtgctcgacaagctcaaggctgagcgtgagagaggtatcaccattgatatcgctctgtggaagtttgagaccaccaagtactactgcacggtcattgatgcccctggacaccgtgacttcatcaagaacatgatcactggtacctcccaggctgactgtgctgtccttatcattgactccaccatggtggttttgaggctggtatctccaaggatggccagaccgtgaacatgtctct

SEQ ID NO: 58624 - DNA, 277 bp, Zea mays
gaggcattatagggcacctgaaataatattaggtttaggctggagttttccatgtgatatttggagtgttggctgtattcttgttgagctatgctctggggaagcattgtttcagacacacgagaatctggaacacctagcaatgatggagagggttttgggacctctaccagaggatatgatacggaaagcaagctcttcagctcagaaatttttaggagagcaacacgttaaatggcctgaagtgctgtttcaagagaaagctcagagctgtgag

SEQ ID NO: 58625 - DNA, 280 bp, Zea mays
gggttgctaccgtgcagtgcctatcgggtactggttctttaagagtcggaggtgaatttcttgcaaggcactatcacgagcgcactatctacatcccacaaccaacctggggaaatcacccaaaagtcttcaccctatctggcttgaacgttaggagctaccgctattatgatcctgcaacatgcagccttcacttcgaaggactcctggaaagactcggttctgctacttcaggttcattgtactgctgcatgcctgtgctcacaacctactggagtag

SEQ ID NO: 58626 - DNA, 296 bp, Zea mays
cttaattccacttcacaagccaaggtgcactacaatgtaccatcaacagttgtcttactgcattacacagtttgttgaaaaagattgcaagcttgcggattctgttattaggggcctcataaaatattggcctatcaccaacagcacaaaggaggtactgttcttgggtgagttggaagaggtactagatgcaacacaacctggcgagtttccaaaatgtatggttcctctttctcaccagatcgctcgctgctcgaacagccctcaatccagttgctgagagagtatgtttttct

SEQ ID NO: 58627 - DNA, 301 bp, Zea mays
gcattgatgtggtctctcgggaaagtattgaatacacctgaggtttcacgtgtttatattggatcattcaatgacaaaccagtaaatgaatcagctgttggtccacttggaaaggaactatttgagagagagcagatgatcttctttctgatctcaaagatatccccaagaaagcctgtgaccgccggatcaatgaatttgttaaacgtgctagagctgccaagatccatgcttatataataggtcatctaaagaaggagatgcctacagatgatgggcaaagcaaagcccaacaacgact

SEQ ID NO: 58628 - DNA, 278 bp, Zea mays
tggatcgggaagtagcaatttggaagctgaatcatctgaagagaaacctggttatgttattgtcattggagccacaaataggcctgatgctgtggaccaagctctgcgaaggccaggcaggtttgaccgagagatatcacttggtgttccagatgagaatgcacggaaacaaatactgaagatgcttactcagcatctccgacttgaaggcgaatttgacttgttcaagatagctagggcaacaccaggtttgttggtgctgacttgaaagcatagtg

SEQ ID NO: 58629 - DNA, 301 bp, Zea mays
ctctgctccattctcagccgccgccaatcccttcccgtgctccgcaaccgctgagtgagaagaagagatggccggcaatggcgatggcccggctatcggcatcgatctcggcacgacgtactcttgcgtcggcgtgtggcagcacgaccgtctcgagatcattgccaacgaccagggtaaccgcaccacgccctcgtacgtcgccttcaccgactccgagcgcctcatcggatatgcggccaagaaccaggtcgccatgaaccccatcaacaccgtctttgatgccatgcgtctcatcggc

SEQ ID NO: 58630 - DNA, 292 bp, Zea mays
ggtaacttctgttctgacaagaagtcagctgctgtgaactggatcgatggccgtgggaagtcggtggtttgcgaggcggtaatcaaggaagaagttgtgaaaaaggttctcaagacaaacgtacaggctctcgtagaattgaacgtgatcaagaaccttgccggttcagctgttgctggagctcttgggggtttcaatgcccatgcaagtaacattgtggcagccacttcattgctactggtcaggacctgcacagaacgtggagattcccagtgcatcacatgttggagct

SEQ ID NO: 58631 - DNA, 299 bp, Zea mays
  unsure (1)..(299): unsure at all n locations
gaggggtttggggacgccgcgggggaaggaggaggacccggcgcgatggagtacctgaccagcgtgctgtcatccaaggtgtacgacgtggcaatcgaatcaccgctgcagctcgcctccaagctctcccaccgcctcggggtcaacatctggatcaagcgcgaggacctgcagccggtgttctcattcaaattgcggggagcatacaacatgatggcanagctctcccgtgagcagttagagaggggcgtcatctgctcctctgctggaaaccatgcccagggcgttgctctttctgc

SEQ ID NO: 58632 - DNA, 291 bp, Zea mays
tcgtgatggtccagatggaagcttagcaactgttactgagtttatggttaatgggtctctcaaacagttcctgaggaaaaaagacaggacaatagatcgccggaagagagtaatattagccatggatgctgcatttggcatggaatatttgcacgacaagaatatagtccattttgacctgtagtgtgagaatctactggtgaacatgagggatccacagcgaccaatctgcaagatcggtgatctcgggctatcaaaggttaaacagcatactttggtactggtggtgtt

SEQ ID NO: 58633 - DNA, 297 bp, Zea mays
ggagagaccaggctggtgcactgatccacatctaccaccatgtgcagcatttgttgagattatggcaacagtgttctccagaaatgcatggcgctgtgtatggcatatgattcagaatgacttggtccatggatggggtcttgactttgctcttagaaaatgtgtggagccggctcatgagaaaattggagttgttgatgctcaatggattgttcatcaatcagttccttcacttggcaaccagggcaagtcagataatggaagaccaccatgggaaggggtaagagcacgctgcag

SEQ ID NO: 58634 - DNA, 273 bp, Zea mays
  unsure (1)..(273): unsure at all n locations
cattgactggcaagaccattcacttggaggtggagagctctgacaccattgacaatgtgaaggccaagatccaggacaaggagggcattcccccagaccagcagcgtctgatctttgcgggcaagcagctggaggatggccgcactctcggcgnatacaacatccagaaggagagcacccttcaccttgttctccgcctcagaggtggtatgcagatccttgtaaagaccctgactggaaaaaccataaccctggaggttgagagctcggaca

SEQ ID NO: 58635 - DNA, 290 bp, Zea mays
agcgtatttacttgcatgaggagggcgtacaaggcaacaggggttctatattgtcattaccaggcggggatgttcctcctggtggtgagttcatccaggctgcagctcttgtgagccaaccagctctttactctaaggaactgctggagcaacgtgctgctggtcctgcgatgatgcatccatctgaagcagttactaaaggtccaagatgggccgacctatttgagcctggggtgaagcatgcactgtttgttggcataggaatacagatcctgcaacagtttgctggc

SEQ ID NO: 58636 - DNA, 288 bp, Zea mays
ttttgcaggagaatgatcctcctccttggctgcacagaatgcgtgagttaggctatcctccgggctacctagatgtggttgacgatgaagatagaccttctggtatcaccatatttggagatggtgaggtgaaactagagtatgaggagggagagctttcagagcaaggcgaacatctccgcctaagaaaaagatgacagtggaattccctggaataaacgcccccatcccagaaaatggtgatcagtggctgtggggtagcacccgccccagtcctcaggccgccac

SEQ ID NO: 58637 - DNA, 288 bp, Zea mays
ctggctgttccaagttaagtaaattggatctagagggtaacaagcttgtggcactttctgaaaacatgtttgtgtcatggacaatgctcacagaattgaatctcgcaaagaatctacttacagccatcccaggtagcattggagcacttccaaaactaatccgcttggacatgcatcagaataaaataacatcgattcccccttccataaaaggttgctcttcgctagccgagttgtatatgggaaataacttattgtcttcaataccagctgatattggcacgttat

SEQ ID NO: 58638 - DNA, 299 bp, Zea mays
atggcaagaagggagggcacctccactgggatacccgatacagcattgctattgaggcagccaaggggctttgctacttgcaccatgactgttcacctttgatacttcaccgggatgtcaagtcaaataatatacttcttgactccaactttgaagctcatgtggccgactttgggctagcaaaattcttgcaggactcgggggcatctgaatgcatgtctgccatcgctggctcatatggctacatagcgccatacgcatcaccatgaagggggtgaccgagaagatgatgtctacac

SEQ ID NO: 58639 - DNA, 298 bp, Zea mays
cgtctctaaccctacagcgacgacgagagcgaggccatgaaggggaagaagccggtcaaggagctcaagctcaccgtgccggcgcaggagaccccggtagacaagttcctgacggcaagtggcacgttcaaggatggtgagctgaggctcaatcagagcggcttgcggcttatctctgaggaaaacggggatgaagatgaatctacaaagctgaaggtggaagatgtgcagttatcaatggatgatcttgagatgattcaagtcattggcaaaggaagcggtggtgttgtccagctag

SEQ ID NO: 58640 - DNA, 297 bp, Zea mays
attcatttcacggtggagttccccgactcgctggcaccagagcagtgcaaggctctcgagtcggtacttccgccaaagccttcgtccaagctgacagacatggagatagatgaatgcgaggagacaaccatgcatgatgtgaacaacatcgaggaagagatgcgcaggaagcaggctcatgctgctcaggaggcgtacgaggaggacgacgagatgcctggcggagccaaagagtgcagtgcgctcaacagtaagcagactacccaaatgggattcaagcactttggttgctcttca

SEQ ID NO: 58641 - DNA, 274 bp, Zea mays
aaggaagtccttacaaggttcccagatatatcgtcagtccagcttagaatgccgaaccttcactttctgcctgtcaacttggggaccaaagaagctccgctggtgaagtttgctgatgatgtgtacctgccgacggacgaaccacacgggaccattgaagcaaccttgagccgtcccatgtcaaagctgtaaaaaaatttgtagtcgtcaggctgatattagactcctgcttcgtctccccagcattcccaggctaaaatggacagtaagctgt

SEQ ID NO: 58642 - DNA, 295 bp, Zea mays
aaggatggggagaacaaggcgttcagccctgaggagatcagtgccatgattcttggcaagatgaaggatactgctgaggcgtaccttggcaagaagatcaacgatgctgtcgtcactgtccctgcatacttcaatgatgcgcagaggcaggcaaccaaggatgctggtgtcattgccggcctcaatgttgctaggatcatcaatgagccaactgctgctgctattgcctatggtttggacaagaagggtggcgagaagaacatccttgtctttgaccttggtggtggtactttga

SEQ ID NO: 58643 - DNA, 296 bp, Zea mays
aggctgccaagaaggagaggcttctgaagagggcccaagctgagaatgaaggaaaaactgttgagtcgaagaaaccaattgttgtgaagtatggccttaaccatgtgacttacctcattgagcagaacaaggctcagcttgttgtcatcgctcacgacgtggactccgatcgaacttgttgtgtggcttccagccctgtgcaggaagatggaggtcccttactgcattgttaaaggaaaggctcgccttggatcgattgttcacaagaagcatgcatcagtcttgtgtcttaccac

SEQ ID NO: 58644 - DNA, 295 bp, Zea mays
agaccaggtcgccatgaaccccatcaacaccgtctttgatgccaagcgtctcattggcaggaggtttagtgatgcctctgtccagagtgatattaagctgtggcccttcaaggtcattcctgggcccggtgagaagccaatgatagttgttcagcacaagggggaggagaaacagtttgcagccgaagagatctcctccatggttctcatcaggttcctgagatcgctgaagcttactcggtagcagcacgatcaagaatgctgttgtcacggtccctgcctacttcaacgactc

SEQ ID NO: 58645 - DNA, 294 bp, Zea mays
ggcattcaggctgatggccagatgcccggtgacaagaccattgggggaggtgatgatgctttcaacaccttcttcagtgagactggcgtgggaagcacgtcccccgtgctgtttttgttgaccttgagcccactgtcatcgatgaggtgaggactggcacctaccgccagctcttccatcctgagcagctcatcagtggcaaggaggatgcagccaacaacttcgctcgtggtcactacaccattggcaagggattgttagacctgtgccttgaccgcatcaggaagcttgcag

SEQ ID NO: 58646 - DNA, 260 bp, Zea mays
ccaaaattgaaaggcctgtgatgatacacagggcaatcctaggttcggttgaaaggatgcttgccattcttttggagcattacaatggtaaatggcccttatggctaagccctcgccaggccattgtttgctcggtatcttctggttcagtggaagcatgcgaaacaggttcttgccactctacatgaagctggttttcatgttgatattgacgcgagtgacaggacaatacaaaagaaggtacgggagcttcaactggc

SEQ ID NO: 58647 - DNA, 288 bp, Zea mays
gttacttctcccgccgccgccaatcccctcccgttctccgccaccgccaatcccctcccgtcctccgccacctctgctgagagcgagaagagatggccggcaagggtgatgggccggcaatcggcatcgatctcggcacgacctactcttgcgtcgatcagtggcagcacgaccgtgtcgagatcatcgccaacgaccagggtaaccgcaccacaccctcgtacgtcgccttcaccgactccgagcgctcattcggagatgcggccaagaaccatgtcgccatgaacc

SEQ ID NO: 58648 - DNA, 292 bp, Zea mays
tggaaggtcattgagcattacaatttcgcaccgttgactgccgttttgtctgtgaactacctcgatagattcctctccacgtatgagtccctgaaggcagagcttggatgactcagctcttggcagtggcttgcttgtctttggcttcgaaaatcgaagagacagttgtgccactccccttggatttgcaggtagccgaggcaaagtttgtttttgagggaaggaccataaaaaggatggagcttctggtgctaagcaccttaaagtggaggatgcatgctgttactgcttg

SEQ ID NO: 58649 - DNA, 293 bp, Zea mays
ggagaggcatccctcccttccgcgtggtgtgctctctgttcctacgccgtttcctctcccgactctctcctcgccggcgacgccgcggagtaggtgcaacagaaactgctcgaggcggaggcggagcctgcggctgcacagacatgggtgatcacgaggcgcgcggtgatgacttcgagaagaaggcggagaagaagctctcgggctggggcctcttcggctccaagtacgaggacgccgccgacctcttcgacaaggctgcgaactccttcaagctcgccaagaactggagc

SEQ ID NO: 58650 - DNA, 248 bp, Zea mays
gtgcatcatccgtgccatcttcctcgaccgcatcaagaaggcgtacgataggaaccctaaccttgccaacctcctcgttgaccccgagttcgcccaggagatcatagacaggcaagctgcctggcgcagggttgtctgccttgccatcaacaatggcgttagcaccccaggcatgtctgcaagtctggcctacttcgactcgtaccgaagagttaggtttcgcgaaactgtggtggaggctcagagag

SEQ ID NO: 58651 - DNA, 286 bp, Zea mays
ctgtcgggctaatcttaagtgacggctctgagattacatctgacaatagacctaaaaacaccatctttgattggttctttgaccctcttatggttataaaggaacagatcaaagctgagaatctcactgacgaagaggaagagtatctgaaaatgcgagtgctattggctggtgatcccagtcgcctgaaaggctctctgcctcatgttccatccttgactgaacgtaaaaaggcagatatagacgcattcgctcgcaggttgcaaggaatcacaaagtcgatatc

SEQ ID NO: 58652 - DNA, 254 bp, Zea mays
ggcaaacaaacatggggacggctgacatcaaagtaacatttggaaatggaagcaagcatgaactgaacgtatcaacataccagatgtgtgttctcatgctgtttaactcagcagatgtcttgacttaccgtgaaattgagcagtctacagcaataccagccgctgacctgaagcgatgcctccagtcactagctcttgtgaagggtaagcaagtcctgcggaaagagccgatgagcagggacattgccgatgat

SEQ ID NO: 58653 - DNA, 238 bp, Zea mays
ggtgttttttaaggatgtagccggttgtgacgaagcaaaacaagaaataatggagtttgtgcatttccttaaaaaccctaagaagtatgaagatttgggagctaaaatacccaaaggtgctctacttgtaggccctcctgggacagggaagactttgctcgccaaagctacagcaggagagtctggtgtgccatttttgtctatttctggttcagatttcatggaaatgtttgttggt

SEQ ID NO: 58654 - DNA, 279 bp, Zea mays
gactggtacataggcccaaccctgcttgaggctcttgaccagatcaccgagcccaagaggccttcagacaagcccctgcgtctgcccctccacgatgtgtacaagattcgtggtattagaactgtaccggttggtcgtgtggagactggtgtcatcaagcctggtatggtagtcacctttggtccaactggcctgactaccgaggtgaagtctgttgagatgcaccacgaggcacttcaggaggctcttccgggtgacaatgttggcttcaccgtgaag

SEQ ID NO: 58655 - DNA, 287 bp, Zea mays
cgccgtcggcaacttggcgatggaggagaagcagatccagcagaacatccagatgagcgtgaacttccttgtttcccttctgaagaagaactggcagaatgtgagatgcctctacgtcaagagcaccatggggaagccatacagggtgttctcagtatgctcttttgtgaagtctgctaggttctggcaccgaggttttattgaattaaactcttgttaaggatatgtttttggacgatcctatatttcgtcctggcgctactatgtttcagaatggtggtactact

SEQ ID NO: 58656 - DNA, 109 bp, Zea mays
atgggtggcatgcagatcttcgtgaagacacttactggcaagacgatcacccttgaggtggagtcctcggacaccatcgacatgtcaatgccaagatccaggacaagga

SEQ ID NO: 58657 - DNA, 275 bp, Zea mays
  unsure (1)..(275): unsure at all n locations
cacgtctgtcaatgaagtcatttgccatggaattccagatgccagataacttgaggatggtgacattgtaaatgctgatgtactgtatactataaatatgtctcatttaaatcaccatgaccacctttatagtacagagtcacctcacatttcaatgtgcgcanaccctcaagtctcctggtgatttaaatgagacatattttgttggaaatgtcgatgaagcttccaaacagcttgtacgttgtacctatgagtgcttggagaaagctattgca

SEQ ID NO: 58658 - DNA, 238 bp, Zea mays
tgaacgcaagaaaatattgttagacattgcagatgctttggaacaaaatgaggatctaattagaactgaaaatgaagctgatgtatctgcagcacaagatgctggatatcagaaatctttggttgatagattgacattgaagccagaaaagatagcaagccttgcgaaatccatacgcactcttagcaatatgggagaccccaatcaaccagatactcaaaagaacagaggttgctga

SEQ ID NO: 58659 - DNA, 110 bp, Zea mays
acggattctatatccaagcatgaccagggtattatacacttaatctctgccctaggctatgagtgggcattgtcttcagttctcagtgttggtgttggtctaaattttcg

SEQ ID NO: 58660 - DNA, 281 bp, Zea mays
tgctgctgatgacaagcggaaggaagtcctctctaaaatagaagaggatgttgctaagctcagcggttctgcagccaaactcgcgtctagaattgccgctagatgggggaggtgagcggctcctggtctcttcgatccaatctaaggagctacaagtgaatgccgaggagagcagcgatgacttggctaacccaccgaaggtagaggagaagcttggtgctgtccctcatggcctgtccaccgactctgaggttgcccagagggaagccgagtctatctct

SEQ ID NO: 58661 - DNA, 286 bp, Zea mays
cattgactggcaagaccatcaccttggaggtggagagctctgacaccattgacaatgtgaaggccaagatccaggacaacgagggcattcccccagaccagcagcgtctgatctttgcgggcaagcagctggaggatggccgcactctcgcggactacaacatccagaaggagagcacccttcaccttgttctccgcctcagaggtggtatgcagatctttgtaaagaccctgactggaaaaaccataaccctggaggttgagagctcggacaccatcgacaatgt

SEQ ID NO: 58662 - DNA, 276 bp, Zea mays
  unsure (1)..(276): unsure at all n locations
agcgtattaccttcatgaggagggcgtacaaggcaacaggggttctatattgtcattaccaggcgnggatgttcctctggtggtgagttcatccaggctgcagctcttgtgagccaaccagctctttactctaaggaactgctggagcaacgtgcgtatggtcctgcgatgatgcatccatctgaagcagttactanaggtccatagatgggccgacctatttgagctggggtgaagcatgcatgtttgttggcataggaatacagatcctgcaac

SEQ ID NO: 58663 - DNA, 107 bp, Zea mays
ttcactgagactgtggacattcagattggtctgaagacttatgatccacaggaggacaagcgtttcagcggctctgtgacattgccgcatatcgctcgtctcaagat

SEQ ID NO: 58664 - DNA, 275 bp, Zea mays
actagctcaaaaccctagagctctcgcctgctcgcctccgccgccggagcgagctccccatcttcatccgtcaaccatggcgacccagatcagcaagaagaagaagttcgtcagcgacggtgttttctacgccgagctcaatgagatgctgacgtgggagctggcggaggacggctactctggcgtggaggtgcgcgtcacgccgatgcgcacggagatcatcatccgcgccacgcgcagcagaacgtgctcggcgagaagggcgtaggatcagg

SEQ ID NO: 58665 - DNA, 276 bp, Zea mays
ggtttgaggagctcaacatggacctgttcaggaagtgcatggagcctgttgagaagtgcctgagggatgccaagatggacaagagcaccgtccatgacgttgtacttgttggtggctccactaggatccccagggtgcagcatgtagccacgagatcttcaacggcaaagagctgtgcaagaacatcaaccccgatgaggctgtcgcctatggtgctgctgtccaggctgccatcctgagcggtaagccattagacgtgcaggactgctctgctgg

SEQ ID NO: 58666 - DNA, 233 bp, Zea mays
tgtcccaacgccgccgccgccgccgccgcccgccgctcggggattgcctgctttcctctgccgaccacatctacaccgcacaactggtccttccaagtgagcttcaatcccctgcgtgtagatggagagggttctcaaggatgacgccgtcgaggagaagggcgaccgcgccagaatggcatcgtttgttggggccatggcaatctcggatttggcgaagaccacattgggtc

SEQ ID NO: 58667 - DNA, 108 bp, Zea mays
gctactgccattctatggaaatttgtcaccgtgatcttaaacttgagaacaccctccttgatgggagtccaacacctcgtgtgaaaatttgcgactttggttactcaa

SEQ ID NO: 58668 - DNA, 103 bp, Zea mays
ccaccacacccaagtactccaaggcccgttatgatgagattgtgaaggaagtctcttcctacctgaagatggttgtgatagagtgctgctggccttatccctc

SEQ ID NO: 58669 - DNA, 105 bp, Zea mays
aagacattgactggcaagaccatcaccttggaggtggagagctctgacaccattgacaatgtgaaggccaagatccaggacaaggagggcattcccccagaccag

SEQ ID NO: 58670 - DNA, 100 bp, Zea mays
gaagggaatatgcttcttcactgactttcttgtcgttcgggagaaccaacaaacatttgatcttgaaggggacagtggaagcccataatcttaacaggac

SEQ ID NO: 58671 - DNA, 87 bp, Zea mays
gcatacaagtacattgaagatattcttctcaaggtggctgctcaggtacctgacagcggccgtgcgtcacatatatggcaaggtgga

SEQ ID NO: 58672 - DNA, 97 bp, Zea mays
atctgctccaagtgcaagggcaagggctcgaagtctggtgcctcaatgaggtgccctggttgccagggctcaggcatgaaagtcactattcgtcagc

SEQ ID NO: 58673 - DNA, 94 bp, Zea mays
atttacgttgtgtttgaacttatggagtctgatttgcaccaagttataaaggctaatgatgacttgaccccagagcattatcagttcttcttgt

SEQ ID NO: 58674 - DNA, 106 bp, Zea mays
agaagaagccgatcatcttctcgatggcgcgtctcgaccgcgtgaagaacatgacaggcctggtcgagatgtacggcaagaacgcgcgcctgagggagctggcgaa

SEQ ID NO: 58675 - DNA, 95 bp, Zea mays
gattgcaagatttagctcaacttcagttaccggattgaataacaacgaataccagataaccaggggaaaggagctcaccgtttagcaggaattag

SEQ ID NO: 58676 - DNA, 98 bp, Zea mays
ggctcctgctagtgctagctcgtccagatgaacgcgcgcgtcggctactacaagcagtactgccagcagctccgcgtcgacccagggcccaacctcac

SEQ ID NO: 58677 - DNA, 324 bp, Zea mays
caaaccctagccgcctcctgcaagtttcagagctcaggaatctgcgccatggcgagtgagacggagaccttcgcatttcaggctgagatcaaccagctgctctcactcatcatcaacaccttctactccaacaaggagatcttcctccgcgagcttatctccaactcttccgatgcgctggacaagatcaggttcgagagtctcactgacaagagcaagctcgatgcgcagcctgagcttttcatccaccttgtcccagacaaggccacgaacacgctctccatcatcgacagcggcatcggcatgaccaagtccgaccttgtc

SEQ ID NO: 58678 - DNA, 318 bp, Zea mays
agggaatgggtccatccgtccgcagactttatgttcagggcaaggaagtcaatggcgctggcatcaactctagctttgctgtgcaccaggatgttgatggaagggcactgatgttgctttagcatggtcagttgcacttggttcccccttcacgtttgctactactttggaacaggagtacaagagtgatatctttggagagcgaggcatcttgctgggtgctgtccatggtatcgtggaggctctgtttaggaggtacacagaacaaggaatggatgacaatcggcctacaaaaacactgtcgagggcatactggga

SEQ ID NO: 58679 - DNA, 306 bp, Zea mays
cgacgtgcgcgtctcctccgctcccgtcgtccggaaagatggcgtccacattgttggataccctcgcatgggccccaagagggagctcaagtttgcacttgagtctttctgggatgggaagcgcagcgctgaggatctggagaaggttgctagcgacctcagggccagtatctggaagcagatggctgatgctgggatcaagtacatccccagcaacactttctcgtactatgaccaagtccttgacaccactgccatgctcggcgctgtccccgaacgttactcatggactggaggagagatgga

SEQ ID NO: 58680 - DNA, 307 bp, Zea mays
ctcgagccgcagctatatctgaaggatggcttgatgcttcttatggtaaatcagctgcccctgatgaagagatacaaagtacaagcgttgtaaaggtgaagcgttttaaagaagaatgtggccacataattcatgagtattttctctcagatgatgtcccagaacttattcgaagccttgaagagcttctgctccagaattcaatcccattttcctcaagaagcttgtgacgcttgctatggatagaaagagcagagagaaggagatggcctcagtactcctttcttcattgagattagaatgtttt

SEQ ID NO: 58681 - DNA, 305 bp, Zea mays
gcgcctccatttcggcctctgtcccttgcaagttcaatctcactccaaccatgggtaaagagaagtcccacatcaacattgtggttattggccacgttgactctggcaagtcgaccaccacaggacacctgatctacaagcttggaggcattgacaagcgtgtgatcgagaggtttgagaaggaggctgctgaaatgaacaagcggtccttcaagtacgcgtgggtgctcgacaagctcaaggctgagcgtgagagaggtatcaccattgatatcgctctgtggaagtttgagaccaccaagtac

SEQ ID NO: 58682 - DNA, 294 bp, Zea mays
atcgcctgggccccggggaaacccctcgcgctcgaggccctgtgagcagccgcagccatggcacagctgcccgtcgtgaagaaagacgacgatctcgacgaggaagagtactactcgccattcctgggcatagagaagggcgccgtgctgcaggaggcccgagtcttccatgaccctcagctcgacgcgcggcgatgctgccaggttatcaccaagctcatgtacctgctcaaccagggtgacacctttaccaaggttgaggctacagaggtcttctttgcaacgaccaagctg

SEQ ID NO: 58683 - DNA, 306 bp, Zea mays
accaaaaggctttcagtgtcataaattcgttggagatttggaagttttgaggaacagagagcatgtccttgagatgttgaagcttaagatcaaggaggaagctcttagaacctatctcttttcatactcgtcttcgtacgagtccttaagcctttaccagctcactaccatgtttgatctcagcgagcagcatgcccacagcattgttagcaagatgatgatgcatgaagagcttcatgctagctgggaccagccaacaaagtgcatcgtattccatagtgtggaccaactaggcttcaggggcta

SEQ ID NO: 58684 - DNA, 306 bp, Zea mays
catgggatgatgttggaggtcttgattcgttgaggaaagagttcaccgctacataagatgtattaagagccctgaagattgtgatgtatttggagtgagaatgcaagatggcttcctgctgtttggacctccgggttgtggcaaaacacatatagcaaaagcagtggcacatgaggcaggggctaattttattcatattaaggggcctgatatattgaacaagtatgttggcgagagtgaatcagaaattaggaaaatattcaaccgagcacgtattaatgccccatgcatagtattttttgatga

SEQ ID NO: 58685 - DNA, 306 bp, Zea mays
ctagtcctctgttacttctcccgccgccgccaatcccctccgttctccgccaccgccaatcccctcccgtcctccgccacctctgctgagagcgagaagagatggccggcaagggtgatgggccggcaatcggcatcgatctcggcacgacctactcttgcgtcggtgtgtggcagcacgaccgtgtcgagatcatcgccaacgaccagggtaaccgcaccacaccctcgtacgtcgccttcaccgactccgagcgcctcatcggagatgcggccaagatccaggtcgccatgaaccccatcaaca

SEQ ID NO: 58686 - DNA, 306 bp, Zea mays
tatcaaaggaagttgttagagtctgggaagatctcaaagggagatattgataggttaaacaaaaaggtcagcactatacttaatgaggaatttcagaacagcaaagactatgttcccaacaagagggactggctttcagcttactggactgggttcaagtcaccagagcagatttcgcgtatccgaaacaccggtgtcaagccagagattctaaaacgtgttggagaagccatgactactctgccagaaaatttcaagcctcacagggctgtgaagaagatttttgatctacggcgtcagatgatc

SEQ ID NO: 58687 - DNA, 191 bp, Zea mays
gtcgtaggctcgtagcgtcggcaaagttgacatgccgctggtgagcgaggcgtgtaccatgaataactgttagactgattgtgtgagtgtgtgtgggctggtaccattgttaggctgccggttcattagggttagagttgagtctatatattgtaaccccttctctatgcaatacaatgttccacttcact

SEQ ID NO: 58688 - DNA, 291 bp, Zea mays
ggatgaatcaatgctattatgatgcatctctatagattagacaactacagagttggtgctgttttaatgcagtccgggcacccaatagcttatttgagcaaggctttgggaactaaatcttaagggttgttcacctatgagaaagaatataagacgattatggttgctgtagatcattggcgccattatttgcagttgaaggagtttcacatttacacggatcatcgcagcttggttcaattgtgatgaacaatgtttgcacactccatggcaacagaaaatgtttactcg

SEQ ID NO: 58689 - DNA, 311 bp, Zea mays
  unsure (1)..(311): unsure at all n locations
caggcgcctccacttcggcctctgtcccttgcaagttcaatctcactccaaccatgggtcaaaagnagtcccacatcaacattgtggttattggccacgttgactctggcaagtcgaccaccacaggacacctgatctacaagcttggaggcattgacaagcgtgtgatcgagaggtttgagaaggaggctgctgaaatgaacaagcggtccttcaagtacgcgtgggtgctcgacaagctcaaggctgagcgtgagagaagtatcaccattggtatcgctctgtggaagtttgagaccaccaatactact

SEQ ID NO: 58690 - DNA, 294 bp, Zea mays
gtggttttgatgcaaagggttttgcggtttccaataaggcaagagtttggaggccattgttgaacaagttcgtgatggcagtactgttcgtgtgtatttactccctaatttccagtttgtgcagatatatgttgctggagtacaggctccatcaatgggatgacgtccatcggtacctactgtaattgctgagactgatgataatgctaatatcgcgaacgctgaagatcctgagggaacacctgcgcaactgactacagcacaaaggctagttgcatctgcagcttctgctga

SEQ ID NO: 58691 - DNA, 296 bp, Zea mays
cattcccccagaccagcagcggctcatctttgctggaaagcagcttgaggacgggcgcacgcttgccgactacaacatccagaaggagagcaccctccacttggtgctgcgcctcaggggaggcatgcagatcttcgtgaagaccctgaccggcaagactatcaccctcgaggtggagtcttcagacaccatcgacaatgtcaaggccaagatccaggacaaggagggcatcccaccggaccagcagcgtctgatcttcgctggcaagcagctggaggatggccgcacccttgcgg

SEQ ID NO: 58692 - DNA, 292 bp, Zea mays
tagtgatctccttgaagcatttcagcttttacctagagatctttctgttgttgaaggcaagagaggctttagggtgatggcgcaaactagcctgcctcctggttttcgtttccacccaaccgatgttgagctcgtttcctattacttgaagaggaagtttctgggaaagaaacatatcgtggatgctatagcagaggttgatctgtacaagtttcctccctgggatctatgtgacaagtcctctcttcgaagtaaagatcttgaatggttctttttttgtcctcgtgacaag

SEQ ID NO: 58693 - DNA, 266 bp, Zea mays
cattgtcaagaggctcgaggtgattatgatgcagaagaggttcagccagctcggcgggctccagctggataaggaggtccgctctctgatcaaccatttctcagagatgtcccagagaccagtcagagacaagttctctaggctttcgcagatgtcgaccattttgaacttcgagcgggtatcggagatattggatttctggggtgacaagctggccatctgatgtggctgttgacactgcagaggtgcggagagtgttaggactt

SEQ ID NO: 58694 - DNA, 227 bp, Zea mays
caccaggagcatgtgttgcctatgatccctagtggtggggctttcaaggatatgatcctggatggtgatggcaggactgtgtactgatctaaaatccagcaagcaactgatctaaaatccagcaagcaccgcctccctgctagtacaagggtgatatgtttttatctgtgtgatgttctcctgtattctatctttttttgtaggccgtcagctatctgttatggtaa

SEQ ID NO: 58695 - DNA, 223 bp, Zea mays
cgcagagctctgtgctcccggcctctgtcttctgccgtcccggccgtttaatttatagtctctactgtgtgttcgtcccatgtgtttagcagcagcagcaggtgtattgtgcgggtatgtaatggtattgcaactatattgggtgtaaaaccataatatatgtggaaaaaatgcaaggaaaaaaaataaaaaaaaaaaaaaaaaaaaaaaaaaaggggggggg

SEQ ID NO: 58696 - DNA, 295 bp, Zea mays
tgattgtgaaagtagtttttttccacttgatttacatcttttctagtctgttctcacctattagcacgttttctatctacagggaaggatgtactagccaaagcaaagacaggaactggaaaaactgtagctttcttgctaccagcaattgaagttgtttcgaaattgccacctgttgatcgtgatctaaagaaacctcccatcagtgttgtagtagtgtgccctacacgtgagcttgctgatcaggctgctgcagaagctaacaagcttcttaaatttcatccatcaattggag

SEQ ID NO: 58697 - DNA, 303 bp, Zea mays
ggggaggccacgcgccgccatgtacgggctcatccccgaagactttggcgcctacgcggcgcccctgggtcgccgagctcgccgcgccccttgactgcctcaaggcgctccacctgcgtcgcatgaccgtcaccgacgaggacatgcccgtgctcgtccacgcgcgcggccacatgctacaggcgctcaagctcgacaagtgctccggcttctcaacagatgccctccgcctcgtcgcgcgctcctgcaggtctctgagaaccttgttcctggaagaatgtataattgaggatgaagggagtg

SEQ ID NO: 58698 - DNA, 295 bp, Zea mays
agcttaccccggagactgccaaggttaaggctgctggcaaggcatggtacaagaccatggtctcggacagcgactacaccgagtttgagaacttctcaaagtggctcggcgtgactcagtgagcggcaagggtagttaagttttgagtagctcagcttatgttgagaggaaagaggatccatcaaatctgttttatcctgcatcatcataacaagttgctacaagtcttgcatgttcgtgttgtttgtgcatttccgcgagaacatagtatttttatattcgaaccagttgtctg

SEQ ID NO: 58699 - DNA, 288 bp, Zea mays
  unsure (1)..(288): unsure at all n locations
gtaaataaggagtttgaattggagaagagatacgagagaaaagcattctgcgaatgcagacaatgctctctgacatgctattcaaggaatcatctcccttgagtatcgtatccgggagtccaaatatcatggacctcgttaagtgtgatggtgctgctcttttgtatggggacaaagtatggcggcttcaaacggctccaactgagtctcagatacgtgatattgccttctggctttcagaagttcatggggattcactggcttgagcactgatangctccaggatgc

SEQ ID NO: 58700 - DNA, 150 bp, Zea mays
cgtatccctgaacgtgttgtgcatgcacggggagccagtgccaagggtttctttgaggtcactcatgatgtctctcaccttacatgtgctgattttctccgtgctcctggggtccagacacctgttattgtccgtttctctacagttgtg

SEQ ID NO: 58701 - DNA, 146 bp, Zea mays
gccaataacagctaatcagcttaaggcggctattcgaagagctacagtggcacggaagttcataccagtatacatgggaagtgcattcaaaaataatggtgttcaaccacttcttgatggcgtgctggattatctaccgtgcctgt

SEQ ID NO: 58702 - DNA, 154 bp, Zea mays
cacggccactgatcttgttcttacagtaacacaaatgctaaggaaacatggtgttgttggcaaatttgttgaattctatggtgaaggtatgggtaagctgtctttagctgacagggccacaattgcgaacatgtcaccagaatatggagctacc

SEQ ID NO: 58703 - DNA, 223 bp, Zea mays
caataatccgtgctattccaagcaatgcatcagacaatgtctattgcaccctgctcgcacatagtgccattcatggtgcaatggcgggatacagctttacagtcggaatggttaatggcaggcatgcatatataccatttcatagggtaacatctacaaggaacaaggtgaggatacctgacaggatgtgggcgaggctgctgtcttcaaccaaccaaccgag

SEQ ID NO: 58704 - DNA, 195 bp, Zea mays
cacgatcagcgacgagctcggaataggccgagctcgagcgctcgagccgctcgagccgcaccgaccgggagacggggatcttgcctggaccaccagcactgagtcgacggagcatgccttcgcctcctacggcgagatcctcgactccaaggtcatcaccgaccgggagacggggaggtcccgcggcttcagctt

SEQ ID NO: 58705 - DNA, 225 bp, Zea mays
gaccatttggagtatcgctgttgattgctgggtatgatgacaatggcccacagttgtatcaggttgatccctcaggatcatacttctcctggaaggcatcagccatgggaaaaaatgtgtcaaatgcaaagacatttcttgaaaagagatacacagaggatatggagcttgatgatgccatccacagtgacattttgactttgaaagagggttataaggggcaat

SEQ ID NO: 58706 - DNA, 177 bp, Zea mays
ctctgtccagagtgatattaagctgtggcccttcaaggtcattcctgggcccggtgagaagccaatgatagttgttcagcacaagggggaggagaaacagtttgcagccgaagagatctcctccatggttctcatcaagatgcgtgacatcgctgcatcttaccttggcagaacgat

SEQ ID NO: 58707 - DNA, 155 bp, Zea mays
aggaacttgactaccttgttggagctgttgccaacccaaagaagccatttgccgccattgttggtggatccaaggtctcaactaagattggtgtcattgagtcgttgctggcgaaggtcgatatcctcatccttggtggtggtatgatctacaca

SEQ ID NO: 58708 - DNA, 177 bp, Zea mays
ggccaaagagttctacccgctgtttgggcttggggccaatgtggccctcatcttctctgggcgcacggtgaaatatttctcaaacatgaggaagaatttgggtcctggagtggatggttgggcaatttcgttgaaggccatgatgagcatagtggttgtactgggtcttgtcatcac

SEQ ID NO: 58709 - DNA, 299 bp, Zea mays
caactcgccgtctgccttctgcgcctccatttcggcctctgtcccttgcaagttcaatctcacctccaaccatgggtaaagagaagtcccacatcaacattgtggttattggccatgtcgactctggcaagtcgaccaccacaggacaccttatctacaagcttggaggcattgacaagcgtgtgatcgagaggttcgagaaggaggctgctgaaatgaacaagcggtccttcaagtacgcgtgggtgctcgacaagctcaaggctgagcgtgagagaggtatcaccattgatatcgct

SEQ ID NO: 58710 - DNA, 133 bp, Zea mays
ggcacatcattcttgagaacaatgacagtaaacctgtcacaaatagcagggacacacaggaggtgaagctggaacagggcctccagatgctaacaatcttcaagaaccatgaggctgagacaacgatcgtgga

SEQ ID NO: 58711 - DNA, 163 bp, Zea mays
accagttaaggttcctgagcctactgttgatgaaacaatacagatcttaagagggctccgtgagagatatgaactccatcacaaactgcgatacacagatgatgctttaattgctgctgcacagctgtcttatcagtatatcagtgatcgtttcctgcctgac

SEQ ID NO: 58712 - DNA, 134 bp, Zea mays
cttcaatttatgatgctttgatcaaggaaaaggtggcagtgggagatgttatatacattgaagcaaatagtggagcagtgaaaagagttggtagatgtgattcttttgctacagaatatgatcttgaagctgaa

SEQ ID NO: 58713 - DNA, 164 bp, Zea mays
tgaatgtggctgctccatcattagctgttcgtttgcggatgatagtaatgtttattactgtgtgggaactgcatatgttatacctgaagaaaatgaaccgacgaagggccggattcttgtatttgcagttgaagatggaagcttgcaattgatcgtggagaaag

SEQ ID NO: 58714 - DNA, 272 bp, Zea mays
caccgagctagcagccaagatggcgaccaaacacctggctctttgcctccttgttctctttagcataggcatgggcatggccaccgctgctgcaaaccgcaaactgggttatggccccgggggatgtggtggcggtggtggtagcggtggcggtggacgcggtggttacggtggaccaggctatgggtccggatcatggtatggtgacggcggtggcagcggaagtgctgctggaaggtatggacatggtggtcgcagcagcagcggaggtg

SEQ ID NO: 58715 - DNA, 232 bp, Zea mays
ctggctttcaaggtgatattaaggctctgcagaagaacctagctgccagagaattgctgtaccaacaccagcataataaaaggatgagctgccccgccatggcacagctcctctccaataccctgtactacaggcgattcttcccatattacgccttcactgtgctcggtgggcttgacagcgaggggaaaggatgcgttttcacctatgatgcagtaggttcctatgagag

SEQ ID NO: 58716 - DNA, 182 bp, Zea mays
gcagccgatagaagaggtgtgatacctgcttcaggcttttctctcagtgcactgcagatttgggaagtaatacgtgaaaataaggacctcaaccttcctgctcacgaggtcatggttgctactgttcgatgtgaagagattgcaaatgaaaacctcaaacagttttcgtctgatgagggttg

SEQ ID NO: 58717 - DNA, 281 bp, Zea mays
tatgcaatggttttggctgcatcgaatgatgaccacacgaaggttgagttggtggagccacccgaatctgctgccgtgggcgatcgtgttacctttgctgggtactcgggggagcctgaggcttccctcagtggcaagagcaagacgtgggagatgctggccgccgagctgcacagtaacggtgagctcgtggcgtgctacaaagatgtgcccttcacaacctcggctggaatctgcaaggtcaagacaatagcaaacggagagattcgctaggcacatct

SEQ ID NO: 58718 - DNA, 227 bp, Zea mays
aagctatcaagagactcgtagaggctgaggcacttaagatggaaattattccaaaccccaaggaagttgatggtgtgaaagtccttcaactcgaaaccgcagctggtgcagctattcggttcttcgacaaagcgattggaattaatgttccccgctcaaggtttctcccagtgaaggctacatctgatctgttgcttgtgcagtctgatctttacaccttggttgat

SEQ ID NO: 58719 - DNA, 145 bp, Zea mays
ctgtcccttgcaagttcaatctcacctccaaccatgggtaaaccgaagtcccacatcaacattgtggttattggctatgtcgactctggcaagtcgaccaccacaggacaccttatctacaagcttggaggcattgacaagcgtg

SEQ ID NO: 58720 - DNA, 284 bp, Zea mays
gcctcaatgaggtgccctggttgccagggctcaggcatgaaagtcactattcgtcagctgggcccttccatgatacagcagatgcagcagccttgcaatgagtgcaaggggactggagagagcatcaatgagaaggaccgctgtccagggtgcaagggtgagaaggtcattcaagagaagaaggttcttgaggttcatgttgagaaggggatgcaacacaaccagaagatcaccttccctggtgaagctgatgaagcgcctgatactgtcactggagacattgt

SEQ ID NO: 58721 - DNA, 242 bp, Zea mays
ctcgagccgcccattcatggtcctaatcattgcaattctaaatgatggtaccataatgactatatccaaggatcgtgtaaagccatccccattacctgacagctggaagttggctgaaattttcacaactggagttgtccttggtggatatcaggcaatgatgactgtcatcttcttttgggctgcatacaagacaaactttttcccaaaaatatttcatgtggaaagccttgagaagacag

SEQ ID NO: 58722 - DNA, 240 bp, Zea mays
ctcatatggaataatgagtggtgctctgactgtgggtgatttggtcatggttaatggacttttattccagctttcattacctctgaacttccttgggagtgtgtatcgagaatctagacaaagcctcattgacatgaagtcgatgtttcagttgcttgaggaaaaacctgcaataaaggatgagccacacgcacaatctatggaggtgcattgaatcgagaatgtcatttgggtgtgtac

SEQ ID NO: 58723 - DNA, 288 bp, Zea mays
gaaggagaaactctcccagttttgccatgttccggcagcaaatattatcactttgtatgatgtttccaatatctggcgcattcctttgttgctacatgaacaaaaggctcatgaggctattcttaaagttctgaatctggaaaggatggacagcatcgctcgatagccaaagttagacgaatggattgcaagagctactatatctgatacccttcatgacactgtgaggattgctatggttgggcagtacactggcttatcagattcatacctctctgtgttgaaagc

SEQ ID NO: 58724 - DNA, 157 bp, Zea mays
ccagcatcttggtcctgctgcaggagtgtttcggcgaggggctcataaccatcaaccagatgaccaaaggctttgcccgtgtcaaggaaggccttgatgatctgatcctcgacatcccaaatgcccaggagaagtttggagagtatgtggagctggc

SEQ ID NO: 58725 - DNA, 256 bp, Zea mays
cagtctcgatctgcctgggagcagttctgttgctgatgcccttgcccgcttctttaagccggagatattggaaggtgcaaacaaatatagttgtgaaagatgtaaaacgctcacctcagcgcagaagcaaatgtttatgctgagggcacctaaggtgcttgtcatacaactcaagaggtttgaggggataaatggtggaaagatcaacaggaatatagaattcaaggagacacttggtatttctgattgcatgtac

SEQ ID NO: 58726 - DNA, 131 bp, Zea mays
gcacggaggcgaaggatgagcagcagcagcaggcggcgccgatgagcggcatcccactcagtgcttgcaaccatggctaggggattgaagaagcacttgaagaggctcaatgcgcccaagcattggatgct

SEQ ID NO: 58727 - DNA, 182 bp, Zea mays
ctgctgtaagaagggttgaagacatgtttgaacaagtgaaaactaagcttcctggagcacccaagtttcttttgtgtgttctagcggaaagaaagaattccgatatttatgggccttggaagaagaaatgccttgctgaatttgggatcgttacacagtgtgtcgcaccaactagtgtcatg

SEQ ID NO: 58728 - DNA, 258 bp, Zea mays
gggagttccggtctggctcctcccgtgtgctcatcaccaccgacctgcttgctcgtggtattgatgttcagcaggtgtccctggtcatcaactatgatctccccacccagccagagaattacctgcatcgcattggtcgtagtggtcgtttcggtaggaagggtgttgccatcaactttgtgacccgcgacgacgagcggatgctgttcgacatccagaagttctacaacgtgttgattgaggagctcctgccaacgt

SEQ ID NO: 58729 - DNA, 295 bp, Zea mays
ctggcttctcctccccctcttaccaagtcctcctcgggttagggttccttagggttttgtggaggggcgatggcggcggctgatgtggagtaccgttgcttcgtcggcgggcttgcctgggccaccagcaacgagtcgctggagaatgccttcgcctcctacggcgagatcctcgactccaaggtcatcaccgaccgggagacggggaggtcccgcggcttcggcttcgttaccttctcctccgagaactccatgctcgacgctatcgagaacatgacggcaaggagctcgacgg

SEQ ID NO: 58730 - DNA, 292 bp, Zea mays
cacggggcgaacatccgaactccgaaaagcccccagcggcctcccctccgccccgcagccatggccgccaccggcgtggtcgccgagccgaagaccaagtacgatcgccagctcaggatatggggtgatcaaggccaggctgcactggagaaggctagcatatgcttgcttaactgtggtcctaccggaaccgaagcattgaagaatctcgtgcttggaggcataggaagtgtgactgttgttgatggctccaaagttgaagcatctgacctgggaacaattttctgttgga

SEQ ID NO: 58731 - DNA, 296 bp, Zea mays
aagcgagcgagggacccggggcggaagaagagagagaagacgtctctctcctctcggcgtccccgttccccaacctctcgtctgctgcctgcctgcctgcctgcctgcaaaaaggagtttgtcatggcgtctaagcgcatcctcaaggagctgaaggacctgcagaaggacccccccacatcatgcagtgcaggtcctgctggtgaggacatgtttcattggcaagcaacaattatgggaccacctgacagtccctatgctggtggtgtttttttagtgacattcatttcccgcca

SEQ ID NO: 58732 - DNA, 292 bp, Zea mays
tgcagaggagcagggccaagatagtacttgttgcaattggatctggaggatatggcaaggcaaattgctacagccaatggccctactggctataatagggattacctgttctcaatggagaaggcattagccagcattagccacgaagatgattcgatcatagagcttgcaaacgaggtgaggaaggtgctcaacagaacaaaggagaccaagatcactggtgccaatgcttccatgaaatcacatgcccctcttgtgcacctgtccgcgcttccagaggcaccgttgtgga

SEQ ID NO: 58733 - DNA, 293 bp, Zea mays
gtagaacttagagctgaaactgattctgatgaagttatgctcaaattatgctgcaaccacaaacagagcaaagtgagcccaccagcccagatcctgaaccacctgagcctgaaagatgcaacattcattccttctgcaagaccttgactgcttcagatacaagtacccatggtggattctctgtcctcaggaggcatgctgaagaatgtttgccccaactggacatgactcagaatccaccgtggcaagaactagtggctaaagatctccatggaaagaatggcatttcgtca

SEQ ID NO: 58734 - DNA, 293 bp, Zea mays
  unsure (1)..(293): unsure at all n locations
ggagcacagatctggcgcgangccctggtggcgccggacatctaccaccccgacggcaccgcggccgacgagcacggacaccaccacatgagcgtgttgcagcagcacgtcgccttcttcgaccgcgacgacaacggcatcatctacccttgggagacgtagtccggatgccgtgcgcttgggttcaacatgatcctgtctctcttgatcgctcttgtcgtgaacgggaccatgagctatgccacgctgcctgggtggctgccgtcccctctgttccgatctacgtccacaac

SEQ ID NO: 58735 - DNA, 290 bp, Zea mays
  unsure (1)..(290): unsure at all n locations
attaagaatgatgataaactgattcaagctgagggagttgaatctctctctgaagaagagctccggcaagcctgccgggaacgtggtcatctaggcctgctgtcaactgaagagatgtgccagcagctccgagactggttggacctatcacttaatcttgctgtgccatcttcacttctcatactttcaagagcctttactgtgtctgggagaatgaagccagaggaggctgttgtagcaacactatcttcnttaccagacgaagttgtggatacattgggacagtattg

SEQ ID NO: 58736 - DNA, 294 bp, Zea mays
  unsure (1)..(294): unsure at all n locations
gtcagagcaaccctatctcttccccactccgctcctcgctcacgctctcaccacatccttctcctccgcgccgccacagccgggcgcgcctctcgatcgagatccaggagatatgcctcgttatgatgatcgccatgggaatacacgcttgtaatgaagaagattggcccctcgcacccgttcccgcgacctagaatatcttttcagcaaatatggaagaatacgtgaagtggagttgaaggtttannncgcattcattgaattcagtgacccccgtgatgctgatgatgcgca

SEQ ID NO: 58737 - DNA, 292 bp, Zea mays
ctgtcccttgcaagttcaatctcacctccaccatgggtaaagagaagtcccacatcaacattgtggttattggccatgtcgactctggcaagtcgaccaccacaggacaccttatctacaagcttggaggcattgacaagcgtgtgatcgagaggttcgagaaggtgactgctgaaatgaacaagcggtccttcaagtacgcgtgggtgctcgacaagctcaaggctgagcgtgagagaggtatcaccattgatatcgctctgtggaagtttgagccaccaagtactactgc

SEQ ID NO: 58738 - DNA, 289 bp, Zea mays
gatctacaagcttggaggcattgacaagcgttaatagagaggtttgagaaggaggctgctgagatgaacaagcggtccttcaagtatgcttgggtgatcgacaagctcaaggctgagcgtgagaggggtatcaccattgatattgctctgtggaagtttgagaccaccaagtattactgcaccgtcattgatgcccctggacaccgtgacttcatcaagaacatgatcactggtacctcccaggctgactgtgctgtccttatcattgactcaccactggtggttttga

SEQ ID NO: 58739 - DNA, 287 bp, Zea mays
caccatgttattagtctctggtcttacacaatactacatacttttttgggttctcggcttccactgattcaaggaagctcctttgtatatttggctccagcgttggtaattgcgaactccgaggagttcagaaatcttagtgacaataaattcaagcatctaatgagggaactacagggggctatacttgttggttcagtgttccagataatattaggatacactggtcttatgtcactgtttctgaggttaataaatccagtagtggtggaccaactattgctgca

SEQ ID NO: 58740 - DNA, 288 bp, Zea mays
catgaggaggatcatgggatcctttggaaacatcaagactggagaactggtttagcagaagtaaggcggtcaaggaggctcactgtttcatttatctgtacagttgcaaactatgagtatggtttttactggcacttctatcaggatgggaaaatagaggcagatctaaagcttactggaattctcagtttaggggccttgatgcctggggaatcgaggaaatatggcacaactattgcccctggtctgtatgcaccagttcatcagcattctttgttgcccgtatgg

SEQ ID NO: 58741 - DNA, 288 bp, Zea mays
cattgactggcaagaccatcaccttggaggtggagagctctgacaccattgacaatgtgaaggccaagatccaggacaaggagggcattcccccagaccagcagcgtctgatctttgcgggcaagcagctggaggatggccgcactctcgcggactacaacatccagaaggagagcacccttcaccttgttctccgcctcagaggtggtatgcagatctttgtaaagaccctgactggaaaaaccataaccctggaggttgagagctcggaaccatcgacaatgtgaa

SEQ ID NO: 58742 - DNA, 289 bp, Zea mays
ctggctttcaaggtgatattaaggctctgcagaagaacctagctgccagagaattgctgtaccaacaccagcataataaaaggatgagctgccccgccatggcacagctcctctccaataccctgtactacaagcgattcttcccatattacgccttcaatgagctcggtgggcttgacagcgaggggaaaggatgcgttttcacctatgatgcagtaggttcctatgagagaaccggttacagtgctcagggaacgggatctactttgatcagccagtcctggacaat

SEQ ID NO: 58743 - DNA, 286 bp, Zea mays
tgcaggacctgcttctgcttgacgtcactcctctctctctgggtctggagactgccggaggagtgatgaccgtccttatcccgaggaacaccaccatccccaccaagaaggagcaggtgttctccacctactcggacaaccagcctggtgtgttgatccaggtgtacgagggcgagaggacccggacccgcgacaacaacctgcttgggaagttcgagctctccggcatcccaccggctccccgtggtgtcccccagatcacggtctgctcgacatcgacgccaac

SEQ ID NO: 58744 - DNA, 282 bp, Zea mays
  unsure (1)..(282): unsure at all n locations
gggacactgcaaagcttgagattcagataagttggacaaagagaagaaaatcctctccattcgggataggggtattggtatgaccaaggaagatcttattaagaaccttggaacgattgctaaatctggcacttcaggaacaggagctgctcgagtctactgtcgaagctgatacgagaaggcaggaaagagctaaaaagatggaagaaaagaaagtgtatctgcaactatacgaagcaatggaggcgttgtncaagatcaatctggagccaacaagatcat

SEQ ID NO: 58745 - DNA, 286 bp, Zea mays
ctgcagcgccgccagacactccgtagtctgtaccccaagcaccggcgcggcggcggcggctaccatggcagtcgggaagaacaagaggatctccaagggaaagaagggtggtaagaaaaagaccgtcgatcccttctctaagaaggactggagtgacatcaaggccccatcggtcttcagtgtgcgcaacattgggaagactctcgtgtccaggacacagggtaccaggattgcctctgatggtctgaagcacagagtctttgaggttttctagctgatcttcagg

SEQ ID NO: 58746 - DNA, 283 bp, Zea mays
atgttgcttgccccagggatgataagaagcgcattagcacagagcaacactgtgttgcaagggatattgtcaatttaattgcttgtgaaggtgcggaaaggatagagagacatgagccttttggaaagtggagggcaagacttgtaatggctggttttagaccagacccgttaagtccagtggtgaacagaaccatcaaaacactgcttgacagttaccacagccattacaggcttgaggagagagatggcatcctttatcttggctgaagaacagaaagctg

SEQ ID NO: 58747 - DNA, 282 bp, Zea mays
gagaacaatgagaacaagcctgtcaaaacagccgcgacactcaggagatacgcctcgaacaaggccttcagatgctcaagatattcaaggatcatgtcagcaagacttccatcctcgacgactttgccttctacgagagccgccagaagttgatgcaggataagaggtcgaaacagcagcagctccaaaagcaggtctgggacactaggacccccgtttctgtcaccggtgagcgaccgcaggaacctgctaatgggaagcccaatcgtccgtaccagatgg

SEQ ID NO: 58748 - DNA, 282 bp, Zea mays
tcgacgtctcgtctcgtctcgtctccctgcccgcagccccttggcttcgttccatccggcttctcggcggcggcggagaggagggggatggcgcaccggctgctgcgggacgcgcaggcggacgggtgggagcggtcggacttccccatcatctgcgagtcatgcctcggcgacaacccctacgtccggatgttaagagctgaatatgacaaagaatgcaaaatttgtgcacgtccttttactgtattccggtggcgtcctgggcggatgcaaggtacaaga

SEQ ID NO: 58749 - DNA, 283 bp, Zea mays
ctccgccgccgaatccgagacttgatctcgggttcaccgcagcgcacagagcacccctgactcacggcccgatccgcgctctcctctccgacgcttcagtcatggcaggaatggcacccgagggttctcagtttgatgctaagcactatgattctaaaatgcaggagctgctgagcactggtgagactgaggagttcttcacttcatatgatgaagtttttgaaagttttgatgacatgggccttcaagagaatcttctgagaggcattatgcatatggtttt

SEQ ID NO: 58750 - DNA, 278 bp, Zea mays
ggcgggaggaacctgttcccgtgcttccggaggcgttcaagggggtcaagcagatcggagttattggatggggctcgcagggtcctgcccaagcccagaacctgagagattcactggctgaagccaagtcagatattgttgtgaagattggtctccggaaaggatccaaatcttttgaggaagcacgtgccgctggattcaccgaagagagcggaaccttgggcgatatttgggaaaacgtctccggcagcgatcttgtgttgtgctgatatcggatg

SEQ ID NO: 58751 - DNA, 280 bp, Zea mays
agacaatatttgatattgatgtggaaactgcatttgaggagaagccatggaaattccctggtgctgatatttcagacttttttaactttggccttgatgaagagaagtggaaagatttttgcaagcagctggaccaacttcgactagaatccacaatgcaatctaggatacgggtgtacgaaagtggccgctctgaacaggattatgacccagatttgccacctgagcttgctgctgtgactggtcatccagacatctctgctgcagtcgcaataaaatg

SEQ ID NO: 58752 - DNA, 283 bp, Zea mays
ccatttccaagctcctcctcgcgattccaatccacgcacgcctcctccgcttccgcctcgctcaggcttatagtcagtgatggaacacaaggaggcgggctgccagcagccggagggcccaatcctatgcatcaataactgcggcttcttcggcagtgctgcgacgatgaacatgtgctccaagtgccacaaggagatgataacgaagcaggagcaggcccagctggctgcctcctccatcgatagcattgtcaatggcggtgacgcgggaaaggacctgtaa

SEQ ID NO: 58753 - DNA, 278 bp, Zea mays
cttggaagttgaacttggactggaccttaaacctcttcctcttccagacaagactagagaagatatatttcttctcttcaaactctatgaacctgaaaaggaacagctacggtatgttggtaggctctttgtaaaggcttcaggaagaccacaggacattctgccgaagctaaagatgttggcaggtttttcacaagatgatgatattgaactttatgaggaaattaagttcgaacccaatgtgatgtgtgaatacattgatacaggcttctgttccg

SEQ ID NO: 58754 - DNA, 279 bp, Zea mays
cgctctggttggaaggtttggagaaactccccggctcgaggagatcgtgacattgagaggacgatgggagggcgcgcgctcctcctcctcctcctggtctcggcgttggtctttcagatccacgcctccgacccgctgctgtacgagccgttcgatgtggactttgaggggagatgggtcgtctccaagaaggatgaataccaaggtgtgtggaggcatgccaagagtgatggtcatgaggacctatggcctccttgttagtgaaaggcaaggaaatac

SEQ ID NO: 58755 - DNA, 278 bp, Zea mays
agccttccacccttcatccccagccgctcctcgagcacccccgtcccgcgccgcctccggctccggcgagatgtcacgcttcggtcgatccggcccgccgccgccgatccgcgacacgtactcactcctcgtcctcaacatcaccttccgcacaactgctgatgccctcttccctctcttcgacaagtacggcgagattgtcgacatctacatcccaagggaccgccggactggtgactcgcgcggattcgcgttcgtgagagtcaagtacgaggacg

SEQ ID NO: 58756 - DNA, 279 bp, Zea mays
tttcacccagcccttcattgagtcaggcctggttattttgcctccaataaaaaagcatataacaaattcttgggcattcttgcagccatttacattggggatgtggtgtgttacagggttgtcttttcttgttgtgggtgtggttatttggattcttgagcatcgaataaatgatgatttccgcggctcgccgcgacaacaaataataactattgtttggtaaggatctgaatcgcatcttttgcactcactatacacacatttattttcactttcaaa

SEQ ID NO: 58757 - DNA, 279 bp, Zea mays
tggcactgcaaaacattggtgcttcaaacagggatgatgccttctacaggtacaagatgcccagaatgattaccaagatagaaggtcgtggtaatggtatcaagacaaatattgtgaacatggttgacatagcaaaagcacttgccaggcctgcttcctatacaaccaaatactttggatgtgagcttggtgcacagtccaaatttgatgagaagacagggatttccttggttaatggggctcatgatactgcaaagctggctggctccttgaggtatt

SEQ ID NO: 58758 - DNA, 313 bp, Zea mays
cgtgctgcgaggagctggtgagcaggtgggcggcggagtcccttggctccgacggctcgtgcgagctggacgtctggccggagctgcagaacctgacgggagacatcatttctcgcaccgtgttcagcagcagctacagcgaagggagaaggatcttccagctacaggtcagcaagcttcgcttgtcatgaccaacattcggaagatcatgatccccggctacatgtacttgcctaccgcgaacaacaggaagatgcgcaggaacaacagggaggtggagtcaatcctgcgagagataatcgggaagaggatc

SEQ ID NO: 58759 - DNA, 312 bp, Zea mays
cgatcgagccagccaggaaaccaaaatccccatttgtatatacaatttgtgacaagttaccaacacccagaaggtcaaatgaggataagagttactacgatatgcaggaaatgggtagatggttccactaataccgaggaattagttgaaggttttgaccaggaaactgagctgttgtgttggcaagatacatctctttgaaaatggagatggaggaagagttcgatgcaacccggtggcttgatagatctctcatacgtctttgttcaagatttggggattaccggaaggatgaccctcttcatttagctg

SEQ ID NO: 58760 - DNA, 305 bp, Zea mays
cgtgctgcgaggagctggtgagcaggtgggcggcggagtcccttggctccgacggctcgtgcgagctggacgtctggccggagctgcagaacctgacgggagacatcatttctcgcaccgtgttcagcagcagcttcagcgaagggagaaggatcttccagctacaggcgagcaagcttcgcttgtcatgaccaacattcggaagatcatgatccccggctacatgtacttgcctaccgcgaacaacaggaagatgcgcaggaacaacagggaggtggagtcaatcctgcgagagataatcggga

SEQ ID NO: 58761 - DNA, 218 bp, Zea mays
gtgaaacattcgactgaagtgttttatgcaggctctctatggaaggtgagtgtccaggcattcaatgatgaggatcctcatgggcgacgcactcttggactttttctccaccggcgcaaggctgagttgttagatcccttgaggaaggctcacttgtacgtcgaccccgggaaaaggtcactgcgcgctatcagctcatctgtccatcaaagagggag

SEQ ID NO: 58762 - DNA, 123 bp, Zea mays
tggtcatggccaccgtcaagaagggaaagcccgacctcaggaagaaagtgatgcctgccgtcatcgtccgccagcgcaagccgtggcgtcgcaaggacggtgtctacatgtacttcgaagata

SEQ ID NO: 58763 - DNA, 118 bp, Zea mays
tgagcaactgggatgacatggagaaaatctggcatcatactttctacaacgagcttcgtgttgccccagaggagcaccctgtgttgctcaccgaggctcctttgaacccaaaggccaa

SEQ ID NO: 58764 - DNA, 301 bp, Zea mays
caagaagagcttgacattgatgtgcttgtgcatggcgagcctgagagaaacgatatggttgagtacttcggtgagcagctctccggttttgcgttcactgccaatggctgggtgcagtcttatgggtcaaggtgcgtcaagcctccgatcatctacggtgacccgaccgccccaaccccatgaccgttttctggtcgaagacggcacagagcatgacgtctcgcccaatgaaggggatgctgactggcccagtcacaatcctcaactggtccttcgtccggaatgaccagccgaggtttga

SEQ ID NO: 58765 - DNA, 133 bp, Zea mays
attgtgtgaagattaaaaaagccctaagaggtgtgaaggttgaggtgactcacaggggaaacatgcgcagaaaatatcgcattactggcctcacctcacaagcaacaagagagctatcaatccctgttgatga

SEQ ID NO: 58766 - DNA, 143 bp, Zea mays
gcgacagcgggtcggcgggccgcaggagtggggtcatgggtaaagactactaccagacgttgggcctggcccgcggcgcgtcggacgaggagatcaagcgggcctaccgccgccaggcgctgcgctaccacccggacaagaac

SEQ ID NO: 58767 - DNA, 132 bp, Zea mays
gtcgcacttcgggaggtcaggcccgccggacatccgcgacaccttctcgctcctcgtcctcaacatcagcttccgcaccacggccgacgacctcttcccgctcttcgagcgctacggcaaggtcgtcgacgt

SEQ ID NO: 58768 - DNA, 178 bp, Zea mays
caccaggagcatgtgttgcctatgatccctagtggtggggctttcaaggatatgatcctggatggtgatggcaggactgtgtactgatctaaaatccagcaagcaactgatctaaaatccagcaagcaccgcctccctgctagtacaagggtgatatgtttttactgtgtgatgtact

SEQ ID NO: 58769 - DNA, 298 bp, Zea mays
caggagtactatctggaaaatatggcaaaggggacatacctgctgatagcaggtttgccctagacaattacaagaacctggcgaacaggtccctggttgacgacacgcttcgaaaagtgaatgggctaaaacctatcgccgctgaacttggcgtttcgttagctcgctctcgattgcttggtgcgcgtcgaaccccaatgtgtcgactgtgatcactggagccaccatagaaagccagattgtggagaacatgaaggccctagatgtcatcccactgctgacgccggaggtcgtcgac

SEQ ID NO: 58770 - DNA, 283 bp, Zea mays
catctccctgtgcattggctgtagctccattggcatatgcaactgcaatcagttctcttgctagtaagggaattttgttgaaaggtggccatgtcttggatgctctttcgtcttgtcagtctattgcttttgataagacaggcacactaacaactgggaagctatgtgcaaagcaattgagcctatccatggacatttgggtgtgaaaagtggtcgtagtaatccttctagctgcactccaaactgtgaaagtgaggcattagctgttgctgcaactatggag

SEQ ID NO: 58771 - DNA, 141 bp, Zea mays
gtggttttgatgcaaagggttttgcggtttccaataaaggcaagagtttggaggccattgttgaacaagttcgtgatggcagtactgttcgtgtgtatttactccctaatttccagtttgtgcagatatatgttgctggag

SEQ ID NO: 58772 - DNA, 142 bp, Zea mays
caagaggttgcaggacactcagcattcagaggaccaatttacatctgagatgtcaactctgggaagtgtaaggcaacgtaacttagtgccgcttttgggatactgcattgtcaagaatgagaggctcttggtgtataagtac

SEQ ID NO: 58773 - DNA, 130 bp, Zea mays
ttgaactaaggaacgaaggtcttaaaagagataaaatcctaaattcattggtgaacaaaataaaataagacgaagttactatcaaaacccaagctgaagctcagaaatgcgaaattgaagatcttcgaaa

SEQ ID NO: 58774 - DNA, 298 bp, Zea mays
gagcaaagtacaatagagatgacttccctgttcagtacgatgctgcaaagttctttgtcattaaatcgtacagcgaggatgacatccacaagagcgtaaaatacaatgtgtgggcaagcacaaccaacggaaacaagaagcttgatgctgcttaccaattactcagtcaaagggatctgcatgccctatattcttgttcttctcagtgaatacaagtgggcagtttgttggtgttgctgaaatgactggcgccgttgattttgagaaaaccctagagtattggcaacaggacaagtgg

SEQ ID NO: 58775 - DNA, 137 bp, Zea mays
cttctgataccattgacaatgtcaaggccaagatccaggacaaggagggcatccctccggaccagcagcggctcatttttgccggcaagcagctcgaggacgggcgcacgcttgccgactacaacattcagaaggag

SEQ ID NO: 58776 - DNA, 101 bp, Zea mays
ccagatctcccccaaatccacccgtcggcacctccgcttcaagatgcagatctttgtgaaaaccctgactggcaagactatcaccctcgaggtggagtcgt

SEQ ID NO: 58777 - DNA, 111 bp, Zea mays
atcctgaagttacccagaaattgaaggtgcatacttccgtcctgtgctactactgccattggagcgaagtatgatcctgaagttacccagaaattgaaggtgcattttgag

SEQ ID NO: 58778 - DNA, 111 bp, Zea mays
acctctcagaccctagccgcctcctgcaagtttcagagctcaggaatctgcgccatggcgagtgagacggagaccttcgcatttcaggctgagatcaaccagctgctctca

SEQ ID NO: 58779 - DNA, 135 bp, Zea mays
cccaactggagccaaggtgacgaaggctgctgccaagaagaaatgatctatctgtctggtgctgtgcttgcttgttggttacctcgtggaagcttaaaatatctcgtcttgttgacatccttgcagttgtcgcgt

SEQ ID NO: 58780 - DNA, 120 bp, Zea mays
tgaggagggacttggttgggatgaagcttgggacattacatataggacaatttcctacaccaatcatacagttctccccgaagctcttgaaaaatggtcacaaatcgtgatgaggaaatt

SEQ ID NO: 58781 - DNA, 273 bp, Zea mays
  unsure (1)..(273): unsure at all n locations
ccctcccctagccgccgccgccgccgctcgtctccctgagaggtgccgngaccgaggaactggccgagtactaggtagagaatcggtttttcttgtctcagcccggggtctgctgcgtctggtggtggtgaaggggagaaattcgtgagatctgtatctctcaggcgtgcgagctcgggaatcaggggtttcacacatagcttcgtcgatttgaatttgatgtactaatggagtctaagggtggcaaaggtcttagcagtagtcgttctatga

SEQ ID NO: 58782 - DNA, 174 bp, Zea mays
cctcgtttgccttgtttaccattcctccccaaaacacatcctgcgatcctcgaagcctccgccgagcatcgatcatgtcggcctactgcggcaagtacgcggatgagctcatcaagaatgctgcctacatcggcacccctggcaagggtatccttgctgctgatgagtcaactg

SEQ ID NO: 58783 - DNA, 198 bp, Zea mays
ttcaacagatgcttcatctgcagctgctcaggtgaagactatatatgtgaagaacctacctgaaaatgtttctaaagagaagataaaggacctgtttgacaaacatggagaggtcacaaaaatcgttctgcctcctgccaaggctggtcataagagatactttggcttggttcactttgcagaaagagcaagtgcatt

SEQ ID NO: 58784 - DNA, 280 bp, Zea mays
agaaagagctgactcttaggacacgagattatctagtttcagttggtgaatgcatggctacaagaatattggctgcacttttaaacaaaattggagtaaaagctcggcagtatgatgcatgtgatcttggcttgataactaccgatgatttcacaaatgcggatattctggaagcaacttatcctgctgttgcaaggaggctacatgtggaatggattaatgatcctgctagacctatagtcactggctttcttggcaagggatggagatctggtgcaat

SEQ ID NO: 58785 - DNA, 265 bp, Zea mays
gaagctccgcacccaatctaatcgacacctcaccgagatgggccgcaagttcttcgtcggtggcaactggaaatgcaatggaaccacagatcaggtcgagaagattgtcaaaaccctgaatgaaggacaggttcccccttacaatgttgttgaggtcgttgtcagccctccttatgtcttccttcctgtggtcaagagccagctgcgccaagagttccatgttgctgctcagaactgctgggtgaagaagggaggtgctttcact

SEQ ID NO: 58786 - DNA, 221 bp, Zea mays
ccctccttactattgaggaaggtatctttgaggtcaaggccacagctggcgacacccatcttgggggtgaggactttgacaacaggatggtcaaccactttgtccaggagttcaagaggaagaacaagaaggatatcactggcaactcgaggagactcggaggctgaggacctcttgtgagagggccaagagaactctgtcttccactgcccagaccacca

SEQ ID NO: 58787 - DNA, 276 bp, Zea mays
tacacatctatgtgcaaggaaataaggcagaattcatccagcatgctgaagcagaggtgtccaaacttagatatgcagcatatggagttgttatgttgaacactattggctatgtatattcaaggcaagctgcaaaagaacttggaaagacagtgatgtttttgggtgttccatttattgccgaatggtttagggacaaaggacattttatcagatcccaagtaacagctgccacaggtgcaatagctcttatgcagttgcaagataacttgacga

SEQ ID NO: 58788 - DNA, 155 bp, Zea mays
gaggaagaagacgggtgggatttctttcaataccactgttcctttgactcatattgatgagaagctgtgcgatcagattctgcacgagtacaaaattcacaatgctgaggtgttattccgtgaagatgctactgtggatgatctcattgacgtta

SEQ ID NO: 58789 - DNA, 162 bp, Zea mays
gtgatgcctctgtccagagtgatattaagctgtggcccttcaaggtcattcctgggcccggtgagaagccaatgatagttgtgcagcacaagggggaggagaaacagtttacagccgaagagatctcctccatggttctcatcaagatgcgtgagatcgctg

SEQ ID NO: 58790 - DNA, 277 bp, Zea mays
cgagattggcgacattgataggtatgaactgaatgaggccttcgcctctcagtttgtctattgctcgaacaagttggggctggaccgttctaaagtaaatgtaaatggaggcgcgattgcccttggacaccctctaagtgcaacaggtgcccggtgtgtggctactcttctaaatgaaatgaagcgccggggcagagactgcagatttggtgttgtcaccatgtgtatcggatctggaatgggggcagcagctgtgttcgagcggggagacgcggtg

SEQ ID NO: 58791 - DNA, 102 bp, Zea mays
aaagaaggtcatgcccgccgtcatcgtccgccagcgcaagctgtgagcgccgcaaggatcggagctacatgtacttcgaagataatgctgtagtcatggtga

SEQ ID NO: 58792 - DNA, 128 bp, Zea mays
caaatatgtggtctcaatattattgttcaggttgacgacctggaagaagtcagtgcgtactaccagaacagaggatgcttcagtgaacttattgctctcatggagagtggtcttggacttgaacgtgc

SEQ ID NO: 58793 - DNA, 297 bp, Zea mays
gatgatggtacagcaaagctgtgggacttgcgtcagagaggtgcaatacaaactcttcccgacaaataccagatcacagccgtggccttctcagaggcagcagataaggtattcactggtggcctggacaacgatgtcaagtggtgggatcttcgcaagtctgaaacgacagaatatctcaaaggacatcaggacatgatcactgggatgcagcttagtcctgatgggtcttacctcctgaccaatgcaatgacaatgagctcaagatctgggatctgcgcccttacgcaccagaga

SEQ ID NO: 58794 - DNA, 214 bp, Zea mays
ccactccctcgcgctctccgcctggaagtccgcgggcctctcaacctggtcgctccgcgttaaccccagcagcggcaacctgcaccccaccgaggcccacctggtcttcccgcatccgcgagaggtcgaccgcctcgccatcgcgcactacgcgccccgcgaccatctcctcgaggcccgcgctaccgcaccaattagggattgttccgcgatt

SEQ ID NO: 58795 - DNA, 214 bp, Zea mays
tccaataccaggctgatttggtattggatccaattcaattccaccatctccaattccaacatccaaacggagcattagagatgttcaatgacccggattggggatttgggatcctgagcactctggtgaagctcgaagagagtgaccacatacgccatggtagccacacatcccagtcccccgagctcgtagtagtcgccgccaccgtgacggg

SEQ ID NO: 58796 - DNA, 294 bp, Zea mays
aacagtttgcagccgaagagatctcctccatggttctcatcaagatgcgtgagatcgctgaagcttaccttggcagcacgatcaagaatgctgttgtcacggtccctgcctacttcaacgactcacagaggcaggccacgaaggatgctggggtgtttgctggcctcaatgtgctgcgtatcatcaatgagccaaccgctgctgctattgcctatggtcttgacaagaaggcaaccagcgtcggtgagaagaatgtcctcatctttgaccttggaggtggtaccttcgatgtct

SEQ ID NO: 58797 - DNA, 301 bp, Zea mays
tccagatatccttgtaaggtgtgaagagttggaaagggaggaagggcttcgtctggaagaacaagctgcagaagatgctttccagattgatggtcatgaactaactcaggaacagaaggagattttggctcagattaggaagaagaaggcattacttatccaagaacatagaatgaagaagagaactgcagaaagccgtcctattgtccctagaaagtttgacaaagataggaaattcacaactgataggatgggacgccagctttcatccatgggtatggatcctagtgctgccatgaat

SEQ ID NO: 58798 - DNA, 181 bp, Zea mays
catgaatattgctatgactactcttagttcaaaaatactttcccaagacaaggagtactttgctgaacttgcggttgatgctgtcttgaggcttaagggtagcaccaacttggaatctattcaaattctgaagaaacctggaggatctctcaaggattcatttttggacgaaggattcatt

SEQ ID NO: 58799 - DNA, 259 bp, Zea mays
atctatgggagaaagagtttatccttgctggacgtaaatacaaacgactagacttggagcttacaaatgcaagaggctatatcttaaaatgcagccactatgttcctgcttttatcccagagaatactgccctcccatgtgtggtctattgccatggaaatagcggatgccgagcagatgcaaatgaagccgctgttatacttcttccttcaaatatcactgttttcacacttgacttttctgggtcaggtctatccgg

SEQ ID NO: 58800 - DNA, 296 bp, Zea mays
catgaatattgctatgactactcttagttcaaaaatactttcccaagacaaggagtactttgctgaacttgcggttgatgctggcttgaggcttaagggtagcaccaacttggaatctattcaaattctgaagaaacctggaggatctctcaaggattcatttttggacgaaggattcattcttgacaagaaaattggcatcgggcagccaaagcggattgagaatgccaaaattttggttgcaaacactgctatggacacagataaagttaagatatatggagcacaggtccggg

SEQ ID NO: 58801 - DNA, 299 bp, Zea mays
caacctcctcgagctcgaggcgcccatcaagatctgcggtgacatccatggtcaatacagtgatctatctaaagctttttgaatatggaggttttcctcctgaagccaattatctattcttaggtgattatgttgatcgaggcaaacaaagtttggagactatatgccttcttcttgcttacaaaatcaagtaccctgagaacttttttcttctgaggggcaatcatgaatgtgcctcaataaacagaatatatggattttatgatgaatgcaagcgtcgatttaatgtgcggctatgg

SEQ ID NO: 58802 - DNA, 227 bp, Zea mays
cacagcccaacaaaggagcgcggcggcccctccttccttcctcccacttctctcgcgcggcgctcgcttacctcgcctcgcattccgttcgagcaggggagcggcagtgagaagggagggaattaaggcaagatgttcatcgagagcttccgcgtcgagagcccccacgtgcggtacggcccgacggagatcgagtcggagtaccggtacgacacgacggagctggt

SEQ ID NO: 58803 - DNA, 170 bp, Zea mays
ttcggagcgcacacacacacaaccagatctcccccaaatccacccgtcgggacctccgcttcaagatgcagatctttgtgcaaaccctgactggcaagactatcaccctcgaggtggcgtcgtctgacaccattgacaacgttaaggccaagatccaagacaaggcgggc

SEQ ID NO: 58804 - DNA, 184 bp, Zea mays
ctaccacccatctcgtcgtccgccgattcgatccggttcttccaacccaggggcagtgatggcgacgaagaggagcgtgggcaccctcggcgcggcggatctgaaggggaagaaggtgttcgtgcgcgccgacctcaacgtcccgctcgacgatgcccagaagatcaccgacgagacccgcatc

SEQ ID NO: 58805 - DNA, 296 bp, Zea mays
gatcaaggaggtttctcatgagtggtcagtggtcaacaagcagaagcccatatggatgaggaagccagaagaaatcacaaaagaagaatatgctgccttctataagagcttgacaaatgactgggaggagcatctggctgtgaagcacttctctgtggagggtcaactggagttcaaggctgttctctttgttcctaagagggccccctttgatctctttgacaccaagaagaagcaaaacaacatcaagctctatgtgcgcagggtgttcatcatggacaactgcgaagagctga

SEQ ID NO: 58806 - DNA, 302 bp, Zea mays
ccgcgttcacagcgaggctgccgctgctgcgaaggagcagcgcaagaacgacaagagggagaagaggaagaagcacaaggatgccaaggaggatgactgcggcgcctcgatggccgaggaagaagcacccaaagagaagaagcagaagcagaagcagaggaaggataaggacgagcgggaggagaagaaaaagctgaagccgacggttagcatagccgttgccggctccatcattgacaacgcccagtccctcgagctcgccaccctcctggctggtcagatcgctcgcgccgccaccgtct

SEQ ID NO: 58807 - DNA, 294 bp, Zea mays
catgaatattgctatgactactcttagttcaaagatactttgccaagacaaggagtactttgctgaacttgcggttgatgcgggttgaggcttaagggtagcaccaacttggaatctattcaaattctgaagaaacctggaggatctctcaaggattcatttttggacgaaggattcattcttgacaagaaaattggcatcgggcagccaaagcggattgagaatgccacaattttggttgcaaacactgctatggacacagataaagttaagatatatggagcacaggtccgg

SEQ ID NO: 58808 - DNA, 290 bp, Zea mays
gccgcgagcagcccatccacaaggccctcggtggcggcaagcctgctgatgtgttcttgtggaggaacaagaacatctctgctggagtacttggtggtgccacagcaatctggatcttatttgaattgcttggctaccatctccttacttttgtttgccatggtctcatattcgccctgggtgttctctttctctggtccaatgcttcatcgtttatccacaaggctccaccacagatcccagaggtgatcattcctgaagatttagttgtcaacattgcgctatccact

SEQ ID NO: 58809 - DNA, 145 bp, Zea mays
ctcaaagaggaagaaactgaagagtgctgtcatggtcactatacatatggggatttgggtgacaggtgcttcgggactataggccgatgcttgacagagaccctcgtccttatttcgcaggctggtggttctgtagcatacctga

SEQ ID NO: 58810 - DNA, 287 bp, Zea mays
cgcagaccggcaccgccgagggattcgccaagtcgatggcggacgaggcgagggtgcggtacgagaaggccgtgtttaaagtggtggatctggatgactatgctcaggaggacgaggaatacgaggagaagctgaagaaggaaactgtggcgctgttcttcttagcaacatatggggatggagagccaactgataacgcagcaagattctacaaatggtttactgagggaaaagagaaggaagtttggctgaaggatcttaaatatggtatttttggccttggaaac

SEQ ID NO: 58811 - DNA, 153 bp, Zea mays
aatcaacctcctcgagctcgaggcgcccatcaatatctgcggtgacatccatggtcaatacagtgatcttctaaagcttattgaatatagaggttttcctcctgaagccaattatctattcttaggtgattatgttgatcgaggcaaacaaag

SEQ ID NO: 58812 - DNA, 287 bp, Zea mays
ctcgagccgaaaataaatgttaaggttgggggaaggaatactgtacttgttgatgctttagcaaggagaatcccccttgtcagtgacgtagctactattatctttggtgctgatgtgacccatccccatcctggggaagattctagtccttccattgcagctgtggttgcttctcaagactggcctgaggttacgaagtatgcaggattagtgagtgctcaaacccatcgccaagaattgatacaggatcttttcaacgtacggcaagatccccaaaggggggctgt

SEQ ID NO: 58813 - DNA, 166 bp, Zea mays
gcttacgttgatgaggataaggatgagtcgttctatactctaagctaggctcgtgaccatgttgatggctcaccactgctggtggcagcaggaagcaatgggatcattcgggtcatcaattgtgctacagaaaagttagctaagagctttgttggccatggcgact

SEQ ID NO: 58814 - DNA, 167 bp, Zea mays
aatccttctacgtcggcaaagaccacgttggggatgtccctttgtccaagaagatagccgccggcttcacaactggtgccatcgctatcagcatcgccaaccctactgaccttgtcaaggtcaggctccaggccgagggcaagcttacgcctgatgagccacgccgc

SEQ ID NO: 58815 - DNA, 213 bp, Zea mays
atgacaagtcagtcaaggatctcgtgatgctgctgttcgagactgctctcctgacctccggcttcagcctggatgaccccaacaccttcggcaaccggatccaccgcatgctcaaactcggtctgagcatcgatgaggacgagcctgttgaggcagaggctgagatgcctcagcttgaggacgacgctggtgaaagcaagatggaggaggtcg

SEQ ID NO: 58816 - DNA, 290 bp, Zea mays
ctcaatgctgctgatgacaagcggaaggaagtcctctctaaaatagaagaggatgttgctaagctcagcggttctgcagccaactaagaagctacaagtgaatgccgaggagagcagcgatgacttggctaacccaccgaagtagaggagaagcttggtgctgtccctcatggcctgtccaccgactctgaggttgcccagagggaagccgagtctatctctaggaagactctcaggagctcagccgagaagtttgagttccaagctgaggtttccagactcatggacat

SEQ ID NO: 58817 - DNA, 284 bp, Zea mays
agcccttctaaccttgctcgacccttgcccgccgcctgaactcgcctcctccgcggccggtcccctgcatctgttcgccgcgccgcaacccggaggagactacgactacgagcaccaccaggtagcagcaactgttttgctgcaatctgacaaagtgcatggtttacgagtcgctgcttcttttatgtctgaacaatctttgctttatttgggattgctgggagagtattcttgcgcgacgaggaaaaggcacaagtttctgctccagtgcatgcatcaagagc

SEQ ID NO: 58818 - DNA, 274 bp, Zea mays
tccagatatccttgtaaggtgtgaagagttggaaagggaggaagggcttcgtctggaagaacaagctgcagaagatgctttccagattgatggtcatgaactaactcaggaacagaaggagattttggctcagattaggaagaagaaggcattacttatccaagaacatagaatgaagaagagaactgcagaaagccgtcctattgtcctagaaagtttgacaaagataggaaattcacaactgatagatgggacgccagctttcatcctgggt

SEQ ID NO: 58819 - DNA, 284 bp, Zea mays
ggaagaactggtcgtgctggtgacaaagatggcactgcatacactctgattactcagaaggaggcacgctttgccggtgaactggttcaaagtttgattgctgctggccaggatgtacccaatgaactcatggatctggctatgaaggatgtgcgattcagagcaaaacgggactccaggaaaggtgggaagaaaggtggcaaagaaaaggtggcgtcggtggtggtgctgggcgcggtcgtggtgtgcgtggagttgattttggcctcggcataggttacaat

SEQ ID NO: 58820 - DNA, 286 bp, Zea mays
cccgagcagcaggattcaccgaagagagtgggacgctgggtgatatatgggagactgtatcaaacagtgatcttgttttgctactgatatctgattctgctcaggctgataactacgagaaaattttctcgcacatgaaaccaaacagtattcttggtttgtcacatggatttctccttggacatttgcaatctctgggttttgattccctaaaagcatcagtgtgattgctgtatgccccaagggaatgggcccatcagtcagaagactttatgttcagggcaaa

SEQ ID NO: 58821 - DNA, 285 bp, Zea mays
gaaataaagcggaaaactttaaacgggtacgcaggagatccagcgaaatggcggcgcgccgcggtcatatccagcggccttgaagccggagatcggccctgacggcctcgctcgagattctcccgtaatcgcctacaccgagaaggtcattttggaggagcagctgcagctgaagaaatacattcaggagaactattccaaaattcgtgatgtagacaaggagttagagagtcttactttagaaatgaaactgacagctggaccaaagaaagcagcactagagca

SEQ ID NO: 58822 - DNA, 280 bp, Zea mays
attgtcaccggcgccaccgtccaagtttgctgggagaagttcgcgcgctacttcgaggtcgagctgaaggaagtgaagctgagcgacggctactacgtcatggacccgcagaaggcagtggacatggtggacgagaacaccatctgtgtcgcggccatcctcggctccacgctgaacggcgagttcgaggacgtgaagctgctcaacgacctgctcaccaagaagaacgcggagacaggctgggaccgcacatccagtggacgcggcgagcggcgggttc

SEQ ID NO: 58823 - DNA, 288 bp, Zea mays
ggaagactggaagctggacacactgtgtgacctgtatgagaccctggccattacccagagtgtcatctttgtcaacacccgccgcaaggtggactggctcactgacaagatgaggagcagggaccacaccgtttctgccactcatggtgacatggaccagaacactagagacatcatcatgagggagttccggtctggctcctcccgtgtgctcatcaccactgacctgcttgctcgtggtattgatgttcagcaggtgtccctggtcatcaactatgatcttcccac

SEQ ID NO: 58824 - DNA, 285 bp, Zea mays
gactagttctagattgccaacgaccagggtaaccgcaccacgccctcgtacgtcgccttcaccgactccgaggcgcatcatcggagatgcggccaagaaccaggtcgccatgaaccccatcaacaccgtctttgatgccaagcgtctcatcggctctaggttcagtgatgcgtctgtccagagtgatatcaagttgtggcccttcaaggcatttctgggcctggtgagaagccaatgattgttgtccagcacaagggtgaggagaagccgtttgcagctgaagag

SEQ ID NO: 58825 - DNA, 289 bp, Zea mays
aaagctttggaggtcactcactacctaggtggtgaaaactatgtgttctggggtggaagagagggttaccaaactcttctgaatactgatatgaagagagaacttgaccatctggctaactttcttcaagctgctgttgactacaagaagaagattggattcaacggaacactattgatagagcctaaaccacaggaaccaacaaaacccagtatgactgggatgttgcgactacgtttgcttttctacagaagtacggtcttacaggagagttcaagattaatgttga

SEQ ID NO: 58826 - DNA, 193 bp, Zea mays
agtcggtccaggagcccagatgatcaaaatccagggaataacctttatgtaactggattgtctactcgtgtaacggaagatgatcttgagaagttctttagtaaagaaggaaaggttaagaactgtcatgttgttcttgatcctaggacaaaagaatcccgtggctttgccttcgatactatggatactcttg

SEQ ID NO: 58827 - DNA, 283 bp, Zea mays
gaaaaaatgtttttcatatttctcccttttcccagatgattataaatttgataagtctgagattattcgtttatgggattcaataggaatcataggttctagtatacagcaaaagaaaatagaggacataggatcggattattttgatgaactattagatagtggttttcttataaaagggagcaatgatttttatgtaatgcagatttaatcaaaaaaaaaaaaaaaaaaaaaaggggggcccccccaaaatgggccccttcccccggggtattttttccgg

SEQ ID NO: 58828 - DNA, 252 bp, Zea mays
aaccctctccccgccgcatcgccgccgccggaagcgcctccctcgatccagatccaggagatatgcctcgctatgatgatcgctatgggaatacacgcttgtatgttggaagattgtctccccgcacccgttctcgtgacctagaataccttttcagcaataatgggagaattcgagaagtggagttgaagcgtgactatgcattcattgaattcagtgacccccgtgatgctgatgatgctacgtacaact

SEQ ID NO: 58829 - DNA, 282 bp, Zea mays
tgcatatgctgtatttcattcattttcccaaaccctaagatgctagaggctgcagctgaaacaacatcaaagtttctgaagagtgatagtcataatcttaagtacatgggtattgatgctcttggccggctaataaaaataaacccagatattgcagaagagcaccagctagctgtcattgattgcctagaggatccagatgacactttgaagcgcaagacctttgagcttctttataagatgacaaaatcaacaaatgttgaagtgattgttgataggatg

SEQ ID NO: 58830 - DNA, 197 bp, Zea mays
aaatcatatgctgcaatatacccacatgctggtggtttcctgcatccactcatgcccctagtggtaaacccattgagtgcagagccagctaagtctgggaacagcaaggataatagtttaaagaagaaactacaggaaattgatggatctgctgtgtcaagtggcaacagtgagaaaacaagtggggatcacagcct

SEQ ID NO: 58831 - DNA, 282 bp, Zea mays
ccaaaccccactcaccgcaacgagccgccggatccatggccggcaaagacggctccgtcccttccacgcctcctccccggctcccatcctaccctgagatgatcgtggaggcaatccgggcgctgggactcgagaacggctgcaacaagactgcgatctcggactacatcaagggcagctacggctccaacctccctgcccagcacacgccgtcctcacgggccacctcgcccgcatgaaggctaccggtgagctcgccttcctcaggaacaactatctcct

SEQ ID NO: 58832 - DNA, 281 bp, Zea mays
ggaagaactggtcgtgctggtgacaaagatggcactgcatacactctgattactcagaaggaggcacgctttgccggtgaactggttcaaagtttgattgctgctggccaggatgtacccaatgaactcatggatctggctatgaaggatgtaagattcagagcaaaacgggactccaggaaaggtgggaagaaaggtggcaaagaaaaggtggcgtcggtggtggtgctgggcgcggtcgtggtgtgcgtggagttgattttggcctcggcataggttac

SEQ ID NO: 58833 - DNA, 279 bp, Zea mays
gacgttgggagctattgttcagtagctgaagtgtcttggatgtatattggcaatgaacaacttgaatatgcatccggagctcttaaaaagttcaggtttcttgtggagcaactatcaaaggttgacccttcttgtatgaactgtgatgaaaagatagcattttgggttaacttgtacaatgcattaataatgcatgcttatttggcatacggtgtccctgaaaatgacattaagctgttcgcgctaatgcaaaaggcctgttacacgatcggcgggcag

SEQ ID NO: 58834 - DNA, 275 bp, Zea mays
aaaacctccaaggctccaaccctagccgcgatccgacaacgcctccatccctagccgactgctgcaagcttcagagctcaagagtcagggcgccatggcgacagagacggagaccttcgcctttcaggctgagatcaaccagctgctctcactcatcatcaacaccttctattccaacaaggagatcttcctccgggagtcatttccaactcttccgatgcgttggacaaaatcaggttcgagagcctcactgacaagagcaagctcgatgcgca

SEQ ID NO: 58835 - DNA, 283 bp, Zea mays
ctggcctattggtttccgctgcaatgggcatctaatgcttaactctgagaaaatgtccaagtccacagggaatttcctaactctggaagatgccataaaaaagtactcttctgatgccactagatttgcccttgctgatgctggcgatggtatggatgatgcaaattttgtcactgaaactgcaaattctgctgttatgaggctacaaaagaaatttcatggatggaggaggttacagctgctgaatctaaattaagaactgggccgcccactacatatgctg

SEQ ID NO: 58836 - DNA, 277 bp, Zea mays
agtcggtccaggagcccagatgatagaaatccagggaataacctttatgtaactggattgtctactcgtgtaacggaagatgatcttgagaagttctttagtaaagaaggaaaggttaagaactgtcatgttgttcttgatcctaggacaaaagaatcccgtggctttgccttcgttactatggatactcttgaaggtgcagacgctccatcaagtatctgcaccgcactgtacttgaaggtcgcctggtcactgtagagaaggctaaaagaatcgt

SEQ ID NO: 58837 - DNA, 278 bp, Zea mays
aagagatggattatgaccacaggcgtgtcagtgctctgcagcagaggctgcttgatggcatacgtgcgcaggtcgatgatgttgtcatcaatggaagtatggagtaccgttacccaggcaatctaaatttgtcatttgcttatgtggaaggggagagcttactgatgggtctgaaggaggtggctgtgtcaagtggtagtgcctgcactagtgccagcttggagccctcatatgtgctgcgggcacttggggtggaggaggatatggcacacacttct

SEQ ID NO: 58838 - DNA, 275 bp, Zea mays
ttgatatgtcctctactgcatttatcgagcctctccctgtgatcgattttgttgctcagcttcttaacagagatatctcagttaggccattgtctgattctgatcgcgtgaagattaaaaaagccctaagaggtgtgaaggttgaggtgactcacaggtgaaacatgcgcagaaaatatcgcatttctggcctcacctcacagcaacaagagagctatcattccctgttgatgatcgtggtactgtgaagactgtggtgcaatacttcatggaga

SEQ ID NO: 58839 - DNA, 315 bp, Zea mays
  unsure (1)..(315): unsure at all n locations
gtcttgcggccgtcagcancgaactcggctcgagggaagaactggtcgtgctggtgacaaagatggcactgcatacactctgattactcagacggaggcacgctttgccggtgaactggttcaaagtttgattgctgctggccaggatgtacccaatgaactcatggatctggctatgaaggatgtaagattcagagcacaacgggactccaggaaaggtgggaagaaaggtggcaaagaaaaggtggcgtcggtggtggtgctgggcgcggtcgtggtgtgcgtggagttgattttggcctcggcataggttac

SEQ ID NO: 58840 - DNA, 276 bp, Zea mays
gacgttgggagctattgttcagtagctgaagtgtcttggatgtatattggcaatgaacaacttgaatatgcatccggagctcttaaaaagttcaggtttcttgtggagcaactatcaaaggttgacccttcttgtatgaactgtgatgaacagatagcattttgggttaacttgtacaatgcattaataatgcatgcttattggcatacggtgtccctgaaaatgacattaagctgttcgcgctaatgcaaaaggcctgttacacgatcggcgggc

SEQ ID NO: 58841 - DNA, 194 bp, Zea mays
gctttgaccgcctcccctcccctccgctcctgtcactccataccccacccccccgcaggagcggcgcggcggcggcggcggcaaagccaaaggcaagatgttcgggcgcgcgccgaagaagagcgacaacaccaagtactacgagatcctcggggtgcccaagtcggcgtcccaggacgacctcaagaaggcct

SEQ ID NO: 58842 - DNA, 280 bp, Zea mays
cccggcagccgcaaacgccttcgccgtcgcgtcccgctcctccgcccgcccgacgcgacccctaggacctggagagagaggtcggcatggctgccgcagtggtcgacgacgctggtatggacgccgtccagaagcgcctcatgttcgaagacgaatgcattttggtggacgagcaggacaatgttgttggccatgagtcaagtacaactgccatttgatggaaaagattgattctgagaatctgctacatagggcattcagtgtgttccttttcaactca

SEQ ID NO: 58843 - DNA, 279 bp, Zea mays
ggctttaagataattgatatcctaactatctcagctattgcacggcatactgcatctcttgctacttatgcgagaaacaaaatgctggaattgaagcatagcaatgagaaaaatgtttgcataatctatggacaagattttaaggcaaattatctgaaaatgggtccttcaatcacattcaatttgaaaagagaagatggcacatggtttggatatcgtgaggtggagaagcttgcctcattgtcaggaattcatttgcgtacgggctgcttctgtaac

SEQ ID NO: 58844 - DNA, 275 bp, Zea mays; identical to SEQ ID NO: 57757

SEQ ID NO: 58845 - DNA, 275 bp, Zea mays
gacgttgggagctattgttcagtagctgaagtgtcttggatgtatattggcaatgaacaacttgaatatgcatccggagctcttaaaaagttcaggtttcttgtggagcaactatcaaaggttgacccttcttgtatgaactgtgatgaacagatagcattttgggttaacttgtacaatgcattaataatgcatgctatttggcatacggtgtccctgaaaatgacattaagctgttcgcgctaatgcaaaaggcctgttacacgatcggcggg

SEQ ID NO: 58846 - DNA, 288 bp, Zea mays
tgcttccagaaggacatcctgaacctggtgtacatctgcgagtgcaatggcctgcccgaggtggccaactactggaagcaggtgatcaagatcaacgactaccagaagagccggttcgtgaaccgcgtcgtgtcgtccatgttcaacaccgttgtccggcaagaagatcgccgtcctcggcttcgccttcaagaaggacaccggcgacacagggagaccccggccatcgatgtctgcaagggcctgctgggtgacaaggcccagatcagcatctacgacccccaggtg

SEQ ID NO: 58847 - DNA, 206 bp, Zea mays
cactcccatccagccgccaccaggtgcagagtctttcgtcatctcttctccggcgaagaacccccagtcgcccaccagatcacttgttaaactttgttgaggggtgatggcggtttctttcgcaaacctcaacaccgaggcagggcttaaaaagcttgatgagtaccttctcactcgcagctacatcactggctaccaagcttcca

SEQ ID NO: 58848 - DNA, 233 bp, Zea mays
cggtcttcgacggcagcaagctggggatcgagccctactccgtggaggtcacccagggtggcgagctactcgtaatggactccatgaacagcaacatctacaggatagcgctgccgctgtcccgatatagcaggccaaagcttattgctggttctccagaaggatttcctggtcatgttgatgggacgctgcgagaggcgaggatgaaccctccaacgggatttacagtggac

SEQ ID NO: 58849 - DNA, 129 bp, Zea mays
ccaaggtcgagaataagaagccatttgctcctccaagggaggtacatgtccaggttacacattcaatgccacctcacaagattgaaattttcaagtcacttgatgattgggctagagataatatcttga

SEQ ID NO: 58850 - DNA, 225 bp, Zea mays
cagatgcagcaacctcaagactctcaagctcaacaatgctatacctcttgacaagcttgctaacctccttcgcaaggctcctcagattgtagaactcggaacaggaagattctctgcagattaccatccggatctcttttcgaagcttgacgcagcatttgctggctgtaaaagcttaagaaggctctctggggcttgggatgccgttccagaatacctgccagc

SEQ ID NO: 58851 - DNA, 319 bp, Zea mays
gctcgaggaggtgtatgggagcttcgacgcgccgtcgcagaagaagaagggctttgttctgccgaggcccaagatggccaacgctgacctgggcaggattatcaactctgacgaggtgcagtctgtggttaagccactcaacaaggaggtgaagcgcagggagaagaggaagaacccgctcaagaacatggctgctgtgctcaagctgaacccctacctcggcactgcccggaagatggccacccttgctgaggctgcccgagtcaaggcccggaaggagaagcttgattccaagaggaccaagcttacctcggaggag

SEQ ID NO: 58852 - DNA, 320 bp, Zea mays
ggactatggtaaagggaggcagatgcccattcactatgggtcgaaccgtctgaactatttcacagtctcgtcacctatcgcaacacagctcccgcatgctgttggagctgcctactctctgaagatggacaagaaggacgcgtgtgccatcacatactttggggacggtgggacaagtgagggagacttccatgcagcgctcaacttcgcggctgttatggaggcaccggtgatcttcttctgccgcaacaatggctgggccatcagcactccgactactgaacaattcagaagtagcaacagcgtgtcttcatatactg

SEQ ID NO: 58853 - DNA, 211 bp, Zea mays
tgctgctgtacctgggtatctgcgtcgtctggtgccctctggtgtacctctatatggatgtcgtcgtctaataaacatctgtggtttgtgtgtcatgaatcgtggttgtggcttcgttggtttaatggacctgttgtgtcctctgtgttgtacccaaaactcttctgcagcagtatggcttgaatccttatgaagtttgatatttgaactt

SEQ ID NO: 58854 - DNA, 147 bp, Zea mays
aagaggctgacacaactactggtaaagccactcacaggatttcacgtggcattggcattaagggtcactcgttaacaagaaatcttaattctgatgggcgtgtgaacacccttcaaactttacacaacttgaatgaagatgagcttg

SEQ ID NO: 58855 - DNA, 255 bp, Zea mays
caatgccaactttcctgttcctgtatggtgctgcctttgccgtagtacatttctttgcccggttccaagtcgtattcaagctgcattacgttggcctctgcttgctctgcatcccccggatgtacaagtactacatacagacgaaagacgtgggtgcgaacggctcgcaaaactgtgggtccttacactgacccttcggaccctctgctggctggttgatcgcgtcttctgcaagaagctttcgcattggtacgt

SEQ ID NO: 58856 - DNA, 219 bp, Zea mays
ctgagaaggagatgatgtcacagtgtgtggctcttcttgggaagtttattgcagtccgggagccaaacattcggtacctcggtctggaaaacatgactaggatgctgttagtaacagatgtgcaggatatcattagaaggcaccaggcccagatcattacatctttgaaggatccagatatcagcattaggcggagggctcttgatttattatatggca

SEQ ID NO: 58857 - DNA, 312 bp, Zea mays
gcggcagctcgcgcggcggtctggtctctctggtgggtgcccctcttcgccggtggccggaaaggggagtggagtgggaccgctcaaggagaggccggcgtcccaaagtctcacttccgccgtccgctttccccctgggatcgagggaggaaggaaaggtggtgcttcacaatgaaggccctcattcttattgggggtttcggaacccgccttcggcctttgactctgagcttcccgaaacccctcgtggattttgcaaacaagcccatgattctgcaccagatcgaagccgtgaaagaagttcgggtcaca

SEQ ID NO: 58858 - DNA, 322 bp, Zea mays
attcggctcgagggcgaatcgaaggaaaagtagtcaggagaggcgtttccctcgcaatcgaccatcacagatcaaatcgctgcaactagctagggtttcgtcgcctcatctctcgtcgatccatcgatggcgtccgagggcgaaaacaagaggatgatcacgctcaggagctccgacttagaggagttcgaggtggaggaagcggtggccatggagtcgcagactctccgccacatgatcgaggacgactgcgccgacaacggcatcccgctccccaacgtcaaattccaggatcctctctaaggtcatcgagtactgcaac

SEQ ID NO: 58859 - DNA, 309 bp, Zea mays
cgtccctcgccttcgccgccgaatccgagactccgatctcgggttcaccgcagcgcacagagcagccccgactcccggcccgatccgcgctctcctctccgtcgcttcagtcatggcaggaatggcacctgagggttctcagttcgatgctaagcactatgattctaagatgcaggagctgctgagcaccggtgagactgaggagttcttcacttcatatgatgaagtttttgagagttttgatgatatgggcctccaagagaatcttctgagaggcatttatgcttatggttttgagaagccatctgc

SEQ ID NO: 58860 - DNA, 177 bp, Zea mays
gttccgcttatcgcctattgtgtgcttcctgctatctgtcttcttaccaataaatttatcattcctgagattagtaattatgctggaatgttcttcattcttctttttgcctccattttcgcaactggtatattggagctcagatggagtggtattggcattggagattggtggtga

SEQ ID NO: 58861 - DNA, 220 bp, Zea mays
gttcggagcgcacacacacacaaccagatctcccccaaatccacccgtcggcacctccgcttcaagatgcagatctttgtgacaaccctgactggcaagactatcaccctcgaggtggagtcgtctgacaccattgacaacgttaaggccaagatccaggacaaggagggcatccccccagaccagcagcggctcatctttgctggcaaacagcttgagg

SEQ ID NO: 58862 - DNA, 217 bp, Zea mays
ggaagtaatggactcaatgatagatacagaattctggtatgaggagagtggcagcagagctgatggtcgggggaaaattacaggtccaaggaagagtaaaaagtggtggctcccgtctcctcgtgtccctgagcaagggctatctcaattccagcggaaaaggcttgtttttcaggctaagcttgttcaccagatcctcaaagccgcagaatccatc

SEQ ID NO: 58863 - DNA, 310 bp, Zea mays
tacatccgccctcaggatgctggatgggatgccaaggagtttgataatgagactccatacactattatgtttggtccagataaatgtgggtcaaccaacaaggttcatttcatccttaagcacaagaatcctaagactggaaagtatgttgagcatcacctcaaattcccaccttctgtcccatacgacaagctctctcatgtctacacagctatcttgaagccagacaatgaggtcagaattttgatcgatggggaagaaaagaagaaggcaaacttcctttctgctgatgactttgagccagcactta

SEQ ID NO: 58864 - DNA, 310 bp, Zea mays
ggatggcacacgttcaactcattgcccttctctaggaagacggccacagttgttggtgaagcagcccctattctgcccagggatttctagtgggctagttttgtgttgaactcgaggatgctgtggaaggaggctgacggcaagcctgactgggtgaaggatcttgatgctgtgggcgagaatggcgaggagattgagaacccacttactcagttgaatgatccgtcctctgttgagccactgggcaactgtgggaagaaggtcatattgtggtggcttcgtgttgaagcacgggctgatagcaagtttc

SEQ ID NO: 58865 - DNA, 101 bp, Zea mays
gctgccgccacagcatgacgattatcacatgatgttaagattcctaaaagcacggaaatttgatgttgagaaagctaagaatatgtggtcagagctgctta

SEQ ID NO: 58866 - DNA, 301 bp, Zea mays
agaaccacacaatacagtttaggccggcgtaccaccctgaaggtctatacgatgataccaagagcagcataggctcaaacaatgctggcgagaggccgatgctccagatgtggcatcgaaatggcaggtgccccgagggcacggttccaatcaggagaaccaagaaggacgacctgcttcgagctagctccgtgaggcggtatggcaggaagcggcacactgctccgaacccactgtctgttgatcccaacatgctcagtgagggtggccaccaacacgccattgcgtacgtccagggcga

SEQ ID NO: 58867 - DNA, 309 bp, Zea mays
gacctctccaagacggaggcgctgacgcaggccttccgccgcgccataggcgtccgcatcaaggaggaggccgagatcattgagggcgaggtcgtggagatctcaatcgaccgccctttgtcggcctctggcgttggcggcagctcagttgctccttctggtgcaactgccgctggtaagtcagggcggctcacgctgaagaccacggacatggagactgtgtacgagctcgggggaaagatgattgaggctcttgtgaaggagaaggtgcagagtggagatgtaattgcgcttgacatggcctccggg

SEQ ID NO: 58868 - DNA, 307 bp, Zea mays
agggtggcaaggtcatcaattggaatggctatcgagtcctcggtgttctcgccatgtcccggtcaattggggacagatacctgaagccatatattatcccagtccctgaggtcacaattgtcgcccgtgcaaaagatgatgagtgcctaattattgcaagtgatggcctctgggatgtgatgtcaaacgaggaggtatgtgatgctgctcgcaagcgcatactgctgtggcacaagaagaattcagatgcctcatcgtcagcccaaagaagcggtgattcgccagatgaagcggctcaagcagctgc

SEQ ID NO: 58869 - DNA, 305 bp, Zea mays
accttgtttggtgttgcttattcaaggcatattgtacaaatttattcctataatggtggcgacgatattagacaacacttggagattgatgcacatattggtggtgtaaatgacattgcatttgctcatccaaataagcagttatgtataattacatgtggagatgataagacaattaaggtatgggaggccaccagtggagctaagcaatttacatttgaaggacatgaagctcctgtttattcagtttgtccacattacaaggaaaatattcagttcatcttctcgactgctttagatgggaa

SEQ ID NO: 58870 - DNA, 310 bp, Zea mays
tgatgccatcttggatctttcatggtcaaaaaaaatagggaattgctttctgcgtccaaggacaaaactgttcgattatggaaagttgggtgcgatagctgcctgaaggttttctcccataataactatgtgacatgtgtacagtttaaacctaccaatgacaattatttcatcagtggttgtattgacgggatggtacgtatttgggatgttcctagatgcctagttgtggactgggctgacagcaaagagataattacagcagtttgttaccgtcctgatggaaagggtgcagtggttgggacaataa

SEQ ID NO: 58871 - DNA, 306 bp, Zea mays
aacgctgtttgcaactgatttcttcgagataaaggctgtggatgaaatagagcctgctctcaagaaacagctcataatttccacaattgtgatgaccattggcattgcactaatcagttggcttggtcttccatacactttcactattttcaactttggagtccagaagacagtgcaaagctggcaattgttcttgtgtgtggcggttggtctctgggctggcctagtcattggttttgttactgagtactacacaagcaatgcctacagccctgtacagatgttgctgattcctgcagaactgga

SEQ ID NO: 58872 - DNA, 301 bp, Zea mays
acaaggttcaagcagttgcttggagcccacagtcacctgaagttctgcttagcggatcctttgataaaacagttgccatgaatgatatgaaagatggtgggcagaattgtcataaatggtctgttgaagcagacgtcgaaagtttagcttggaatccacacaatgaacattcatttgtggtcagtcttgaaaatgggatggttcaagccttcgataagcgaacagcttcatcaagttcttctggccagtctatgtatacccttcatgcacacgataaggctgtttcttccatctccttcaa

SEQ ID NO: 58873 - DNA, 298 bp, Zea mays
  unsure (1)..(298): unsure at all n locations
gctcgtgaagatgatgatctagagtccctggagagagatgttaatgaggaatcaggatggaagcttgtccatggcgatgtatttcggcctccccaaagtttgatgtttctttctgcacttgttggtatcggcacccaattggcagctcttatcctacttgtcatcgttttggccatcgttggcatgctatacattgggcgaggggctatcatcacaaccttcattgtgtgctatgctcttacatcttttatttctggatatgttagtggtggtctttactcnaggaatggtggcaaaa

SEQ ID NO: 58874 - DNA, 291 bp, Zea mays
cgaccgcaccgtggtcgtcagcacggctcacggcctcaagttctcgcagtcgaagatcgactaccatgacagcaagatcgaggacatggcttgcaagtactccaacccgcctgtgagcgtgaaggccgactttggcgccgtcatggatgtgctgaagaagaggctcaagggcaagctctgagcgcctgtgcctggctaatgcaatcaactgattggaatgcagtggtttcgtcggtatcggggggtcttttaggcttcagaaattctgtctgggttaggctatctgtttgt

SEQ ID NO: 58875 - DNA, 209 bp, Zea mays
tcaacatggacctgttcaggaagtgcatggagcctgttgagaaatgcctgagggatgccaagatggacaagagcagcgtccatgatgttgtccttgttggtggctccactaggatccccagggtgcagcagctgctccaggacttcttcaacggcaaggagctgtgcaagaacatcaatcctgatgaggccgttgcctatggtgctgct

SEQ ID NO: 58876 - DNA, 299 bp, Zea mays
caaattcactggttttctattgtgaactctctcatgatcgtactcttcttatctgggatggtggccatgattatgctccgcaccctgtatagagatatctctagatacaatcagcttgaaactgaagaagaagcccaagaggagacagggtggaagcttgttcatggagatgtattccgacctcctgcaaactctgatttactctgtgtctgtgttgggactggtgttcagttctttggtatgctgctagtaaccatgatttttgctgttttgggttttctttcgccatcaaaccgggg

SEQ ID NO: 58877 - DNA, 206 bp, Zea mays
gccgcgagcagcccatccacaaggccctcggtggcggcaagcctgctgatgtgttcttgtggaggaacaagaacatctctgctggagtacttggtggtgccacagcaatctggatcttatttgaattgcttggctaccatctccttacttttgtttgccatggtctcatattcgccctgggtgttctctttctctggtccaatgct

SEQ ID NO: 58878 - DNA, 302 bp, Zea mays
gggtttttgattttagccgccgccgctgctcatctcacatccctcgagaagacgcctgctcctcgccgatcgatacgatggccgtcttctccgacctccacaccgccgacggcctcaagtccctcgaggctcacctcgccggcaaaacctatgtgtctggtgactccattactaaggatgacattaaggtcttcgccgcggtgccgtcgaagcctggcgctgagtttcctaatgccgctcgctggtacgagaccgtctctgcggctgtagcctcaagattccctggtaaggctgttggtgta

SEQ ID NO: 58879 - DNA, 302 bp, Zea mays
atttcccgtcctgtccttccacccggcggcttaaaccctagttctcactcccatcgccgcttcagctccgccgctgcagatggagttctggggttacctccctttctctctctctctcgcaaactcaatttgccgcgatacctgctctgtgttcgttttgttgcgattcctttgtttgaatttatttggtggtttagccttttattagtgccctcgcaatcaagggccgggtttgattcgctaccattatacttatattcgaatgtttttaggtccatgcgaatcatgggtagtgttttgat

SEQ ID NO: 58880 - DNA, 296 bp, Zea mays
cggcgaggagggcaggaagaccgaagaccgagccgtgcgggggctcgggacgggaacgggacaggaccccaaaatctcagatccttcctgcccgcccgcccgtgcccgtcgacgcgtcgttcttgccggacgcgccccacctccgccctctcctcctccagggggatcggatacgccacaggctgcgcgatggtgctgtgggtcttcggctacggctccctcatctggaaccccggcttcgacttcgacgacaatatcctcggcttcatcaagggctacaagcgcacctttaatct

SEQ ID NO: 58881 - DNA, 296 bp, Zea mays
ctggcaagcattattgcaggatctgctttagagcagctaaaaagctatattcatcagtcagcaaatgaaataccaaggacgattggtgaagcaattccaatgaaggcaaccttttttataacatatacaatggttgatggttgggctggggtagctggtgagatattgagattgaagccactagtgatcttccacctgaaaaactttttcttggtcaagactgagaaagacagggaagaggcaatggaccctggaagtattggttttgactcaagcgaacctcaaattcagctgta

SEQ ID NO: 58882 - DNA, 233 bp, Zea mays
gtcaattagcggctgcttataagcttgtctgtgagatgattgaaaatggctgcacacctaaccttgttacttacaatattatgattgcgctccaggccaaagcaagaaattatgagaatgttgttaagctgtacaaagacatgcaggttgctgggtttcgtcctgacaaaataacttacagcatcgttatggaagttcttggtcattgcggccatcttgatgaggctgaggcg

SEQ ID NO: 58883 - DNA, 272 bp, Zea mays
agagatagatctgtccgcggccatggcggcggcggcggcggcggcggacaaggcgtggacgccgcgaggaaagaggaggaggaggagcaggtagtgaatccgtgggcggtgtcggcggggaagggcggcatcgactacgacaagctcgtggaccagttcggctggcagcgcatcgacgacgcgctcgtggaccgcatcgcacgcctcaccgcccgaccaccgcactgcttcctccgccgaggcctcttctcgcccaccgatgatttaacgag

SEQ ID NO: 58884 - DNA, 197 bp, Zea mays
aaatttctgacgacgaagacgaggaagagaagaaagatgctgaggaaggaaaggttgaggatgttgatgagaaggaagagaaagaaaagaagaaaaagaagatcaaggaggtttctcatgagtggtcattggtcaacaagcagaagcccatatggatgaggaagccagaagaaatcacaaaagaagaatatgctgcc

SEQ ID NO: 58885 - DNA, 268 bp, Zea mays
tcggctcgagcaaagttttttctccatcagttaaaagaaactgatagacctttaactatgtccttttaggaaacaaaagcgtggactattttttcaggcatgactgcgccacaagcagctggagtgattcatagcgactttcagaaaggatttattagagttgaaactgtatcctacgatgattttgttgcagctgggtctcttggagtagcatgggagaaaggaaaacatttcgaaaacatccggtcaagaagtatctggcagcact

SEQ ID NO: 58886 - DNA, 250 bp, Zea mays
caccgtcaagcagatgcacggcctgctcaagcaccaggactccccctacatcagagctattggattcctctacctacgatacgttgcagaaccgaagacactttggacttggtatgaaccctatatcaaggatgacgaggagtttgcacctggatcaaagcgtaaagtgactacaatgggcgtttatgtgcgtgatctcctccttggtcagtactatttcgacagtctccgtccacgagtgcctctccca

SEQ ID NO: 58887 - DNA, 251 bp, Zea mays
  unsure (1)..(251): unsure at all n locations
gagcacttcaacagaagcaacaagtggaagaagcgtggcatttcttgtgtgccaattacatatgaggtcaatcttcggccaactccaggcaaggtgtctatcatgaatgatggttccatcgctgttgaggtcggaggggttgagataggccaagggctgtagacacaagtgaagcagatgacggcattcggattgggacagctgntccctgacggcggcgaaagcctccgtgacaagctcgggcactaggc

SEQ ID NO: 58888 - DNA, 170 bp, Zea mays
gaaggtttagcaccaataaatttgatagttgaagacaagttccatcgtgctactcctggtggtactgggggtgtgaagaccataggcaattatgcttcggtgttgatggcacagacaattgcaaaggaaaagggttattctgatgtcctctacttgaacgctgttcacaa

SEQ ID NO: 58889 - DNA, 145 bp, Zea mays
cactcagtgtaccatcgctcatgccttggagagaaccaaataccccaactcggacatatacttggacaaattcgacagccagtaccacttctcttgccagttcacagctgacctgattgccatgaaccacaccgatttcatcatg

SEQ ID NO: 58890 - DNA, 261 bp, Zea mays
ctgcaagagagcaacggcagcaagaaaccttgtaaacatcggagcatagatcgcggcggtgatggcggccaaagtgaggacggcgctggacgtgggcgccgacggcgtagccgtaatcaccatctacaatccgcccgtcaactccctctccatcgacgtcttacatagcttaaaagaacgctatgaagcagcacttctgagaaacgatgttaaagctattgtcggtacagggaaaggagggaaattttctgaggatttgat

SEQ ID NO: 58891 - DNA, 224 bp, Zea mays
ccaggttctctccctgtgcgacaacccagccctcatggacagagatgaagctcgtgccttattcagcccgtgtagcataagaagggccaggaggatcctaaactcgatccccagcaaagacactggtggatatactgattgccggggaatcacatgcctgcgtcaagtagtagcagatgggaccaccgcaagagacggatttccatcgacagcggacgatatct

SEQ ID NO: 58892 - DNA, 252 bp, Zea mays
agatcatcctattgtgcaaagaaaaggattggctgtggttgattattcctgggcacgtttaagtgatgtcccttttgtgaaactacgttgcggtgctcctcgtctcttaccatggttggtagcagcaaatcctgtgaactatgggcagccatgtgaactgtcatgtgtggaagctttatcagcagccctcataatatgtggggaggaagatacagcgcatttgctgcttggaaatttacatgggacacgcat

SEQ ID NO: 58893 - DNA, 285 bp, Zea mays
agaacagaactaaaagaacggtggtgggggtgatctggtaaggcttggttttgccgaaatattgtgggggaggagtgataaggtcggtggggtttctatgttaaagtcgtggtctcgggcaatatgcgatttgtctttatgccatgttttgggaaattttgtagctgcctaggcctcgtgctgttgtggtggttcattagtatgaagacgaaggctctgctggctatgggagtcctttttctttttgttagtattttgtttaaaactatgtatgaccgaattatt

SEQ ID NO: 58894 - DNA, 309 bp, Zea mays
gaagaagaaagctttgagaacactctagcaaagggttatgaaaaatttaagaaagctgcagacgctgttaaggataatggtggaactatacttagtggacaggatgcatttattctttgggacacttatggttatccaattgatttgactgaggtcatggcaatgactatgggctaactgttgataagaaggggtttaatgcttctatgggaagagcgaagccaaaaacttagaaatgctcgtaacaagtctggagggaactctattgctatggatgcgcatgctacagcgcagttgcgcaaactgggg

SEQ ID NO: 58895 - DNA, 290 bp, Zea mays
cattgcaattctaaatgatggtaccataatgactatatccaaggatcgtgtaaagccatccccattacctgacagctggaagttggctgaaattttcacaactggagttgtccttggtggatatcaggcattgttactgtcatcttcttttgggctgcatcaagacaaactttttcccaaaaatatttcatgtggaaagccttgagaagacagctcaagatgatttccaaaagcttgcatctgctgtttacctgcaagttagcaccatcagccaggccctcatcttcgtg

SEQ ID NO: 58896 - DNA, 299 bp, Zea mays
cagctattgtggtcgtccctcagccgcgtcgcaccgcatcgcattctacgattcgaagctctctctgctcgcagccatggcgaagaattacccaaccgtgagcgccgagtacagcgaggccgtcgagaaggccaggcgcaagctccgcgccctcatcgccagaagagctgcgcgcccctcatgctccgcctcgcgtggcactccgcggggacgttcgacgtgtcgtcgaggaccggcggtcccttcggtactatgaagtgcccggcggaactggctcacggcgccaacgcggggctgga

SEQ ID NO: 58897 - DNA, 152 bp, Zea mays
catgggtgctgcacttcagggtggcattctccgtggagatgttaaggagcttcttcttcttgatgttactcccctgtcactaggtattgagacgctcggtggtatcttcaccagattgatcaacagaaacactacaatcccgaaaagaaaag

SEQ ID NO: 58898 - DNA, 297 bp, Zea mays
gaaaaggagaaggctgaggaggctgctgctggtgcagatggtctttctgacttccagaagaagatttttgacgtcctgtacaagattgctgatattccgttcttggcaccctacaagaccaagattattgatgttatcgagaagggagagaagcacccaacatcactattggcattttggtctccgttgtcatcgtgttcgttaccgttctcttcaagatcctttttggtggcaagaagccggtggcacctgtgaaacctgcagctgaggcgaagaagcccaaggccgcggagacgg

SEQ ID NO: 58899 - DNA, 292 bp, Zea mays
cgaacataaaccctagagccgccggcccggtcgcgtacgcacaaatctcaaatcacccggagagaactcgctcgcgaaggctgaactcatggctcgcgtcttcgttgggaacctggatccgcgtgtcacggcgcgggagattgaggacgagttccgacgtttggggttctgaagagtgtatggttctagaaaccaccagggtttgccttcattgacttcgatgaccgcgggatgcacaagattgccattcgcgatttggatggtaagaatggttggagggttgagctgtcaa

SEQ ID NO: 58900 - DNA, 301 bp, Zea mays
gagaacaatgagaacaagcctgtcacaaacagccgcgacactcaggagatacgcctcgaacaaggccttcagatgctcaagatattcaaggatcatgtcagcaagacttccatcctcgacgactttgccttctacgagagccgccagaagttgatgcagataagaggtcgatacagcagcagctccaaaagcaggtctgggacactaggacccccgtttctgtcaccggtgagcgaccgcaggaacctgctaatgggaagcccatccgtccgtaccagatggtgtcacggcagaggtgaag

SEQ ID NO: 58901 - DNA, 306 bp, Zea mays
  unsure (1)..(306): unsure at all n locations
gaaaaaatggcgacttgaaatctgtcaatgatcttgcaaaggaaggagcgcgtaaaaatgacaggcttgttgctaatttagctaaccaaattgaggtgaacaataggtatttacaggaactagaatgcaaatacagtgagacaactgcatcacttgagaagtattngggcaaagggaccaacttctccagtcatacaatgacgaaattagcaagatgcagcagctagctcgcaggcattctcagaagatcattgtgagtaatcaaagctgcgttctgaccttgaggtcaagatgaatgatcttgat

SEQ ID NO: 58902 - DNA, 131 bp, Zea mays
gttatggtactccagaacattggaacatcagttctcgtctccccgaaccagcttccagatctccaccaactgctggttgaggctgcgaagtcttgaacaccgaagctcctgacttgtacataaggcagaat

SEQ ID NO: 58903 - DNA, 286 bp, Zea mays
gccgaagacaaaactcctgggggccttatcctcactgaaacaactaaagagaagccgtccatcggaacggttgtagctgttggcccgggtcctctggacgaggaaggcaagagacagccactgtcagtgccggcgggcagcacggtgctgtactccaagatgacgggagtgagttcaaaggcgcggattgcacgggctacattgtgttgagagcgtctgatgtgatggctgtcctgccttgagcatttcgtcttcggctcgttaatgtagtttgcaaccaatagtt

SEQ ID NO: 58904 - DNA, 138 bp, Zea mays
tgaagcagctccagcagctgtagcacggctcttttcaattgactggtacatggataggattaatggcaagcaggaggtcatgattggatattcagactctggcaaagatgccgggcgtctctctgcagcatggcaaat

SEQ ID NO: 58905 - DNA, 283 bp, Zea mays
ctctccgcttccaagatgtcgaagcgaggacgtggaggttctgctggtaacaagttccggatgtcactgggtctaccagtggcagccactgtgaactgtgctgataacactggagccaagaacctttacatcatttctgtgaagggatcaggggcgccttaacaggcttccttctgcctgtgttggtgacatggttataggcactgtgaagaaagggaaagcttgacttaggcagaaaggtgatgccagctgtcattgtgaggcaacgaaaccatggcgccga

SEQ ID NO: 58906 - DNA, 285 bp, Zea mays
atgggcagtagtggatgtgtccattgacggattggtgagagatcacaactctggaacagcatccaacttcggacatatacggtgcaggaggttgccttctggctgtgtgatgcaggacactcccaatggctactgcaaggtcacatgggtagatacatagaatacgacgaggcgtcagtacaccagctctatagaccactcatccggtccgggctggcctttggggcaggctgtagcttgcaatctgagcgcagtgcgaatgctgcatatcatgtcctgatacag

SEQ ID NO: 58907 - DNA, 316 bp, Zea mays
cacggggaactggatttatgcaccgtgcttttcaggcatatgctaaatacagaggtccactgggcagtgtcagaaaaggagttctgatatctgttggtaagggacttatcacttcacatgcccttatgagtttagaagctcgtgggatcctctttgtatcccctggaatggaggcatatgaagggatgatagttggtgagcactcacgtgacagtgatcttgaggtgaatcctgtgagaactaaagaacttacaaatatccgagcccctggaaaggatgaaaatgtccgtttgtctccaccccgattgatgagttt

SEQ ID NO: 58908 - DNA, 302 bp, Zea mays
tggaggtggagtcgtctgacacaatcgataatgtcaaagccaagatccaggacaaggagggcattccaccggaccagcagcgcctgatctttgctggcaagcagctggaggatggccgtaccctcgccgactacaacatccagaaggagagcaccctaccacctggtgctccgcttgcgaggtggtatgcagatctttgtgaagaccttgactggcaagaccataaccctggaggttgagagctccgacaccatcgacaacgtgaaggcgaagatccaggacaaagagggctccccccagac

SEQ ID NO: 58909 - DNA, 307 bp, Zea mays
cagttcgcatcggagatgaagacacttggccgggtgaggcaccggaacttggttccgctcttgggattctgcgtcgccaagaaggagaggttgctggtgtacaagcacatgcccttgggctcgctctacgaccagctaaacaaagaggaaggtagcaagatggactgggcgctgaggctacggatcggcatcggtgcagcgaaagggcttgcgtatctccaccatacctgcaatcctcgagttctccaccgcaacatcagctccaagtgcatcctcctggacgaggactacgaaccacagatatcgg

SEQ ID NO: 58910 - DNA, 244 bp, Zea mays
cgggagcagtcgacgcgccgtcactgaatcctcagatcacggctagccgtaatcacacgccactctgctgactcccggcgagcagtgtaacattttccttcagccatgggcaaggagaagactcatatcaacattgtggtcattggacatgtcgactctggcaagtcgaccaccactggccacctgatctacaagctcggcggtattgacaagcgtgtgattgagaggttcgagaaagaggcgc

SEQ ID NO: 58911 - DNA, 237 bp, Zea mays
gaactatgtcaagacatggttcaaccagcccgcccgcaagcagaggcgccgcatcgctcgtcaaaagaaggctgtgaagatattcccacgcccaactgctggccctcttcgccccatcgtgcaatgccagaccctcaagtacaacatgaagtcgagggctgggagaggatttacccttgaggagctgaaggctgccggcattccaaagaagcttgccccaaccattggcatttctgt

SEQ ID NO: 58912 - DNA, 297 bp, Zea mays
cacacacacaaccagatctcccccaaatccacccgtcggcacctccgcttcaagatgcagatctttgtgaaaaccctgactggcaagactatcaccctcgaggtggagtcgtctgacaccattgccaacgttaaggccaagatccaggacaaggagggcatccccccagaccagcagcggctcatctttgctggcaaacagcttgaggacgggcgcacgcttgctgactacaacatccagaaggagagcaccctccaccttgtgctccgtctcaggggaggcatgcagatctttgtg

SEQ ID NO: 58913 - DNA, 123 bp, Zea mays
cttttgctcggaacgcacacaccgcccggtctccgatctccgatccccgatcccctcgtcgatccaagatgcagatcttcgtcaagactctcactggaaagactatcaccctcgaggtggagt

SEQ ID NO: 58914 - DNA, 298 bp, Zea mays
ggagcgcacacacacacaaccagatctcccccaaatccacccgtcggcacctccgcttcaagatgcagatctttgtgaaaaccctgactggcaagactatcaccctcgaggtggagtcgtctgacaccattgacaacgttaaggccaagatccatgacaaggagggcatccccccagaccagcagcggctcatctttgctggcaaacagcttgaggacgggcgcacgcgtgctgactacaacatccagaaggagagcaccctccaccttgtgctccgtctcaggggaggcatgcagat

SEQ ID NO: 58915 - DNA, 302 bp, Zea mays
gttcggagcgcacacacacacaaccagatctcccccaaatccacccgtcggcacctccgcttcaagatgcagatctttgtgaaaaccctgactggcaagactatcaccctcgaggtggagtcgtctgacaccattgacaacgttaaggccaagatccaggacaaggagggcatccccccagaccagcagcggctcatctttgctggcaaacagcttgaggacgggcgcacgcttgctgactacaacatccagaaggagagcaccctccaccttgtgctccgtctcaggggaggcatgcagat

SEQ ID NO: 58916 - DNA, 295 bp, Zea mays
attgaggctccggtgaagacgaacaagatcccaagacaggtccctgagcaggcttggtacatgaaccctgccttcaccattctgattggtggcatacttccgttcggagcagtcttcatcgagctcttcttcattctgatttgtggcatacttccgttcggagcagtcttcatcgagctcttcttcatcctgacgtcgatctggcttcaccagttctactacatctttggcttcctgttcctggtgttcattatcctcatcatcacctgtgcggagatcacgatcgtgctgtgct

SEQ ID NO: 58917 - DNA, 306 bp, Zea mays
ccctgttcagtatgatgctgcaaagttctttgtcattaaatcgtacagtgaggatgacatccacaagagtgtaaaatacaatgtgtgggcaagcacaaccaatggaaataagaagctcgatgctgcttatcaagaagctcagtcgaagggttctgcgtgccctatattcttgtttttctcagtgaatacaagtgggcagtttgttggtgttgctgaaatgacgggggctgtcgattttgagaaaacctggggtattggcaacaggacaagtggaatggttccttctctgttaagtggcacattgtc

SEQ ID NO: 58918 - DNA, 298 bp, Zea mays
tgttacattagcacacttgcaggctgttacaaaagccaagctacgttacgatcctctggaggttaatccagaagatatggttcgctttgcaatggagcagccacagacaatggcttcgtattctgtatcagacgatgttgcaacatactatctatacatgacttatgtccatcctttcatctttgctcttgcaaccataatacctatgttacctgatgaggtactgtggaaaggaagtgggacactttgtgaaattctgctaatggttcaggcattcaggctggaggcaccaactatg

SEQ ID NO: 58919 - DNA, 304 bp, Zea mays
attttctggaggtcgtctttggacatgtacaaacaatctcaacctatgttgaaagtttttattcaattagtgctatccctatcctataacatatgtcatcattctggactcgatcccatcttgtatggacataaatccaacgcaagatacacaattttgcaacacttatatattgaacatgttgtcttttttgtaggccaacattttgcaccatacaacatagcaagctaatcgctatcctataaaattcgtcttttagtttatgtggtatcctcttgtcatatagaatgtcaggtacttgacg

SEQ ID NO: 58920 - DNA, 288 bp, Zea mays
gggtttttgattttagccgccgccgctgctcatctcacatccctcgagaagacgcctgctcctcgccgatcgatacgatggccgtcttctccgacctccacaccgccgacggcctcaagtccctacgaggctcacctcgccggcaaaacctatgtgtctggtgactccattactaaggatgacattaaggtcttcgccgcggtgccgtcgaagcctggcgctgagtttcctaatgccgcccgctggtacgagaccgtctctgcggctgtagcctcaagattccctggt

SEQ ID NO: 58921 - DNA, 295 bp, Zea mays
tggagctgttagagttcttcaacggttatttccagaacccggaaggcttcaatttatttatgctgatttaggcgatgccaaagctgtgaacaaaatattttcggagaacgcatttgatgctgttatgcactttgctgctgttgcttatgttggtgagagcacaatggagccactcaggtactaccacaacataacgtcaaacacattgacagttcttgaggcaatggcagcacataatgtaaatactctgatttactcgagtacgtgtgcaactatggtgaactgatacaatgcg

SEQ ID NO: 58922 - DNA, 304 bp, Zea mays
gacaagtggaacggctccttctctgttaagtggcacattgtcaaggacgtgcccaacaatattctcaagcacatcatcctggagaacaatgagaacaagcctgtcacaaacagccgtgacactcaggagatacgcctcgaacaaggccttcagatgctcaagatattcaaggatcatgtcagcaagacttccatcctcgacgactttgccttctatgagagccgccagaagttgatgcaggataagaggtcgaaacagcagcagctccaaaagcaggtctgggacactaggacccccgattctg

SEQ ID NO: 58923 - DNA, 297 bp, Zea mays
aattgatcaaacacgtatgtggaaggtgggtgaaagggtccgttcaaccaggccacaaggtgatcttggcccactgcatcccttcactgctggagtgtatgttgcactaatgatggctcagattgaggtccttaggaagaagggccactcttactcagagataattaacgagagcctgatcgagtctgtggactcgttgaacccgttcatgcatgcccgtggtgtggcattcatggtcgataactgctccacaactgctcgtttgggatctaggaagtgggcaccacgcttcgatta

SEQ ID NO: 58924 - DNA, 293 bp, Zea mays
gttcagttctgctatgagccaatcaagcaaatcatcaagacctgcatgaatgaccagaaggagaaattgtggcccatgctgcaaaagctcaatgttaccatgaaggctgatgagaaggagttgattggcaaagctttgatgaagcgtgttatgcaaacgtggcttccagctagcactgctctgcttgagatgatgatattccaccttccttccccagcaaaggctcaaaagtatcgtgtggagaacttgtacgagggaccccttgatgatgtgtatgctactgctatcagaaa

SEQ ID NO: 58925 - DNA, 294 bp, Zea mays
gaaacctctcaaaccctagccgcctcctgcaagtttcagagctcaggaatctgcgccatggcgagtgagacggagaccttcgcatttcaggctgagatcaaccagctgctctcactcatcatcaacaccttctactccaacaaggagatcttcctccgcgagcttatctccaactcttccgatgcgctggacaagttcaggttcgagattctcattgacaggagcaagctcgatcggcacctgagcttttcatccaccttgtcccagacaaggccacgaacacgctctccatca

SEQ ID NO: 58926 - DNA, 167 bp, Zea mays
gaaccgcatcctcatgccgatgatcaacgaggccttccttggctctgtacaccggagtggcaaccaaagaggacatcgacgcagggatgaagctgggcacgaaccacccgatgggcccgctgcagatcgcctacttcatcggccggatgtctgcctctcagtacttc

SEQ ID NO: 58927 - DNA, 280 bp, Zea mays
gagaggtttgatcgtgatcgaagtggcaggatcgacatgtcagaactgcgcgatgctcttctcagtctcggatattctgtgtctccaactgtccttgatctgcttgtgtctaaatttgacaagactgggggcaagagaaagcaatcgaatatgacaacttcattgaatgctgcctcactgttaaggggctgacagagaagttcaaggagaaggacaccgcctactctgggtcggcgactttcacctacgaggccttcatgctgaccgtgctgcctttcct

SEQ ID NO: 58928 - DNA, 284 bp, Zea mays
gaagaaggtcatgcccgccgtcatcgtccgccagcgcaactgtgagcgccgcaaggacggagtctacatgtacttcgaagataatgcctggagtcattgtgaaccccaagggcgagatgaaaggatctgccatcactggacctattggcaaggagtgcgctgacctttggcctaggattgctagtgcagcaaatgctattgtctgatactactggttgggaggctgggctgagatagttttattgtgatccattttaaccttttctgtacttcaacatctgtgg

SEQ ID NO: 58929 - DNA, 280 bp, Zea mays
tcatcatggacaactgcgaagagctgatccctgagtggctgagcttcgttaagggtattgttgactctgaggaccttcccctcaatatctctcgtgagactcttcagcagaacaagatcctgaaggtgatcaggaaaaccttgtgaagaagtgtgttgagctcttctttgagattgctgcgaacaaggaggactacaacaagttttacgaggctttctccaagaacctcaagcttggcatccacgaggactcgcagaacaggaccaagatcgctgagctt

SEQ ID NO: 58930 - DNA, 283 bp, Zea mays
gtctcagagaagtttcggtcttattaccttggcacacataatggcaggaggctaacatggcaaacaaacatggggacggctgacatcaaagtaacatttggaaatggaagcaagcatgaactgaacgtatcaacataccgatgtgtgttctcatgctgtttaactcagcagatgtcttgacttaccgtgaaattgagcagtctacagcaataccagccgctgacctgaagcgatgcctccagtcactagctcttgtgaagggtaagcaagtccgcggaaagag

SEQ ID NO: 58931 - DNA, 281 bp, Zea mays
tcatcatggacaactgcgaagagctgatccctgagtggctgagcttcgttaagggtattgttgactctgaggaccttcccctcaatatctctcgtgagactcttcagcagaacaagatcctgaaggtgatcaggagaaccttgtgaagaagtgtgttgagctcttctttgagattgctgcagaacaaggaggactacaacaagttttacgaggctttctccaagaacctcaagcttggcatccacgaggactcgcagaacaggaccaagatcgcagagctt

SEQ ID NO: 58932 - DNA, 277 bp, Zea mays
aaacaacatcaagctctatgtgcgcacggtgtttatcatggacaactgtgaggaactgatccctgagtggctgagttttgttaagggtattgttgactctgaggaccttcccctcaatatctcccgtgagactcttagcagaacaagatcctgaaggtgatccggaagaaccttgtgaagaagtgtgttgagctcttctttgagattgctgcaaacaaggaggactacaacaagttttatgcaggctttctccaagaacctcaagcttggcatccat

SEQ ID NO: 58933 - DNA, 282 bp, Zea mays
ctggaagcaggccaggtggattgatagcgggacttgggctgctatgatgtctctcggactgaacggctacttggacagtacaagccgtatcatggatgtttcaaagaaaatacaaagagggattggagagatcccgggttgtttgtgatagggaaaccggatatgaccgttgtggcgttcggctcagacgttgtcgacatatttgaggtgaacgacataatgtcatcaaaaggttggcatctcaatgctctgcagagacctaacagcttgcatatctgtgtg

SEQ ID NO: 58934 - DNA, 276 bp, Zea mays
tgctgctgagctccaagatgtgcttatcaatcttaatggcactaaggaatcaataaagggagcgaagtcatggtttatgcaaagattgccgttcgcgccggctctggctgaagctcttaaggagagagtatttgtcttggaggattcggagcggcagctgcacataattttcctggtgaacgatattctttttgaaagcttacagagacgaactagtattcgggaccttgacaatgaggctattgctttcaaatccgtactgggtcccatgcttgc

SEQ ID NO: 58935 - DNA, 287 bp, Zea mays
gtcactgatgaaatgctgctggagcttttctccagcaagtaccgctcggtgaaaggagctaaagttattattgatgcaaacacaggccgttccaggggctatggatttgtcaggtttggagacgacaacgacaaatctcatgccatgtctgaaatgaatggtgtatattgctctacgaggccaattcgtataggacctgcgactcccagaagatcttcaggtgattctggctcctcgactcctggtcattcagatggtgattcttctaacagaacggtatatgttgg

SEQ ID NO: 58936 - DNA, 276 bp, Zea mays
ctccaccaccatcggtgggcagaacggcgagccgaagcggaccatcagttacatggcagaacgtgtcgtgggcacgggctcatttgggatcgtcttccaggctacgtgtttggagactggagagaccttcgccataagaaggtgctgcaggatcggcgttacaagaaccgggagctgcaacttatgcgtgccatggagcaccccaacgtcatctgcctgaagcactgcttcttctcaacaacgagcagggacgagttgtttctacaccttgtcatg

SEQ ID NO: 58937 - DNA, 274 bp, Zea mays
gatagctgctccaataaggaggacatcaaacttctttttcaaattttgcagaaactcagagtatttagactatcaaatcttcgcatcagtgcaaacttcaatgagcatctctgcagaaaagtaactgaggctgtgctcgtgtaggtgccgttgactatgggttgaaggctttatggaaacataatgtttatggaataacaccaacgattggttctgctcattatctactgcaacatgctaaagagcaaaatgacacacccaccatggaaaacgt

SEQ ID NO: 58938 - DNA, 166 bp, Zea mays
accagatctcccccaaatccacccgtcggcacctccgcttcaagatgcagatctttgtgaaaaccctgactggcaagactatcaccctcgaggtggagtcgtctgacaccattgacaacgttaaggccaaatccaggacaaggagggcatctccccactccagcag

SEQ ID NO: 58939 - DNA, 274 bp, Zea mays
ctttgatctctttgacaccaagaagaagcaaaacaacatcaagctctatgtgcgcagggtgttcatcatggacaactgcgaagagctgatccctgagtggctgagcttcgttaagggtattgttgactcgaggaccttcccctcaatatctaccgtgagactcttcagcagaacaagatcctgaaggtgatcaggaagaaccttgtgaagaagtgtgttgagctcttctttgagattgctcagaacaaggaggactacaacaagttttacgagg

SEQ ID NO: 58940 - DNA, 270 bp, Zea mays
ggggcttggctggacagagaaggctctggcggtgctcatcagcctcgcggccacccaagctggccgaaaggagatcatgtccacccctggcttggtcagcacgctggcgatgctgctggacacgggcagtcgacggagcaggagcacctactgtcgtgcctcctggtgatgtgcggcgccgacgacaagtgcatcgcgccggtgctccaggaaggggtggtcccgtccctcgtctccatctcggcggccgggactgggaggggccaggag

SEQ ID NO: 58941 - DNA, 271 bp, Zea mays
ccggaatagttttcggctacggtttcggcttcctgatcatcatggtcggggcgaccatcggcatgtctataccttactggatcggcctactgttccgcgaccgcctaaacctctggctggagaagaatggccacggcagattgctctgatcaaactggtaggtcaagggagctggttccagcagttccgcgtggccgcgttgctcaggatctcgccgttcccatacgcgttgttcaactacgctgtaaccgtgacggagatgaagttcgtc

SEQ ID NO: 58942 - DNA, 266 bp, Zea mays
accagatcttccccaaatccacccgtcggcacctccgcttcaagatgcagatctttgtgaaaaccctgactggcaagactatcaccctcgaggtggagtcgtccgacaccattgacaacgttaaggccagatccaggacaaggagggcatccccccagaccagcagcggctcatctttgctggcaaacagcttgaggacgggcgcacgcttgctgactacaacatccagaaggagagcaccctccaccttgtgctccgtctcaggg

SEQ ID NO: 58943 - DNA, 275 bp, Zea mays
gccacaaacaactgctcctcctgcattccccctttccccttccgtccgctgcattcctgctctcttgctctcctcgctctcagaccacagttgctgccgccgccgccctaagccagggtgctgaggctttcgtggcctcttcgccggcagcgagcacccaccagcagttctgtagaaatggctgatggtgaggacatccagcctcttgtctgcgacaatggcaccggaatggtcaaggctggttttgccggcgatgatgcaccaagggctgtatt

SEQ ID NO: 58944 - DNA, 282 bp, Zea mays
gtacttgtcatcttgacagatatgagctcttatgcagacgcacttcgtgaggtttctgcagcccgagaagaggtgccaggtaggcgtggttatcctggatatatgtatactgatctggcaacaatatatgagcgtgctgggcgtattgaaggaagaatagggtccattacccaaattcctattctgacaatgcctaatgatgatatcacacacccaactccggaccttactggatacattactgagggacagatatacattgataggcagctccataacaga

SEQ ID NO: 58945 - DNA, 301 bp, Zea mays
caacactcaccgatagcaagtagcgccgccgacgtttcgagagcagagtatccaagctagccaagcgcgcacctcggtgacctagctagttcaggcgacgatatggcgtcaggtcaggaaagcaggaaggagctggaccgcaaggcccgcgagggcgagaccgtcgtccccggcgggaccggcggcaagagcgtcgaggcccaggagcacctcgccgaaggtatatatagccgactgcggctaaccatctgcatatgttaattcactgtcgttggctttaattacacgagtagtgtggcta

SEQ ID NO: 58946 - DNA, 275 bp, Zea mays
cacacaaccagatctcccccaaatccacccgtcgtgacctccgcttcaagatgcagatctttgtgaaaaccctgactggcaagactatcaccctcgaggtggagtcgtctgacaccattgacaacgttaaggccaagatccaggacaaggagggcatccccccagaccagcagcggctcatctttgctggcaaacagcttgaggacgggcgcacgcttgctgactacaacatccagaaggagagcaccctccaccttgtgctccgtctcagggga

SEQ ID NO: 58947 - DNA, 300 bp, Zea mays
tcgacgcgccgtcactgaatcctcagatcacggctagccgtaatcacgccactctgctgactcccggcgagcagtgtaacattttccttcagccatgggcaaggagaagactcacatcaacattgtggtcattggacatgtcgactctggcaagtcgaccaccactggccacctgatctacaagctcggcggtattgacaagcgtgtgattgagaggttcgagaaagaggccgcggagatgaacaagcggtcattcaagtatgcctgggtgcttgacaagctcaaggccgagcgtgagag

SEQ ID NO: 58948 - DNA, 303 bp, Zea mays
gggttttagcttctgccgccgtaacctcacctcccggcccttgtcgccgcaagtccgcaacctcaccatccttcgaatcccatacgaatccctagcccgcaacccgccgggcgacgagcggcggagccgcagccaacatggaccggtaccatagggtggagcgggcgcggaaccagtcgaccatcgaagagaacgagatccgcatcaccgcgcagggcctcatccgcaactatgtctcatatgctaccttcctcctccaggaaaggagaattacagagattgttttgaaggccatgggacagg

SEQ ID NO: 58949 - DNA, 298 bp, Zea mays
ggcggcctgaaatctggtggtaatgcttatgtgattggagatccagcaagacctggacagaagtggcacgtcttctacgccactgagtacccagagcaaccaatggttaaccttgagatgtgcatgactggtctggacaagaagaaagcttgtgtctttttcaagactaatgctgatgggaacacaacatgtgccaaggaaatgacaaagctctctggcatctctgaaatcatccccgagatggagatctgcgattttgacttcgaaccctgtggctactccatgaatgcgatccatg

SEQ ID NO: 58950 - DNA, 297 bp, Zea mays
gccgccgtcaccgtcgtcgctcgcgctctccgcccggatcggagcgagagtaggggcgtgtcggcggtgaaagcgactgcgtcagccatgagcggacgaggagcattcggagaggagagaggaggcctccgagcttgcccccttcgacccgaccaagaagaagataccgacgaaggttgtcatccaagaaccttctgatgaagtggacaagcttgcagagaagacagaaacactggcagtcgcagaacccgctgaacttaacttcactggaatgaagaagaaaaagaagaagccggt

SEQ ID NO: 58951 - DNA, 295 bp, Zea mays
gttctgcagacgtctacaggcagcaaaaagatagtcggggtgttctacaaggccggggagtatgccgacaagaaccccaacttcgtcggctgcgtcgagggtgcactcggcatccgcggctggctcgagtcgcagggccatcaatacattgtcaccgatgacaaggaaggccccaactgtgaactggagaagcacattgcagacatgcatgtcctgattaccaccccattccacccagcttatgtcactgcagagaggataaagaaggcgaagaatcttgagcttcttctcacgg

SEQ ID NO: 58952 - DNA, 300 bp, Zea mays
gtatcaagacaaatgttgtgaacatggttgacatagcaaaagcacttgccaggccagcttcctacacaaccaagtacattggatgtgagcttggtgcacagtccaaatttgatgagaagacagggatttccttggttaacggggctcatgatactgcaaagctggctggtctccttgaggtattcatcaagaagtatgtccaatgttatgggtgtggaaatcctgagacagagattctcatctcaaagacccagatgatatcactgaaatgtgcagcctgtgggttcgtctcagatgttg

SEQ ID NO: 58953 - DNA, 299 bp, Zea mays
gttcccgtgcaatcttcgttgatctagaacccactgtgatcgatgaggtgcgcactggcacgtaccgccagctcttccaccctgagcagctcatcagtggcaaggaggatgccgctaacaatttcgcccgtggccactacacaattggcaaggagattgttgatctgtgccttgaccgtatccgcaagcttgctgacaactgcaccggcctccaaggcttcctggtcttcaatgccgttggtggtggcactggctctggccttggttctctcctccttgagcgcctgtctgtggagtac

SEQ ID NO: 58954 - DNA, 294 bp, Zea mays
aaggcagatgcctgcgatgggtgccccaaccagcagatttgcgccaccgcccccaaggggcctgatcccgatgtggttgctattgttgagaggttggctactgtgaaacacaaattgttagttttgtctggaaagggaggtgttggaaaaagcacattctctccccaactctcgtttgccctagctgaaatggaccatcaggttggccttcttgacatagatatatgtggccctagcatccctaaaatgctaggccttgaaggacaagatattcatcaaagcaaccttggctgg

SEQ ID NO: 58955 - DNA, 290 bp, Zea mays
aaaacctccaaggctccaaccctagccgcgatccgacaacgcctccatccctagccgactgctgccagcttcagagctcaagagtcagggcgccatggcgacagagacggagaccttcgcctttcaggctgagatcaaccagctgctctcactcatcatcaacaccttctattccaacaaggagatcttcctccgggagctcatttccaactcttccgatgcgttggacaaaatcaggttcgagagcctcactgacaagagcaagctcgatgcgcagcggagctgttcat

SEQ ID NO: 58956 - DNA, 292 bp, Zea mays
cgaatccgccgcgggcgtcatctcctcttcccacctcgactcgccttgctcgccggcggcggccttttcttcgccgagcggcgagccgcccatgttgagctcgtggctgatctgatgggcttgttgtgatctcctgcagataaggaagaggaggagggcaggatgtcgcaccgtaagttcgagcacccgaggcacggctccctcggcttccttcccaggaagcgctcctcccgtcaccgcggcaaggtgaagtcattccctagggatgacgccaagaagccttgccatctca

SEQ ID NO: 58957 - DNA, 288 bp, Zea mays
tcaagggggagatcgccctcgtgccccagtcccccgacaggtcgctcgcgcgccacaagttcgtcgacgactgcgaggcagccatcaacaagcagatcaatgtggagtacaacgcctcgtatgcgtaccactccctcttcgcctacttcgaccgcgacaacgtggccctcaaaggatttgccaagttcttcaaggaatccagcgacgaggagagggagcacgctgaaaagctcatggagtatcagaacaaacgcggaggcagggtgaggctccagtcgattgtggcgc

SEQ ID NO: 58958 - DNA, 285 bp, Zea mays
ctcaaacacaatgtttggcgtgtgaagggtatcatccagatctcaagatctattggagatgtatatctaaagaaaccagagtataatagagaaccgcttcacagcaagtttcggcttcgagaaaccttccagaggccgatccttagttctgaacctcaaattactgaacatcgaatacagccaaacgatcaatttgttatatttgcttctgatggtctatgggagcacctcagcaataaggaagcagttgaccttgtccaaagtagtccccgaaatggaatcgct

SEQ ID NO: 58959 - DNA, 298 bp, Zea mays
gtaactaataagcgggtgatgctgcttcagtgcttggatctagataaaatggacaagaaaccttctaaaatactttgggatgttccttgggaagaagtactttcattggagctagcaaaagctgggtatcagaggccttcacatgtaatcatacatctgaagaattttaggaggtcagagaactttgtaaggcttattaagtgcaacattgacaacgaacgggaacctcaggctctttcactttgctgttcaattcggaaaatgtggagatctcaccaagcagcaatgaaagttatac

SEQ ID NO: 58960 - DNA, 288 bp, Zea mays
gattgtcatcaagacctgtggcactaccaagctcctgctcaccattccaagaatccttgagcttgctgaagagctgtctatgccacttgctgctgtgacgtactcccgtgggacgttcatctttcctggcgcacagccagacccccacaggagcttctctgaggaagttgctgcacttaaccgctactttggcggcctgaaatctggtggtaatgcttatgtgattggagatccagcaagacctggccagaagtggcacgtcttctacgccactgagtaaccagagca

SEQ ID NO: 58961 - DNA, 280 bp, Zea mays
aaacacttcccagccctccacgcaccccgctgccgcggctcgaacataaaccctagagccgccggcccggtcgcgctagcgcacaaatctcaaatcacccggagagaactcgctcgcgaaggctgaactcatggctcgcgtcttcgttgggaacctggatccgcgtgtcacggcgcgggagattgaggacgagttccgcacgtttggggttctgaagagtgtatgggttgctaggaaaccaccagggtttgccttcattgacttcgatgaccgcaggatg

SEQ ID NO: 58962 - DNA, 284 bp, Zea mays
ctcaatatctctcgtgagactcttcagcagaacaagatcctgaaggtgatcaggaagaaccttgtgaagaagtgtgttgagctcttctttgagattgctgagaacaaggaggactacaacaagttttacgaggctttctccaagaacctcaagcttggcatccacgaggactcgcagaacaggaccaagatcgccgagcttctgagataccactccaccaagagtggtgatgagctgaccagcctcaaggactacgtgaccaggatgaaggagggacagaatga

SEQ ID NO: 58963 - DNA, 290 bp, Zea mays
tatattctgggccaacagaccaaagagctatcttaaaaggacattaggttgggatcagtatccccatggacggtggggtgattctcggaacccatcatatggagcacttactgaccaccagttcacaagaccacgaggccgtggtaagaagctccaagaggaatgggctgttccactgaaatctgtggaggacattagtgagcgcttcacaaacttctgtcaagggaaactcacaagcagcccatggtcagaattggacggtcttcaaccagagacaaagattatcgatg

SEQ ID NO: 58964 - DNA, 190 bp, Zea mays
atggggagaagcttaattctatgaatctgttattgtacatggctccaattgctgttattttcttgcttcctgcaactatctttatggaggataatgttgttggcatcacaattcagcttgcaaagaaggatttcacgattgtttggttgctactgttcaattcttgcttgtcatattttgtcaatttgac

SEQ ID NO: 58965 - DNA, 286 bp, Zea mays
gcttctctcccggcggcgcctccacatctcgtctctcaaatcgggaggcgaaaccaaggcatacatatacatatttgtagtggtaccatcataacaagtaaagatggtgaagttcacggctgaagagctccgtgccatcatggacaaaaagaacaacattcgtaatatgtctgttattgctcatgtggaccatggcaagtctacacttacagattcccttgtggcagctgctgggattattgcccaggaagttgctggtgatgttcgcatgactgatactcgtgca

SEQ ID NO: 58966 - DNA, 286 bp, Zea mays
ctgaggtgcagcgcaagtacatgatctacaactactgcaccgaccccaagcgctaccagcagggcctccccgccgagtgctccatgcagtagcgcccggttattcctcgcccgtccaacaatggcgcgcgcgcgcgtgtgtgtgcatgtggtccgctctactgctaccgctacgacgatcggtgtcgatcaccggatcaaggcaagacgaaaggcatcgaaacatggtagataaataaaggacttgacgatttgtaacgcatagctggtgcgtgcgtggtgtggtg

SEQ ID NO: 58967 - DNA, 281 bp, Zea mays
gctgtgcctgatagagcaaagtacaatagagatgacttccctgttcagtacgatgctgcaaagttctttgtcattaaatcgtacagcgaggatgacatccacaagagcgtaaagtacaatgtgtgggcaagcacaaccaacggaaacaagaagcttgatgctgcttaccaagaagctcagtcaaagggatctgcatgccctatattcttgttcttctcagtgaatacaagtgggcagtttgttggtgttgctgaaatgactggcgccgttgattttgagaa

SEQ ID NO: 58968 - DNA, 290 bp, Zea mays
taaatcttctaggcaaacaactgctagagactttgtgaaacactataatgggcgtgtagagaagttaattgaggtctttaaaactggggtatcctctgttgcccttacctctgacatttggtctggaaaggctaaagaggattacatttctgttgttgctcactttgtgaaccctaattgggagttagagaaaaggttgcttggtctaaggccaattgaagacgaccatactggtaagaacattgctgaacgtgtttccttggtggtagatgagtatggcttaactgata

SEQ ID NO: 58969 - DNA, 301 bp, Zea mays
ccttcggaaggttgcgccggcggtgcgtgacctttgcaagaagcatgggctgacctattccgcagcctccttctgggacgcaaatgtgcttacatggaagacactcagggctgccgcattgcaggccaggagcgccacaggcggcggcggcggcgctccgaagaatttggtctgggaggcattgaacacccatggatgataaacgggacgaggatatggctgaggggaaggcaacttctggtgtttcagctttgtgccgacgcgattgtctggttgcttctaatctcagttgtttagattg

SEQ ID NO: 58970 - DNA, 287 bp, Zea mays
cttgatccttctggccgtgctgctttgggtgttcacgatgctgcgtatgaagacactgcagggaaaactcctgcctctgctgatcctgtctcagacaagggccttcgtccagctattggcgaaagcctagggacacccgttgcttcagccacagctgtctaacctcctgtttatcacccagcaatgcttgaaacagcaaaggttgtccattgcttgtttcagtttccttccgatcatgtttttagttccatcaatcaagcaatggagacatgcttgtgcttcatact

SEQ ID NO: 58971 - DNA, 286 bp, Zea mays
gaatgacatatactatatcactggtgagagcaagaaggcagtggagaactcccccttccttgagaagctgaagaagaggggctatgaggttctgtacatggttgatgccattgacgagtatgctgttggtcagctcaaggagtttgagggcaagaagcttgtctctgccaccaaggagggtctgaagcttgatgagactgaggacgagaagaagaggaaggaggagctgaaggagaagtttgaggggctgtgcaaggtcatcaaggaggttctgggtgacaaattg

SEQ ID NO: 58972 - DNA, 286 bp, Zea mays
acaaggcctggcatggagacacttctaaacagaaagaaatctcaggtcgtcccgagaaaaaagttcggaagaggcacaagtatttgatgctgcttgcagttttagctgcctccatcacgtatcaagctggtctcaacccacccggtggtttctggtcctacgacaatgaaacccatgtggaaggcaatcctggcctgaaaccacctggtgccttgtggtctgataacaaaggtcatttggcaggcaatcctgttctccttgatattaatcctcggcgctacgaaat

SEQ ID NO: 58973 - DNA, 156 bp, Zea mays
ggagcgcacacacacacaaccagatctcccccaaatccacccgtcggcacctccgcttcaagatgcagatctttgtgaaaaccctgactggcaagactatcaccctcgaggtggagtcgtctgacaccattgacaacgttaaggccaagatccagg

SEQ ID NO: 58974 - DNA, 253 bp, Zea mays
gtcgaaccaacatgcagatcttcgtcaagactctcactggaaagactatcaccctcgaggtggagtcctctgacaccattgacaacgtcaaggccaagatccaggacacggaaggcattcccccggaccagcagcggctcatcttcgctggcaagcagctcgaggacgggcgcacacttgccgactacaacatccagacacagagcaccctccaccttgttctccgcctcaggggaggcatgcagatctcgtc

SEQ ID NO: 58975 - DNA, 280 bp, Zea mays
agagatccatgcaagaactgcttgaaggatgccggagtatctactaaagaggtggatgaagtacttcttgttggtggaatgactagggttccaaaggtgcaagaagtagtctctgaaatcttcgtaaagagcccaagcaaaggagtgaacccagatgaagctgtggccatgggtgctgccattgcagggtggcattctccgtggagatgttaaggagcttcttcttcttgatgttactcccctgtcactaggtattgagacatcggtggtatcttcacca

SEQ ID NO: 58976 - DNA, 283 bp, Zea mays
attgagaggtccaccaaccttgactggtacaagggcccaaccctacttgaggctttggacttgatcaatgagccgaagaggccttcagacaagcccctgcgtctccccctacaggatgtgtacaagattggtggtattggaactgttcctgttggccgtgttgagactggtatcatcaagcctggtatggttgttacctttggtcctagtggccttactactgaggtgaagtctgttgaaatgcaccatgaggctctccaggaggccccttcctggtgaaatg

SEQ ID NO: 58977 - DNA, 279 bp, Zea mays
  unsure (1)..(279): unsure at all n locations
attgagaggtcgaccaaccttgactggtacaagggcccaaccctacttgaggccttggacttgatcaatgagccgctgagaccttcagacaagcccctgcgtctccccctacaggatgtgtacaagcttggtggtattggacctgttccccctnggcgtgttgagactggtatcatcaagcctggtatggttcacacctttggtactagtggccttactactgaggtgaagtctgttgaaatgcaccatgaggctctccaggaggcccttcctggtgac

SEQ ID NO: 58978 - DNA, 282 bp, Zea mays
acaagctctgagctcatgtcatatatgcatctcctttacgagatctgcccattctacaagtttggttacatgtcagcaaatggtgccattgccgaggctattaagggcgagaactttgttcacataattgatttccaaattgctcaggggagccagtgggttactctgctacaggcccttgctgcaagacctggggggccaccatacattagaatcactggtatagatgactcaaattctgcttatgccagaggaggcgggcttgatatagttgggaggacg

SEQ ID NO: 58979 - DNA, 282 bp, Zea mays
cgtgctgcgaggagctggtgagcaggtgggcggcggagtcccttggctccgacggctcgtgcgagctggacgtctggccggagctgcagaacctgacgggagacatcatttctcgcaccgtgttcagcagcagctatagcgaagggagaaggatcttgctcatacaggtcgagcaagcttcgcttgtcatgaccaacattcggaagatcatgatccccggctacatgtacttgcctaccgcgaacaacaggacattgcgcaggaacaacagggaggtggagt

SEQ ID NO: 58980 - DNA, 270 bp, Zea mays
tgggttcaagtcaccagagcagatttcgcgtatccgaaacaccggtgtcaagccagagattctaaaacgtgttggagaagccatgactactctgccagaaaatttcaagcctcacagggctgtgaagaagatttttgatctacggcgtcagctcccacagactggagaaggcattgattgggcagtttatgaagcacttgcttttgctactcttataattgaggggaaccatgtcggttaagtggtcagatgttgagaggggtacattag

SEQ ID NO: 58981 - DNA, 280 bp, Zea mays
agagatccatgcaagaactgcttgaaggatgccggaatatctactaaagaggtggatgaagtacttcttgttggtggaatgactagggttccaaaggtgcaggaggtagtctctgaaatcttcgtaaagagcccaagcaaaggagtgaacccagatgaagctgtggccatgggtgctgccattcagggtggcattctccgtggagatgttaaggagcttcttcttcttgatgttactcccctgtcactaggtattgagacatcggtggtatcttcaccag

SEQ ID NO: 58982 - DNA, 278 bp, Zea mays
agagatccatgcaagaactgcttgaaggatgccggaatatctactaaagaggtggatgaagtacttcttgttggtggaatgactagggttccaaaggtgcaggaggtagtctctgaaatcttcgtaaagagcccaagcaaaggagtgaacccagatgaagctgacgccatgggtgctgccattcagggtggcattctccgtggagatgttaaggagcttcttcttcttgatgttactcccctgtcactaggtattgagacactcggtggtatcttcac

SEQ ID NO: 58983 - DNA, 286 bp, Zea mays
ccagtttgaagggccgtggaatgataaaaacactcgtttaatcacatgtgatcctcatgccagcaagcttgtggtaaactcagatactcctcaggaggttgaagccgggaaggaaatcatatttacctatgatgtaggcttcgaggagagtgatatcaagtgggcttctcgctgggacacctacttgttaatgatagatgatcaaattcactggttttctattgtgaactctctcatgatcgtactcttcttatctgggatggtggcaatgattatgctccgcacc

SEQ ID NO: 58984 - DNA, 283 bp, Zea mays
ggaggccgccgcgctccggagatgcaggccaaggttgccaaggagatgcaaggtgtagatcccaatgcaaccacatctgaaaacaaagaggagatggattctcggtcagtattcattggaaatgttgactatgcgtgcactccagaagaagtgcagcagcacttcaattcttgtggaactgtcaacagagttacaatcctgactgacaagtttgggcaaccaaaaggttttgcttacgtggaacccgtggaagttgaagctgttcaggaagctatcaagttga

SEQ ID NO: 58985 - DNA, 276 bp, Zea mays
  unsure (1)..(276): unsure at all n locations
ctataggagtaaatgccattccgtagcatcgtgcgtgatgtaagggatggtttcgggagcttgtctaggacgggatttgaggtcaggtttctgagtcatcgcagagggccatctcatggtgctgtccatgagctgcacgacccagtgcttgtagcgcagagtagctgctgggctagcttgcctcctgaattacttcgagatgtgattgagaggttggagaccagtggggatacatggccttcangnaaacatgtagttgcttgtgcagctgtctgc

SEQ ID NO: 58986 - DNA, 283 bp, Zea mays
acaagctctgagctcatgtcatatatgcatctcctttacgagatctgcccattctacaagtttggttacatgtcagcaaatggtgccattgccgaggctattaagggcgagaactttgttcacataattgatttccaaattgctcaggggagccagtgggttactctgctacaggcccttgctgcaagacctggggggccaccatacattagaatcactggtatagatgactcaaattctgcttatgccagaggaggcgggcttgatatagttgggaggacgt

SEQ ID NO: 58987 - DNA, 166 bp, Zea mays
acatggcctggcatggtgacacttctaaaccgggagttagctcaggtcgtctcgcggaaagagttcggcagaggctcaagtatttgctgctgcttgcagttctagctgcctccatcacgtatcacgctggtctcaacccacccggtggtttctggtccgacgacaa

SEQ ID NO: 58988 - DNA, 291 bp, Zea mays
cgatggtgtactgacgctggtgcgggaagagaccctgggactggcgttcggcaatgatgatgaggaagtgatggagaggccacatgtccttcatcgcaaactcccgctggagggcgatgatcgtgcgctgtaggagatcggtggtggatgccgttcgcacaatgtcggcgacgtagaggaggtaaacgatgtccacgccccgccggtagataaagagagatgtgtccgacttggcctcgacgaaaccgatggaggccaaataggtggcgaacggctgtaccaggccgcggc

SEQ ID NO: 58989 - DNA, 296 bp, Zea mays
ctcgagccggaaggcacaggccctgagggactcgagcatggcgggctacatgtcgagcaaaaagacaatggagatcaacccagagaaccctatcatggatgagctccgcaagcgtgccgaggctgacaagaatgacaagtcagtcaaggatctcgtgatgctgctgttcgagactgctctcctgacctccggcttcagcctggatgaccccaacaccttcggcaaccggatccaccgcatgctcaaactcggtctgagcatcgatgaggacgagcctgttgaggcagaggctgaga

SEQ ID NO: 58990 - DNA, 90 bp, Zea mays
tctggaccagagcagcgtccatgatgttgtcctacttggtggctccactaagatccccaagatgccgcagctgctccaagacttcttcaa

SEQ ID NO: 58991 - DNA, 295 bp, Zea mays
ccaggacaaggagggcatcccaccggaccagcagcgtttgatcttcgctggcaagcagctggaggatggccgcacccttgcggattacaacatccagaaggagagcaccctccacctggtgctccgtctcaggggtggtatgcagatctttgtgaagacactcactggcaagacaatcacccttgaggtggagtcttcggataccattgacaatgtcaaggccaagatccaggacaaggagggcatcccacccgaccagcagcgcctcatcttcgccggcaagcagctggaggat

SEQ ID NO: 58992 - DNA, 325 bp, Zea mays
gactgccctccgcgtcagctcgcacttcggctcgccagcttgtgctgtttactccttccttggatgtctgagacatacctgttcttgtccagctcatgatttttttccagtacattctgtatatcctgctgttctattagctgttgtgcattgcaagtgattacaaaatcacggcttgtttctctacattcgcagctgccgcctaagagctttcgccctgccaggcttgagagctagtgctgccccatatccttccttggcatgtctgccacaatgcaatacctatgtttgatacttgttatttctgataatgggtgccctatga

SEQ ID NO: 58993 - DNA, 321 bp, Zea mays
caggtacgtagctcggaatcggccgagctcgagcgctcgagccgctccccaggcccagagcgggacgagcaagggaagccaaatgacggtaacaagtacaaggggagcatttacatggttttcgagtatattcaccatgatctcaccgggcttgctgatcggccaggaatgcggttcactgtgccgcagattaagtgttacatgaggcagctgcttacaggcctgcactattgtcatgtcaaccaagttctgcatcgagatatcaaaggatctaaccttttgatagacaatgagggtaacttgaagcttgctgattttggc

SEQ ID NO: 58994 - DNA, 303 bp, Zea mays
agataagccatgtaccatctattaagatttacaggcaactattctcatagccgtcgtgttggcatcgcaatgggcatagcaaggggttctgcaaaaaatgacgctgagcttctggaccttgagacaaaacatcaggtcctatcaatgtatctatggttgtcacatcattttgaggaagataactttcctcatgtgcagcaggctgaaaacatggcaataaatattgctgatttacttggcaagtcgcttgcgaaagcatgctggaagcctgaatcaagacagcaagttagggggcgacgagaa

SEQ ID NO: 58995 - DNA, 276 bp, Zea mays
gataatgccttgatgtatgtcaaaattgatgatcagagacttgccattggaaccctctctgttgacaagaatccacacatacaatttgatctgattttcgataaagagtttgagctgtcgcacacatcaaaaactaccagcgttttcttcactgagctttaagttgagccgccattcgaggaagatgaaatggatcttgattctgaagatgaagacgaggagctgaatgttccagtagatcaggaaaatggcaaagctgatgagaaggaaccgaaa

SEQ ID NO: 58996 - DNA, 290 bp, Zea mays
gcaaggggcgcccgtgcatcagtctgggagaacttcaagaacaacccgctcttcgacatctcaacggaccacccacccacgtactacgaggacatgcagcgtgccgtcttctgcctgtgcccgctgggctgggccccgtggagcccccgtctggtggaggcggtggtgttcggctgcatcccggtgatcatcgccgacgacatcgtccttcccttcgcggacgcgatcccgtgggaggagatcggtgtcttcgtggccgaggacgacgtccgaggctggacacatcctga

SEQ ID NO: 58997 - DNA, 293 bp, Zea mays
gatcggtgctgctggtgtagtcagccaggcgtgcaagactgttgtttctcaatacggacaacagatcctagatcttctgctagctgagacgcaaccagcgaagatctgttctcaggttggcctgtgcacttttgatggcactcacggtgttagcactggaattcgtagcgtagtggatgacaaagctgggaaatcaaatggtggtctcaagagtgatccaatgtgcaatgcctgtgagatggctgtggtatggatgcagaaccaactggcccagaacaagacacaggagctca

SEQ ID NO: 58998 - DNA, 296 bp, Zea mays
tccgaattccaaggcaggcaggtcggcgaggagggcaggaagaccgaagtccgagccgtgcgggggctcgggacaggaccgggacaggaccccaaaatctcagatccttcctgcccgcccgcccgtgcccgtcgacgcgtcattcttgccggctgcgccccacctccgccctctcctcctccacggggatcggatacgccacaggctgcgcgatggtgatgtgggtcttcggctacggctccctcatctggaaccccggcttcgacttcgacgacaacatcctcggcttcatcaag

SEQ ID NO: 58999 - DNA, 297 bp, Zea mays
ctcgagccgctcgagccgctccccaggcccagagcgggacgagctagggaagccaattgacggtaacgatgtaaaggggagcatttacatggttttcgagtatatggaccatgatctcaccgggcttgctgatcggccaggaatgcggttcactgtgccgcagatccagtgttacatgaggcagctgcgtacaggcctgcactattgtcatgtcaaccatgttctgcatcgagctatcaaaggatctcaactgttgctagacaatgagggtaccttgaagcttgctgattttcgcct

SEQ ID NO: 59000 - DNA, 291 bp, Zea mays
agcttgtgctgtttaatccttccttggatgtctgagacatacctgttcttgtccagctcatgatttttttccagtacattctgtatatcctgctgttttattagctgttgtgcattgcaagtgattacaaaatcaaggcttgtttctctacattcgcagttgccgcctaagagctttcgccctgccaggcttgagagctagtgctgccccatatccttccttggatgtctgacacaatgcaatacctatgtctgatacttgttatttctgataatgggtgccctatgatga

SEQ ID NO: 59001 - DNA, 300 bp, Zea mays
caaaagccatgtaccatcttttaagatttgccttcaactattctcatagccgtcgtgttggcatcgcaatgggaataccaaggggttctgcaaaaaatgacgctgagcttctggaccttgagacaaaacatcaggtcctatcaatgtatctatggttgtcacatcattttgaggaagataactttcctcatgtgcagcaggctgaaaacatggcaataaatattgctgatttacttggcaagtcgcttgcgaaagcatgctggaagcctgaatcaagacagcaagttagggggcgacgag

SEQ ID NO: 59002 - DNA, 268 bp, Zea mays
gataatgccttgatgtatgtccaaattgatgatcagaaacttgccattggaaccctctctgttgacaagaacccacacatacaatttgatctgattttcgataaagagtttgagctgtcgcacacatcaaaaactaccagcgttttcttcactggctattacgttgagcagccattcgaggaagatgaaatggatcttgattctgaagatgaagacgaggagctgaatgttccagtagtcaaggcaaatgccaaagctgatgagaaga

SEQ ID NO: 59003 - DNA, 293 bp, Zea mays
atccaaagcataggatcatttggcatacaaaatgtctcatcattgtatctaaacctggagatattgctgggaccccagttgctttgcttcttcagtgataatatgcaggagttggaagatggtgacgtcatcgacaattcgtcgcagaatgccctttttgaataacagatggggagatctatagggtaaatacagcaaaacgaagcgagcatgtaggccacagcagtcagctctgttgtgcggaaagatgtgtatatatgtattagcaacatgtttgttctgatgacttttta

SEQ ID NO: 59004 - DNA, 284 bp, Zea mays
ggcgaccaacgcgtcggggcggccgtacccgcgcttcgcctgccacttcgacccctatggccccatctacaacgaccgggagcgcgcccagatcttcgtctcggacgccggcgtcgtggccgtggcgttcgggctgtacaagctggcggcggcgttcgcggtctggtgcgtggtgcgcgtgtacgccgtgccgctgctgatcgtgaacgcgtggctggtgctcatcacctacctgcagcacacccacccgtcgctcccccactacgactcgagcgagtgggact

SEQ ID NO: 59005 - DNA, 301 bp, Zea mays
gttgatgagcatggacgtccactctatggagacgtttttggtgttctgcagcaggacgaacctaactacgatgatgaacctgttgatcgcagcaaacactggggagatttggaggaagaggaggaggaagaagaggaagaggaggaagaggaagaaccaatggaactacgaggaaatggaagacggaattcagtctgtcgataccatctcaagtactccaactggtgttgaaacacctgatgttatcgaccttcggaagctgcagaggaaggagactgacaagcaggcagaacggccgctg

SEQ ID NO: 59006 - DNA, 282 bp, Zea mays
gcaaggggcgcccgtgcatcagtctgggagaacttcaagaacaacccgctcttcgacatctcaacggagcaggcacccacgtactacgaggacatgcagcgtgccgtcttctgcctgtgcccgctgggctgggccccgtggaacgcccgtctggtggtgacggtggtgttcggctgcatcccggtgatcatcgccgacgacatcgtccttcccttcgcggacgcgatcccgtaggatgagatcgatatcttcgtagccgacgacgacgacccgaagctggac

SEQ ID NO: 59007 - DNA, 290 bp, Zea mays
ctgatccctgagtggctgagttttgttaagggtattgttgactctgaggaccttcccctcaatatctcccgtgagactcttcagcagaacaagatcctgaaggtgatccggaagaaccttgtgaagaagtgtgttgagctcttctttgagattgcttaaaacaaggaggactacaacaagttttatgaggctttctccaagaacctcaagcttggcatccatgaggactcgcagaacaggggcaagattgctgagcttctgagataccactccacgaagagcggtgatga

SEQ ID NO: 59008 - DNA, 262 bp, Zea mays
tccaagccatggaccatcttctaagattcgccacctactattctcatagccgtcgtgttcgcatcgcaatgggaataccatggggttctgcaaaaaatgacgctgcgcttctggaccttgagacagaacatcaggtcctatcaatgtatctatggttgtcacatgcttttgaggaagatcactttccccatgtggagcaagctggaaacatggcaattaatatcgctgagctactttgcaaatcgcttgcgaaagcatgctg

SEQ ID NO: 59009 - DNA, 295 bp, Zea mays
gtgcactggtgtacgacgattcacttcacgctttcctgccgtatgaccgccagtggataaaacagaagctgtttcagcacctgaagcggctggcgcacagtagggtatcatcaccgctggcttttgacgtgcatgcgtcgtggggagaaccccctcatcttagcacataagctgtgtttgggtgctctagtattaacctcagttcatatgtattgaggtgaattaaggtgtacattagtataatatacaactcatggcttgttcggttagctctcaatccatgtggattgagtgg

SEQ ID NO: 59010 - DNA, 299 bp, Zea mays
ccaggacaaggagggcatcccaccggaccagcagcgtttgatcttcgctggcaagcagctggaggatggccgcacccttgcggattacaacatccagaaggagagcaccctccacctggtgctccgtctcaggggtggtatgcagatctttgtgaagagtctcactggcaagacaatcacccttgaggtggagtcttcggataccattgacaatgtcaaggccaagatccaggacaaggagggcatcccacccgaccagcagcgcctcatcttcgccggcaagcagctggaggatggcc

SEQ ID NO: 59011 - DNA, 298 bp, Zea mays
ggagcctgttgagaaatgcctgagggatgccaagatggacaagagcagcgtccatgatgttgtccttgttggtggctccactaggatccccagggtgcagcagctgctccaggacttcttcaacggcaaggagctgtgcaagaacatcaatcctgatgaggccgttgcctatggtgctgctgtccaggctgctatcctcagtggtgagggcaacgagaaggtgcaggacctgcttctgcttgacgtcactcctctctctctgggtctggagactgccggaggagtgatgaccgtcctt

SEQ ID NO: 59012 - DNA, 300 bp, Zea mays
ccctcccgacccactatcccaaaaccgtagcgccctcgcctgctcgccgccgccgtcgttgcgagctccccatcttcctccgtcaaccatggcgacccagatcagcaagaagaagaagttcgtcagcgacggcgtgttctacgccgagctcaatgagatgctgacgcgggagctcgcggaggacggctactccggcgtggaggtgcgcgtcacaccgatgcgcacggagatcatcatccgcgccacgcgcacgcagaacgtgctcggcgagaagggccgcaggatcagggagctcacgtc

SEQ ID NO: 59013 - DNA, 299 bp, Zea mays
tcaactttcaggaagggcagtgtcgtgaacgctacattctactcggcgtgcccgaggaatgaccttctcacggacggcacgttcgcgctcgttgagaagctggacggcagcaacagctgggttcctgcctacgacgacgacgactggtcactacgcttcaagtggtcgagaccgtcgaagctgagcccgagaagctttgcgacgctggaatggaccgttcctggagacgccccgtcgggcgtttataggttgaggcattttggtgcctccaaaccactgattgggtccatcaaacattt

SEQ ID NO: 59014 - DNA, 299 bp, Zea mays
tcaactttcaggaagggcagtgtcgtgaacgctacattctactcggcgtgcccgaggaatgaccttctcacggacggcacgttcgcgctcgttgagaagctggacggcagcaacagctgggttcctgcctacgacgacgacgactggtcactacgcttcaagtggtcgagaccgtcgaagctgagcccgagaagctttgcgacgctggaatggaccgttcctggagacgccccgtcgggcgtttataggttgaggcattttgggtgctccaaaccactgattggggtcatcaaacattt

SEQ ID NO: 59015 - DNA, 300 bp, Zea mays
gaagtttcgtggacaattgtcatcttttagctcagctcgtaatgatggtaataaattccgtgatatatacaactttgcattcacttgggcaagggaaaagggtcaaaagtctctctcactggagactgctattggaatgtggcagttgctatttgctgaaaggaactggcctcttctggatcattggtgtcagtttttacaggtcagacacaataaagccatatctagagacacatggtcccagctgctggaatttgtgaagacgaccgatccacagttatccaactacgacgacgaagt

SEQ ID NO: 59016 - DNA, 274 bp, Zea mays
gtggtggagtccgccctttcggcctctccacactcattgtcggcttcgacccctacaccgacaagccagcgctgtacctcaccgatccttctggtaccttctctgcttggaaggcgaacgccacgggaaggaactccaactctatgcgtgagtactctggagaagaactacaaggagacctccggcaaggagaccatcaagcttgctattcgtgcacttctagaggttgttgaaagtggtgggaagaacatcgaggttgcagtgatgacaaaga

SEQ ID NO: 59017 - DNA, 287 bp, Zea mays
gacgagacgagttaccatctcatcccaactccggaacgaacaagttaccatctcatcccaactccgcctcgaccggatctcgtcggactcggatccgcccgaccaccccgcgccgccgcagatcaaagaagatggcagctgtcgacacattcctcttcacctcggagtctgtgaacgagggacaccctgacaagctctgtgaccaggtctcagatgccgttcttgacgcttgccttgctgaggaccctgacagcaaggttgcttgtgagacctgcaccaagaccaac

SEQ ID NO: 59018 - DNA, 291 bp, Zea mays
cgagacagactactcgtacccacatgctgacaagatcaaggagtacctcaaggacccaagcaagtttgctgttgccgcccggttgctgctggggactctggcgctgcagctgctcccaaggaagaagagaaggctgcggagcctgaagaggagtcggacgaggaaatgggcttcagcctcttcgacgactagagctgctgttttcgtcaaactgctgcaagttttggctttttttttttatcatctacaagtactgtttcctatattttttagcagacaattatcgtgtgt

SEQ ID NO: 59019 - DNA, 299 bp, Zea mays
ctgctgtgattggtcttgccgttttcagtcagttctggtactggtatcctctcttatattttatcagcctggccttctcaccaacagccttcattgggctcaactctgatttgaaagtgccaaagtttgagttcctgtcacatgctaaaccgtctctcttcgagtatcccaaaccgacaactcagcagactactacttcgacagtgaaactgccaacagccattttgtcaacttatgcgaaagcaaaatctagggcaaagaaggacgcagaaagcaaagctaaccaggagatagcaaca

SEQ ID NO: 59020 - DNA, 290 bp, Zea mays
cctgtggttctgtgactacaagtacaatgacgagaacacagtgtcgtttgtgactatgaacaaggttggtggcttcctgcagcggatggatctgtgccgcaaatacgcctttggcaagatgcttgtggttggctctgagccccctttcaaggtcaagggactctggctcttccgtggccccgaaatccccaagtttgtcatggatgaggtctatgacatggagctctatgagtggaccaaggtcgacctctctgatgaggcccagaaggagcgggtcaatgccatgatcg

SEQ ID NO: 59021 - DNA, 291 bp, Zea mays
cacaaacaaatgaggatgggcttctgcatactacctgtggaactccaaactatgtagcacctgaggtgcttgctgataaaggttatgatggtatggctgcagatgtatggtcctgtggcataatcttatttgttcttatggctggatacttaccctttgatgatgcttggcagatcagtttgtacagtctcatcagattggcatcatcaaagggtaagtatccagccataagaacaaataagattatgccaatctgatgagactgtacaaactgatctgccaagcatattt

SEQ ID NO: 59022 - DNA, 282 bp, Zea mays
ggcttcgttaccttctcctccgagaactccatgctcgacgctatcgagaacatgaacggcaaggagctcgacggccgtaacatcaccgttaaccaggcccagtcccgtggcggtggcggtggcggctgtggctacggcggctgatgtgtatgctgattttggctctgatcgcttctgcagctatatcttcgttatcgtgtgtaccttcgtgtccgtgttcgcgttcgtgatcgttatgagcttcgtgttggtggacgatcagtcgttatcgttgtggtcgct

SEQ ID NO: 59023 - DNA, 295 bp, Zea mays
  unsure (1)..(295): unsure at all n locations
cgccgcgtcgccgcgctcgcgaggggaccactcccgcaacctctctttccacaagattgatctccgtgacaagggagcactggaaatggtttttgcttctacaagatttgaagctgtcattcacttcgctggattgaaagctgtgggtgaaagcgtacagaagccattactttattatgacaacaacgtcattggcacgataaatcttctagaagttatgtctgttcacggtttgcagaagttggtgttctcatcatcagctgcagtttatggatcacccanaaactcaccctgc

SEQ ID NO: 59024 - DNA, 295 bp, Zea mays
caatctcacctccaaccatgggtaaagagaagtcccacatcaacattgtggttattggccatgtcgactctggcaagtcgaccaccacaggacaccttatctacaagcttggaggcattgacaagcgtgtgatcgagaggtttgagaaggaggctgctgaaatgaacaagcggtccttcaagtacgcgtgggtgctcgacaagctcaaggctgagcgtgagagaggtatcaccattgatattgctctgtggaagtttgagaccaccaagtactactgcacggtcattgatgcccc

SEQ ID NO: 59025 - DNA, 295 bp, Zea mays
gaagaccagaaggtgagaagagagagagagagtgtgtgtgatcggtacaaggatcaccgctgtgcctgcgcgtgctgcttcaccgaatcgagtcagatcctgtccgaatccgagctaagggatggcaaccggtagtgaagcctcgaaggcagctgaggctgtggttgactggcataaacacgacagcaagaggatgctccatgcggtttaccgtgttggggatctggaccgcacaatcaagtactacacggaatgctttgggatgaaactgctgaggaaaaggatgttcctgatg

SEQ ID NO: 59026 - DNA, 271 bp, Zea mays
cccgacgccgccgctaggctttgcgcctttgcctgcatcactcgctcattcggagcccctctcttcgccggcgtcgtaagaagagatggcagagcgtttgacccgtatcgccatagttagcgaggacaagtgcaagcccaagaacgtgcaccaagagtgcaagaagagctgccccgtcgtcaagactgggaagctttgcattgaagtgacttcggcgtcgaaactcgctttcatttctgaggaactgtgcatcggttgtggtatctgtgta

SEQ ID NO: 59027 - DNA, 290 bp, Zea mays
cattgtgaagcctgggtgctctcaggatgtccttaaggcggcgctgagcgccatgtcttctgtgacggagacactgaacatcatgacctcatcgtccaccggccagactgcactgtgactcgtttggtgccgttttgtggtgcggatcagaatccccactttttccatggtgtcgattgacaaagttaggagcagtaatcctgtggtgccgatcagaatccccactttttccatggtgccacacgggtcattcttttgtagcttcttgggagagttctatcagttttgaa

SEQ ID NO: 59028 - DNA, 241 bp, Zea mays
cgccatcttttggagcattcactgtccaatgtgctaaatgttttaaatggaggcttattccaacgaaagagaagtatcgaagaaattcgtgaacgtattatagaggaaccttttgtatgcaaaagagctcgtgaatggagacctgatgtaacatgcaatgacccagaagatatatctcacgatggtagcaggctttgggctattgacaaacccaatattgcacaaccccctcgcagatggg

SEQ ID NO: 59029 - DNA, 285 bp, Zea mays
gtcccgcgcagaggccgtggattactacgcagccacactggcccaggttgttggaagtgagaaggaggcgcagatgcgcatatgtgaggcttcgtgggatgggacctacgagttccgctgcgagatcgacgaggatgcatcgaaggagcttgcaaagatgcctggagtgttatctgttcaactagatatgggtaacaaatcagagaaggataatcacagcttgagtctctcgacagctaaccttgtaagcattagtgatggtgcatctacatcttcaagtgggaa

SEQ ID NO: 59030 - DNA, 290 bp, Zea mays
tctctttctagaaaggatggtgagcttcagttttctcgcactatgcttgctcgcacaacttccaaactttcccaagttgaagcccagcttgaagatttgtcaaaaggtcggactactgcagaattggtaaaaggtagccctactgttgttgaaaatcctctttcatctatctctgaggatggctttaatcaagataatgtgagttgttcaggctcatgggcatcagccttgctgtctgaactggaacacttcaagaaggggaaacacacagcacattctagtaagagcac

SEQ ID NO: 59031 - DNA, 255 bp, Zea mays
aaaccctagccctcgcgccgccgccgccgtgcccagcgctcgagctcctcgcctgccgcgagctcgcgccgcaacgccaccatgaagttcaacatcgcgaacccgtctaccgggtgccagaagaagctggaaatcgatgacgaccagaaactacgtgccttttatgaccgaagatctcccaggaggtcagtggtgatgctctgggtgaggagtttaagggttatgtcttcaagatcatgggtggatgtgacaaac

SEQ ID NO: 59032 - DNA, 293 bp, Zea mays
tcaccctctcccctccctcggggtcgcggttgcttcctcgcggccgattcgtatcttccgtggcagcagggagggtacggtactcctccggccggcgggaggagaagaggagcttcgagatgggggcgtccctcgcttccgcgggcttggtgaactacccgcttgtcgcggcgctcctcgcgttcgctctcgcgcagtcctccaagttcttcaccacctggtacaaagaaggtcggtgggatgccagacaacttatagcttctggcgggatgccatcatcccactcagctaca

SEQ ID NO: 59033 - DNA, 269 bp, Zea mays
gtgttgagactggtatcatcaagcctggtatggttgctacctttggtcctagtggccttactactgaggtgaagtctgatgaaatgcaccatgaggctctccaggaggcccttcctggtgacaatgtcggcttcaatgttaagaatgctgctgtgaaggatctgaagcgtgggtatgtggcctccaactccaatgatgaccctgcgcaagacgctgctagcttcacgtcccaagtcatcatcatgaaccaccctgggcagattggcaac

SEQ ID NO: 59034 - DNA, 295 bp, Zea mays
tggagagcaagtgaccattgtccagctgcaaggatccacagagtcttggtcccagttcttcagtacaccttgtcaccggcttagaagcaccaagccagaacctttctggaattctctccccaagtatagggaatctgaccaaccttgagacagttctatgacagaacaacaacataaacgggttaatcccagcagagattggaaagctaagaaagctcaaaacgcttgatctgtccagcaaccacttctcggaaggaaatcccaagctctgtgggccaccttgaaagccttcagt

SEQ ID NO: 59035 - DNA, 290 bp, Zea mays
tcgtacgtgtcgacacgtacggcaccggcgcgatccccgacaaggagcatcctcaagattgtcaaggagaacttcgatttcaagcctggcatgatcatcatcaaccttgacctcaagaaaggcggcaacgggcgctacctcaagacggcggcctacggccactttggaagggacgaccctgacttcacctgggaggtggtgaagccactcaagtcggagaaaccttctgcctaaggcggcctttttttcagtaagaagcttttggtggtctgctgtgcttaatcatgctt

SEQ ID NO: 59036 - DNA, 288 bp, Zea mays
gaagactctgactggcaagactatcacccttgaggtcgagtcttctgataccattgacaatgtcaaggccaagatccaggacaaggagggcatccctccggaccagcagcggctcatttttgccggcaagcagctcgaggacgggcgcacgcttgccgactacaacattcagaaggagagcaccctccacttggtgctgcgtctcaggggtggcatgcagatcttcgtgaagacacttactggcaagacgatcacccttgaggtggagtcctcggacaccatcgacaa

SEQ ID NO: 59037 - DNA, 284 bp, Zea mays
catggtcactacacatatggggatttgggtgacaggtgcttcgggactataggccgatgcttgacagagaccctcgtccttgtttcgcaggctggtggttctgtagcatacctgatattcattggccaaaatctccattccacattcagccagctgatgtcaccagccggcttcatcttcgccatcctcctgcctctgcagatagcgctctccttcatccgctcactgtcgtccctttctccgttcagtatatttgcagacgtgtgcaatgtccttgccatggc

SEQ ID NO: 59038 - DNA, 288 bp, Zea mays
ctgacagggaattgccttctcagatggatctcgacatcactgatgcagagacaaaaagatctaatgcggtctggaaaaatcttgagctcgcaaccatgaaattgtcccaagaactggcagagcaattgcgcctggttatggaaccaactcttgctagtaagcttcaaggggattatagaactggaaagagaataaacatgaagaaggttattccatatattgcgagtcatttccgcagggacaagatatggttgcgccgaactaagcctaataaacggaattaccaag

SEQ ID NO: 59039 - DNA, 293 bp, Zea mays
gtcgccgagttcctcggcttcggcgtcaagcgggcgggtttcctctacggccgcgtcgacgcagagaccaaggatgtcttcgtcgactttatctatgagccgccgcagcagggctccgaggacgtggtccacctcttgagggaccccgacgaggaggcccgcgtcgataccatcgccgaggggctcgggatgcgccgggtcggcctcgtgttcacgcaggccgttgggagaaaggccagcgagactggtgagtacatcatgtccaaccgggaggtcgtgcaggcggcccagct

SEQ ID NO: 59040 - DNA, 290 bp, Zea mays
ggcttgcagaaaaatgggcagatgcacatgatggtaacttgccttcaactaggcaagaaaaaaaggaatttaaggatctaattcgagcccatatgcttaatgtagatgaagaaaattacaaagaagctgtggactcttcatataaagtatcagtcactccaggaatcagtaatgagattcgtcagataattgatgatgactctgcggaagtcaattcctcatcgtcagatttttggattttagtggctgctttaaaggagtttattgcaaaggagggcaacggtgagcta

SEQ ID NO: 59041 - DNA, 279 bp, Zea mays
caagatcaaatgcactttcttgttgtgcatgaaacccagattgccatctatgaaactacaaaactagaaccagtgaagcagtggcctgttcgagagaattcacctccaatcacacatgctgcattctcgtgtgacagtcaactgatctatgcaagctttatggatgccactgttggcatatttaatgcatcgagtttgagacttcaatgtcggattcttccagcttcgtatctccccccaaatatcagtccgagtgttcatcctgttgtggttgcggca

SEQ ID NO: 59042 - DNA, 175 bp, Zea mays
cagaggcaaagactcttctagagactgctcactcgttctacctgaatgatgtgagatacagactcgtggagcgcttcaacaaagagactcatgattttgagttcggggacgtccttaaagtgcttgacatgccaaccatgtgacccagtttaattcccaaccaatagcaaatatt

SEQ ID NO: 59043 - DNA, 147 bp, Zea mays
gaaggagagcaccctccacttggtgctgcgcctcaggggaggcatgcagatcttcgtgaagaccctgaccggcaagactatcaccctcgaggtggagtcttcagacaccatcgacaacgtcaaggccaagatccaggacaaggaggg

SEQ ID NO: 59044 - DNA, 279 bp, Zea mays
  unsure (1)..(279): unsure at all n locations
gaatggaggctcggatactatggatgaaattcttgctaggatacaacaacgggaagaagcagcagtaaagcgtgagcgngccatggcgtacgcgttcaaccatcagtggagagcaaggtctgccacaagtctaggaaacttcagctatgaagtcggtaagggtggctggggctggagctggatggaccgctggatcgcagcacgaccatgggagccgcgatccatggtccaccctgagaacccgaagaaagcacaggcaaagaaggagaacaccacaaa

SEQ ID NO: 59045 - DNA, 280 bp, Zea mays
catgctaggaaagctggaagagtgtcttcaattgctaatagaaagcaatcgtattccggaagcagcattgatggcaagatcttatcttcccagcaaagtccctgagattgtagcattgtggaaaaaggatctccagaaggtaaactcaaaagcagcagagtcgctggctgatcctaatgagtacccaaacttatttgaagactggcagattgctctcaacgtagaagctgctgttgcctctaaaaggagtatctatccatcggccgaggagtacatgatt

SEQ ID NO: 59046 - DNA, 282 bp, Zea mays
ggagccgctcaccaaggaggacctcgtcgcctacctcgtctccgggtgcaagcccaaggagaattggagaattgggacggagcacgaaaagttcggtttcgaagtcgacactttacgccctataaaatatgatcagattcgtgacatactgaacggtcttgctgagagatttgattgggacaagataatggaagaaaacaatgttatcggtctcaagcagggaaagcaaagcatctcactagaacctggaggccaatttgaacttagtggcgctcctctcga

SEQ ID NO: 59047 - DNA, 293 bp, Zea mays
ctgctcgttcgatctgtgcagcagatctgaggtcccgggcgaccgtgaagcagcttcaatcgtcggcatggcgctcgtattgcatagtggggctggaaacaagaatgccttcaaagcacttattgctgcagaatacagtgggatcaaggttgagttgaccaaggattttgagatgggtgtctccaacaagacccctgagtttcttaagatgaaccccttgggaaggttcctgttctggagactcctgatggccctgtttttgagagtaatgcatcgcacgctatgttgctcgc

SEQ ID NO: 59048 - DNA, 138 bp, Zea mays
gcaaggatcttagcagcatcggagacactgtcgttatctcggtaaccaaggagggcgtgaagttctccacatctggagaaattgggagtgcgaacattgtttgcaggcagaaccaaactattgacaagccagaagagg

SEQ ID NO: 59049 - DNA, 217 bp, Zea mays
atgctccttattgtggcgttgtacttagcggaacttgttcactttgacagccgtgtctgtgcgaaccctcatggactgatcaggaagtacgggctgatgtgctgcaggcagtgcttccgcagcaatgccaaggacattggcttcatcaaggtatgcaatataagcttcaaactcctgtgtgaatgatgcttagcatcattaatgctttatgattttg

SEQ ID NO: 59050 - DNA, 292 bp, Zea mays
ctggagagcttcgtggaggagcttgggttgtggtcgatagcacaataaatccagaccgcattgagtgttatgctgaaaggactgccaaaggtaatgttctcgaacctcaagggttaattgaaatcaagttcaggtcagaggaactccaagactgtatgggtaggcttgacccagagttgataaatctgaaagcaaaactccaagatgtaaatcatggaaatggaagtctaccagacatagaagggattcggaagagtatagaagcacgtacgaaacagttgctgcctttata

SEQ ID NO: 59051 - DNA, 271 bp, Zea mays
gcggcctgttgtcccggcttttagacgcaacttccatcgctgcgaactatccattcgtgttcgtcatggccgccagcgtcaccgtggaaaacctcaaccccaaggtcttaaaatgtgagtatgcagtccgtggggagattgtcatccatgctcagcgtctgcagcaacaactacaaacacaaccagggtctcttccttttgatgagatcctctattgcaacattgggaatccccaatctcttggtcatcaacctgtgacattcttcaggga

SEQ ID NO: 59052 - DNA, 132 bp, Zea mays
tgatgacaaggatggttgggaacagaaaaggagtaagaaggataagctgatggataagcagttcttgaaagatccaagtgaaatcacatgggatattgtcgataagaaactcaaagagattttagcatctag

SEQ ID NO: 59053 - DNA, 270 bp, Zea mays
gaatgtaaaccaagtccttacaaggtgtcttttcgctggactgtgtttccatgcataccaacaggtgtcttacatgattttggcgatggtgtctcctgtcactcattctgtgggcaactgtgttaaacgtgttgtggtcattgtaacatcagtgctgttcttcaggacacctgtttctcctatcaactctctcggtactgcgattgcacttgccggagttttcctgtactcacagctcaagcgacttaagcccaagccgaagacggctta

SEQ ID NO: 59054 - DNA, 134 bp, Zea mays
aaacctctcaaaccctagccgcctcctgcaagtttcagagctcaggaatctgcgccatggcgagtgagacggagaccttcgcatttcaggctgagatcaaccagctgctctcactcatcatcaacaccttccac

SEQ ID NO: 59055 - DNA, 143 bp, Zea mays
ctctagggtttttgattttagccgccgccgctgctcatctcacatccctcgagaagacgcctgctcctcgccgatcgatacgatggccgtcttctccgacctccacaccgccgacggcctcaagtccctcgaggctcacctcg

SEQ ID NO: 59056 - DNA, 151 bp, Zea mays
ggcggatccacgagaacccggagctgggatacgaggagttccagaccagcgagctcgtgcgccgggagctccacgccatggggatcccctacaggcaccccttcgccgtcaccggcgtggtagcaacagtcggcaccggcggtccgccctt

SEQ ID NO: 59057 - DNA, 269 bp, Zea mays
tgaaaagaataggagtgaacaccattcctggtattgaagaggtcaacatctttaaggatgatgttgttattcagtttgtgaatcctaaagtgcaagcttcaattggtgctaatacatgggtggtcagtggaactccacagacaaagaagctgcaagatctgcttccgtccattatcaaccagctcggccctgacaacctagacaacctgcggaggcttgcggagcaattccagaagcaggcccctggtgcttcaggtgcagaggctggc

SEQ ID NO: 59058 - DNA, 269 bp, Zea mays
  unsure (1)..(269): unsure at all n locations
gcattcattactgctttccgctctggtgcngtgntgggcttcctgcttgctgctagtggcctttttgttctttatattgcaatcaacttgtttggaatttattatggtgatgactgggagggcctttatgaggctatcactggttatggtcttggtgnttcttctatggctctttttggtcgtgttggtggtgggatttacactaaagctgctgatgttggtgctgatcttgttgggaaagtcgaaaggaatatccctgaagatgatcc

SEQ ID NO: 59059 - DNA, 269 bp, Zea mays
gtgcgggagttgctcgagtccttcggacctctgcgtggattcgatcttgtgaaggatagagaaactggtaactcgaagggatatgccttctgtgtttaccaggatcttaatgtcaccgacattgcctgtgctgcccttaatggcatcaagatgggggacaagactcttactgttaggagggcaaaccaaggagcttctcagcctaggccagagcaagagagcatcctgctgcaggcacagcagcaggtgcaaatgcagaaactcgtata

SEQ ID NO: 59060 - DNA, 273 bp, Zea mays
tgatgacaaggatggttgggaacagaaaaggagtaagaaggataagctgatggataagcagttcttgaaagatccaagtgaaatcacatgggatattgtcgataagaaactcaaagagattttagcatctaggggaaagaaaggttctggaaggatcgagcgtgttgagcagttaacatttttgacccgtgtggccaaaacaccagctcagaagcttgaaatcctcttccatgtgatttctgcgcagtttgatgttaaccctagtctacttgg

SEQ ID NO: 59061 - DNA, 242 bp, Zea mays
caaaattcagttcacaacgaatttttgtaaaatcaaaatttctcctatatggaaagcgagaattgagccaaaatgtcgttttttcgtatggaccatgttgtataacataattttgactgcagacaacctacaaaagcgaggatggctgtgcaatccaatttgttgtctttgcaacttatcacaagaaactatgcctcatttagccaaagtatgcccgtttttgtagaggtttggaacatgat

SEQ ID NO: 59062 - DNA, 188 bp, Zea mays
gtgctctgtccacctctctcgctctgggccgccgcgccgccctaagccacgtgctgaggctttcgttggtctcttcgccggcgacgagcacccagcagttctgtagaaatggctgatggtgaggacatccagcctcttgtctgcgacaatggcactggaatggtcaaggctggttttgctggcgatga

SEQ ID NO: 59063 - DNA, 302 bp, Zea mays
gccttctatgccaactgttgccagggcaacccttggaagcttgctgatcatttcacacataatctcgttaacatcagtatcttccaacaatctgatggtatttccagaagcacttctccagcagatactgaagtccatgttacatactgatattgatactcgtctgggagcacaccacatgttttctgctattattgtccgagggccaagccatctgcggagtgaatcagagtacctatatgaaacaaaaaagcagtctcggaatacatctgtatttgcttcagctactgctctactggaga

SEQ ID NO: 59064 - DNA, 296 bp, Zea mays
aggaaaacaaataccttgcttggactcgctgccgtcgccgtcgccaactataaaccaccccaacccaaccctaccgtttcgccggcgaaaccggggctggcggcgtcggggaccatgggggagtacgcggcggtgaagacctcggtgtggtgggacatcgagaactgccatgtcccccgctcgtgcgaggcccacctcatcgcccagaacatgagctcggccctcgccgccgccggctacaccggccccatcaccatctccgcctacggagacaccaactgcgttcccaaccacgt

SEQ ID NO: 59065 - DNA, 289 bp, Zea mays
tgggaccttggcagagcacacttatttattccttggtgctggggaggctggaactggtattgcagaactcattgctcttgagatttcaaaacagacgtcggctccaattgaagagtgccgcaagaagaattggttggtggactcaaagggtttgattgttgactctcgtaaaaactccgttcagtcattcaaaaaaccttgggcacatgagcattgagccctggacaacttggtacgatgcggtcaagtcaatcaaacctacagtcctgattgggacgtctgaagttgg

SEQ ID NO: 59066 - DNA, 287 bp, Zea mays
ggggaattccaacaacaaaaagcatgataagcggcagccaaaatttataccagacaattatagctccgtcgatgaggttactactgctctgcgagaagctggcctcgaatcgtcaaatctaatcctcggtattgatttcaccaaaagcaatgagtggtcaggcaggcattcctttagaagaaaatctctgcatgccattaatggcaccccaaatccatatgaacaagctatctctataatcgggcgaacgctgtcaccttttgacgatgataacttgataccatgtt

SEQ ID NO: 59067 - DNA, 291 bp, Zea mays
gcctcgggtcaaaccctaagcagggagttgatttatccgctgcagccatgagtaagttgcagtctgagtctgtcaaggatgccatctcccagattgttggggatgccaaggagaagaataggaagttcactgagactgtggaacttcagattggtctgaagaattatgatccacagaaggacaagcgtttcagtggctctgttaagttgccccatatccctcgtcccaagatgaaggtgtgcatgcttggtgatgcccagcatgttgaggaggccgagaagatgggacttg

SEQ ID NO: 59068 - DNA, 248 bp, Zea mays
gattgatgctgaagatttcaacttgagaaaacataaatatagaagttggttggcgtattcaaatagcaagttggcacaggtaaaatttagtagcatgcttcataagagaattcctgcagaagctggcatcagcataatttgtgcttctcctggaattgtcgacacgaatgttacaagagaccttcctaagattgttgtagctgcatacggtttcccccaaatcaaaatcgatggtcaagaaggttcta

SEQ ID NO: 59069 - DNA, 295 bp, Zea mays
ggataaatgtgtgaaaagtggagcaaagatagttctgtctcggctagctattggtgatcttggaacacagtattttgcagatcgagacattttctgtgctggccgtgtcactgaagaagatttgcaacgtgttgctgcagcaactggtggaactgttcagtcttctgtaaataatgtcatcaatgatgtactcggttcctgtgaggtattcgaggaaaagcaagtaggcaatgaaagattcaacatatttagtggctgcccttctggccagacagcgactattgttctccgtggt

SEQ ID NO: 59070 - DNA, 277 bp, Zea mays
gcagcaggagcgagcacgtcgacggtgtccgagagttcttctcccctgtgcagcagatggccaatggaggagggtctacgactattgggtatcgttacaggtcagatgaccacgaccgaaggagacagacaggttccagataaatctgcagagcttgaatacgagaagctctaattctcccagtaaccaagtcgacgcggagtggatagaacagtatgagccaggagtgtacctgactctagtttctcttcgtgatgggaccaaagagctgaaagcg

SEQ ID NO: 59071 - DNA, 225 bp, Zea mays
ctccgctcggccaccagctttgaccgcctcccctcccctccgctcctgtacctccataccccacacccccgcaggagcggcgcggcggcggcggcggcaaagccaaaggcaagatgttcgggcgcgcgccgaagaagagcgacaacaccaagtactacgagatcctcggggtgcccaagtcggcgtcccaggacgacctcaagaaggcctaccgcaaggcagcta

SEQ ID NO: 59072 - DNA, 287 bp, Zea mays
cgaacgtgatacgagaaggcaggaaagagctaagaagatggaagaaaagaaagtgtatctgcaactatacgaagcaatggaggcgttggtcaagatcaatctggagaccaacaagatcatggacttcaacaagtttgacgtcggcaacgtggtcatggtgactggcgggaggaacaccgggcgtgtaggagtcatcaagaacagggagaagcacaagggcagctttgagaccattcacgtgctgcttggagcttttgctatgtctagttttctcctatttgttgtac

SEQ ID NO: 59073 - DNA, 290 bp, Zea mays
gatctcgtcccgggctgcaacaaggtggtcggcaaggcggtgatgctggatgaaatcataaactacgtgcagtccttgcaacggcaagtcgagttcctgtccatgaaactggccaccgtgaatccccagctggacttcaacaacctgcctaacctccttcctaaagatatgcaccagtcctgcggcccgctgcagaactcgcatttcccgctggagacctcaggcgcgccgctgccatacctcaaccaggggaaccctctaataggctgcggcctacccaacggtatgga

SEQ ID NO: 59074 - DNA, 260 bp, Zea mays
ttcgtctttgctttttgcatggcaatacttgtgagctttcctcctggcacaatcgaaccaagtatggctggcctcgctgtaacatatggacttaatttaaatgctcgcatgtcaagatggatattgagcttctgtaaattagagaccaggataatctctgttgagcgcatttatcaatattgcaggcttcctagtgaagcaccattgattattgagaactgccgtccaccatcatcatggcctcagaatggaaccattga

SEQ ID NO: 59075 - DNA, 286 bp, Zea mays
ccatcgccaactggtgtgatgattggaatcgatctagcgtataatttgcactctgcttttggcaacttgtttcctggatcaaagccactacttcagcaggcaatgaacaagatcatgaagtcaaatcctgctctgtatgtcctgagggagagaataaggaagggtctgcagttgtactcttctgaacccactgaaccatacctgtcttcacagaactatggagacatattcagcaatcaaatcatatggttcgtggatgatacaaatgtgtatcgagtcactattc

SEQ ID NO: 59076 - DNA, 287 bp, Zea mays
gatttgaaactgttgacatggcagtgaggttgcttgtacctattattgtgctacagaaccacaataggtacaacattcttcaagaaggccataactatagtatagatgttcaagctatagaaagggaggttaaaaagatggtccaccctggtcaggaggtaataataatttctggttcgcatgcgctgcaccagcatgaacagttagctgttgcagtttccaaagcaacacgtagccattctcttcatgaaacaaagattgatggcgggttcaaggtcggtacaaaa

SEQ ID NO: 59077 - DNA, 286 bp, Zea mays
cccgatccagcgaggcggcgaccctccctcctccccttgcttcgctcgtccagccctgaccacccgcatccccgtcagtcatggcagcggcagcaggcggaggcgcggtgcgtgcgctgtcccagaaggagcaggacatacagatgatgctcgccgccgacgtccaccttggcaccaagaactgcgatttccagatggagcgctatgcctttaagcgccgcaccgacggcatctacatcatcaaccttggcaagacatgggagaaactgcagcttgcagcgagggt

SEQ ID NO: 59078 - DNA, 315 bp, Zea mays
aaaatctgtcaaggatttcgcacactacaaatctggagtgtacaagcacatcaccggtggcattatgggtggccatgccgtcaagttgattggatggggaaccagtgatgctggagaagattactgggtatgttgttctatctccatattttgttctgtacattgtcaaacggtgaggccctaagttgttttgtatgatcttttcgtctttgcagcttctggcaaatcagtggaatagaggctggggcgatgatggatacttcaagatcataaggggcaaaaatgaatgtggcatcaggagggcgttgttgctgg

SEQ ID NO: 59079 - DNA, 314 bp, Zea mays
cacgcaaggtagacatattcagcttgggtattcttatactagagattgtaactggtcaagacaatagtaccaaggttgactttatcgatcatgtatgtgaacactgcatggaagggccacaaataaaatttatgtatccctctctggaacctgaattacatgatcaggtagaactgtgcatcaaaattggcctagagtgtgtccagacagatcgaaaaaaaagacctactgcaggggacattatacgtaagctcgaggaaggaaccaaattgggccctacaccatcccgtgaaaatatactacagaaattggta

SEQ ID NO: 59080 - DNA, 318 bp, Zea mays
agtattttgcagcaaaaggcagatgagagtaagttaaaatctcaaattgcttccctagagtctagggtgagtatcagtgagggtagattatcggcaacacgtgaacaggctgattctgctcaagaggaagcatccgaatggaaacgcaaatatgaagttgctgttagtgaggccaaaacagctctgcagagagcggcggtagcacaggaacgcacaaataagaaagtgcaagagagggaagatgctttgagggtagagcttgctaaccaactatctgagaaggaagaggaaattgcaagatacatgcaaaacgtagtc

SEQ ID NO: 59081 - DNA, 319 bp, Zea mays
gcctgtccactttccccgtgcttctccgccgtcgaggccgcgtcccagtgcgaagagactccgactcagatggccagccgctgggtccggcccgaggtgtacccgctgttcgcggcgacgggcgtggccgtcggcatctgcgggtttcagctcttccggaacatcactggcaacccggaagtcagggtaaacaaggcagggagggcagctggtgtgcttgagaaccatgaggaggggagacgttacgccatgcatggcctaagaagctttgtgcacgacaagactcctgagatcatgcctcagttaacaagttcttcac

SEQ ID NO: 59082 - DNA, 313 bp, Zea mays
cggctcgagggtgttcaatgtcacggcaatgaacatccacaactacgtcctcggtgatttcatcggcgctgcagggatcgtgctgtgtttctttggtctgctgtacggtggtttctggaggatccagatgaggaagacatttgggctgcccagaagcaggtggtgcttcggatcggcgtcactaacagactacacgcatggctattctgctggccttgcgtgcttgcacaggaggtgcgcacggggaatctatacgacgcgaagaacggcagcttctatgagaaagttatggacgcgatggtgtggagactga

SEQ ID NO: 59083 - DNA, 316 bp, Zea mays
cgctctacaagaagatcttcaaagcggatttcagttgcccgtcctggttctccacaagcgcaaagaagctcatcaagaagatacttgatcctaatgctaacaatagaataactattgcagagctcattaacaacgagtggttcaagaaggggtatcagcctcccagatttgaaacagcagatgttaatctggatgacgtgaactccatcttcgatgaatccggggagccagcacagcttgttgttgagaggagagaagaaagaccatcagtgatgaacgctttcgagttaatctctagtctcagggcctcaatctc

SEQ ID NO: 59084 - DNA, 120 bp, Zea mays
gtacatcgagtggttcaagaaggctgggtttagggatgtcaagctgaagaggattggaccgaagtggtaccgcggtgtccgaaggcatggcctcatcactggcttgctgacatcctccgc

SEQ ID NO: 59085 - DNA, 313 bp, Zea mays
cggctcgagggtgttcaatgtcacggcaatgaacatccacaactacgtcctcggtgatttcatcggcgctgcatggatcgtgctgtgtttctttggtctgctgtacggtggtttctggaggatccagatgaggaagacatttgggctgcccagaagcaggtggtgcttcggatcggcgtcactaacagactacacgcagtggctattctgctggccttgcgtgcttgcacaggaggtgcgcacggggtatctatacgacgcgaagaacggcagcttctatgacaaagttatggacgcgatgcgtgtagagact

SEQ ID NO: 59086 - DNA, 315 bp, Zea mays
gaagccgccgccgctgcagtgtccatagccaccgcaggagactgagatggggggttttgtcaagacccacaagagcaatgcatacttcaagcgtttccaggtgaagttcaagagaaggcgcgctggcaagacagactacagggccaggataaggctgattaaccaagacaaaaacaagtacaatacacccaaatacagatttgttgtgcgatttaccaacaaggacatcacagcacaaatcatatctgctagtatagcaggtgatatggttcttgcttctgcttactcgcatgagtgccacgatatggtctcgaa

SEQ ID NO: 59087 - DNA, 313 bp, Zea mays
acctaatgttgcacatgctgtggccaccaaaagtgtgttccacatctactacaaccccagattaagccaatctgaattcattataccattttcgaagtttatcaagagcttcagtcaaccattttctgctggttcgaggttcaaagtgaaatatgagagtgatgatgcttctgaaagaagatgcacagggatcatagcaggaattggtgatgctgaccccatgtggcgtggttcgaaatggaaatgtttgatggttcgatgggatgacgatgtagattttcgtcaaccaaacaggattctccttgggagattg

SEQ ID NO: 59088 - DNA, 312 bp, Zea mays
cacaccacacctcctcgcttgcactccgctcgtctgacatctcgtcccgtcctttcgtttcgaagcctcgcgagccccgacgatggccaccaccgcggtgtcggtcgacgagaagctcgataagcttcgcgccgaggtcgccaagctcgaccagatcagcgagaacgagaagtccgggttcatcagcctcgtgtcacggtacctcagtggggaggcggacagatcgagtggagcaagatccagacccctacggatgaggtggtggtgccctacgataccatcgcgtcgcctccgaagatctcgaggagacga

SEQ ID NO: 59089 - DNA, 309 bp, Zea mays
gagatgctcaaggaacaaactggaaaggatgacattgatgtgggttctatccggatgacgctgttcaacatctttggtgatgatgccagcccaaagattaagaagttcatgaaggtcatgctcggaaagttccaccagggccagtcaggtgagcaaggcagtggtggtggtggtgtctttggcatggttggtgcccttgctcaggagttcttgaaggctaagcttgaagggaaggaggaagaggctttcaaacctgcattagagcaagaggttcacagtgttgacgaggtgtacccgggagtaaggcct

SEQ ID NO: 59090 - DNA, 138 bp, Zea mays
ctcaaaccctagccgcctcctgcaagtttcagagctcaggaatctgcgccatggcgagtgagacggagaccttcgcatttcaggctgagatcaaccagctgctctcactcatcatcaacaccttccacacaacatacg

SEQ ID NO: 59091 - DNA, 317 bp, Zea mays
ctcctttcttcccctgcctgccgtctctcttccaccttccaccacaagcgccgccgcagccggtgcctgctccttcccgatccccgaggcaaagctgcgactccgcaaccgccgccatggcgttcgagaagatcaaggtctccaacccaatcgtcgagatggacggtgatgagatgaccagggtattctggcagtctatcaaggacaagcttatcctcccatttctggacctggacatcaagtactatgatttggggatactgcaccgtgaagcaactgatgacaaggtcacagtggagctgcagaggctactctca

SEQ ID NO: 59092 - DNA, 310 bp, Zea mays
tatgacaagcagctggatgctgatatccatcgcaagtacatctatggtggccatgttgctgactacatgaggaacctcgctgaagaggagccagagaagtaccagtctcacttcagtgagtacattaagaagggaattgaggctgatgacatgtaagctctgtacaagaaggtccatgctgccatccgtgctgatccttctgtggtcaagtcaaccaagcagccaccaaaggagcacaagaggtacaaccccaagaaactgacatacgagcagaggaaggccagtctcattgaaggctcaaccaactcaa

SEQ ID NO: 59093 - DNA, 309 bp, Zea mays
agagaactcccccttccttgagaagctgaagaagaggggctatgaggttctgtacatggttgatgccattgacgagtatgctgttggtcagctcaaggagtttgagggcaagaagcttgtctctgccaccaaggagggtctgaagcttgatgagactgaggacgagaagaagaggaaggaggagctgaaggagaagtttgaggggctgtgcaaggtcatcaaggaggttctgggtgacaaagttgagaaggtggtggtgtctgatcgcgttgtggactcaccgtgctgcctttgactggcgagtatggc

SEQ ID NO: 59094 - DNA, 309 bp, Zea mays
gcagcagctacacacagcaagacaagaacttagtcatgcactctaccagcatgacgctgcctgccgtgttatagccaggttgaagaaggaaagagatgaggctagagcacttttggctcaagctgagagacagattccagcatcagttgcaggagctgctcctgcagctgttgtttccaatggaaaaagagcaatggaagatgaaattggccctgacggaaagaagattcgtcctggtatcaaccctgtcatgattgatgaacttacagagtgtaataccatgctttcagacagcgtaagaaaagacag

SEQ ID NO: 59095 - DNA, 306 bp, Zea mays
actctactctactcttgcctcttggtggtcaggatatcggcaaccttgatagtgaccctgaagaatttgcgaggacactgtgtgatgatttgaatattacagaccctgaagttgggcctgcaatagctgtttccatccgtgagcagctttatgagattgctagtcagagcgtctctgttatgagagagaagcaaatgtcaaagaagggaaggcgagcaccagaattttcttcaaatagtaaagccgtgaacaatgcagtggatttgttcaagtattttggcagcaaaggagcgtcatccggaaaag

SEQ ID NO: 59096 - DNA, 306 bp, Zea mays
caacaacgcgacagaaagataccaattgttggttgaaggaacaaacctcctggcagtcatgggtaccccaggagttgatgctaggaagacgaaaagtaatcacatcatggaaacgaaccaaacacttggaattgaagctgctaggagatctattattgatgagattcaatacacaatgaaaagtcatggcatgaacattgatcggagacatatgatgctcttggcagatttaatgacatacaagggtgaaattctcggcattactagatacggcattgcaaagatgaaagcagtgtgctgatgctt

SEQ ID NO: 59097 - DNA, 310 bp, Zea mays
gaagatcaaaagagaaattaaaattcttcagaatctttgtggaggccctaacattgtgaagctgctcgatattgttagagatcagcattcgaaaacgcccagcttgatctttgaatatgttaacaacacagattcaggagtgctgtacccaacattaacagattatgacattcggtattacatctacgagttactcaaggcattagattactgccattcacaaggtattatgcaccgagatgtgaagccccacaatgttatgatagatcatgagcttcggagactccggctatagactggggtcttgctg

SEQ ID NO: 59098 - DNA, 310 bp, Zea mays
gcgactttatttcaagaagacagaagaagggagagtcgtactgaggtgtaagaatggcgagtgcacaggcagtggggcaaggagaacgaggccacttcgttctgaagagcggacacaccattccggccgttggtctaggcacttggagggccggctcagataccgctcactctgttcggaccgccatcgccgaggctggatataggcacgtggacacagctgcccaatacggagtagagaaagaggtcggtagaggacttaaagctgcgatggagggcgggatcaacaggaagatttgtttgtgacgtcg

SEQ ID NO: 59099 - DNA, 306 bp, Zea mays
gttgttggtagaaattggagtggtgctccaaacaatccctgtagggtgaagactattcctcgccctattcctgagaagaaatggtacctcacaccatctgtcattgcgcttatgggaggactgcttccttttggtagtatctttattgagatgtactttgtcttcacatcgttctggaactataaggtctactatgtttatgggttcatgttgctggtctttctgatactcatcattgtcaccatatgtgtaacaattgtcggtacatatttcttgctaaatgcggaaactaccactggcaatgga

SEQ ID NO: 59100 - DNA, 307 bp, Zea mays
tccagaaccacatgatgtggggcggtacatccaagctgaagtcaaatctggtggccaaatctcagtcgcaaaaactgccggttcaatagatcctgctgcaggattggttgaatatgtagaaactctcgtgaggaatcctgaaactgattatgatgtagtcattattcaagtaaatggagttgctcaggctgcagactccgttcacgttctttgcatcgggagattgcggatgagacttgctaaagaaaagacggtcgttgcgaaggagttctattcctcgtcaatgcagttgtgtggcgttagagga

SEQ ID NO: 59101 - DNA, 306 bp, Zea mays
cgcacgctctcgcagtacagcagcattatcagggagcgtgccgtgggagtgggaggttgcctcaggtgcggacagtcgccggcgggaccatcggtgtctgagatgaaggagagaggcggctccagggcggcagtggacgagcgctacgcgcagtggaagtcgctcatccccgttctctacgactggtttgccaatcacaacctcgtttggccatccctctcctgccggtgggggccacagtttgagacagctacctacaagaatcgtcaacgcctttacctatctgaaagaccgatgggagtgtgc

SEQ ID NO: 59102 - DNA, 302 bp, Zea mays
tggaggtccaaatgtaactaaaggctacttcaaaaatgaagcaaaaacaaatgaggtgtacaaggttgatgaaagaggcatgcgatggttctactctggcgacattgggcgcttgcacccagatggatgtcttgaaattatcgaccgcaagaaggatatagtcaagcttcaacacggtgaatatgtttctctaggaaaggtggaggctactttgagtgtgtgctcatacgttgaccagatcatgatccatgctgaccccttccacagctactgtgtggcacttgtgtaactgcacagagtga

SEQ ID NO: 59103 - DNA, 300 bp, Zea mays
aatcggtggtgctagatagactagttaagcctgctaatccaatcattgattacaatacaaggttcagtggaatcactgctgagatgttggctgacgtgtccacatccctgcatgaaattcaggaagagtttgttggacttgtatatacagaaacaattcttgttggtcattctttggaaaatgaccttatggcattgcagatatcccatggtttaatcatcgacacagctgttttgtacaagtataatcgaggatctcgctgtaagattgctttgcgtgtcttacaaaaagatttctcgg

SEQ ID NO: 59104 - DNA, 305 bp, Zea mays
tgagacgagacgagttaccatctcatcccaactccggaacgaacaagttaccatctcatcccaactccgcctcgaccggatctcgtcggactcggatccgcccgaccaccccgcgccgccgcagatcaaagaagatggcagctgtcgacacattcctcttcacctcggagtctgtgaacgagggacaccctgacaagctctgtgaccaggtctcagatgccgttcttgacgcttgccttgctgaggaccctgacagcaaggttgcttgtgagacctgcaccaagacaacatggtcatggtctttg

SEQ ID NO: 59105 - DNA, 212 bp, Zea mays
tgcagcagtatggcttgaatccttatgaagtttgatgtgtcctctgtgttgtacccaaaactcttctgcagcagtatggcttgaatccttatgaagtttgatgtttgaacttcataaggattcaagccatactgctgcagaagagttttgggtacaacacagaggacacaacactcttctgcagcagtatggcttgaatccttatgaagttt

SEQ ID NO: 59106 - DNA, 297 bp, Zea mays
caacatggacctgttcaggaagtgcatggagcctgttgagaaatgcctgagggatgccaagatggacaagagcagcgtccatgatgttgtccttgacggtggctccactaggatccccagggtgcagcagctgctccaggacttcttcaacggcaaggagctgtgcaagaacatcaatcctgatgaggccgttgcctatggtgctgctgtccaggctgctatcctcagtggtgagggcaacgagaaggtgcaggacctgcttctgcttgacgtcactcctcttctctgggtctggag

SEQ ID NO: 59107 - DNA, 286 bp, Zea mays
ggaagcagcagttttggatggtcaaattactgattttctggatgataacactgagtgatctctctcactggcctgggtgttggggtgtaaatcatgtcagttttcgtcaaaccacttactaatcgtttttaacaatgttttcaggtattgcctatcaggatcatctgattcgatgataagactatgggatctaggacaacagcgttgtgttcattcttatgctgtgcatactgattcagtttgggcgcttgcaaccactcattcgtttggtcatgtctacagtggt

SEQ ID NO: 59108 - DNA, 289 bp, Zea mays
agaagagcggcggcgcgggcggacaaggagcaggcggaggaggagctgtgccaagccacaatgggtatctcgcgtgactcgatgcacaagcgccgggccaccggtggaaagcagaaggcctggaggaagaagcgaaagtatgagcttggtcgccagccagccatacaccaagttgtcaagcaataagacagtgaggagggtccgtgttcgtggaggtaatgtgaaatggagggctcttcgccttgatactggtaactactcatggggaagtgaagctgttacccgcaaa

SEQ ID NO: 59109 - DNA, 298 bp, Zea mays
cttcttccattgatccagtcttctgaatctggtctgatcaaggttgacttgagtggttgcaagaacatcacagatgtggctgtctcctctctggtgaagcgacatggaaaatctctgaagaaagtcagccttgagggttgcagcaagataacagatggcagcctcttcaccatgtctgagagctgcaccgagcttgccgagcttgatctttcaaactgcatggttagtgactatggtgttgccatgctggcatctgcaaggcacctcaagcttcgtgttctctcactgtctggttgct

SEQ ID NO: 59110 - DNA, 283 bp, Zea mays
aggtgaagtatggatcaagattgtctgcagcaaacacaaatgcagagaccattctgggtactatcgtaatggcaaagaatccatgccttcatccaggggatgtccggatccttgaagctgttgatgtgcctgaactgcatcaccttgttgattgcttggtcttccccaagaaaggtgagaggccgcacgcgaatgaagcatctgggagtgatcttgatggggatctatacttcgtaacatgggatgaaaaccttataccacctggtaaaaagagttggaaccc

SEQ ID NO: 59111 - DNA, 283 bp, Zea mays
caggagtctctagggggctaattgaaaaagtacaatagacgtgatctttgcgaaaggctcgtctctatatgattcttcatacatattgtcttttatctgcatttatggtctagagtctctaggttgtattgtatagtttgttaattgtcccttgtatttagaaaactggaccactgtctaaaggttgtacgtgcccttagttgtcttttatggttggagaatcgttctgatgtctctcgactatacatgccttaagaccttaagagccatcaatgtttgcttt

SEQ ID NO: 59112 - DNA, 286 bp, Zea mays
cggcgacgaggagtggtggccggagcttggcattcccaaggaccagggcccacctccctacaagaagccccatgaccttaagaaggcctggaaggtgagcgtgctcaccgctgtcatcaagcacatgtcaccagacatagagaagatccgacgcctcgttcgccagtccaagtgcctccaggacaagatgactgccaaggagatctcgacctggctggcggtcgtcaagcaggaagaggagctgtacctgaagatgcaccctggcgcacgcccgccggcatccact

SEQ ID NO: 59113 - DNA, 278 bp, Zea mays
cccccacctcccggtccggcagcagagagcgggggtgcagagagatcgagatccggaggccgcgagtgggagcgccaccaccagcgtctgcgcaatggcgggcacggtgacggtcccggggtcgtcgaccccctccacgccgctgctcaaggacgagctcgacatcgtgatcccgacgatccgcaacctcgacttcctggagatgtggcggcccttcttccagccctaccacctcatcatcgtgcaggacggcgacccgaccaagaccatcaaggtgc

SEQ ID NO: 59114 - DNA, 274 bp, Zea mays
cggagagaagcgtgtctccgttcagaatgaggatggaacaaaagtcgaatacagggtgtggaaccccttccgttccaagctggctgctgctgtgcttggtggtgttgacaacatctggattgctcctggtacccgtgtgctgtatcttggtgctgcttctggcacaactgtatctcatgtgtctgatattgtagggccggatggtctggtctacgctgttgagttctctcacaggagtggaagagaccttgtcaacatggcaaagaagaggacc

SEQ ID NO: 59115 - DNA, 170 bp, Zea mays
ctctcagccgacgagccagtcttgcgtgacaacgaagccctgaggaataaatgtcttattccaatgagtgatatcgagatggttctaccaatcacggttggaggttacacagatttcttttgttctgtgcaccatgcaaggaactgcggattcatcttccgagggccgca

SEQ ID NO: 59116 - DNA, 284 bp, Zea mays
caatctctctggcctgctgcttcctgataatcgaccagttccccagtcttgctccttgcactcctccctccatctccagcattgtcgttctgattcacctgctccaatggctgttctttctgctgctgatgcttccccggtctcagctatcgggtttgagggctatgagaagcgccttgagatcacattctctgaggcacctgtctttgtggaccctcatgggcgtggtttgcgtgccctctccagggcccagattgactctgttctggatcttgcacggtgca

SEQ ID NO: 59117 - DNA, 283 bp, Zea mays
cacaaccaccagattgctgcacttgctgttgctctacagcacactatgtcgcctggcttcaaggcctatgcaaagcaagtgaaggccaatgctgttgcaattggaaactatctcatgagcaagggctacaagatggtgactgatggaactgagaaccaccttgttctctgggatctccgcccccttggcttgactggaaacaaggtcgaaaagctatgtgatctttgccacatcacattgaacaagaatgctgtcttcggtgacagcagtgcattgtctccgg

SEQ ID NO: 59118 - DNA, 285 bp, Zea mays
tagaagagcggcgggcgggcggacaaggagcaggcggaggaggagctgtgccaagccacaatgggtatctcgcgtggctcgatgcacaagcgccgggccaccggtggaaagcagaaggcctggaggaagaagcgacagtatgagcttggtcgccagccagccgcaccaagttgtcaagcgataagacagtgtaggaggtccgtgttcgtggaggtaatgtgaaatggagggctcttcgccttgatactggtaactactcatggggacatgaagctgttacccgca

SEQ ID NO: 59119 - DNA, 117 bp, Zea mays
ggtgtttgttcaagaactaatgatgtagtggaccctatgatcaaaccacagtggtttgttaattgcaaccacatggccaaggcgggcccgacgctgtaaggtcgatcaagattgaaa

SEQ ID NO: 59120 - DNA, 283 bp, Zea mays
tgtgcttactacatattctatagtaagcatggaagtaccaaaacaatcaaatcctgatagtgatggagaagagaaagggaagcctgacacgtatggtgcacctgtgtcctcttcagggagcaaaaagagaaaggcatcctcttctaagaaaacaaaaaataaaagtgttgcagagagttgcttgcctgaaaaacctcttgcgaaagttgcttggtttagggttattcttgatgaagcacaaagcattaagaactaccgaactcaggttgccagggcttgctgg

SEQ ID NO: 59121 - DNA, 276 bp, Zea mays
ggcgaggcgacgaaaccctagccagtccccaactcgaacctcagtcaggcagcgtgaggagggagagttcaaggaccgaggcggcgtcgggcgagatgaagcttaacgtcaagaccctcaagggcaccaacttcgagatcgaggcgagccccgatgcgtcggttgctgacgtgaagaggatcattgagaccactcagggtcagagtacctaccgggcggaccagcaaatgcttatataccaagggaaaattctcaaggatgagaccactttggaaa

SEQ ID NO: 59122 - DNA, 271 bp, Zea mays
gaggatttggtcgtctgctgctactacattgactgtgctatgaaggccttcgcgatatctcctgcgcagtatattccaacacaccttcggattttgacttcaaacttgaaagtttagcccaagaatttgattccctatctgacttcgcggagatctcgccacaaatgttgacattgtcttcccagtgatccatgggaaatttggtgaagatggaggcattcaggagcttttggagaaagcaaatgttccatttgttgggacacctctaagg

SEQ ID NO: 59123 - DNA, 273 bp, Zea mays
gttcgatctgtgcagcagatctgaggtcccgggcgaccgtgaagcagcttcaatcgtcggcatggcgctcgtattgcatagtggggctggaaacaagaatgccttcaaagcacttattgctgcagaatacagtgggatcaaggttgagttgaccaaggattttgagatgggtgtctccaacaagacccctgagtttcttaagatgaacccccttgggaaggttcctgttctggagactcctgatggccctgtttttgagagtaatgctatcgc

SEQ ID NO: 59124 - DNA, 269 bp, Zea mays
ctctgacttactctgtgtctgtgttgggactggtgttcagttcttcggtatgctgctagtaaccatgatctttgctgttctgggtttcctttcaccatcaaaccggggaggactgatgactgccatgctgctcacttgggtcttgatggggttgtttgctggatatgcttcttcacgcctgtataagatgttgaaaggatcagaatggaagagcatcaccctgaggaccgccttcctgtttcctgggattgctttcggtattttcttcg

SEQ ID NO: 59125 - DNA, 277 bp, Zea mays
aattttcaggattgaccattatttgggaaaagaactggtggagaatttgtctgtcctgcgcttctcaaatctcgtttttgagcctctctggtcaagacaatatataagaaatgtgcaacttatattctcagaagactttggtactgaaggacgtggaggatactttgatggctacggtattattcgagacataatgcagaatcatctcattcagatactagctttatttgctatggaaactcctattagtttggaagcagaggatataagaaatgag

SEQ ID NO: 59126 - DNA, 274 bp, Zea mays
tgattcccaccaagcccatggtggtggagacattctcgcagtatcctccccttggtaggtttgctgtccgcgacatgaggcagacagttgctgttggagtcatcaagagtgtggagaagaaggacccgaccggcgccaaggttaccaaggcagctgccaaaaagaaatgatgcaacctgtcgttaatcctgtatctgcttttgcaatacctgacttgtcactccatcccgaagttttgtatgcggttgttactgttattgtgtactgttaagct

SEQ ID NO: 59127 - DNA, 269 bp, Zea mays
ggccttaccttcatggttgcaaaatttgatggcattcttgggctaggctttcaggaaatatctgttgggaatgcaacacctgtgtggtataacatggtaaaacaaggtctcatcagtgaccctgttttctctttctggtttaaccgacatgctggtgaaggagaaggtggtgaaattgtgtttggtggaatggattctagtcactacaagggtgatcacacctatgtcccagtcactcagaagggatactggcagtttaatatgggtga

SEQ ID NO: 59128 - DNA, 270 bp, Zea mays
cgggaaacatgttgtttttggtagagtgatgaaaggaatgggggtagttcgctctattgagcatgtttctgtcggagaagctgactgccccactcttgaagttaaaattgttgattgtggggagcttcctgaaggtgctgatgatggagttgtaatctttttcaaagatggtgatacgtacccagattggcccaatgatcttgaagagaagcctgctgaggtttcatggtggatggatgctgtggagtctgctaaagcttatgggaatga

SEQ ID NO: 59129 - DNA, 277 bp, Zea mays
gtcctcatctttgaccttggaggtggtaccttcgatgtctccctccttactattgaggaaggtatctttgaggtcaaggccacagctggcgacacccatcttgggggtgaggactttgacaacaggatggtcaaccactttgtccaggagttcaagaggaagaacaagaaggatatcactggcaacccgagggctctccggaggctgaggacctcttgtgagagggccaagagaactctgtcttccactgcccagaccaccattgagattgactcgc

SEQ ID NO: 59130 - DNA, 270 bp, Zea mays
gtcagcttctacttcctacgcggccggctccaccagacgtggagcgtcccgagatatggcctccagtatttcatcccgtcgcggaagaagggcatcaaccgcaagatcgagctcgccatcctcagggcagacaagatgggcgtaaaggtcatcagccttgctgcgctgaacatgaacgatgctctcaacggcggcggcacactttccgtgaacaagaacccgaacctgagggtgacgctggtgcacggcaacaccctgacggagtccgtg

SEQ ID NO: 59131 - DNA, 269 bp, Zea mays
ctttccagatgctacatcagaagagctcgatgtgagtgatgctacatgtattatttgccgtgaggagatgactacagcaaagaaactgctctgtgggcatctgttccatgtgcattgtctaaggtcgtggctagaacgccaacacacttgccccacgtgcagagctccaatcattcccgcagataatggacatgctgtatcagcacgacaacatggagcccaggctggggttcagcctggtactgccactccatcctcagaaggagcac

SEQ ID NO: 59132 - DNA, 273 bp, Zea mays
tgagattgactcgctgtacgagggcattgacttctactccaccatcacccgtgccaggtttgaggagctcaacatggacctgttcaggaagtgcatggagcctgttgagaaatgcctgagggatgccaagatggacaagagcagcgtccatgatgttgtccttgttggtggctccactaggatccccagggtgcagcagctgctccaggacttcttcaacggcaaggagctgtgcaagaacatcaatcctgatgaggccgttgcctatggtgc

SEQ ID NO: 59133 - DNA, 269 bp, Zea mays
gaagattgtcagggagacctgccgcaacattggttttgtgtcaaacgatgttgggcttgacgccgaccactgcaaggtgctcgtgaacattgagcagcagtcccctgatattgctcagggtgtgcatggccactatcaccaagcgccccgaggagattgcgagctggtgaccagggacacatgttcgggtatgcgaccgatgagacccctgagttgatgcccctcagccatgtccttgccaccaagctaggtgctcgtctcaccgaggt

SEQ ID NO: 59134 - DNA, 299 bp, Zea mays
gttaagagggagttcaatatgagactcacagatattgttacacaattcaagatgctaggagtgaatactgctttgtactacaagaacaaggagatggaagatacctttaacatagtgcctacgagtgctgtaagtggtgaaggtattcctgatttgcttctgttactggttcaatggactcagaagacaatggaagaaaaactcacttttgttgatgaagtccagtgtactgtactggaagtcaaggttgttgaaggccatggtactacaattgatgttgttttggtcaatggtatact

SEQ ID NO: 59135 - DNA, 303 bp, Zea mays
gttccccgaggctagaattcggatccctcccaccacatccatccccttcccttcccttccctcgtgccccgccggctctccagcgcgccgtctctgcccagatccaggagatatgcctcgctatgatgatcgctatggaggcacgcgcttgtatgttggcagattggccccccgtactcgttctcgtgatttagaatatctcttcggcaaatatggaagaatacgagaagtggagttgaagcgcgactatgcatttattgagttcagtgaacatcgtgatgccgatgaagctcggtaccaact

SEQ ID NO: 59136 - DNA, 316 bp, Zea mays
gaattcctccctggccagcggcgccgccaccgccatgaaccgcgttcacagagaggctgccgctgctgcgaaggagcagcgcaagaacgacaagagggagaagaggaagaagcacaaggatgccaaggaggatgactgcggcgcctcgatggccgaggaagaagcacccaaagagaagaagcagaagcagaagcagaggaaggataaggacgagcgggaggagaagaaaaagctgaagccgacggttagcatagccgttgccggctccaatcattgacacgcccagtccctcgagctcgccacctcctggctggtc

SEQ ID NO: 59137 - DNA, 131 bp, Zea mays
ggtgggttggcttcgactcaccctccagttcgggttcgggttcgtgaggttatccggggttcgggttcgtaggtgaacggatcgagatggcggcgtcggatgttgagtaccgctgcttcgtcggcagcctc

SEQ ID NO: 59138 - DNA, 317 bp, Zea mays
cacactgttccttaaggacgatcagctggagtaccttgaggagcgtcgcctcaaggatctggtcaagaagcactctgagttcatcagctaccccatctccctgtggactgaaaagacaacagagaaggaaatttctgacgacgacagacgaggaagagaagaaagatgctgaggaaggaaaggttgaggatgttgatgagaaggaagagaaagaaaagaagaaaaagaagatcaaggaggtttctcatgagtggtcattggtcaacaagcagaagcccatatggatgaggaagccagaagaaatcacaaaagaagaa

SEQ ID NO: 59139 - DNA, 312 bp, Zea mays
agagagggtaactttgacctcgtgggtaacaacatgcctgtgtttttcatacgagatgggatgaaattccctgacatggtccacgctttcaagccgaatccaaagaccaatttgcaggagaactggagaatagtagatttcttctctcaccgaccagagagcatacacatgttcaccttcctctttgacgatgttggcatcccactcaactacaggcacatggagggctttggtgtcaatacctacaccttgatcaacagggatggaaagcctcaccttgtgaaattccattggaagtctacttgtggtgtg

SEQ ID NO: 59140 - DNA, 314 bp, Zea mays
  unsure (1)..(314): unsure at all n locations
gcaaatcatgcatatgcttgaccatcctaacatcatcggtcttaagcattacttcttttcaacaactgaaagggctgagctttatctcaaccttgttcttgagtttgttccagagacagtaaacaggattgcaaggcagtacaatcgaatgaatcagcggatgcccctcatttatgtcaaactgtacacgtatcaggtctgccttgactagatatgccgagcgcttgcttatatacataactgcattggcatctgccaccgtgatatcaaaccgcagaatgttcttgtgagatatgatttnctntcttttctat

SEQ ID NO: 59141 - DNA, 161 bp, Zea mays
gacgtctcgatgggcaagtgtgaatctagggatctttatatgcatgacatgttctggcattcatagaagcctgggggtgcacatatctaaggtaagatctgccaccctggatacatggctgccagagcaagttgcatttattcaatcaatgggaaacgaaa

SEQ ID NO: 59142 - DNA, 307 bp, Zea mays
gactttcatggacccagctatgtctcctgtgcacatgagtgctcgctctcctcagcagagggggcatattttccatcgaaggagcaatgtggctcctattccatcctctttcgattctgctggtgaacggatgcggagccgaagaaatgactcgaatgtaaatcaatctgacaacaaaaggctgttttacgttgacattgagcgtatagtccggggcgaggactcccggactacactgatgataaagaatatcacaaacaagtacacatcaaagatgcttctggcagctattgatgaaagtcacggg

SEQ ID NO: 59143 - DNA, 310 bp, Zea mays
  unsure (1)..(310): unsure at all n locations
gtcgtcatccccatcctagtagcgtagaaaccacctgcattttcattttgatctcactaatacctccggctagctgctttccagtgaccaaaagatatcaaagaccacttcccgtcttcctcccgtggctgtctgtcatctggctctgaaacgatggcagtcctgcaagttgctgctgctgcccctccccctgtctctgtgattgggttcgagggatttgagaagcgccttgagatcagcttctctgaggcacctgtcttggctgacnccagcggaaggggactgcgtgcgctctcgcgtgcccagatcg

SEQ ID NO: 59144 - DNA, 309 bp, Zea mays
gttcctatccttgccccactgccaattgggttcgcggtgttcctggtccaccttgccaccatccccattactggcactggcatcaacccagctaggagccttggcgctgccatcatctacaacagggatcacgcctggaacgaccattggatcttctgggtcggccccttcattggcgctgctctggctgccatctaccaccaggtgatcatcagagccatcccgttcaagagcaggtcttaagctgccgtggccgtgccgagacatgccagtccgaagaacgggcgtcttcctgtgatgtcttcttgt

SEQ ID NO: 59145 - DNA, 312 bp, Zea mays
cccgtgctccgcaaccgctgagtgagaagaagagatggccggcaagggcgatggcccggctatcggcatcgatctcggcacgacgtactcttgcgtcggcgtgtggcagcacgaccgcgtcgagatcattgccaacgaccagggtaaccgcaccacgccctcgtacgtcgccttcaccgactccgagcgcctcatcggagatgcggccaagaaccaggtcgccatgaaccccatcaacaccgtctttgatgccaagcgtctcatcggcaggaggttcagtgatgcgtctgtccagagtgatatcaagttgtg

SEQ ID NO: 59146 - DNA, 300 bp, Zea mays
cacacacacacaaccagatctcccccaaatccacccgtcggcacctccgcttcaagatgcagatctttgtgaaaaccctgactggcaagactatcaccctcgaggtggagtcgtctgacaccattgacaacgttaaggccaagatccaggacaaggagggcatccccccagaccagcagcggctcatctttgctggcaaacagcttgaggacgggcgcacgcttgctgactacaacatccagaaggagagcaccctccaccttgtgctccgtctcaggggaggcatgcagatctttgtga

SEQ ID NO: 59147 - DNA, 301 bp, Zea mays
taatcatggattaattaggcttaataaatgtaagttttcatctatgtaattagttttgtgattagactatatttaatactcgtaattgacatttaaacacccaatatgacacggactaaacttttagttagttgaaccaaacatagtcaaatccttgttcacaaaccgtggtcagtgcccaatgaatttgtttgtgctaaagttgtgggcttacaagttttgaacacctgtattggccatagggcctgtttgtttcggtttaatggccaaattttggctgttaaacgcttcgtttctcggt

SEQ ID NO: 59148 - DNA, 226 bp, Zea mays
ggaaatgattgactcattgtttaagccacgggaagctgaagatgatggtctgatccgggagtgtctgattgacttctacaccagttctgggaagagaaagcctgaccaagttatcatattcagggacggtgttagcgaaagtcagtttaatcaggtgctgaacattgagttgcaacaaatcatcgaggcttgcaaatttcttgatgagaaatggaatcccaagttc

SEQ ID NO: 59149 - DNA, 302 bp, Zea mays
tcaatatacactacagttgaggtgcaggaaggaatgaagatagacaagggatatatttctccatacttcatcacaaatcaagacaaatcaattgttgaattcgaaaatactagagtgcttttaactgatcagcgtgtgaatgatgttcaagagatacttcccttgctggagaagacaacacagttgagtgtccctttattaattattgccgaggatgtgtcgcatgaggtatattcaacactggttcttaacaaactgaatggattgctaaatgttgcggttgttaaatgtcctggtttggg

SEQ ID NO: 59150 - DNA, 281 bp, Zea mays
ggatatcactggcaacccgagggctctccggaggctgaggaactcttgtgagagggccaagagaactctgtcttccactgcccagaccaccattgagattgactcgctgtacgagggcattgacttctactccaccatcacccgtgccaggtttgaggagctcaacatggacctgttcaggaagtgcatggagcctgttgagaaatgcctgagggatgccaagattgacaagagcagcgtccatgatgttgtccttgttggtggctccactaggatcccag

SEQ ID NO: 59151 - DNA, 293 bp, Zea mays
tggccacttcaccaagcgccccgaggagattggagctggtgaccagggacacatgttcgggtatgcgaccgatgagacccctgagttgatgcccctcagccatgtccttgccaccaagctaggtgctcgtctcaccgaggtccgcaagaacggaatctgcccctggctcaggcctgatgggaagacccaggtgacagtcgagtaccgcaatgagggtggtgccatggtccccatccgtgtccacaccgtcctcatctccacccagcacgacgagacgtgaccaatgatgagat

SEQ ID NO: 59152 - DNA, 290 bp, Zea mays
ctcgagcgccccttctcagtctctgaacatcccactatagctggaatagctgatgaagcagaaattcttaactcccttcagaaaccaaagaaggttgttttcctcggaagtgatggggttgaacgtccatttctttgcaaacctaaggatgatcttaggaaagacttacgcatgatggagttcaatgcaatgatcaaccgtctcctctccaaggtccctgagagccgcaggagaaagctctatattagaacttttgcagtggtaccacttacgaagattgtggaatggta

SEQ ID NO: 59153 - DNA, 284 bp, Zea mays
tcggactcgcagctgtacgagctcttcagccaggcggggcaggtggtgtcggtgcgcgtctgcagggacgtcacctcgcgccgctcgctcggatacgcctacgtcaacttcaacaaccccttggatgctgcaagggcattggaagtgctgaactttgctcctcttaacaacaaacctatccgggtgatgtattcaaaccgtgatccaagtagccgcaggagtggatctgctaacattttcataaagaatcttgacaagatgatagcaataaatcccttcatgag

SEQ ID NO: 59154 - DNA, 283 bp, Zea mays
tgctgtgttaattaatgctggacaagcaaatgctgcaactgtaagtgtttataagcaccatgtcatagtcatcagtagcagttatgaactcagtgactgatatttattgaagtgttaggctgactccagcagttcacccaaagcttacccataagcactgttttgcactgtagactgcactgttcgcagagtggagtttgaatatgggcatgagtatgggtaagttgttggagatagtcttagagtggacgcgctagcgagttcgcccaaaaggttaagctga

SEQ ID NO: 59155 - DNA, 283 bp, Zea mays
gtcgccatctacatcgaggtcggcaaggacttcgatctcaacgacatccagaggatcatcggcgaccggctcggcgtgtcatgggagaaccggacgctcaaggagcgcgccggtgtgctctacagagtgctcagcaagatgaacttcgtgctgctgctggacgacgtttgggagccactcaatttccggatgcttggcatcccggtgcccaagcacaactcccagagcaagatcgtcttgacgaccaggatcgaggatgtgtgcgccgcatggacgtccgccg

SEQ ID NO: 59156 - DNA, 284 bp, Zea mays
gcgaaatgcaggacatcgggaggacatgccgttgtgtgcgctgctgttagcttcagaccatgcattgacattcacaagggaaaagttaaacagattgttggctctactcttcgggatttagcaaatgatagcatggaacttgtgacaaactttgaatcagacacctctcctgcagaatttgctaaattttataaagcagatgaacttctaggaggacatgttataatgcttggcgcaaatccttcaagccaggctgctgcactggaggcactacgtgcatatcc

SEQ ID NO: 59157 - DNA, 287 bp, Zea mays
ctcaaatccccagttcagtaactggctaactgtaggagaaggagagagagatggagaacggcggcgctaaaggcgacgtccccgacgatgcgaacgagcattgccctggaacacagtctgaggaggcaggcaaggcagatgcctgcgctgggtgccccaaccagcagatttgcgccaccgcccccaaggggcctgatcccgatgtggttgctattgttgagaggttggctactgtgaaacacaaattgttagttttgtctggaaagggagggttggaaaaagcacat

SEQ ID NO: 59158 - DNA, 284 bp, Zea mays
tagagccgcagccccggtcgctccaccgaccccaaatctcaaatcagcgggagggaactcgcacgcgaaggctgaactcatggctcgcgtctacgttgggaacctggatccgcgtgtcacggcgcgggagatcgaggacgagttccggatgtttggggttctgcagagtgtatgggttgctaggaaaccaccagggtttgccttcattgactttgatgaccgcaggatgcacaagatgccattcgtgaattggatggtaagaatggttgagggttgagctgtca

SEQ ID NO: 59159 - DNA, 284 bp, Zea mays
ttgacatttcgccagcagctgaagcccttattggtgttaagatggagttggttgatgctgcgtttcctcttctgaagggagttgttgctacaactgatgttgtggaagcctgcactggggtcaatgtggccgtcatggttggtggattccccaggaaggagggaatggaaaggaaagatgttatgtcgaaaaatgtttcaatctacaaatcccaagcatctgcccttgaagcccatgcagctcccaactgcaaggttctggtggttgcaacccagcaaacacca

SEQ ID NO: 59160 - DNA, 281 bp, Zea mays
catggagatagatgaatgcgaggagacaaccatgcatgatgtgaacaacatcgaggaagagatgcgcaggaagcaggctcatgctgctcaggaggcgtacgaggaggacgacgagatgcctggcggacccaaagagtgcagtgcgctcaacagtaagcagactgccaaaatgggattcaaggcactttggttgctcttcaattatgcgagtgcgcctgtggactgtatggttctatggttttgctgtcgctgagctacaaagtaggaactgatgcgcccct

SEQ ID NO: 59161 - DNA, 115 bp, Zea mays
ctgacggctgccgtgatcctcaacgagatccccagcagcgtgagggaggtgttcctcaccggcgccacgttcaagctcggcagggccatcgcgctgtacctctgcaggaagagga

SEQ ID NO: 59162 - DNA, 275 bp, Zea mays
aattcagatcgtgcttggtttcagtggcctttggcgcaatgtcgttggattgctgagcccattgtctgctgtacctttggtttcgctagctggatttgggctatatgagctaggttttccaggggttgctaagtgtgtggaaattgggcttccggaaatcatcctaatgctcatattttctcagtacttacctcatgctgtccatgcggcaaagcctgtgttcgaccggttttctgtgattttcacaattgcgattgtatgctgtatgcgtacat

SEQ ID NO: 59163 - DNA, 280 bp, Zea mays
ggccacttcaccaagcgccccgaggagattggagctggtgaccagggacacatgttcgggtatgcgaccgatgagacccctgagttgatgcccctcagccatgtccttgccaccaagctaggtgctcgtctcaccgaggtccgcaagaacggaacctgcccctggctcaggcctgatgggaagacccaggtgacagtcgagtaccgcaatgagggtggtgccatggtccccatccgtgtccacaccgtcctcatctccacccgcacgacgagacagtgac

SEQ ID NO: 59164 - DNA, 285 bp, Zea mays
gataaaatggacaagaaaccttctaaaatactttgggatgttccttgggaagaagtactttcattggagctagcaaaagctgggtatcagaggccttcacatgtaatcatacatctgaagaattttaggaggtcagagaactttgtaaggcttattaagtgcaacattgacaacgaacgggaacctcaggctctttcactttgctgttcaattcggaaaatgtggagatctcaccaagcagcaatgaaagttataccattgaaggtccatcaggccagcgtcatg

SEQ ID NO: 59165 - DNA, 280 bp, Zea mays
ctcaaatccccagttcagtaactggctaactgtaggagaaggagagagagatggagaacggcggcgctaaaggcgacgtccccgacgatgcgaacgagcattgccctggaacacagtctgaggaggcaggcaaggcagatgcctgcgctgggtgccccaaccagcagatttgcgccaccgcccccaaggggcctgatcccgatgtggttgctattgttgagaggttgggctactgtgaacacaaattgttagttttgtctggaaagggaggtgttggaaa

SEQ ID NO: 59166 - DNA, 273 bp, Zea mays
ccgcgtcgagatcattgccaacgaccagggtaaccgcaccacgccctcgtacgtcgccttcaccgactccgagcgcctcatcggagatgcggccaagaaccaggtcgccatgaaccccatcaacaccgtctttgatgccaagcgtctcatcggcaggaggttcagtgatgcgtctgtccagagtgatatcaagctgtggcccttcaaggtcatttctgggcctggtgagaagccaatgattgttgtccagcacaagggtgagagaagcagttt

SEQ ID NO: 59167 - DNA, 279 bp, Zea mays
gtctggttacagtcttgccgccagagctttgtcaacatgcttgctgagaagcaatttagggagactgaggagatgaaggccaaggcacagataacttatgcccaaccagacgatcttattgatttctatcacctaaagagcaggaagggaatgagtcagcttgagctggaagatgcagttcaagatgatttgaaggctgcaaccggccaatttactaaggatgcagatgatactgacaagctaaaccgtattcttcagttgacaggatcagtgatcctg

SEQ ID NO: 59168 - DNA, 269 bp, Zea mays
atcaaggttgagttgaccaaggattttgagatgggtgtctccaacaagacccctgagtttcttaagatgaacccccttgggaaggttcctgttctggagactcctgatggccctgtttttgagagtaatgctatcgcacgctatgttgctcgcatgaaggatgacaaccctctttttgggtcttcccgtattgaacaagcccacgttgagcaatggatggattttgccgcaacagaagttgatcctggtgttgcatgtacttgtatcca

SEQ ID NO: 59169 - DNA, 274 bp, Zea mays
tctcccgccgccgccaatcccctcccgttctccgccaccgccaatcccctcccgtcctccgccacctctgctgagagcgagaagagatggccggcaagggtgatgggccggcaatcggcatcgatctcggcacgacctactcttgcgtcggtgtgtggcagcacgaccgtgtcgagatcatcgccaacgaccagggtaaccgcaccacaccctcgtacgtcgccttcaccgactccgagcgcctcatcggagatgcgccaagaaccaggtcgcc

SEQ ID NO: 59170 - DNA, 271 bp, Zea mays
agtagttgttgcagtaccttgatacagcagaatttgcaatgcgtgaagagttgtctctgaaggcagctattcttgcagaaaaatttgctccgcaactattgtggtatgttgatgttattcttcaacttatagacaaagctggagattttgtaagtgctgatatatggtatcgagtggtacaatttgttacgaacaacgaagacctacagtcatacgctgcaactaaagcgagagaatatcttgacaagcctgctttactgagacgatggtc

SEQ ID NO: 59171 - DNA, 272 bp, Zea mays
cccgaagaagccccaagcaagcgacactcttgtcctctccgcgccagatcgttgtttatgagctcgaaggagaagcccactcttggaggcacgcggattaagacccgcaagcggaacattgcagctcctttggaccctgcatcattctctgatgcaattgtccagatttatctggataatggtggagatctggaactcgtcgccaaaagtattgagtcttccgacctcaacttctcacgttacggtgacacctttttgaggtggtttttgtt

SEQ ID NO: 59172 - DNA, 271 bp, Zea mays
gttcttctcagtgaatacaagtgggcagtttgttggtgttgctgaaatgactggcgccgttgattttgagaaaaccctagagtattggcaacaggacaagtggaacggctccttctctgttaagtggcacattgtcaaggacgtgcccaacaatattctcaagcacatcatcctggagaacaatgagaacaagcctgtcacaaacagccgtgacactcaggagatacgcctcgaacaaggtcttcagatgctcagatattcaaggatcatg

SEQ ID NO: 59173 - DNA, 292 bp, Zea mays
agcgcgtataaattgggggaaggaaaattccagcggacgagcgctctagccgtttttcctcgtcctcgatccagcccctgccgcttccagctccgatcgatctgatccctccccaccaccacgcccatggcggaccaactcaccgacgaccagatcgccgagtccaaggaggccttcagcctcttcgacaaggacggggatggttgcatcacgaccaaggagctgggaactgtcatgcgttcactggggcaaaaccctacagaggctgagctccaggacagatcaatgaggt

SEQ ID NO: 59174 - DNA, 296 bp, Zea mays
gcaaatatgatcatggtattttgcagcaaaagcagatgagagtaagttaaaatctcaaattgcttccctagagtctagggtgagtatcagtgagggtagattatcggcaacacgtgaacaggctgattctgctcaagaggaagcatccgaatggaaacgcaaatatgaagttgctgttagtgaggccaaaacagctctgcagagagcggcggtagcacaggaacgcacaaataagaaagtgcaagagagggaagatgctttgagggtagagcttgctaaccaatatctgagaagga

SEQ ID NO: 59175 - DNA, 289 bp, Zea mays
ggtgtaacgaccgtaaagccagggtggctttgaagtatgctagttccctctgcaccttctctgcaccgttggaagatccgaagccgtactatgacccactgaacgaccaagtctactgctacgttagcccggtcttctctcgtcataactggcagcttccgttgcacagtttacctatcaaagacggtgcgagccggctgcaggtgtttgcatgcgcgttgcttaaaggggacgtcctgccatgtctacgggacgccaaggatttcctcgcgctgtaccatccgctgtg

SEQ ID NO: 59176 - DNA, 284 bp, Zea mays
tcggatactatatcaatggtagatgatcttattccattggttgcaaagcattctggatgcttgacccagggatcaagaaggaggagggttactttgtttatgatagtggctcaaaaagcgatgtttggattcaaaaggcagatggcagtctcatcctctgggaggtgtggcctggtgattgtgttttccctgactatacatctgaaaaaacacgagcttggtgggctagtttggtaaaggacttcatctctattggtgttgatggaatatggaatgtatgaatg

SEQ ID NO: 59177 - DNA, 288 bp, Zea mays
ttttctcatgcgaacaggtgctccttaggatgcttccagcctactacaaacacgtccgctttttcgtaaacactctgatcactaaattcttcggcctgcactgcgtcaacgtcaagcttacaggagctatccagaaaaaggtccggtttgttataatggggaaccttttctgctccagctacgcgatccacaggcgcttcgacctgaaagggtcctcgcatggtcgcatgactgacaaacccatcgatcagatcagcgagcacacaacgttgaaggactcgatcttaa

SEQ ID NO: 59178 - DNA, 286 bp, Zea mays
cgcctaagctgcgacgaccatccatcgaacaggaaggatgacgggctccatggatctcccggccaagggcgggttcagcttcgacctgtgccgccggaacaacatgctggagaagaacgggctcaaggtcccgggattcaggaagaccgggacaaccatcgtcggcctcgtctttcaggatggggttgttcttggggcagacacaagggcaactgagggccccatagttgctgataagaactgtgagaaaatccactttatggcaccgaatatatctgctgtggag

SEQ ID NO: 59179 - DNA, 277 bp, Zea mays
aggagagtttgtaccccttgctgaattcctcaaggctcataactacaagggcacgacgatgttgttgaatgacagaatccaaagccttcgtggtctccaatcatccctgagaaaggcagaggagtatctactgagtgttcctcaagacactctctactcggagttcaaccataggttccaagagcttggcttggagaagggttggggtgacatgcgaacgtgtactcgacacactccattgcttctcgaccttctggaggccctgatccgccaattg

SEQ ID NO: 59180 - DNA, 285 bp, Zea mays
catcaaaacctgcatgaatgaccaacaggagaaattgtggcccatgttgcaaaagcttaatgttaccatgaaggctgatgagaaggagttgattggcaaagctttgatgaagcgtgttatgcaaacgtggcttccagccagcactgcacttcttgagatgttcatattccaccttccttccccggcaaatgctcaaaagtatcgtgtggagaacttgtatgagggaccccttgatgatgtttatgcaactgctatcagaaactgtgatccggaggtcctcttatg

SEQ ID NO: 59181 - DNA, 284 bp, Zea mays
gggacaaacattgcctggagtatgcctcctgttaggagaaacgactctgctggatttctgcccccctcaagaaacatcactggtagccctggaattcaagggcagcgagcaagacagaagtttgatgaatcaaagacctgctctttcttagaagagttgaagtccaacagagcgcgcatggttgagctttctgacatcacaggccgtgtagttgaatacagtgctgaccaacatggtagccgattcatccagcagaagttggaaaactgcacgccgaagagaag

SEQ ID NO: 59182 - DNA, 283 bp, Zea mays
taagaagtcagctgcaccggcactccgtgcgaggaaaagaagatgagcattggtctcatatatgtgaacgagcactactctggatggaaagagcagtgcttgagggtgctgcagtccaagttcgacagccaaagccgctccttctcacccgatcaggaaatagcagaagctactgaaggagtgccccatcgggcaggaaatgaacctgaagcaggttcagaagctgtgcatgcccttcatcaagctgaagaaggacgaggcaaaggaggttggcctcaggcgc

SEQ ID NO: 59183 - DNA, 281 bp, Zea mays
gtggacatcatgtttggaaataaaagcatgcctttttccagcctgcagagaaagaaatgattactctccttcacttccatttgcacaaccatatcatggttggaaacaagaagacaaaggatgttcagttctatgttgaagttatggatgttgtacatccgcttgggggcagtagaagatcggcacttgatcctgatgagattgaagaagagcagcgtgagagggataggaagaacagaataaacatggatttaccagaactttgtgaacaagttaacgac

SEQ ID NO: 59184 - DNA, 277 bp, Zea mays
gtgaaaagtttgttttcttactttcaactagggcaggtggccttggtatcaacttggccactgctgatgttgtggttctttatgacagcgattggaatccacaagctgatctgcaagctcaggaccgtgcacataggataggtcaaatgtcagaagttcaagtgttccgcttttgcactgagtacactatcgaggaaaaggtgattgagagagcatataagaagctagcattggatgctttagttattcagcaaggacgattggcagagcaacaact

SEQ ID NO: 59185 - DNA, 283 bp, Zea mays
cccgtacgtgcgctgcgtgggggactcgtggcccatgacgcgagagcgcgcctacttcgaggcctccacgctgcgggagcacggccgcctgtgcccggagcacacccccgaagtgtaccacttcgaccggaccttgtcgctgatggggatgcgctacatcgagcccccgcacatcatcctccggaagggcctcgtcgccggtgtcgagtacccgctgctcgccgaccacatgtccgattacatggccaagacgctcttcttcacctccctctctataacaata

SEQ ID NO: 59186 - DNA, 112 bp, Zea mays
gtctggagactgctggaggagtatgacagtgctgatcccgaggaacaccaccatccccaccaagaaggagcaggtattctccacctactcggacaaccatcccggtgtcctg

SEQ ID NO: 59187 - DNA, 278 bp, Zea mays
gggacaaacattgcctggagtattgcctcctgttaggagaaacgactctgctggatttctgcccccctcaagaaacatcactggtagccctggaattcaagggcagcgagcaagacagaagtttgatgaatcaaagacctgctctttcttagattcgttgaagtccaacagagcgcgcatggttgagctttctgacatcacaggccgtgtagttgaatacagtgctgaccaacatggtagccgattcatccagcagaagttggaaaactcacgccgaa

SEQ ID NO: 59188 - DNA, 277 bp, Zea mays
gctcgttcgatctgtgcagagatctgaggtcccgggcgaccgtgaagcagcttcaatcgtcggcatggcgctcgtattgcatagtggggctggaaacaagaatgccttcaaagcacttattgctgcagaatacagtgggatcaaggttgagttgaccaaggattttgagatgggtgtctccaacaagacccctgagtttcttaagatgaacccccttgggaaggttcctgttctggagactcctgatggccctgtttttgagagtaagctatcgcac

SEQ ID NO: 59189 - DNA, 279 bp, Zea mays
aagatcctcctcacaaaggagaaaaggaggtcccagagggtgcccctgactgtttatctggtctgacatttgtcataagtggtaccctcgacagtcttgaacgtgaggaagcaactgatctaattaagcgttatggtggccgtgtgactggctctatttgtaaaaagacgagctacttattggccgacgaagacattggtggagtcaaatctaacaaagcaaaagatctgggtgttccattcttgactgaagatggtttatttgatttatccgaaaatc

SEQ ID NO: 59190 - DNA, 274 bp, Zea mays
atctggctgtgaagcactctctgtggagggtcagctggagttcaaggctgttctctttgttcctaagagggccccatttgatctcttcgacacaaggaagaagcaaaacaacatcaagctctatgtgcgcagggtgtttatcatggacaactgtgaggaactgatccctgagtggctgagttttgttaagggtattgttgactctgaggaccttcacctcaatatctcccgtgagactcttcagcagaacaagatcctgaaggtgatcggaaga

SEQ ID NO: 59191 - DNA, 270 bp, Zea mays
tgatgacgaaaccgaggaaccgaggacccgcatcagccccctccagcaggaccctccgccgctgcagcagattctgatgacgacgatgaagaggaagaagtggaagtgactctcggtgtccttagcaaaccgaaacacccaggcctccttctccgccacttgttccccagcaaggccggcggcatcccggcgtggctagaccccgtgaacttgccgtcggagaagtccagctgctgcggtttttgtggcgagctttgcagttcgtcttca

SEQ ID NO: 59192 - DNA, 304 bp, Zea mays
aaataatcttgtgtttgtttctggagttcttggcttgaatcccgagaccaggaagtttatctctgaaaatgttgaggagcaaactgagcaggttatgaaaaacatgggcgagatattgaaagctagtggtgctagctattcttcagttgtgaagacaacgatcatgttggctgatctgcaggatttcaataaagtaaacgagatctatggcaaatatttcccggcgccacacctgcacgatcaacctaccaagtggcggcgctgccactgaatgcccggattgagattgagtgcatcgctgctc

SEQ ID NO: 59193 - DNA, 303 bp, Zea mays
acaacatctacctcaacttcgacgccttccacggcgacaaggcccacggcggcgtccatgacggtaccgagatcgtgctctggaagtggtgcgagggcgacaaccagcgctggaagatcctcccttggtgaacgaacgaaagaaactactagctggtaccctaataataattctgctggctgcggcgatcccaaaataaaagaggccgggtgcgatgcatctcggacttctcgagtggtgtttgcgtcagacagccagccactgtggggctagtgttccaacatttgtcagcctgcttgcgcg

SEQ ID NO: 59194 - DNA, 304 bp, Zea mays
caataatccgtgctattccaagcaatgcatcagacaatgtctattgcaccctgctcgcacatagtgccattcatggtgcaatggcgggatacagctttacagtcggaatggttaatggcaggcatgcatatataccatttcatagggtaacatctacaaggaacaaggtgaggataactgacaggatgtgggcgatgctgctgtcttcaaccaaccaaccgagtttcctgagccagaaggacatcgacgcggccagagaagctcgacaaggcggccaaccgcatgaagagcagagaggacgcga

SEQ ID NO: 59195 - DNA, 305 bp, Zea mays
attggcttcaggaggctgtacgtgctcctgcttcatctaagccacctgaacgtgggctaccagcaactgtctcagcaattgctcagtccatgtgccttcttcttggagaacaagaaccatcaatacctccattcttgatcctgggaacccctctttctcccccaaaagatccaaggattaattcaaagaagaggaaactccgcaaagctcatcaatctacctctcatgtaggtgattgcatcgctacccaagcacccccatccgttaaagcttcagctgctcctcttgctgtcgattgcaatgat

SEQ ID NO: 59196 - DNA, 302 bp, Zea mays
ctagtcgcctgctccattctcagccgccgccaatcccttcccgtgctccgcaaccgctgagtgagaagaagagatggccggcaagggcgatggcccggcgatcggcatcgatctcggcacgacgtactcttgcgtcggcgtgtggcagcacgaccgcgtcgagatcattgccaacgagcagggtaaccgcaccacgccctcgtacgtcgccttcaccgactccgagcgcctcatcggagatgcggccaagaaccaggtcgccatgaaccccatcaacaccgtctttgatgccaagcgtctca

SEQ ID NO: 59197 - DNA, 302 bp, Zea mays
  unsure (1)..(302): unsure at all n locations
ccccgacccatcagtagagggcggcggctgcctcctcttcctaaccgcgtacgagatgagnccccttcctcgccaccctgggangcgacgagcatcaccaggatcccaggttgcctatattttcttccccttcttgaaaatggatcatagttctgacgaagatacagtgatcagtgattctgagattgatgattatgaaggaaaaatttatgcaagactgatgtcaggagatttaaaattaaataagaatggagaaaattacatttgtcccttctgtagcagcaagaagaagaattacagtg

SEQ ID NO: 59198 - DNA, 293 bp, Zea mays
caccagccgagttcgcagcggcactccagggtccaggcccagcagcctcttcggctcttcgttgggggtgcgtggacaccggaaattgcctcggggattgcgttcctgatctaagcccggcatgaagggctgctcagagcgtttgctgctcctgctgctgctggcatcgtcgttgttactgtccgtcgtggttgccgcgcacagacttgccctgccgacctcgacagcaaatgcgacggtggcgcgcctgatgactgggagggggaattctccccggcgtcccgaaaatcaag

SEQ ID NO: 59199 - DNA, 295 bp, Zea mays
ggtgccaagcgggcaagcgggcagacggcgggtgcaccacagcgcagacctaagccatcacctgcagccagctctggcggaccagcttatgacgaacaaataactgagctgaagctccttgtggatagcctggagaaggagagagatttctacttctccaagctgcgggacattgagatcttgtgccaaaaccctgaggttgagcacgtgccggtccatgctatccagaacatactctacacatcagaggaggaccctcagcagcaggctccagccctgagccccatcatggagg

SEQ ID NO: 59200 - DNA, 306 bp, Zea mays
  unsure (1)..(306): unsure at all n locations
aggccggactcgctcaaaaccctactgctcccgctccgctcctgcttggccgagatcacttcgccgccgccgctttcgagatctccgggtggagcaagcgaggcaaggcagcagccatgtcgctccgcgtgctgaaccctaacgccgaggtgctcaacaagtcgngcatgctgcacatgaacatcaacgccgcaaagggcctccaggacgtgctcaagaccaacctcggccccaagggcaccatcaagatgcttgttggtggagctggtgacctgaagctgacgaaggatgggaacaccctcttga

SEQ ID NO: 59201 - DNA, 288 bp, Zea mays
  unsure (1)..(288): unsure at all n locations
aaggaattgttganagtggtttgattgatgccctttgctctcctgatgaattgataaagacatcacgtctttgggctctggaaattgctaattgccgtaaaccttggatgagatctcttgtcanaacagataggcttggatcactatctgaagcttgtgctgtattaaatgcagcaagacagcaagcaatgaaggttgcaccaaacatgccacaggaccaggcctgccttgatgtaatggaagaaggcatattatatggaggtcaagctagtgttttgaaggaagcca

SEQ ID NO: 59202 - DNA, 292 bp, Zea mays
agtacatttgaagttgatgttttgtatgtcgacccaaacggcttacaaattccacaaaaaataagcacatacacaattggccctttccaaacctccaaaggagagaaggccaaactgaaagtgaaagtgcgtctcaactgtaacggtcccatggatgttgattcagcaataatgctggaggatgatgtggaagttccagtttcatctgcaaatgaagctccaaatgatactatgaagatggacacagatgatgcaccaagtgatcctgctgttgcatctgatgtgaatatgc

SEQ ID NO: 59203 - DNA, 288 bp, Zea mays
ctggacagtttatagaacgtctgctccagctgctttttgggacggacaaggcctggcatggagacacttctaaacagaaagaaagctcaggtcgtcccgagaaaaaagttcggaagaggcacaagtatttgatgctgcttgcagttttagctgcctccatcacgtatcaagctggtctcaacccacccggtggtttctggtccgacgacaatgaaggccatgtggaaggcaatcctggcctgaaaccacctggtgccttgtggtctgataacaaaggtcatttggcag

SEQ ID NO: 59204 - DNA, 290 bp, Zea mays
ggatatcactggcaacccgagggctctccggaggctgaggacctcttgtgagagggccaagagaactctgtcttccactgcccagatcaccattgagattgactcgctgtacgagggcattgacttctactccaccatcacccgtgccaggtttgaggagctcaacatggacctgttcaggaagtgcatggagcctgttgagaaatgcctgagggatgccaagatggacaagagcagcgtccatgatgttgtccttgttggtggctccactaggatccccagggtgcagc

SEQ ID NO: 59205 - DNA, 289 bp, Zea mays
ggatcttaaaaggatatgtgagactgatcttggattggtctcccaatgctgtctgactaaacatgttttcaaggcgaacaagcatcagtatcttgcaaatgttgccctgaaaataaatgttaaggttgggggaaggaatactgtacttgttgatgctttggcaaggagaatcccccttgtcagtgacgtagctactattatctttggtgctgatgtgacccatccccatcctggggaagattctagtccttccattgcagctgtggttgcttctcaagactggcctgag

SEQ ID NO: 59206 - DNA, 294 bp, Zea mays
ggccggcaagggtgatgggccggcaatcggcatcgatctcggcacgacctactcttgcgtcggtgtgtggcagcacgaccgtgtcgagatcatcgccaacgaccagggtaaccgcaccacaccctcgtacgtcgcctttcccgactccgagcgcctcatcggagatgcggccaagaaccaggtcgccatgaaccccatcaacaccgtctttgatgccaagcgtctcattggcaggaggtttagtgatgcctctgtccagagtgatattaagctgtggcacttcaaggtcattcc

SEQ ID NO: 59207 - DNA, 255 bp, Zea mays
ctcgaggcgctcgagccgatatgattctctcataaacatgcagatagagggtggtgccgaacgcgtaatagttcgaggaacaacaggagagggtcacctcatgagctgggacgaacatatcatgctcattgggcacacagtgaactggtttgggctctagactccaagttataggcaacacaggaagcaactcaaccagagaagccgtccacgcaacagaacagggatttgctgttggcatgcatgcgggtctcc

SEQ ID NO: 59208 - DNA, 287 bp, Zea mays
cgatcaagaatgctgttgtcacggtccctgcctacttcaatcactcacagaggcaggccacgaaggatgctggggtgattgctggcctcaatgtgctgcgtatcatcaatgagccaaccgctgctgctattgcctatggtcttgacaagaaggcaaccagcgccggtgagaagaatgtcctcatctttgaccttggaggtggtaccttcgatgtctccctccttactattgaggaaggtatctttgaggtcaaggccacagctggcgacacccatcttgggggtgag

SEQ ID NO: 59209 - DNA, 293 bp, Zea mays
ggaaactttgcaggagttagttatgcttcctttgcaaaggcctgagttgttctccaaaggacaacttatgaagccatgtaaagggatattgctttttggtccacctggcaccggtaagaccatgcttgccaaagctgttgcaacagaggctggtgctaattttatcaacatatcaatgtcaagcattgcttcaaagtggtttggagagggagaaaaatatgtgaaagctgttttttcacttgcaagcaaaatttctcctagtgttattttcgtggatgaggttgatggcatgc

SEQ ID NO: 59210 - DNA, 301 bp, Zea mays
atctgaagctccctttgatcacccagtacgagccaatataggttacacttcaaacagaccaggtcagagatattccttgtggaacaaaaggtggtgttatgatcagctttgacaagatagaggtcgtgaaccgccttcgcaaagagtttgtgcatgaaaccctactcaactatggtgtgcactatgacaagacatggatatatgataaaatccatcatgagattaatcagttctgcagtgctcacagtttgcagcaagtttacattgacatgttcgatcagattgatgaaacaatgaaaga

SEQ ID NO: 59211 - DNA, 288 bp, Zea mays
cggctcgagcagttgcagaattggtcgagactgtggagtatttcttggctgaggcaatccagtcataccaagccgaaagcgataccgagctcaacctttcaactggtgactacatagtggtccgaaaggtgtcgaacaatggatgggccgaaggtgaatgcagggggaaagctggttggttcccctacgactacatcgagaaacgggagcgtgtgcttgcaagtaaagtcgcccaagttttctaagtcttccgctgagccatgtagtatccccggggttgtacaatgt

SEQ ID NO: 59212 - DNA, 293 bp, Zea mays
atccagcccatttcgaactctctctagacgcttcctcggtctctctgttcaccgccgccccgtaccatactcctcttcgcgccgtagaaatggcgctgccgaatcagcagggcgtggattaccccagcttcaagctcgtcatcgttggcgacggtggaactggtaaaaccacatttgtgaaaaggcatcttactggcgagtttgagaagaaatatgagcccaccattggtgttgaagttcaccctctggattttagcactaactgtggcaaaattcgcttttattgctgggac

SEQ ID NO: 59213 - DNA, 296 bp, Zea mays
gagcttgacaaatgactgggaggagcatctggctgtgaagcacttctctgtggagggtcaactggagttcaaggctgttctctttgttcctaagagggccccctttgatctctttgacaccaagaagaagcaaaacaacatcaagctctatgtgcgcagggtgttcatcatggacaactgcgaagagctgatccctgagtggctgagcttcgttaagggtattgttgactctgaggaccttcccctcaatatctctcgtgagactcttcagcagaacaagatcctgaaggtgatca

SEQ ID NO: 59214 - DNA, 166 bp, Zea mays
gaatatcacagaatggtcctgcttgtacatcctgataaaaatatgggaaatcaattggcttgtgaatcattcaagaagcttcaaacagcttatgaggtcctctctgatttcacaaagaaaaacagctatgatgagcaactgaggaaagaagaatcacagaaaatgg

SEQ ID NO: 59215 - DNA, 280 bp, Zea mays
atagtactcgtgattatgtccttcgacttggtgctgatcagtcttctgaaaatttaacattgctagaaactggtgagcctatctattccccgacactgcaggaacgccccatcatgacagcagagcttataaaagaaacagaggagctagtgttacggacaggaagtcttggtgctggatgctctcaacttctatcagatatgcaggctttcaaggcagcaaatcctggttgtgtcctggaagactttgttagatggcactctccacccgattggtctga

SEQ ID NO: 59216 - DNA, 289 bp, Zea mays
gtcgacacattcctcttcacctcggagtctgtgaacgagggacaccctgacaagctctgtgaccaggtctcagatgccgttcttgacgcttgccttgctgaggaccctgacagcaaggttgcttgtgagacctgcaccaagaccaacatggtcatggtctttggtgagatcaccaccaaggccaatgttgactacgagaagattgtcagggagacctgccgcaacattggttttgtgtcaaacgatgttgggcttgacgacgaccactgcaaggtgctcgtgaacattg

SEQ ID NO: 59217 - DNA, 214 bp, Zea mays
gaaaaaatgtttttcatatttctcccttttcccagatgattataaatttgataagtctgagattattcgtttatgggattcaataggaatcataggttctagtatacagcaaaagaaaatagaggacataggatcggattattttgatgaactattagatagtggttttcttataaaagggagcaatgatttttatgtgatgcatgatttaatc

SEQ ID NO: 59218 - DNA, 295 bp, Zea mays
tgattttagccgccgccgctgctcatctcacatccctcgagaagacgcctgctcctcgccgatcgatacgatggccgtcttctccgacctccacaccgccgacggcctcaagtccctcgaggctcacctcgccggcaaaacctatgtgtctggtgactccattactaaggatgacattaaggtcttcgccgcggtgccgtcgaagcctggcgctgagtttcctaatgccgcccgctggtacgagaccgtctctgcggctgtagcctcaagattccctggtaaggctgttggtgta

SEQ ID NO: 59219 - DNA, 299 bp, Zea mays
tgaagcaaccggcagaacttccttcctacttgagaagagcttgcattgcacatgctggcagattaactcctttgtatgaatatatccctaggatgagaaatactatgatagatttggcacccgcaaaaacaaatccattgcctgacaagaagtatagcaccctggtatctctcagtgggcacctatttgataagttccttataaatgaagctttggacatcattgagacagctggaggttcatttcacttggttagatgtgaagttggacaaagcacggatgatatgtcatactcagag

SEQ ID NO: 59220 - DNA, 289 bp, Zea mays
aaccgtcccaatgatctttccgcagatcaagtggtaccttgtcctctcggcatacgttgttgctcccctcctcgctttctgcaactcatatggcactggactaacggactggaatcttgcgtctacatatggacagatcggcctcttcatttttgcatcatgggttggtcagaatggcggtgtgattgctggcttagcagcctgcggtgttatgatgtccatcgtgtccactgcagccgatctcatgcaggacttcaagaccggttacctcacactctcttcccctagg

SEQ ID NO: 59221 - DNA, 295 bp, Zea mays
gaaatatggagatcacgatgacacagtgacagttattgatcctaaaagatcttacagtgtgaaggctcctactagacatcccatatatgagaacttccgtgtcgaggccttcaaaacgttattagaggcaggtaatacagacgagcagctgtcagcccttggagaacttatgtaccagtgccacaacagctacagcgcatgtggcctcggttctgatgggactgacagactagtcaacctggtacgagaagtgcaacacaggaggacatccgaaggcggaaccctagtctgtttg

SEQ ID NO: 59222 - DNA, 297 bp, Zea mays
cagaagttcattcactttctagtatccaaaccaataaggaacaagaaattgaagaaatgtcatttagatctgcccatgctggatctgatataagccaacttcaatctctggtccgtgagctgagggaaaatacacaggagcttaagctatttgtggagttgtataagcatgagtccactgattccagacagctgatggaatcgagagatagggaactcgctgaatgggctcgagttcacattctcaaatattctcttagtgaaagtaaattagagcaacgtgtaatttcagccaatg

SEQ ID NO: 59223 - DNA, 87 bp, Zea mays
tcttgatcggtaacagcggagttaggaaaagttgcctccttctgcgtatctccgatggttctttcaccactagtgtccacacagcat

SEQ ID NO: 59224 - DNA, 292 bp, Zea mays
ttttacccagtatcttatggacgttgttggccccgagttatcagagccagcaaataggattagctccttccaattggctggcttgcttgagactgcaatccgagcatccaatgcacaatatgatgactgtgatatcttggaccggataaaggtaaagatgatggatcatggggatggtgatcgtggctgggatgtcttctctttggagtatgatgctagggtccccctggacactgtgttcacagcttcagttatgaagatgtatctcaaggttttcaacttcttgtggaag

SEQ ID NO: 59225 - DNA, 295 bp, Zea mays
atctgctgaatgtgttcgacctattattggagcacatggatcatcagaagctattagcgcgattttcaccaaagatgagaggtacgtcctatcttgtgggaaagattctcgtgtcaagttatgggaagttggcactggacgacttgtgaagcaatatgcaggagcaattcgcagacaatttcgttgtcaggctgtcttcaatgaaaccgaggaatttgtgctatcagttgatgaacaaaacaatgaggttgtcgtctgggatgcacttactgctgaaaaggttacaagattgcct

SEQ ID NO: 59226 - DNA, 291 bp, Zea mays
gtcactgatgaaatgctgctggagcttttctccagcaagtaccgctcggtgaaaggagctaaagttattattgatgcaaacacaggccgttccaggggctatggatttgtcacgtttggagacgacaacgacaaatctcatgccatgtctgaaatgaatggtgtatattgctctacgaggccaattcgtataggacctgcgactcccagaagatcttcaggtgattctggctcctcgactcctggtcattcagatggtgattcttctaacagaacggtatatgttggtggg

SEQ ID NO: 59227 - DNA, 284 bp, Zea mays
agcttgcaaggctcacaaaggagcagaagaatgcttattttgacgagtatgactacagggtcaagcttctccagaagaaacaatggaaggatgagatccgcaggttgaaggagatgaagaagagggggaaaactgatctggatgattatgggtatgctaatatcgctggtgagaacgatcaggatcctcctccagagaatgtatcggttcccttgcctgacatggtgcttcccccttcatttgattgtgacaatcccacataccggtaccgctttttggagtca

SEQ ID NO: 59228 - DNA, 288 bp, Zea mays
atcagctgcttgcggagtttgatgccctgtttgctagtgacaaggataagtatgcaccctttgaagacattcttcgtgctgctcaggaagcaattgtgctccccccatgggttgcacttgctatcaggccaaggcctggtgtctgggattacattcgggtgaatgtaagtgagctggctgtggaggagctgagtgtttctgagtacttggcattcaaggaacagctggtggatggacaatccaacagcaactttgtgcttgagcttgattttgagcccttcaatgcct

SEQ ID NO: 59229 - DNA, 291 bp, Zea mays
ggatcagactgcatgttcgctttgaaggttatggacattgagtacctcataagcagaaagaaaatgctcagagcacaaactgagagggagatactgcaaatgctcgaccacccgttccttccaactctgtattctcatttcacgacggacaacctttcttgtctggtaatggagttttgccctggtggtgacctgcatgttcttaggcagaaacaacctaccaaaaccttttcggaagcagctgcaaggttttatgtcgctgaagtcctcttagccttggagtatctccat

SEQ ID NO: 59230 - DNA, 294 bp, Zea mays
aaccattggtatttctgttgatcaccgccgcaagaacaaatcccttgagggactgcagcgcaatgtacagaggcttaagacatacaaggccaagctggttatcttcccaaggcgtgcacacaaggttaaggctggtgactctactccagaggagcttgccaccgctacccaggtccagggtgactacatgccatttactcgtggtgagaaacgttcagttgaggttgtgaaggtcacagatgagatgaagtcatttgctgcctatggcaagctccgccttgagcggatgaacaa

SEQ ID NO: 59231 - DNA, 230 bp, Zea mays
aagcgtgccactgaaagagagatactgcagagtgctgatgtcatttgttgcacctgtgtcggtgctggagatcctcgtctttcaaacttccgtttccgacaagttcttattgatgagtccacacaggcaacagagtctgaatgtcttattcctttcgtgcttggtgtcaagcaggttgtccttgtcggagatcattgccaattgggccgtgatcacgtgcaaaaaagcag

SEQ ID NO: 59232 - DNA, 289 bp, Zea mays
caccagccgagttcgcagcggcactccagggtccaggcccagcagcctcttcggctcttcgttgggggtgcgtggacaccggaaattgcctcggggattgcgttcctgatctaagcccggcatgaagggctgctcagagcgtttgctgctcctctgctgctggcatcgtcgttgttactgtccgtcgtggttgccgcgcagagacttgccctgccgacctcgacagcaaatgcgacggtggcgcgcctgatgactgggagggggagttgtccccggcgtcccgaaaatc

SEQ ID NO: 59233 - DNA, 103 bp, Zea mays
ggaagaacaagaaggatatcactggcaacccgagggctctccggaggctgaggacctcttgtgagagggccaagagaactctggcttccactgcccagaccac

SEQ ID NO: 59234 - DNA, 287 bp, Zea mays
ggagctgactgactggtggaagaaggccctggagagcgagaacgtggactcggtgaagatcagcaaccggctgcatgacaccccctgcgtcgtggtcacctccaagtacgggtggagcgccaagatggagaagatcatgcaggcgcagaccctgcggactcgagcaagcaggcgtacatgcgcggcaagagggtgctcgagatcaaccccaggcaccccatcatcaaggagctccgcgacaatggcgcccaggactacgagagcgaggagctgaagcacacggcgag

SEQ ID NO: 59235 - DNA, 298 bp, Zea mays
cagcaaagaggatctggaattgggtgatgaagaagaagagactaaagaaaccaaacaggagttcactctcctatgtgattgggttaaacaacagcttggcgacaaggttgcgaaggtccaaatatcaaagcgtttaagttcatctccatgtgttctctatctggcaagttcggttggtccgccaatatggaaaggctcatgaaggctcaaacacttggtgacacatcaagtttggaattcatgaggggaagaaggatctttgaaatcaaccctgaccacccaattatcaaggatttga

SEQ ID NO: 59236 - DNA, 302 bp, Zea mays
gaaacagaagtctgtgccccacctacataactcttttgattattacagcctgcagcaaggtcaactgttcctggaggtcctagtgtggcctgcagcactgccaaagctgttgaatgggacgcatcctggtccaagaaccttgatccttctggccgtgctgcttgggtgttcacgatgctgcgtatgaagacactgcagggaaaactcctgcctctgctgatcctgtctcagacaagggccttcgtccagctattggcgaaagctagggacacccgttgcttcagccacagctgtctaacctt

SEQ ID NO: 59237 - DNA, 289 bp, Zea mays
gtcgtggactgtctgggaccgctggaccataaccggcaacatcacgctgagggggctcctggggtggctcaaggagaagggcttgaacgcctacagcatatcctgtgggacctcgctgctgtacaactccatgttccccaggcacaaggacggctggacaagaaggtggtggatgtggccagggaggtggccaaggtggaggtgccatcataccgccgccatctggacgttgtggtggcctgtgaggatgacgacgacaatgatgtcgacgtcccacttgtgtccattt

SEQ ID NO: 59238 - DNA, 127 bp, Zea mays
caaaggctgacatatggtcttgtggggtcatcctgtttgtgctattggctggttatcttccgttccatgataagaacttgatggacatgtataagaagattgagaaagctgacttcaaatgtccaag

SEQ ID NO: 59239 - DNA, 287 bp, Zea mays
cactgcagaacaattgggtgctaagattagggagtataagattgttgctccagacaccaagaactcattatcagatccatacccttttaatctcatgtttcaaacttccattggaccatcaggtttgagcccagggtatatgaggccaagacagctcagggtatatttgtgaacttcaaagacttgtattactacaatggcaataagctgccattcgcttcagcacgaattggtcaggccttcaggaatgagatatctccccgtcaaggccttttgagagtccgtga

SEQ ID NO: 59240 - DNA, 292 bp, Zea mays
  unsure (1)..(292): unsure at all n locations
caaaggagaaaatttcgtagcaataaataaataaataaaattaataaaagaaaggtggcgtagaggataggacgttactggacgttgcgtctcngaggttcttgcctcggtgggaagggatggcgtcggaagtggaggacgaggcggcgaccgtctggtcgccaacggtgcagccgacgtccgccggaggagggaccaggcgaaggcaattctgtccacgcaggccgtcaggatcgccaccaaggccgagcacgatgagcgcttcatctttaaggtcacacacttgctgggt

SEQ ID NO: 59241 - DNA, 144 bp, Zea mays
agcgcacacacacacaaccagatctcccccaaatccacccgtcggcacctctgcttcaagatgcagatctttgtgaagaccctgactggcaagactatcgccctcgaggtggagtcgtctgacaccattgacaacgttaaggcc

SEQ ID NO: 59242 - DNA, 281 bp, Zea mays
atttctcagtgatgtcgatgtcctgtactcctgtatatttggattcaacaatatgccattagtatgctgtcaagcgtcctatttgcaagagataaatggcttacgcccgaggggcttattcttccttatcatgtgcattggtgcacaacactggatgagtataggaacgctatagtgaaggatcctgccttggaaagaaggtttcaaccagttaatgttccagcgcctactatggatgaaactgtacagatcttaagaggacttcgtgagagatatgaact

SEQ ID NO: 59243 - DNA, 287 bp, Zea mays
aaagcacacaagcaaaagcaaccccgcgggccgcgctagcatgtagtagccgaacgaggaggagcctcgaatccagccaggccaggctcctcccattcctcctctcccacgagctctcaccgctcctcgcggcggcaaaaacccccttaattccctacgcgcccgcctccaatcccgccagtccggcggcgacccagggatccatggagaggtacgaactgctcaaggacatcggttccggcaacttcggggtggcgcggctgatgcggaacaaggacaccaaggag

SEQ ID NO: 59244 - DNA, 283 bp, Zea mays
gccatggaggccaccaaggcgatcaggcccatcctcggggactactaccacttcgacccgacccctgttgccaaggcgacctggcgcgaggccagggagtgcatctacgtcgagcccgaggaccgcaagggcgtcttctggtacacaagaagttctagccgccgccgctcgcagagctgagaggacgctaccataggaatgggagcaggaaccaggaggaggagacggtactcgccccaaagtctccgtcaacctatctaatcgttagtcgtcagtcttttag

SEQ ID NO: 59245 - DNA, 294 bp, Zea mays
cagtattgttcaggatgctcctgcagatattccttcccttctagaattgaagcgcgtctactacgaactgatgattcgttattactctcacaacaatgattacttggaaatctgccgttgttacaaggctatttatgatattccagcaataaagaggatccaaccaagtggataccgattcttaggaagatctgttggtacttggtgctagcacctcatgatcctatgcaatcaagccttctcaatgctacactagaggataaaacactttcagaaatcccaaatttcaggtta

SEQ ID NO: 59246 - DNA, 150 bp, Zea mays
aagcagcaggggaagaaggcaaaggaggggagaagatgtagttcacccacttaaagtttctctggaagatctttacaatggcacctcaaagaagctctctctttcgcgcaatgtcatctgctccaagtgcaagggcaagggtcgaagtct

SEQ ID NO: 59247 - DNA, 282 bp, Zea mays
gaaacctctcaaaccctagccgcctcctgcaagtttcagagctcaggaatctgcgccatggcgagtgagacggagaccttcgcatttcaggctgagatcaaccagctgctctcactcatcatcaacaccttctactccaacaagagatacttcctctacgagcttatctccaactcttccgatgcgctggacaagatcaggttcgagagtctcactgacaagagcaagctcgatgcgcacctgagcttttcatccaccttgtcccagacaaggccacgaaca

SEQ ID NO: 59248 - DNA, 212 bp, Zea mays
ctggttagggacaaaactactctgggcagatgttaggatctcatcaagattgctggtgaaacttgctggggggaagagcctttcaagaagagagaggcaacagctgacacgcacaacagcagatatcttcaggctggttccgtttgctggttcatcattgttccattcatggaattcttactgccagtctttctcaagttatttccaaacat

SEQ ID NO: 59249 - DNA, 277 bp, Zea mays
agtacatttgaagttgatgtctagtatgtcgacccaaacggcttacaaattccacaaaaaataagcacatacacaattggccctttccaaacctccaaaggagagaaggccaaactgaaagtgaaagtgcgtctcaacttaacggtcccatggatgttgattcagcaataatgctggaggatgatgtggaagttccagtttcatctgcaaatgaagctccatatgatactatgtagatggacacagatgatgcaccaagtgatcctgctgttgcatc

SEQ ID NO: 59250 - DNA, 277 bp, Zea mays
ggaacgcacacaccgtccggtctccgatctccgatccccgatcccctcgtcgatccaagatgcagatcttcgtcaagactctcactggaaagactatcaacctcgaggtggagtcctctgacaccattgacaacgtcaagccaagatccaggacaaggaaggcattcccccggaccagcagcggctcatcttcgctggcaagcagctcgaggacgggcgcacacttgccgactacaacatccagaaggagagcaccctccaccttgtgctccgcctc

SEQ ID NO: 59251 - DNA, 274 bp, Zea mays
caatcgtgctctgctatttccagctctgcagtgaggactacatgtggtggtggaggtcttaccttacctcaggatcctccgccctgtatctcttcctgtacgctggtttctacttcttcacgaaactgcagatcactaagtggtgtctggcatcttgtacttcggctacatgcttctcgcctcatatgccttcttcgtgctgactggcacaattggtttctgcgcctgcttctggttcactaggttgatttactcttcagtgaagatcgattag

SEQ ID NO: 59252 - DNA, 113 bp, Zea mays
atcagtatcagcgcagaaactacatatagatcagtgtttgtcgaccagtcatcgaagtcgtgtgctctcaagtctgatgtgagatatacatatatcatgattgtaatgtgatt

SEQ ID NO: 59253 - DNA, 294 bp, Zea mays
ggacaaggtggcattcatttagtagccgcacttggtttgatagcccaatcataaccaagtgcggctactaaatgaatgggctatcaaaccaatagttgcggcaggagtaaatataaacttcagggatattcgtggatgacctgcgcttcactgggtgcatgctgtggaagggagcggacagttggtgccctgatagcaagcggagctgcatctggtgctttaacagatccaacgcagcagtatccatctggaagaactcctgctgatttagcatcagaaaatggtcacaaaggc

SEQ ID NO: 59254 - DNA, 302 bp, Zea mays
catttcttccctctcgccttcccctccgccggcaatcccacgtccaatcagccgccgctccagccttccatccatccatcccgtagctgctctctattacgccagcgatcgagagaccaagaggagcaggagcgatggcgaggagctcgttcaagctggagcaccccttcgaaaggaggaagctgaggctaaccgcatcagggagaagtaccccgatagaattcctgtcattgttgagaaggccgagaggagtgacatcccagacatcgacaagaaaaagtaccttgtccccgccgacctca

SEQ ID NO: 59255 - DNA, 297 bp, Zea mays
  unsure (1)..(297): unsure at all n locations
agaagttcgtcagcgacggcgtgttctacgccgagctcaatgagatgctgacgcgggagctcgcggaggacggctactccggcgtggaggtgcgcgtcacaccgatgcgcacggagatcatcatccgcgccacgcgcacgcagaacgtgctcggcgagaagggccgcangatcaggagctcacgtctgtcgtccagaagaggttcaacttccccgagaacggcgtcgagctctacgccgagaaggtcgtcaaccgcggcctctgcgccatcgcgcaggctgagtccctccgctacaa

SEQ ID NO: 59256 - DNA, 296 bp, Zea mays
gctgcggcaggccggcgtgccggttatcggtctagccgcgggggagccagacttcgacacgccgcccgcgatcgcggaggccgggatggctgcaattaggaatggttatacaagatacactcctaatgctgggactttggagctgaggaaggctatactgtactaaactccaggagggaacggggtatcctacctcccagatgaggtgctggtgagcaatggagctaagcaatgcatcacataagctgtgcttgcagtttgctcacctggtgatgaggttttgattccagccccat

SEQ ID NO: 59257 - DNA, 295 bp, Zea mays
agctctggtgctcctttctggtccgctcctaagcggttcccgcgacctctggagttctcatcttctgactcaagtcatcttagcttcttgttggctgcttctatattaagggcagaaacatttggaatacccatacctgattgggcgaaaaacccaaagaaactagctgaagcttggacaaggtcattgttccggatttccatccaaagcagggtgttaagatagagatagatgagaaggctactagcctatcctctgcatctgttgatgatgctgctgtcattgaagagcttat

SEQ ID NO: 59258 - DNA, 294 bp, Zea mays
cgaggaaccgctgctcctgaactgtctgtctgattctgttcatttgttgctgtgtaggctgggcttgtgccaagcttgaatcctcttgtgaaggagtttctcaatgctgctgatgacaagcggaaggaagtcctctctaaaatagaagaggatgttgctaagctcagcggttctcagccaactaagaagctacaagtgaatgccgaggagagcagcgatgacttggctaacccaccgaagtcagaggagaagcttggtgctgtccctcatggcctgtccaccgactctgaggtt

SEQ ID NO: 59259 - DNA, 124 bp, Zea mays
  unsure (1)..(124): unsure at all n locations
ccctgctccattctcagccgccgccaatcccttcccgtgctccgcaacctttnagtgagaataagagatggccggcaatggcgatggccctactatcggcatcgatctcggcacgacgtactct

SEQ ID NO: 59260 - DNA, 301 bp, Zea mays
tgatgccaagcgtctcattggcaggaggtttagtgatgcctctgtccagagtgatattaagctgtggcccttcaaggtcattcctgggcccggggagaagccaatgatagttgttcagcacaagggggaggagaaacagtttgcagccgaagagatctcctccatggttctcatcagatgcgtgagatcgctgaagcttaccttggcagcacgatcaagaatgctgttgtcacggtccctgcctacttcaacgactcacagaggcaggccacgaaggatgctggggtgattgctggcctca

SEQ ID NO: 59261 - DNA, 293 bp, Zea mays
atctggtttcgctgccccgattcgccacgaagccgcactgtgagacagggacgcggcccgttgtcgtcggcttgtacgcaatccttccgtcgctgcgaactgatccctcgtgttcgccatggcccccagcgtcgccgtggaaaacctcaaccccaaggtcttgaaatgtgagttgcagtccgtggcgagattgtcatccatgctcagcgcttgcagcaacaactacaaacacaaccagggtctcttccttttgatgagacctgttctgcaacattgggatcctcaatccttgg

SEQ ID NO: 59262 - DNA, 295 bp, Zea mays
cgagctcattggcacgccaaatgagggtgatcttgattttgtaaatgaaaatgcaagaagatatatccgccaacttcctcgtcaccctagacagtccttacctgaaaaatttccacatgtacaacccttagcaattgacctggtggaaaagatgctgacttttgatcctagaagagaataactgttgaaggcgcacttgcacacccttacttggcatcacttcatgacataagtgatgagccaggctgctcaatgcccttcagctttgacttcgagcagcatgcattgtctgaag

SEQ ID NO: 59263 - DNA, 154 bp, Zea mays
tgctgctgtccaggctgccatcctgagcggtgagggcaatgagataggtgcaggacctgcttctgctggacgtcacccctctgtccctgggtctggagactgctggaggagttatgacagtgctgatcccgaggcacaccaccatccccaccaa

SEQ ID NO: 59264 - DNA, 291 bp, Zea mays
ccctcatccaccacgacatttccaatgaaatacctatccatctacaaaggatgcagtaccttgcattctcatcattcttgggattgatagcgtgtctcttttggaatgtcatagcaactacaacagcatggattaaaggggaaggtgttatgatctggctgcttgccattattacttcatatctggtgcgcctggggcttatgtgttatggtatcgacctctttataatgcaatgagaactgagagcgctttgaagtttgggtggtttttcctattttacatgattcatat

SEQ ID NO: 59265 - DNA, 294 bp, Zea mays
  unsure (1)..(294): unsure at all n locations
cgggggtctaaaggagatcgcgcaggcctacgcggattctttcgcgccgagggacggtgacccggcaaaggtccctgactttgttgaagggatggtgtacacagagagcgagggtgtcatgatgacgggcgtgtacgcttccaaagtagaggcgaagcagaanggcaacaagacaactgcgtggggtggtggtttaagcgctggttctaccagcacgctcagacggcgctgaagaggggcgagtttgtggagtacatcccgacgagggagtactaccaccggcacacccggtgc

SEQ ID NO: 59266 - DNA, 290 bp, Zea mays
gtggctcagctatgttcctgcaaacattggtggacctcttcctattaccaaacctctggaccctccagacagacctgttgcttacatccctgagaacacatgcgatccacgtgcagctatctgtggtgtagatgacagccaagggaaatggttgggtggtatgtttgacaagacagctttgtggagacatttgaaggatgggcaaaaacagtggttactggcagagcaaagcttggaggaattcctgtgggcgtcatagctgtggagacacagaccatgatgcagatcat

SEQ ID NO: 59267 - DNA, 288 bp, Zea mays
cctagccgcgatccgacaacgcctccatccctagccgactgctgcaagcttcagagctcaagagtcagggcgccatggcgacagagacggagaccttcgcctttcaggctgagatcaaccagctgctctcactcatcatcaacaccttctattccaacaaggagatcttccccgggagctcatttccaactcttccgatgcgttggacaaaatcaggttcgagagcctcactgacaagagcaagctcgatgcgcaccggagctgttcatccacattgtaccagacaag

SEQ ID NO: 59268 - DNA, 293 bp, Zea mays
agggcttacatcgtaaattacatggcaaggaatggctctcttcgccaacaactttacaaagaaatcgaggttgctagtgtagactcatttcagggtagagagaaagactacattattctatcttgtgttagaagcaatgagcaccagggaatggggtttctcaatgatccgcgaggttaaatgttgcgctaactcgtgcacgttatggcatagttattcttggtaatccagaagtactaagcaagcagccactttggaatagcttgttgacacattacaaggagcatgagtgc

SEQ ID NO: 59269 - DNA, 293 bp, Zea mays
acctgaagttgatccagaaagagattagaggactgtgtttgcttaccagttatctttgaaggcagatgaaagagatgtatatgagttcttttctagggctggaaaggtccgggatgttcgcctgattatggatcgaaattcacgacgttctaaagttgtcgggtatattgattctatgatgctatgtctgttccaatggcgatagctctttctggtcagttgcttcttggtcaacaagtgatggttaagccttcagaggctgaaaagaatttagttcagtcaaatgcttcaag

SEQ ID NO: 59270 - DNA, 292 bp, Zea mays
gaagctccgcacccaatctaatcgacacctcaccgagatgggccgcaagttcttcgtcggtggcaactggaaatgcaatggaaccacagatcaggtcgagaagattgtcaaaaccctgaatgaaggacaggttcccccttcagatgttgttgaggtcgttgtcagccctcttatgtcttccttcctgtggtcaagagccagctgcgccaagagttccatgttgctgctcagaactgctgggtgaagaagggaggtgctttcactggtgaagtcagtgctgagatgctcgtca

SEQ ID NO: 59271 - DNA, 251 bp, Zea mays
gtcgatccaagatgcagatcttcgtcaagactctcactggaaagactatcaccctcgaggtggagtcctctgacaccattgacaacgtcaaggccaagatccaggacaaagaaggcattcccccggaccagcagcggctcatcttcgctggcaagcagctcgaggcgggcgcacactagccgactacaacatccagaaggagagcactctccacctggtgctccgcctcagcggtggtctgcagatcatcg

SEQ ID NO: 59272 - DNA, 282 bp, Zea mays
gaagggcatcttcttctcgctgtgcgaatgggggaggcaaaaccctgctacctgggcaggcggcatggggaacagctggagaacgaccgatgatatcgccgacaactggggcagcatgacgtctcgtgcagaccagaacgacaggtgggcttcctacgccggactggcgggtggaacgatcctgacatgcttgaggtgggcaacggcggcatgtccgaggcggagtaccgctctcacttcagcatctgggcgctcgccaaggctccgcttctgatcgggtgc

SEQ ID NO: 59273 - DNA, 282 bp, Zea mays
gtccacctctctcgctctgggccgccgccgccgccctaagccacgtgctgaggctttcgttggtctcttcgccggcgacgagcacccagcagttctgtagaaatggctgatggtgaggacatccagcctcttgtctgcgacaatggcactggaatggtcaaggcggttttgctggcgatgatgcaccaagggcggttttccctagcattgttggccgtcctcgccacactggtgtcatggtagggatgggacagaaggacgcatatgttggcgatgaggcac

SEQ ID NO: 59274 - DNA, 283 bp, Zea mays
acaggccatacagaaatgacaggagggtacctgaaagacatcgagcactaaaacgatctagtccagctcctgtggttggatatgcatcatctgccaagcgtcgcagaggaggagaggttgagctctccaacatattggaaaaagtagttgatcacttgcggggttgagtggatcactgctgtttttaaaaccagtgacaaagaaagaagcttctgattaccttgatatcatacggtacccaatggatcttggtaccatcagggacaaggtgagagagatggtg

SEQ ID NO: 59275 - DNA, 146 bp, Zea mays
atgagtttgaggaatatgaggagccaccggtacttggaaggaagacttattttgtagcagataaatcaggttcgaaccatcaatgggcccaatgtgaagattgttccaaatggaggaaacttccaatagatgctctgttgccctcc

SEQ ID NO: 59276 - DNA, 276 bp, Zea mays
gcagtgactctgggacctacgacagcgagggcaggttcatgccagtgaacttcgagaacctgttcagcaagtacgcgcgcacttccccggacaggctcacctacatggagctctggtcgatgacggatgggttccgcgacgccttcgacctctacggctggattcggcgaagctggagtggacgatcctgtacgtgctggcgcggtacgacgaggggtacctgtcgcgggaggccatgcggcgcgtgtacgacggcagcctcttcgagtacgtgga

SEQ ID NO: 59277 - DNA, 290 bp, Zea mays
agcttctacacattccttaatacacataatggattaaactgttcctcaatatcacatgatggatcactggttgttggtgggttttctgattcgtcagtgaaggtctgggatatgtcaaagatgggccagccagcaaaaatatcacgatcacagggtgagaatgggcctcccagggtgagcgcatatcaacattagatgaggggaaacgaacctatacactatttcaaggccattctggaccagtttattctgcggcctttagcccgtttggggatttcctcttgtcatca

SEQ ID NO: 59278 - DNA, 151 bp, Zea mays
ctggagttcaaggctgttctctttgttcctaagagggccccctttgatctctttgacaccaagaagaagcaaaacaacatcaagctctatgtgcgcagggtgttcatcatggacaactgcgaagagctgatccctgagtggctgagcttcg

SEQ ID NO: 59279 - DNA, 147 bp, Zea mays
gtcgtcgggaactgtactggctttgcagttaataggatgttctttccatacactcaatcagcactcttttatgttgatcttggtatggatgtctataagattgatcgtgcttgtaccaaatttggaatgcctatgggtcctttcaga

SEQ ID NO: 59280 - DNA, 214 bp, Zea mays
ctgcattccccctttccccttccgtccgctgcattcctgctctcttgctctcctcgctctcagaccacagttgccgccgccgccgccctaagccagggtgctgaggctttcgttggcctcttcgccggcagcgagcacccaccagttctgtagaaatggctgatggtgaggacatccagcctcttgtctgcgacaatggcaccggaatggtcaa

SEQ ID NO: 59281 - DNA, 232 bp, Zea mays
gggagttccggtctggctcctcccgtgtgctcatcaccaccgacctgcttgctcgtggtgttgatgttcagcaggtgtccctggtcatcaactatgatctccccacccagccagagaattacctgcatcgcattggtcgtagtggtcgtttcggtaggaagggtgttgccatcaactttgtgacccgcgacgacgagcggatgctgttcgacatccagaagtcctacaacgt

SEQ ID NO: 59282 - DNA, 236 bp, Zea mays
cgcaatttggtttcattggttggctattgcgatgaagaggatgagcagatgctggtttatgaattcatgtcaaatggcactttacgtgatcatctttctgccaagtccaagagacctctaagttttggtttgaggttgaaaatcgcattgggtgctgcaaagggaattttgtatctacatactgaagcagatccacctatattccaccgtgatgttaaggccagcaacttctgttg

SEQ ID NO: 59283 - DNA, 197 bp, Zea mays
aaaccctagccctcgcgccgccgccgccgtgcccagcgctcgagctcctcgcctgccgcgagctcgcgccgcaacgccaccatgaagttgcacatcgcgaacccgtctaccgggtgccagaagaagctggcaatcgatgacgaccagaaactacgtgccttttatgaccgaaggatctcccaggaggtcagtggtga

SEQ ID NO: 59284 - DNA, 287 bp, Zea mays
aaaagtgcacttgaggctgtgaaaacactgagagcacagcccaaagccaatgatcagtacttgcccatttgtgatagttgatgacagtggcaatgctgttgggcctgtattagatggtgatgcagttgtcactatcaacttccgagctgatcgcatagttatgcttgcgaaagcactagagtatgcagattttgacaactttgaccgtgttcgtgtccccaaaatccgatatgctgggatgcttcagtatgatggtgagttgaagcttccaagccgttaccttgttt

SEQ ID NO: 59285 - DNA, 184 bp, Zea mays
gatgaagatgcgttcttcaaagattatgctgaatcacacaagaaactctctgagcttggcttcacgcctcgcagcacagcaccatccaaatcagatcttccaaccgccgccgtgcttgcacagagtgcctttggggtagcagttgctgcagccgtagttatcgctggctacttgtacgaggctt

SEQ ID NO: 59286 - DNA, 187 bp, Zea mays
gggcagttgagcttcaggggcaagcgggttctagagcttggatgtggatatggcctctctgggatttttgcctgcttgaagggtgcatccacagttcactttcaggacataaatgcagaaacgatacggtgcagaacaatacccaatgttcttgcaaatcttgagcaggctcaggaccgacagaaca

SEQ ID NO: 59287 - DNA, 196 bp, Zea mays
tgaatctgcacagtctgctattgataaactcaatgggatgcttatcaatgacaagaaagtgtttgttggaccttttgttcgcaagcaggacagggaaaatgtctcgagtaatatcaaatttagtaatgtatatgtgaagaatctgtcagatactgttactgatgatgagttgaaggagatgtttggaaaatatgga

SEQ ID NO: 59288 - DNA, 247 bp, Zea mays
gagaagggaatgcaacacagccagaagatcaccttccctggtgaagctgatgaagcgcctgataccgtcactggagacattgtattcgtcctccagcagaaggaccactccaagttcaaaagaaagggtgaagatctcttttatgagcacaccctgtctctgaccgaagctctatgtgggttccaatttgttcttacacacctggacaacaggcagcttctgatcaaatcaaaccccggcgatgttg

SEQ ID NO: 59289 - DNA, 281 bp, Zea mays
gatgaagatgcgttcttcaaagattatgctgaatcacacaagaaactctctgagcttggcttcacgcctcgcagcacagcaccatccaaatcagatcttccaaccgccgccgtgcttgcacagagtgcctttggggtagcagttgctgcatccgtagttatcgctggctacttgtacgaggcttccaagtaggccaagtagagggcgaagttcttctccacatggctttgctttagtaagtctgaagatcgaataacaggaccatatctgaagatcgaata

SEQ ID NO: 59290 - DNA, 284 bp, Zea mays
gcagcagacacctctcccacctccaccctcgaatcgttccccaccatggcgtcgcagggatcctccgtcttcgccgcactcgagcaggccccggaggaccccatcctcggagtgaccgttgcctacaacaaggatcccagccccgtgaaggtcaacctcggggtcggcgcctaccggaccgaggaagggaagcccctagtgctgaacgtggtcaggcgcgccgagcaaatgttgatcaataatccgtcacgtgtcaaggagtacctaccaatcaccggtctggc

SEQ ID NO: 59291 - DNA, 208 bp, Zea mays
ctggtttccagtgggcatcgaaggagggtgcactggctgaagagaacatgcgcgggatttgcttcgaggtctgtgatgtcgttcttcatgccgatgctatccacaggggtggtggccaggtcattccaactgccaggagggtcatttatgcttctcagctcacagccaagccgaggctgctggaaccagtttacctggtggagatcca

SEQ ID NO: 59292 - DNA, 277 bp, Zea mays
cagaaaccttgtgtgcacagatctgtttaccagaggaattgatattcaggctgttaatgtggttattaattttgacttccctaagacatctgagacatatttacacagggttggccgttctgggagatatggacaccttggtttagcagtgaacttgatcacttatgaggaccgtttcaacttgtataggattgagcaagagcttggaacagaaattaagacaatacccccgcagatcgacctggccgtatactgccaatgatgaatgcgacattca

SEQ ID NO: 59293 - DNA, 275 bp, Zea mays
cactcaacacagcacaggcagctcgagagagagagagagagaaagatgtcgtggttcgggcaccaccaccacaaccagccggctcccccggcgtcgggccccaaccaggtgttcaagatcttctgccgcgccaacgagaactactgcctggccgtccgcgacggcgccgtcgtgctggccccggtcaaccccaaggacgaccaccagcactggtacaaggacatgcgcttcagcaccccgggtcaaggacgaggaaggcttgccggctttcgcct

SEQ ID NO: 59294 - DNA, 204 bp, Zea mays
cagcaatcacagcagcccggagaacggccaggtccgacaagatgcagatcttcgtgaagacgctgacagggaagaccatcaccctcgaggtcgagagcagcgacaccatcgacaatgtcaaggccaagatccaggacaaggaagggatcccgccggaccagcagcggctgatctttgcgagggagcagctggaggatggccgca

SEQ ID NO: 59295 - DNA, 172 bp, Zea mays
gcgactttatttcaagaagacagaagaagggagagtcgtactgaggtgtaagaatggcgagtgcacaggcagtggggcaaggagaacgaggccacttcgttctgaagagcggacacaccattccggccgttggtctaggcacttggagggccggctcagataccgctcactc

SEQ ID NO: 59296 - DNA, 275 bp, Zea mays; identical to SEQ ID NO: 42402

SEQ ID NO: 59297 - DNA, 289 bp, Zea mays
gcatgcagatctttgtgaagacactcactggcaagacaatcacccttgaggtggagtcttcggataccattgacaatgtcaaggccaagatccaggacaaggagggcatcccaccggaccagcagcgcctcatcttcgccggcaagcagctggaggatggccgcaccctggcggactacaacatccagaaggagagcaccctccacctggtgctccgcctcaggggtggcatgcagatctttgtgaagacattgactggcaagaccatcaccttggaggtggagagctc

SEQ ID NO: 59298 - DNA, 291 bp, Zea mays
  unsure (1)..(291): unsure at all n locations
gagatattgttggaatgggatcatatctctttggctcatatgctgaattgtcatgtgctgctcttgttgtggcctcgatctcgtcttttggaatcaaccatcaatttactccaatggtgtatccccttcttgtcagctctgttggtattatagcatgnctcataacaacgctgtttgcaactgatttcttcgagataaaggctgtgagtgaaatagagcctgctctcaagaaacaacttataatatccactgttgtgatgaccattggcattgcgctcatgttggcttggt

SEQ ID NO: 59299 - DNA, 287 bp, Zea mays
ggaaacctctcaaaccctagccgcctcctgcaagtttcagagctcaggaatctgcgccatggcgagtgagacggagaccttcgcatttcaggctgagatcaaccagctgctctcactcatcatcaacaccttctactccaacaaggagacatacctccgcgagcttatctccaactcttccgatgcgctggacaagatcaggttcgagagtctcactgacaagagcaagctcgatgcgcagcgtgagctttgcatccaccttgtcccagacaaggccacgaacacgc

SEQ ID NO: 59300 - DNA, 288 bp, Zea mays
ggaactcatctataaagtgcgtggtcttgaggcagctgagaattattttgctaaccttcctgatccagcgaaagatcatcgaacttacggctcccttcttagttgttattgctcagcaaaaatggaagagaaagcaacaaatctctaccgccagatggatgaacttggcatctggtccagtacactacccatcaacaatcttacgtccctttacatgaagttagaccagtataggaaggttgttagtctctttgaggagatgaaactgaagaatgttaaaccgaatag

SEQ ID NO: 59301 - DNA, 288 bp, Zea mays
ccgcggtctgctcgttcgatctgtgcagcagatctgaggtcccgggcgaccgtgaagcagcttcaatcgtcggcatggcgctcgtattgcatagtggggctggaaacaagaatgccttcaaagcacttattgctgcagaatacagtgggatcaaggttgagttgaccaaggattttcagatgggtgtctccaacaagacccctgagtttcttaagatgaacccccttgggaaggttcctgttctggagactcctgatggcccgtttttgagagtaatgctatcgcacg

SEQ ID NO: 59302 - DNA, 286 bp, Zea mays
acgagatcctcggggtgcccaagtcggcgtcccaggacgacctcaagaaggcctaccgcaaggcagctatcaagaaccaccccgacaagggcggtgaccccgagaagttcaaggagctcgcacaagcctatgaggttttgagtgatccagagaaacgtgagatttatgatcagtatggtgaagatgcccttaaggaaggaatgggtggtggtgggtcccatgctgatccatttgacattttctcatcattctttggaccctcttttggaggaggtggtggaagcag

SEQ ID NO: 59303 - DNA, 290 bp, Zea mays
  unsure (1)..(290): unsure at all n locations
tgtagatctttgaggttagtggtaacagtgacattgaaggtgttgactccagcaatgtatcttatttcngaacagcagccctactgaattgtgtgaatttggtcgaaagtaattcctgggatggccgttatggtcttgtcgattgcacggatagcgcggtttattccgataggccagctcgtccaacaggaggtgctgctgctatagcaatgctcattggtcctaatgctccaatatccttcgagagtaaatatagagcttctcacatagctcatgtctatgatttctac

SEQ ID NO: 59304 - DNA, 283 bp, Zea mays
acatcaagtactatgatttggggatactgcaccgtgaagcaactgatgacaaggtcacagtggaggctgcagaggctactctcaagtacaacgtggctattaagtgtgcgaccattactccagatgaaactcgggttaaggagttcaatctgaaacacttgtggaagagcccaaatggcacaattaggaacattataaatggcactgtgttcagagagcctattatatgcaaaaacgttccaagacttgttccaggatggactaagcccatctgcattggaag

SEQ ID NO: 59305 - DNA, 281 bp, Zea mays
aaattgcaaatgttcaagtttgataccaatgaaggtcgtgacaccttctggcactcaagtgctcatattcttggagaatctattgagagagcatatggatgcaagctgtgtattgggccttgcaccacaagaggggagggtttctactatgatgcttactacaatgatcagacattgaatgaggagcactttggtatcattgaaaaccaagctaaaaaggctgttgcggaaaagcaaccgtttgaacgcattgaggtcagcagggcagaagctcttgaaat

SEQ ID NO: 59306 - DNA, 278 bp, Zea mays
ctcccctagccgccgccgccgccgctcgtctccctgagaggtgacgggaccgaggaactggccgagtactaggtagagaatcggtttttcttgtctcagcccggggtctgctgcgtctggtggtggtgaaggggagaaattcgtgagatctgttctggatcaggcgtgcgagctcgggaatcaggggtttcacacatagcttcgtcgatttgaatttgatgtactaatggagtctaagggtggcaaaaagtctagcagtagtcgttctatgatgtatg

SEQ ID NO: 59307 - DNA, 285 bp, Zea mays
gagcgtacacagacacaaccagatctcgcccaaatccatgcgtcgggacctccgcctcaagatgcagatctttgtgaaaaccctgactggcaagactatcaccctcgaggtgcagtcgtctaacaccattgacaacgttaaggccaagatccaggacaaggagggcatcaccccagaccagcagcggctcatcttggctggcacgacagactgaggacagtcgcacgcttgctgactacaacatccagaaggagagcaccctccaccttgtgctccgtctcaggg

SEQ ID NO: 59308 - DNA, 289 bp, Zea mays
ctccgccaccgccgccgctctacgcgagacgcccaggtcttcgccaacgacgagcatccgggttagagaggaagaaattgcaaccgagacaatggcggcagattccggcgctcgcagacaaccaagcttcaccaaggtcgaccagctgcgccctggaacccacggccacaacctcatcctcaaggttgttgactccaagatggtcgtccagagaggccgcgagggagggccccagggaagacagatgaggattgcggagtgcttggttggtgatgaaaccggcatcatt

SEQ ID NO: 59309 - DNA, 275 bp, Zea mays
actgcaacgtgccggagttcagtaacaccagagtcaaccatgatctgaatgtcatttcctgggacaacacaccgaagcagcagactcaatacctcatgctcgatgacttcgacggcatggataaaagaaaagagccctttgcaaggaagttcgggagagaagaccccgtgctggacaagatcgaccaggagctactgggccgccggcctgatgggtttgtgcccggtggatggacgtatctactgaatgcgacgactgaggaagggagaccttcg

SEQ ID NO: 59310 - DNA, 279 bp, Zea mays
cagaacatgtacagaagagcagctgaattctgggctgaactgcgccttgaacttttatcagcaagtgaattatttgctgagcgcaattcaaatcaaatatggcgattgtattgggccagccatcagcgtttcttcaggcacatgtgcatgtctgaacaggtacctgctgttgtgaggttagctaaagaggccttggcagagaacaaatgtgtggtgattggccttcagagcactggagaagctagaactgaagaagctgtcacaaaatatggagttgaa

SEQ ID NO: 59311 - DNA, 282 bp, Zea mays
ggctcgagccgaatcggctcgagctatcatatctgtcagtggttctggctgtggttcaggtaatttaaacccagaagatcaaacaaattgcagtgatctggacctaaataaggcttcatttttgttaaagaatgtccttggaaactggagctcaaagttgtttgcagttgctttgttggcatctggtcagagttctacaattacggggacatatgctggacaatatgtcatgcaggtttttggaacttataccttatttcagttctagttcgcaagttgaat

SEQ ID NO: 59312 - DNA, 275 bp, Zea mays
tccattcctccctgtctccgccctcttctgactcccgtaggccgtggtgccgccgccgactgctgggactgccctacaccaagtgcccaggtcatcttcgggccattcgccggcgacgagcaccaccaggtgtgccaggttgaccgagctatggacagcctgtggcatcttggggacgagctccgcgggcagcccaaggtggtggaggaccgccagtggtctctcatgacgtccaagctggcggagatcaccaggtccaagggcgagaggatgaa

SEQ ID NO: 59313 - DNA, 276 bp, Zea mays
cgccgccgcaagccgtccgccttgcccttcacgaaggcttggtcctcctccttgtatctccactccccccttcacagatccgttcctccagctagggttagcgttcctctgcagcgatggcgatcaagcggactaaggcggagaagaagatcgcttacgacaagatgctgtgcagcctgctcgatgagtacaccaaggtgctcatcgccctggccgacaacgtcggttccaagcagctccaggacatccgccggggcctcaggggcgactcggtgg

SEQ ID NO: 59314 - DNA, 278 bp, Zea mays
  unsure (1)..(278): unsure at all n locations
ttattaagtacatgactgatggaatgcttctaagggagttccgtggtgaaccagatttggctagctatagtgttgtcatggttgacgaggctcatgagcgtaccctctccactgatatcttatttggtctagtgaaggatatttctcgttttcgaccagatctgaagttgctcatttctagtgccacccttgatgcagaaaaatttagtgactactttgattcagctcctattttcaagntacctgggaggcgatacccggttgaaattcattataca

SEQ ID NO: 59315 - DNA, 283 bp, Zea mays
ctgacaattatttcactggttctgagaatataacaagattcagctacagggaactggttagagccacatcaaattttgaccaaggcaataagattggtgagggcggctatggacctgtctacaagggaacactcaaggatgggacacttattgccgtgaaggttctgtctttacattctagacaaggggcaaaggagtttcttaatgagcttcttgcaatctctgatgtaacacatgagaatcttgtcaaactctatggctgctgtgtagaaggaaaccacag

SEQ ID NO: 59316 - DNA, 264 bp, Zea mays
gagaaaccggaatccatgaacgcgtttgctcttatttcgaggtcgcagggtttcaaccttggaaatttgtttgagaaggagatgatgggaatggtaaagagggaaacatctgtcacgtctcaatgcacagcacaggagatcatgacaaaaatagaggatgcatgtgggccactcggtttcaacgtgcggaaacagaattacaagatgaaatggataggtgacaaatctggcagaaagggcactatctgtgcaactgaggttttg

SEQ ID NO: 59317 - DNA, 308 bp, Zea mays
aaccgctgctgctattgcctatggtcttgacaagaaggcaaccagcgtcggtgagaagaatgtcctcatctttgaccttggaggtggtaccttcgatgtctccctccttactattgaggaaggtatctttgaggtcaaggccacagctggcgacacccatcttgggggtgaggactttgacaacaggatggtcaaccactttgtccaggagttcaagaggaagaacaagaaggatatcactggcaacccgagggctctccggaggctgaggacctcttgtgagagggccaagagactctgtcttccac

SEQ ID NO: 59318 - DNA, 307 bp, Zea mays
gtgcgagggcaagaacttctacacccggagcgcgttcctgagcgccgtcaacgcgtacccgggcttcgcccatggcgggacggaggtggagggcaagcgcgagatcgccgccttcttcgcgcacgtcacgcacgagaccggacatttctgctacatcagcgagatcaacaagagcaacgcctactgcgacgcgagcaacaggcagtggccgtgcgcggcggggcagaagtactacggacgcggcccgctgcagatctcgtggagctacaactacgggcccgccgggagggacatcggcttcaacggg

SEQ ID NO: 59319 - DNA, 243 bp, Zea mays
gtcaaggccaagatccaggacaaggagggcatccctccagagcagcagcggctcatctttgctgggaagcagcttgaggacgggcgcacgcttgccgactacaacatgcagaaggaggagaccctccacttggtgctgcgcctcagtggaggcatgcaggtcttcgtgaagaccctgaccggcaggactatcaccctcgaggtggagtcttcagacaccatcgacaacgtcaaggccaggatc

SEQ ID NO: 59320 - DNA, 306 bp, Zea mays
cctgctccattctcagccgccgccaatcccttcccgtgctccgcaaccgctgagtgagaagaagagatggccggcaagggcgatggcccggctatcggcatcgatctcggcacgacgtactcttgcgtcggcgtgtggcagcacgaccgcgtcgagatcattgccaacgaccagggtaaccgcaccacgccctcgtacgtcgccttcaccgactccgagcgcctcatcggagatgccgccaagaaccaggtcgccatgaaccccatcaacaccgtctttggatgcacagcgtctcatcggcaggag

SEQ ID NO: 59321 - DNA, 301 bp, Zea mays
ctgaagcgtactccgcgccttcaattgtgttgacatctcgttcacgagatgggttgcatgtttttgatgatttccgtgaagcttacgcatggctgagccataacacagatgttgatgacaaggttgcttcctggtgggactatggttaccaaacaactgcaatggccaacagaactgtgattgtagacaataacacctggaacaacactcatatagcaacagttggtacagcaatgtcgtccccagaaaaagcagcttgggaaatcttcaattctttagatgtcaaatatgtgcttgttgt

SEQ ID NO: 59322 - DNA, 288 bp, Zea mays
gagcgcacacacacacaaccagatctcccccaaatccacccgtcggcacctccgcttcaagatgcagatctttgtgaaaaccctgactggcaagactatcaccctcgaggtggagtcgtctgacaccattgacaacgttaaggccaagatccaggacaaggagggcatccccccagaccagcagcggcttcatctttgctggcaaacagcttgaggacgggcgcacgcttgctgactacaacatccagaaggagagcaccctccaccttgtgctccgtctcaggggtg

SEQ ID NO: 59323 - DNA, 242 bp, Zea mays
ccctccgcgagctccctacccctcgcgctcacgccggcgacaagtttccgccagagttaggtagatcaggtgctgcgccggcagccgtggaacggatggaggacctcgcgagttcgcgtggcggcgggggatgcggtggtcttgatgcgcagatcgaacagctcatggagtgccgcccgctgccagagacggaggttaaaacactgtgtgagaaggccaaggagatattaatggaggaaagc

SEQ ID NO: 59324 - DNA, 303 bp, Zea mays
caaagaggttgtgaagaacaagaagtaccttgcagttgctgtgccagatgagggtgcccagacccttctggttcaggtcattgaggcttttggtggtaagtgcaaccctgaggcgctgaaggaggttcccgttgtcctcaaagccctctacgatggtgatatcctggacgaggaaaccattgtggactggtacaatgatgctgtcgcagctgggaaggactcccaggttgtcaagaatgccaagccgttcgtcgagtggctccagagtgccgagtctgatgaagagggtgacgacgagtgaag

SEQ ID NO: 59325 - DNA, 300 bp, Zea mays
gtcatctgctccaagtgcaagggcaagggctcgaagtctggtgcttcaatgaggtgccctgggtgccacggctcaggtatgaaagtcaccattcgtcagctggggccttccatgatacagcagatgcagcagccttgcaacgagtgcaaggggactggggagtgcatcaacgagaaggaccgctgcccagggtgcaagggtgagaaggtcgttcaggagaagaaggttcttgaggttcatgttgagaaggggatgcaacacagccagaagatcaccttccctggtggaagctgatgaagc

SEQ ID NO: 59326 - DNA, 299 bp, Zea mays
cgccgtctgccttctgcgcctccatttcggcctctgtcgcttgcaagttcaatctcagctccaagcatgggtaaagaggagtcccacatcagcattgtggttatgggccatgtcgagtctggcaagtcgaccaccacaggacaccttatctgcaagcttggaggcgttgacaagcgtgtgatcgagaggtttgagaaggaggctgctgaaatgaataagcggtccttcaagtccgcgtgggtgctcgacaagctcaaggctgagcgtgagagcggtatcaccagtgatgtggctctgtg

SEQ ID NO: 59327 - DNA, 302 bp, Zea mays
ggaagcagaaaatgagaaaagccataccactcacatgtctagaagattctgtccaacttagtttcacaagatgagggcataaaggttgacagatccatagagttctcatatgaagaactttctgatgctacaaacaactttagtatggaccataagattgggcaagggggttttggttctgtatattatgctgagcttagaggcgagaaagctgccataaagaaaatggatacaaaggcatctcaagaattcctcaatgaattgaagattttgacacgcgtccatcacacaaatctggtgcg

SEQ ID NO: 59328 - DNA, 289 bp, Zea mays
ctccacctggtgctccgcctcaggggtggcatgcagatttttgtgaagacattgactggcaagaccatcaccttggaggtggagagctctgacaccattgacaatgtgaaggccaagatccaggacaaggagggcattcccccagaccagcagcgtctgatctttgcgggcaagcagctggaggatggccgcactctcgcggactacaacatccagaaggagagcacccgtcaccttgttctccgcctcagaggtggtatgcagatctttgtaaagaccctgactggaa

SEQ ID NO: 59329 - DNA, 299 bp, Zea mays
ttggtgttaaagtccatgcatgcgttggaggaacatctgttcgtgaggaccaaaggattctcgccagtggtgtgcatgttgttgttggtacacctggtcgtgtgtttgacatgctgcgtagacagtccctccgccctgatactcttcaagatgtttgttcttgacgaagctgatgaaatgctttctcgtggtttcaaggatcagatttatgacatcttccagcttctgccgtccaagattcaggttggagtcttctctgctaccatgccacctgaggcccttgagattacccgcaagtt

SEQ ID NO: 59330 - DNA, 295 bp, Zea mays
gggcgaggagcaaggaagcggactacgcggtggagagcatcggcgcgctccggcgggccatcccggagatctggggcgaggccgctgaacgctcctccgacaagctgccggtgccggccgtgagcgtggtgaggtcgacgacgtccgacctggactccatcatcatccagcccacgtccatccacgcctaatatataacctcatcgtccctagctccccacccccaatcagaatcagcgggtgcgtgcgtgcgtgtgtgaatatctctctctctctctctctctctctctctctg

SEQ ID NO: 59331 - DNA, 260 bp, Zea mays
caagaggccttcagacaagcccctgcgtctgcccctccaggatgtgtacaagattggtggtattggaactgtaccggttggtcgtgtggagactggtgtcatcaagcctggtatggttgtcacctttggtccaactggcctgactaccgatgtgaagtctgttgagatggcaccacgaggcgcttcaggaggctcttccgggtgacaatgtgggcttcaacgtgaagaacgttgctgtcaagggtctcaagcgtgggttt

SEQ ID NO: 59332 - DNA, 292 bp, Zea mays
cttcgtgaagaccctgaccggcaagactatcaccctcgaggtggagtcttcagacaccatcgacaatgtcaaggccaagatccaggacaaggagggcatcccaccggaccagcagcgtttgatcttcgctggctagcagctggaggatggccgcacccttgcggattacaacatccagaaggagagcaccctccacctggtgctccgtctcaggggtggtatgcagatctttgtggagacactcactggcaagacaatcacccttgaggtagattcttcggataccattgac

SEQ ID NO: 59333 - DNA, 295 bp, Zea mays
gcggtgtcagctgctcctccacttcccgtgtttctaactccggtggctccaccactagcaacccgtgcagcgagcccaccccgaccactgccatgtcgaggcgcggcgactgggtctacgagaacaacggcgggacctgcgtggccatcgccggcgccgattactgtgtcgtcgcggcggacacccgcctctctgtcggatacagcatcctcacgcgcgaccactctaagatctgcgacctggctgacaaatgtgtactagcatcttctggctttcagggtgatattaaagctct

SEQ ID NO: 59334 - DNA, 310 bp, Zea mays
ctcgagccgtaccgtccgacccggctccctcggtccctccctcggtccctcccggtctacgcagttcctccccgtcgtcttccaccgcaaatcgccgaagcaagcaggcgagctcgggaccagatccactgcgggcagctggagcggaagggccatggggacgccgccgcctttccaggagtccggccactgcgacgtctgccgctgcaccttcaacaccttccgccgccgtcatcactgccgcagctgcggacggacgctctgtcacgagcattcttcgtactacatggctctcccgcagtatgggata

SEQ ID NO: 59335 - DNA, 306 bp, Zea mays
gtccaggcagccgggagatgactgtggacgggaggccgtctgaccagctgggacgacggttcgtgagcgactttcccatatacgatggccgtggctccggcgcccgcctcgtcgctcgcttgcagggagtcactgtccaaatcggcagctcgcaccagctagtcagcatcgtcttcgaggccgagaggcttaagggctccacgctgctcaccaacggagtgagtaacggatgggtcagacgagtgggccatctacggtggcaccggggtgttcgccatggccaccggtgtcatacgaagaaggttt

SEQ ID NO: 59336 - DNA, 304 bp, Zea mays
ccctcccgttctccgccaccgccaatcccctcccgtcctccgccacctctgctgagagcgagaagagatggccggcaagggtgatgggccggcaatcggcatcgatctcggcacgacctactcttgcgtcggtgtgtggcagcacgaccgtgtcgagatcatcgacaacgaccagggtaaccgcaccacaccctcgtacgtcgccttcaacgactccgagcgcctcatcggagatgcggccaagaaccaggtcgccatgaaccccatcaacaccgtctttgatgccaagcgtctcattggcagg

SEQ ID NO: 59337 - DNA, 278 bp, Zea mays
gttcggagcgcacacacacacaaccagatctcccccaaatccacccgtcggcacctccgcttcaagatgcagatctttgtgaaaaccctgactggcaagactatcaccctcgaggtggagtcgtctgacaccattgacaacgttaaggccaagatccaggacaaggagggcatccccccagaccagcagcggctcatctttgctggcaaacagcttgaggacggtcgcacgcttgctgactacaacatccagaaggagagcaccctccaccttgtgct

SEQ ID NO: 59338 - DNA, 313 bp, Zea mays
gtgcccagggccatcttcgtcgaccttgagcccactgtcatcgacgaggttcgcactggctcgtaccgccagctcttccacccagagcagctcaactcggggaaggaggacgcagctaacaactttgcccgtggccactacacggttgggaaggagcttgtcgatctatgcctggaccgtgtgcgcaagcttgcagacaactgcactgggctgcagggattcttggtgttcaatgctgttggtggtggtactggctctggacttggttcactgctgttggagcgcctttcagttgattatggcaagaagtcta

SEQ ID NO: 59339 - DNA, 302 bp, Zea mays
  unsure (1)..(302): unsure at all n locations
gaagaatcaactgccgatgatgcagatgatgatgatactaaagattgtaaaggtttatttaagaacttaaagttctacttgagtcgagaggtgcctagggagtccctgttatttataattccagcatttggagggactgtttcatgggaaggagaaggagctccatttaaagaaatagacgaagatatcactcaccaggttgattccatttgcaataatttattacaccaaagtttaactatatagacggagacattgtgtaccatccctanagtaagatgccactctaagtaccacgacag

SEQ ID NO: 59340 - DNA, 300 bp, Zea mays
gttaagagggagctacaggagactgttcaatatccagtggagcatccagagaaatttgaaaagtttggcatgtctccttcaaagggtgttttgttttatggccctcctggctgtggcaagactttgttggccaaggcaattgccaatgaatgccaaggtaacttcattagtgtgaagggtcctgaactgcttaccatgtggtttggtgagagtgaggccaatgtccgtgagatttttgacaaggctaggcagtctgctccatgtgtcctcttttttgatgagctcgactccattgctact

SEQ ID NO: 59341 - DNA, 294 bp, Zea mays
cacctcgcctgcgatcttcgtagcctccgtcgcgtcgagcatcgatcatgtcggcctactgcggaaagtacaaggatgagctcatcaagaatgctgcctacattggcacccccggcaagggtatccttgctgctgatgagtccactggcaccattggccggcgcctttccagcatcaatgtcgagtacgttgaggagaaccgccgtgccctccgtgagctcctattctgctgccctggtgctctccagtacatcagcggtgtgatcctcttcgaggagacgctgtacgagaaga

SEQ ID NO: 59342 - DNA, 303 bp, Zea mays
gcaatagcatccacctattattcacacttagagccttttatggaaaccatattctacctgacagctaatgcagttaaaggtgatgaggaaccggttgcacttcaagctgttgagttctggagcgctatctgtgacgaagagattgcactccaagatgaatatgagggatctgaggatggtaactctgctatacacttccgctttattgaaaaggccctccctttacttgttccgttgctgctagaaactttgttgaagcaagaggaagatcaagatcaagatgataatgcttggaatatttct

SEQ ID NO: 59343 - DNA, 310 bp, Zea mays
gttaagagggagctacaggagactgttcaatatccagtggagcatccagagaaatttgaaaagtttggcatgtctccttcaaagggtgttttgttttatggccctcctggctgtggcaagactttgttggccaaggcaattgccaatgaatgccaagctaactttattagtgtgaagggtcctgaactgcttaccatgtggtttggtgagagtgaggccaatgtccgtgagatttttgacaaggctaggcagtctgctccatgtgtcctcttttttgatgagctcgactcgattgctactcagagaggaa

SEQ ID NO: 59344 - DNA, 306 bp, Zea mays
gcggcggaggcagtggcggtgcgaacgtggctaatgtggtcaccgactggttcttcaacggcatcaagaaccaggccgggagcgggtgcgagggcaagaacttctacacccggagcgcgttcctgagcgccgtcaacgcgtacccgggcttcgcccatggcgggacggaggtggagggcaagcgcgagatcgccgccttcttcgcgcacgtcacgcacgagaccggacatttctgctacatcagcgagatcaacaagagcaacgcctactgcgacgcgagcaacaggcagtggccgtgcgcggcgg

SEQ ID NO: 59345 - DNA, 300 bp, Zea mays
attggatgctgatgatactctgcctggctgttactattggtttcagagacacaaaacacttggcaaatgcacaagggttggcagtaataactgtcatgcttgttaccacttgcttaatgtcactcgttattgttctttgctggaacaagagtatcttccttgcccttggtttcctacttttctttggcacgatcgaagtaatctacttctcagcttcccttgtcaagtttcatgaaggtgcttgggttcctattagtctctccttcatatttatggtgatcatgagtgtctggcactatg

SEQ ID NO: 59346 - DNA, 294 bp, Zea mays
  unsure (1)..(294): unsure at all n locations
agacttgttttgggtgcctcttcagcggctccatcgcagatggtattggtcgacgccgtgcgttccagctcagtgcgctgcctatgattattggtgctgccataagtgctctctccagatagttgtggatgggtatggctccgttggagagattggttggtactcaacaggggatgggtttngggtccaccagtagcttcactttatataacggaggtttctccttctacagttgagggtacatatggtagctttgttcagattgcagcctggcgtggaattatagtatcacta

SEQ ID NO: 59347 - DNA, 303 bp, Zea mays
gcgggggcggcaagcaaccacgggcggagtcggagcgtcctcctcctcacgtctataaattcccctccttttcttcctccatatatagggtacgtcagatccaagaagagggaagagcaccaaggaccttcggcgcccgttcaggatccacatcttcccgagcgagttcttggttgacctcttcctcttcggaccacctccaaggctcttggtgtagcttgccactctcaccaatcaagttttcatgtcctgatctccgacattcagatcccaactgccttcgatcgcttggctgaggccaat

SEQ ID NO: 59348 - DNA, 296 bp, Zea mays
accttctttgccctctcccgagataaaatgggtcttggtagtggtttatgtagttcttgtgataatatagagccagattctgatgaattaaaaatattctcgaagaccagctttgtctacagaaaggttacatataatgtcaatgagtttttatacataagacctgatttttttgctgaagatgaggatcgtgcaaccttcaaggctggccgaaatgtgggtctaaagccctatgcagtttgtcaaatattgtccatccctgaaggggctggatctaaaaaactcaatccagcatc

SEQ ID NO: 59349 - DNA, 300 bp, Zea mays
cgatctggtacgagatggccggcaagatgaaggagttagacggcgccagcctgccaagatcttcattggcgggctctccaaggatacaagcatgagtacattcaaagaacattttgggaagtatggggatataattgatgctgtcataatgaaggaccgctacacacaaaagcccagaggctttggctttattacttttgctgatcccactgttgttgacagagtgattgaggatgaacatgttatcaatggaaaaccggttgaaattaagagaacgatccctaagggagctgctccttt

SEQ ID NO: 59350 - DNA, 296 bp, Zea mays
gatgaaacctggcgccggctcatgaccagcaacagcaagttaacagcaagattgcttcgttccagcagttcataacccatgacttcgacgccagcgaccatggcacgtcaagcttccctgtcgctgctgttcataggatcggcatactagatatccggattttcaacactgacaggcacgctcagcaatgtgctggtgaggaagcttaacggtggcacaggccgctttggttgccagacagagctgttcccaattgatcatggcatgtgcttgccggagaacttggaggaccctta

SEQ ID NO: 59351 - DNA, 266 bp, Zea mays
agagatgaaggggttcatccagagcgattacgtgcacctgttcccgcagttcgtcgatgacatcaccaggcattacagagacgggaagatcgtgtatgtggaagacatgagcgttgggctggagagtgggccggcttccttcgtcggtctgttcagcggtaaaaatgttggcaagcaggtcgtctgtgtgtcgcgggattgaaaggcctggattttgttccctactggccagtacccttaaataaaatcaggagaacattattttc

SEQ ID NO: 59352 - DNA, 297 bp, Zea mays
gaggaaccgggagcggcactgcagcggccgagggcggtcacgcgaggcatggatagataccaaagggtagagaagcctcggaatgacacgccaatcagccacaatgagatcagaatcactactcaggggaggatgaggaactatatcagctatgggatgtcgctgcttgaggaaaatgggacatgatgagattagtatcaaggcaatgggacgggccataaataagacagttatggttgttgaattgatcaagagaagggttggaggtcttcatcagagcactgctactgaatctgt

SEQ ID NO: 59353 - DNA, 296 bp, Zea mays
ggaagctcgggtacggcacgcagcgggagcgcctggggaaggactccatcaagcccttcgacgcctgctgcctctgcctcaagccgctcatcgacccgctctgctgccccaagggccataccttctgcaaggagtgcatccttgagtgcctcctcgcccagaagaaggacatcaagcgtaagctagcagctcacgaggcccagaagaagcaagagaaggaagaggaggaggaaaagctaattctgcaaaaggctaaggagttggatgcctttgatcagcaaaatcatggggctgtt

SEQ ID NO: 59354 - DNA, 292 bp, Zea mays
gaaagaaaagaagaaaaagaagatcaaggaggtttctcatgagtggtcattggtcaacaagcagaagcccatatggatgaggaagccagaagaaatcacaaaagaagaatatgctgccttctataagagcttgacaaatgactgggaggagcatctggctgtgaagcacttctctgtggagggtcaactggagttcaaggctgttctctttgttcctaagagggccccctttgatctctttgacaccaagatgaagcaaaacaacatcaagctctatgtgcgcagggtgttc

SEQ ID NO: 59355 - DNA, 289 bp, Zea mays
ccaaggagttcgattcgtttgaggatatcctcgggctctacgagctgggcccagaggcacccaacaacccactgatagcagagatcaggaagaagatccccagcgagttccttcgaagcattctgccgaacggtagccatgaccacccgctaaagatgccccttccaaatgtcatcaaatcagatgtgttgaaaaagtgctccggagtttaagtttggctggaggactgacgaagagttcgcgagagagacacttgcaggcgtgaacccagtaatcatcaaacgtctga

SEQ ID NO: 59356 - DNA, 289 bp, Zea mays
gagaaaccggaatccatgaacgcgtttgctcttatttcgaggtcgcagggtttcaaccttggaaatttgtttgagaaggagatgatgggaatggtaaagagggaaacatctttcacgtctcaatgcacagcacaggagatcatgacaaaaatagaggatgcatgtgggccactcggtttcaacgtgcggaaacaagattacaagatgaaattgaaaggtgacaaatctggaagaaaaggtcacttatctgttgcaactgaggtttttgaggtgcccatcactcacatgg

SEQ ID NO: 59357 - DNA, 289 bp, Zea mays
gtgatctggatgtgaatgatcaggaatttattgaagctacaaaggagccaggccttaccttcatggttgcaaaatttgatggcattcttgggctaggctttcaggaaatatctgttgggaatgcaacacctgtgtggtataacatggtaaaacaaggtctcatcagtgaccctgttttctctttctggtttaaccgacatgctggtgaaggagaaggtggtgaaattgtgtttggtggaatggattctagtcactacaagggtgatcacacctatgtcccagtcactca

SEQ ID NO: 59358 - DNA, 293 bp, Zea mays
agagagcgaggcatcttgctgggtgctgtccatggtatcgtggaggctctgtttaggaggtacacagaacaaggaatggatgaagagtcggcctacaaaaacactgtcgagggcataactgggatcatctcgaaaaccatctcaaagctcgggatacttgaagtgtacaactctttgagcgaggaaggcaaaaaggagttcaacaaggcttatagcgcatcgttttacccatgcatggatatactctacgaatgctatgaagatgtggcctctggaagtgaaatcgggagcgt

SEQ ID NO: 59359 - DNA, 307 bp, Zea mays
ctagtcctctgttacttctcccgccgccgccaatcccctcccgttctccgccaccgccaatcccctcccgtcctccgccacctctgctgagagcgagaagagatggccggcaagggtgatgggccggcaatcggcatcgatctcggcacgacctactcttgcgtcggtgtgtggcagcacgaccgtgtcgagatcatcgccaacgaccagggtaaccgcaccacaccctcgtacgtcgccttcaccgactccgagcgcctcatcggagatgcggccaagaaccagtcgccatgaaccccatcaacac

SEQ ID NO: 59360 - DNA, 301 bp, Zea mays
catgcatggtaaaatcccgacattgaagatttctctgatccagatcttccgtgcacatctgtggcagaagatccatgaaagtgttgttatggatctttgccaagttttagaccaggagtaggatgcacttgagattgagactgtgcagaaggagacaatacatcccaggaagagttacaagatgaacagttcctgtgctgatatccttctctttgctgctcatagatggcagatgtccaaaccaagcttagtttctgagtcgaaggatgtatttgatcgaaagcaagtaacaagtattgga

SEQ ID NO: 59361 - DNA, 155 bp, Zea mays
catgatgtgaacaacatcgaggaagagatgcgcaggaagcaggctcatgctgctcaggaggcgtacgaggaggacgacgagatgcctggcggagccaaagagtgcagtgcgctcaacagtaagcagactaccaaaatgggattcaaggcactttg

SEQ ID NO: 59362 - DNA, 296 bp, Zea mays
ctctcaaaccctagccgcctcctgcaagtttcagagctcaggaatctgcgccatggcgagtgagacggagaccttcgcatttcaggctgagatcaaccagctgctctcactcatcatcaacaccttctactccaacaaggagatcttcctccgcgagctatagaacaactcttccgatgcgctggacaagatcaggttcgagagtctcactgacaagagcaagctcgatgcgcacctgagcttttcatccacttgtcccagacaaggccacgaacacgctctccatacgacagcgg

SEQ ID NO: 59363 - DNA, 292 bp, Zea mays
ggcttccattttgcaataagtaccaagtggagcccaggtcaccagctgcctactttggtacagaagctagccctccagatgcatgtgaccgtaaagagtggttttctttgaaggagatgcacaaagatttggcagctcgagtgaattcagttgttaatttagggaagatccctgaagtttcaaaatgcaagcttatgggcttctccaggtggagcgagaatgcaagttttagagatcacccttcaatagttcagattttaattgatggaacaaaaggaaagcaactgatgtt

SEQ ID NO: 59364 - DNA, 289 bp, Zea mays
aagcttggcatccatgaggactcgcagaacaggggcaagattgctgagcttctgagataccactccacgaagagcggtgatgagctgaccagcctcaaggattatgtgacgaggatgaaggagggacagaacgacatctactatatcactggtgagagcaagacggcagtggagaactcccctttcctggagaagctgaagaagaggggctacgaggtcctgtacatggttgatgccattgatgagtatgctgttggtcagctcaagggtttgagggctagaagcttgt

SEQ ID NO: 59365 - DNA, 295 bp, Zea mays
ggctgttctttctgctgctgatgcttccccggtctcagctatcgggtttgatggctatgagaagcgccttgagatcacattctctgaggcacctgtctttgtggaccctcatgggcgtggtttgcgtgccctctccagggcccagattgcctctgttctggatcttgcacggtgcacaattgtgtctgagctctccaacaaggatttcgactcatatgtcctttctgagtcaagcttgtttatctatcctctgaagattgtcatcaagacctgtgcgataccaagctcctgctca

SEQ ID NO: 59366 - DNA, 289 bp, Zea mays
tggtattatcgctcctttgttgcaactgcttcaaggagcagagtttgatatcaagaaggaggctgcttgggccatctcaaacgctacctctggtggttcccatgagcaaatcaagtacttggtgtctgagggctgcatcgtgccgctgtgcgaccttcttgtttgccctgatccgagaattgtaacagtttgtctggagggtcttgagaatattcttaaagtaggggagcacgacaagaccatgggcgcaacaggtgacattaatgtttcgctcagatgattgacgacg

SEQ ID NO: 59367 - DNA, 287 bp, Zea mays
ggctagaacgtttgcagcagcgctgaattgccgttccccaggtgagaaccagccatgtggacgctgtgacgagtgcatgcccatattctcgggaagcagcagcagtgtggtagagattgatgcttccaaacttgattgcaagtctagggtcgcggccttgctcaggaatgcctgagaagtccttgcctcttcacacttcaaggttctgatcgttgatgattgccagcacatggacaaggagggatggtactctatctacaatagcctgaagggattcctgagagcac

SEQ ID NO: 59368 - DNA, 293 bp, Zea mays
gccaccgccacctacgcaacaccagacgctccagcagtccagcactcggagctcgcgcgcccgacggcccaccatgatcatccccaagaagaaccgcaatgagatctgcaagtacctcttcaaggagggcgtgctgtatgccaagaaggactacaacctggcgaacacccacagattgatgtgcccaacctccaggtgatcaagctcatgcagagcttcaagtccaaggagtatgtcagagagaccttctcctggcagtactactactggtactcaccaacgatggcattgag

SEQ ID NO: 59369 - DNA, 288 bp, Zea mays
ctccgattatactgccaaactgtctgactttggcctcgcaaaagatggccctgaaggtgatcagacgcatgtgtcgacacgggtgatgggaacctacggttatgctgcccctgaatatgtgatgaccggatcacttgactgctcggagtgacgtgtacagcttcggcgtggtcctgctggagctcctgacggggcgcaagtcgatcgacaagtcgcggcccagcagggagcagagcctggtggactgggcgctcccgaagctcaacgacaagagaggtcctccagatc

SEQ ID NO: 59370 - DNA, 281 bp, Zea mays
acagaagttgatggtagggtattgcagccacctaagcttaaagctgggaatggtgaagacatttttacacgcgatggtagatggaacttcaacaataagaggctcattagagcttgtagtgtcgagaaatgggcggtggtaaacttttctgcacgatgcaatgtcagggatcttgtccgggatctcatcaagtgtggaggcatgaagggcattatggttgatgctccttttgctgtatttgatgagatccttcaatgagacgtcactgctataagaaggtg

SEQ ID NO: 59371 - DNA, 273 bp, Zea mays
cccgtgctccgcaaccgctgagtgagaagaagagatggccggcaagggcgatggcccggctatcggcatcgatctcggcacgacgtactcttgcgtcggcgtgtggcagcacgaccgcgtcgagatcattgccaacgaccagggtaaccgcaccacgccctcgtacgtcgccttcaccgactccgagcgcctcatcggagatgcggccaagaaccaggtcgccatgaaccccatcaacacgtctttgatgccagcgtccatggcagaggttca

SEQ ID NO: 59372 - DNA, 301 bp, Zea mays
cgtggcacaactgcccccatccctcccggatggaactggacctacgagttccagctcaaggaccagatcggcagcttcttctacttcccgtcgctcggccttcagcgagctgccggcgggttcggccccatcaccgtcaacaaccgcgtcaccgtgcccgtccccttcgaccagcctcatggcgacatcaccctgttcatcggggactggtacaccaagggccacgttatatgacagtgcgctggttccggatggccttccctacgaaatcgttggagttagcaggcgaaactatcgcttc

SEQ ID NO: 59373 - DNA, 291 bp, Zea mays
acctcgcctgcgatcttcgtagcctccgtcgcgtcgagcatcgatcatgtcggcctactgcggaaagtacaaggatgagctcatcaagaatgctgcctacattggcacccccggcaagggtatccttgctgctgatgagtccactggcaccattggcaagcgcctttccagcatcaatgtcgagaacgttgaggagaaccgccgtgccctccgtgagctcctattctgctgccctggtgctctccagtacatcagcggtgtgatcctcttcgagggaccctgtaccagaag

SEQ ID NO: 59374 - DNA, 280 bp, Zea mays
ggaggagcagcagcagcaggcggcgccgaggagcggcatcccactcagtgcttgcaaccatggctaggggattgaagaagcacttgaagaggctcaatgcgcccaagcattggatgctcgacaagcttggcggagcttttgctcccaagccatcttctggacctcacaagtccagggagtgccttcctctgatcctcatcatcaggaacaggctcaagtatgctctgaactaccgtgaggtcatttctatcctgatgcaacgccatgtactgttgatggc

SEQ ID NO: 59375 - DNA, 256 bp, Zea mays
tgcacctcagcttcaagatgcagatctttgtgaaaaccctgactggcaagactatcgacctcgaggtggaatcgtctgacaccattgacaacgttacaggccaagatccaggacaaggcgggcatccccccagaccagcagcggctcatctttgctggcaaacagcttgaggacgggcgcacgcttgctggatacaacatccagaaggagagcaccctccaccttgtgatccgtctcaggggaggcatgcagatct

SEQ ID NO: 59376 - DNA, 292 bp, Zea mays
catgatgtgaacaacatcgaggaagagatgcgcaggaagcaggctcatgctgctcaggaggcgtacgaggaggacgacgagatgcctggcggagccaaagagtgcagtgcgctcaacagtaagcagactaccaaaatgggattcaaggcactttggttgctcttcaattatgcgagtgcgcctgtggactgtatggttctatggttttgctgtcgctgagctacaaagtaggaagctgatgcgcccctggctctgcaagcgggggaatgtatccttttttgctgcaactgaa

SEQ ID NO: 59377 - DNA, 280 bp, Zea mays
gcctccgctccactcttgccccccccctggcaccacactagcctagtgagtagtgcagcagtcttgctcggttgctcctacctgtcctgcacagcacaggagcagagcccaggaccgtcggcaaaaggggagcggccatgaagtacgtgctggtgaccggaggggtggtgagcggcctcggcaagggcgtgacggccagcagcatcggcgtcgtgctcaaggcctgcggcctccgcgtcaccaccatcaagatcgatccatacctcaacactgatgctgg

SEQ ID NO: 59378 - DNA, 293 bp, Zea mays
gaaggatatcactggcaaccccagggctctccggaggctgaggaccgcttgtgagagggcgaagaggactctgtcttccactgcccagaccacgattgagattgactcgctgtatgagggcatcgacttctactccaccatcacccgtgccaggtttgaggagctcaacatggacctgttcaggaagtgcatggagcctgttgagaagtgcctgagggatgccaagatggacaagagcaccgtccatgacgttgtacttgttggtggctccactaggatccccagggtgcagc

SEQ ID NO: 59379 - DNA, 287 bp, Zea mays
cgccgccgccgcctccctattcctcggagaggagaagccgccgtcgcagcaatcacagcagcccggagaacggccaggtccgacaagatgcagatctttgtgaagacgctgacagggaagaccatcaccctcgaggtcgagagcagcccaccatcgacaatgtcaaggccaagatccaggacaaggaagggatcccgccggaccagcagcggctgatctttgccgggaagcagctggaggatggccgcacccttgcggactataacatccaaaaggagtctacgctc

SEQ ID NO: 59380 - DNA, 257 bp, Zea mays
caggagtctctagggggctaattgaaaaagtacaatagacgtgatctttgcgaaaggctcgtctctatatgattcttcatacatattgtcttttatctgcatttatggtctagagtctctaggttgtattgaaaagtttgttaatggtcccttgtatttagaaaactggaccactgtctaaaggttgtacgtgcccttagttgtactttatggttggagaatcgttctgatgtctctcgactatacatgccttaaga

SEQ ID NO: 59381 - DNA, 277 bp, Zea mays
cagcaggggaagaaggcaaaggaggggagaagatgtagttcacccacttaaagtttctctggaatatctttacaatggcacctcaaagaagctctctctttcgcgcaatgtcatctgctccaagtgcaagggcaagggctcgaagtctggtgcctcaatgaggtgccctggttgccagggctcaggcatgaaagtcactattcgtcagctgggcccttccatgatacagcagatgcagcagccttgcaatgagtgcaaggggactggagagagcatc

SEQ ID NO: 59382 - DNA, 290 bp, Zea mays
gtgtatcaaaattgacggcaagacacctttaactacaagacaaaccttagtcacagatttccaaaacaatgatgacgtcaaggcagcagtgttatccatcaaagccggaggtaccgggataactttgacagcagcgagcacggtaatctttgccgagttatcatggactcctggggacatcattcaagctgaagatcgcgcgcacaggatcggtcaggtctcgtccgtgaacgtgtattatcttcctgcgaacggtactatagatgatcttatgtgggacgttgttcagg

SEQ ID NO: 59383 - DNA, 283 bp, Zea mays
gtatattgtgaggggtgggagggatctgttcccgctgttaccggaggccttcaagggaatcaaacagatcggtgtaatcggctggggctcgcagggtcctgcacaagctcagaacttgagagactcacttgttgaggcaaagtcagatattgttgttaagattggtctccggaaaggttctaaatcttttgaagaagcccgagcagcaggattcaccgaagagagtgggacgctgggtgatatatgggagactgtatcaaacagtgatcttgttttgctactg

SEQ ID NO: 59384 - DNA, 282 bp, Zea mays
ctcaggcatgaaagtcactattcgtcagctgggcccttccatgatacagcagatgcagcagccttgcaatgagtgcaaggggactggagagagcatcaatgagaaggaccgctgtccagggtgcaagggtgagaaggtcattcaagagaagaaggttcttgaggttcatgttgagaaggggatgcaacacaaccagaagatcaccttcccctggtgaactgatgaagcgcctgatactgtcactggagacattgtattcgtcctccagcagaaggatcactc

SEQ ID NO: 59385 - DNA, 277 bp, Zea mays
aaaaccgatcaccatttcgaaatggttgatggcgtcattcatgtgtaccccagtaaagcttctaaagaaagactctatccagttgccgatgcaactaccttctttactgatatgcactacgtccttcgtgtgttggctgctggggatatccgaaccgtgtgtcatcaccgtttaaatcttctagagcaaaaatttaatcttcacttgatggtcaatacggatagagaactgcttgctcagaaagctgcacctcaccgggacttctacaatgttagga

SEQ ID NO: 59386 - DNA, 280 bp, Zea mays
ggcgaggagggcaggaagaccgaagaccgagccgtgcgggtggtcgggacgggaacgggacaggaccccaaaatctcagatccttcctgcccgcccgcccgtgcccgtcgacgcgtcgttcttgccggccgagccccacctccgccctctcctcctccagggggatcggatacgccacaggctgcgcgatggtgctgtgggtcttcggctacggctccctcatctggaaccccggcttcgacttcgacgacaaaatcctcggcttcatcaagggctacaa

SEQ ID NO: 59387 - DNA, 277 bp, Zea mays
cagacaccatcgacaatgtcaaggccaagatccaggacaaggagggcatcccaccggaccagcagcgtttgatcttcgctggcaagcagctggaggatggccgcacccttgcggattacaacatccagaaggagagcaccctccacctggtgctccgtctcaggggtggtatgcagatctttgtgaagacactcactggcaagacaatcacccttgaggtggagtcttcggataccattgacaatgtcaaggccaagatccaggacaaggagggcat

SEQ ID NO: 59388 - DNA, 288 bp, Zea mays
gaagattgaagataacaacactcttgtcttcattgtcgacctcaaggcagacaagaagaagatcaaggctgctgtcaagaagatgtatgacattcaggccaagaaggtcaacaccctgatcaggcctgatggaaagaagaaggcttacgtgaagcttatgcctgactatgatgctcttgatgtggccaacaaaatcggcatcatctaaagttaccgcgtcaggcatctgctgtgctctatttccatgtgaaaccagagtttttgtagctatggctcagtggctccatg

SEQ ID NO: 59389 - DNA, 214 bp, Zea mays
ttgggatgtttactttcactgggctgaatagcgaacaagtcgcattcatgaggcaggaataccacatttatatgacatctgatgggaggatcagcatggccggtttgagcatgaggactgtgccccatcttgcagatgccatacacgctgcagttactcaactgacatgaggctagtatcgcagctttcgtgaataaaacctgaatcacccaca

SEQ ID NO: 59390 - DNA, 122 bp, Zea mays
cgcgtcattatgctgattgggctgataagatccatgggctcattctgccggctgatggcccacaggatgtacacaacgtgcatgtgccacttggtgtcgcaggtcagatcatcccatggaac

SEQ ID NO: 59391 - DNA, 301 bp, Zea mays
gacctgaccaattcaaggcgattaatgatgaggggatgccaatttaccagaggcctttcatgaaggggaagctgtacatccatttcacggtggagttccctgactcgttggcaccagagcagtgcaaggctctcgagacagtacttccaccaaggccttcatccaagctgacagacatggagatagatgaatgcgaggagacgactatgcatgatgtgaacaacatcgaggaagagatgcgcaggaagcaagctcacgctgcccaggaggcgtacgaggcggacgacgagatgccgggcgg

SEQ ID NO: 59392 - DNA, 214 bp, Zea mays
agcggcaccatgctgctgagttacttcctactccgctttatatagcatacactcagctgctagggcagaaagaagcatttggagagaatattgaagtagagatcgcgggaagcacaaaggatgcccaaatatttgctcaacaacaagccaagaaggaaaacagagctctttcaagtggcgacaacagaatggatgatgatgtgattgatgatga

SEQ ID NO: 59393 - DNA, 309 bp, Zea mays
cctatttaccagaggcccttcatgaaggggaagctctacattcatttcacggtggagttccccgactcgctggcaccagagcagtgcaaggctctcgagtcggtacttccgccaaagccttcgtccaagctgacagacatggagatagatgaatgcgaggagacaaccatgcatgatgtgaacaacatcgaggaagagatgcgcaggaagcaggctcatgctgctcaggaggcgtacgaggaggacgacgagatgcctggcggagccaaagagtgcagtgcgctcaacagtaagcagactaccaaaatg

SEQ ID NO: 59394 - DNA, 218 bp, Zea mays
tgcatccttcggcctctgtactcattccagctcttcgcacggtgggtattattgtaactggggatgacatgcagactcagtgtgtcattgacaatcaagcacttccatgccttttgaatcttctgactaccaaccacaagaaaagcatcaagaaagaagcatgctggacgatctcaaacatcacagctggtaacaaggagcagattcaggctgtgatc

SEQ ID NO: 59395 - DNA, 176 bp, Zea mays
gtttaccgacagggaaacgaaggcgatcgacagagtcagaggccttgacaaagagacccatcacacaagcacacttattgtttcggagtttatgggttgctccccatctctgagtggtgctttcagggtaaatccttggagcgtcgatgatgtggcggatgccttatgccgcgcaa

SEQ ID NO: 59396 - DNA, 175 bp, Zea mays
aacgtgcaccgtgtgatgccgcaggcttcggcgccaccatcagggccatcaacggcgccctcgagtgcaacgggaacaaccccgcccagatgaacgcgcgcgtcggctactacaagcagtactgccagcagctccgcgtcgacccagggcccaacctcacttgctaggcgacggc

SEQ ID NO: 59397 - DNA, 213 bp, Zea mays
ctccattctcagccgccgccaatcccttcccgtgctccgcaaccgctgagtgagaagaagagatggccggcaagggcgatggcccggctatcggcatcgatctcggcacgacgtactcttgcgtcggcgtgtggcagcacgaccgcgtcgagatcattgggaacgaccagggtaaccgcaccacgccctcgtacgtcgccttcaccgactccg

SEQ ID NO: 59398 - DNA, 188 bp, Zea mays
cccaaaacaaaccctaaccggccggcccaattctcacgcgctcgccgcctaggagcattcacgttggcggcgggcggcggctcggttcctctcctccaccgcacctccaagaatccacctccacgactgagctgacggctcggtagcgccatggcagttcaccggctcccaccttccccatccggcct

SEQ ID NO: 59399 - DNA, 170 bp, Zea mays
cgaacggcaagggctacgccgagatcgtgtgcccgcaccgccagtcgcagggcggcgagagcgagcgcgagcgcgacaagggcaggaggagcgaagaagaagaagaagaatcgtctgaggagcaggaggaggccgggcaggggtaccacaccatccgggcgcggctgtca

SEQ ID NO: 59400 - DNA, 207 bp, Zea mays
cgccgtctgccttctgcgcctccatttcggcctctgtcccttgcaagttcaatctcacctccaaccatgggtaaagagaagtcccacatcaacattgtggttattggccatgtcgactctggcaagtcgaccaccacaggacaccttatctacaagcttggaggcattgacaagcgtgtgatcgagaggttcgagaaggaggctgct

SEQ ID NO: 59401 - DNA, 181 bp, Zea mays
cggagcaagaggaggaggaggaacgcgaagaacgccacggcggccatggggagagggaacgccacggacgtgaggagcgggagaaagaggaggaggaacgcgaaggacgccacggccgcgggcgccgcgaggaggtggcggagacgctcatgagcctggtgaccgccaggatgtgaggggc

SEQ ID NO: 59402 - DNA, 169 bp, Zea mays
cagccatcaaaagactgggtgaaacgtatacagcatgagtggaaagtcctagagagagatttgccagatactatatttgtgagggcatatgaggatagaatggacctgcttagaggtgtcattatgggaccggctgggactccttaccatgacgggctcttcttctttg

SEQ ID NO: 59403 - DNA, 206 bp, Zea mays
gggcctgtggctgcaataaggatgccgatgttaagggtgtcaaatttcaaaggagggactccggaagtgatgcagacgagctatgctatcttggttctggttttgcctaatgatggttcattagggtggggtcgaagagagttggagattgttgaggtagttgctgaccaagttgcagtcgctctgtcacatgctgcactcctaga

SEQ ID NO: 59404 - DNA, 303 bp, Zea mays
gcgatgatggtggatcctccgaatggaatcgggaaccaaggaaagcattactactcaatgtggcagaccttatttgagatagacaccaaatatgtaccgatcaagcccattggtcgaggagcttatgggatagtttgttcatccattaatcgtgaaacaaatgagaaagtagcaataaagaagatacacaacgttttcgacaaccgtgtggatgcactacggaccttgcgggagctgaaactccttcgccatctccggcatgagaatgtcattgctttgaaggatataatgatgccaatacac

SEQ ID NO: 59405 - DNA, 302 bp, Zea mays
agcggcctcaaggtcaaggagtacgagctgctcaggaggaacttcagcgacaccggctgcttcgggttcggcatccaggagcacatcgaccttggtatcaagtatgatccatcaacaggcatctatgggatggacttctacgtcgtgcttgagcgtgctggctatcgcgtcgcgcgccgcaggaggtgcaagtcccgtgttgggattcagcatagggtgaccaaggaggactccatgaagtggttccaggtcaagtatgaaggtgtcatcctcaacaaggctcaggccagcacgatttaaac

SEQ ID NO: 59406 - DNA, 299 bp, Zea mays
aacctgaccaattcaaggcgattaatgatgaggggatgccaatttaccagaggcctttcatgaaggggaagctgtacatccatttcacggtggagttccctgactcgttggcaccagagcagtgcaaggctctcgagacagtacttccaccaaggccttaatccaagctgacagacatggagatagatgaatgcgaggagacgactatgcatgatgtgaacaacatcgaggaagagatgcgcaggaagcaagctcacgctgcccaggaggcgtacgaggaggacgacgagatgccgggc

SEQ ID NO: 59407 - DNA, 212 bp, Zea mays
gccaccgccaatcccctcccgtcctccgccacctctgctgagagcgagaagagatggccggcccgggtgatgggccggcaatcggcatcgatctcggcacgacctactcttgcgtcggtgtgtggcagcacgaccgtgtcgagatcatcgccaacgaccagggtaaccgcaccacaccctcgtacgtcgccttcaccgactccgagcgcctc

SEQ ID NO: 59408 - DNA, 294 bp, Zea mays
ggagaaagatagtaaacccccgtatcatcctgttggactgccctgttgagtataagaaaggagaaaatcagaccaacgctgagttgatgaaggaagaagattggcaggttctgttagagatggaggaagaatacataaagaacctgtgcggtcaaattctaaaattcaagcctgatttagtcataactgagaaagggctcagtgatctcgctatccattatttgagcaaggctggggttagtgcaatccgtagacttaggaaaactgacaacaacaggattgctaaagcttgtg

SEQ ID NO: 59409 - DNA, 299 bp, Zea mays
ttgtgagactgctatgtctaaagaagtggagatcagacaggctgcatttgaatgccttgttgcaatagcatccacatattattcacacttagacccttatatgcaaaccatattcgacctgacagctaatgcagtgaaaggcgatgaagaaccggttgcacttcaagctgtcgagttctggagcgctatttgtgatgaagagattgcactccaagatgaatatgagggatctgaggatggcaactctactgtacactttcgcttcattgaaaaagccctccctttactcgttccgatgc

SEQ ID NO: 59410 - DNA, 296 bp, Zea mays
gtttgccgacagggaaacgaggagatcgacagagtcagaggccttgacaaagacacccatcacacaagcacacttattgtttcggagtttgtgggttgctccccatctctgagtggtgctttcagggtaaatccttggagcgtcgatgatgtggcggatgccttgtgccgcgcaactgatctatctgaatctgagaaacggttgcggcacgaaaagcattatcgctatgtcagtactcatgatgttgcttactgggcgcacagctttgctcaagatctggaaagagcatgcagaga

SEQ ID NO: 59411 - DNA, 303 bp, Zea mays
ctaaaaccctaacccctagccagcggctaccgccgccatccgccggcgagatggcgctgtacctgctgttcgagtcggcctccggctacggcctattccatgcgtacggtatcgatgagatcgggcagagcgttgaggccgtgcgctcctccgtgctggacctcgaccgtttcggcaaggccgtcaagctcactgccttcaatcctttctcctctgccgtcgacgcgctcaaccagtgcaacgccatctctgaaggaatcatgaccgatgagttgaggagcttcctggagctgaacctgccga

SEQ ID NO: 59412 - DNA, 293 bp, Zea mays
  unsure (1)..(293): unsure at all n locations
gaaacatgggagaggagggtaagcgagagtctcgaaagagtgtcggtggaagtaggcctaaccttattttgcatttgttgttgactctattggatctgcgccaaaatctggtgtcccttgcaaatcgtgcagcaagtcattcatcagtgagacggcacttcaggctcactcgaaggcgaacatngggggcaagtgagtcgcaggtccaatagagtcaacaacaaatgcgaaacatgggagaggagggtaagcgagagtctcgaaagagtgtcggtggaagtaggcctaacctt

SEQ ID NO: 59413 - DNA, 291 bp, Zea mays
gtgatccagtggttcgaggtgctggacgggctgctgggccggcactggcgcaacgccgggctggccttcaactgcaccttcctcctcttcggctccgtcatccagctcatcggctgcgccatgcaacatctactacgtcaacgaccggctggacaagcggacgtggacctacgtcttcggcgcctgctgcgccaccaccgtcttcatcccctccttccacaactaccgcgtctggtccttcctgggcctcgtcatgaccacctacaccgcctggtacatggccgtcgcctc

SEQ ID NO: 59414 - DNA, 294 bp, Zea mays
aaaccctagtcctctgttacttctcccgccgccgccaatcccctcccgttctccgccaccgccaatcccctcccgtcctccgccacctctgctgagagcgagaagagatggccggcaagggtgatgggccggcaatcggcatcgatctcggcacgacctactcttgcgtcggtgtgtggcagcacgaccgtgtcgagatcatcgccaacgaccagggtaaccgcaccacaccctcgtacgtcgccttcaccgactccgagcgcctcatcggagatgcggccaagaaccaggtcg

SEQ ID NO: 59415 - DNA, 291 bp, Zea mays
accggttgaaattaagagaacgatccctaagggagctgctcctttgaaagatttcaagacgaagaagatttttgttggtggattaccctcagctctaaaagaagatgaattcaaggaattcttttccaagtttgggaaggttgtggagcatgaaatcatccgtgaccatgcaaccaaccggtcacgtggatttggttttatagtctttgatgcagaaaaagcagtagatgatttattacataagaagggcaatatgattgatctaaatggttctcaggtggagatcaagaa

SEQ ID NO: 59416 - DNA, 285 bp, Zea mays
gcgatgatggtggatcctccgaatggaatcgggaaccaaggaaagcattactactcaatgtggcagaccttatttgagatagacaccaaatatgtaccgatcaagcccattggtcgaggagcttatgggatagtttgttcatccattaatcgtgaaacaaatgagaaagtagcaataaagaagatacacaacgttttcgacaaccgtgtggatgcactacggaccttgcgggagctgaaactccttcgccatctccggcatgagaatgtcattgctttgaaggat

SEQ ID NO: 59417 - DNA, 189 bp, Zea mays
ggactacaacagggaaccgtgtctttggtgccctcaagggagcattggatggaggcctggatattcctcacagcgagaagaggtttgctggattcaagaaggacgacaagcagttggatgctgatacccaccgcaggtacatctatggtggcctcgttgctgactacatgaagaaccttgctgaagagg

SEQ ID NO: 59418 - DNA, 297 bp, Zea mays
ggggggccgcctctgcgccgccaacttcacgtcgggccccgccgcgggccgcttctgctgggaccgccagccggagtacagcgcgtacagggagagcagcttcgggcacggcgtcctggaggtcaggaacgacacgcacgcgctctggcggtggcaccgcaaccaggacctccatgccgccgccgccgccaacgtcgccgccgacgaggtctacatcgtcagggagcccgacaagtgcctcgccaagacggccagattgttggcctattgattgatccatcactcctagctactcct

SEQ ID NO: 59419 - DNA, 119 bp, Zea mays
aggagaaagaaccttcatgactttgagagccttgcagtgttctttggagatagtgcatgtgaagcttctacatacagccttgtcaccatgttcgataaattggcctcctctccagaata

SEQ ID NO: 59420 - DNA, 281 bp, Zea mays
cgtttgctccccaatcccttcggcccgcccgctcgacgtgatcccaccggcagccatggatccatacaagcaccgcccgtctagtgggagcaactccagcttctggaccaccaactccggcgcccccgtctggaacaacaactctgccctcaccgtcggacagcgaggtccaatcctccttgaggattatcatctaatcgaaaagcttgctcagttcgacagagaacgtatccctgaacgtgttgtgcatgcacggcgagccagtgccaagggtttctttg

SEQ ID NO: 59421 - DNA, 285 bp, Zea mays
cgcaagaaaatattgttagacattgcagatgctttggaacaaaatgaggatctaattagaactgaaaatgaagctgatgtatctgcagcacaagatgctggatatcagaaatctttggttgatagattgacattgaagccagaaaagatagcaagccttgcgaaatccatacgcactcttgcaaatatggaagacccaatcaaccagatactcaaaagaacagaggttgctgaagacttagtgctcgaaaaaacatcttgccctctgggtgtgctgttgattgtt

SEQ ID NO: 59422 - DNA, 287 bp, Zea mays
gccgccgccgcgtccgcctcgccaagcgcacagccgccgcagcacatcgctctctcgatctcagccatggcggaggtggagcagcaacaggacacgccgaagctcttcaaccgctggaccttcgatgatgtccaggtgaacgacatctcgctgaacgactacctcgctgtgaacgcgacgaagcacgcgatgtacctgccgcacaccgcgggacgttactccaagaagcggttccgcaaggcgcagtgcccgatcgtcgagcgcctcacaaactcgctcatgatgca

SEQ ID NO: 59423 - DNA, 289 bp, Zea mays
gaagctcggttgttgtatcagtgctgtcgccgagggctcggaagactacaagatggttctcaagtacctggagaagacgtacgagcctgtcgaggtggaggatgtggtctatggtgtgtctgtcgagaggatatatgctgttgaatccagcgcattccctttgtacgaggaaatcaggaacctgccaaacaaaatccttctctggtgtgggactagaagctcgaacttgcttaggcacctccacaaagggttcctgcctgccgtctgccatctgcctgtgccagggtac

SEQ ID NO: 59424 - DNA, 290 bp, Zea mays
tttacaatggaatctcaaagaagctctctctttcgcgcaatgtcatctgctccaagtgcaagggcaagggctcgaagtctggtgcttcaatgaggtgccctgggtgccagggctcaggtatgaaagtcaccattcgtcagctggggccttccatgatacagcagatgcagcaaccttgcaacgagtgcaaggggactggggagagcatcaacgagaaggaccgctgcccagggtgcaagggtgagaaggtcgttcaggagcgagaagttcttgaggttcatgttgagaag

SEQ ID NO: 59425 - DNA, 294 bp, Zea mays
catgagtggtcattggtcaacaagcagaagcccatatggatgaggaagccagaagaaatcacaaaagaagaatatgctgccttctataagagcttgacaaatgactgggaggagcatctggctgtgaagcacttctctgtggagggtcaaagagagttcaaggctgttctctttgttcctaagagggccccctttgatctctttgacaccaagaagaagcaaaacaacatcaagctctatgtgcgcagggtgttcatcatggacaactgcgaagagctgatccctgagtggctg

SEQ ID NO: 59426 - DNA, 284 bp, Zea mays
agaggctctaggaattccctatcgtgtgggcaagtttccacttttggctaacagtcgtgcgaaggccattgatgatgctgaaggggtagttaaggtgatcgcggagaaggaaaccgataagattctaggtgtgcacataatggcacccatgccagtgaaatcatccatgaagctgtcatcgccttgcagtatggagcatccagtgaggatgttgctcgaacatgccacgcacaccctaccgtgagcgaggccctcaaggaggcttgcttgcaaaccttcaataa

SEQ ID NO: 59427 - DNA, 298 bp, Zea mays
gccggatcgggcgctacctcaagaagggccggtacgcgcagccgtgggcactggcgcccccgtctacctcgccgccgttctggagtacctcgccgccgaggttctggagttggcagggaacgcggcgaaagacaacaagaagacgcgcatcatcccgcgccacggctcctggcgatccgcaacgacgaggagctcgggaagctgctggccggcgtcaccatcgcgcacggtggcgtcctccccaacatccactccgtgctcctgcccaagaaggcggcggagaaggcggccagcggcg

SEQ ID NO: 59428 - DNA, 285 bp, Zea mays
agagtccagagtccagacgccagacgccctctacttctcttctctctagttatacatttcaaactcttggccgccgcagcggtctctgttcgccgcgccccgccgcagaaatggcgctgccgaatcagcaggttgtggattaccccagctcaagctcgtcatcgttggcgacggtggaactggcaaaaccacatttgtgaagaggcatcttactggcgagtttgagaagaaatatgagcccaccattggtgttgaagttcaccctctggattttagcactaactg

SEQ ID NO: 59429 - DNA, 282 bp, Zea mays
gcaggctgaaaggtatgaggagatggttgagtatatggagaaggtggctaagactgtagatgtggaagagctcactgttgaggagcgtaaccttctgtctgttgcatacaagaatgtgattggggctcgccgcgcttcatggcgcatgtttcttgtattgaacaaaaggaggagtcccgtaagaacgaagagcatgtgaaccttatcaaggaatatcgtggcaagatcgaggctgaactgagcaatatctgtgatggcatcttgaagctgcttgactcccac

SEQ ID NO: 59430 - DNA, 293 bp, Zea mays
aacagtttgcagccgaagagatctcctccatggttctcatcaagatgcgtgagatcgctgaagcttaccttggcagcacgatcaagaatgctgttgtcacggtccctgcctacttcaacgactcacagaggcaggccacgaaggatgctggggtgattgctggcctcaatgtgctgcgtatcatcaatgagccaaccgctgctgctattgcctatggtcttgacaagaaggcaaccagcgtcggtgagaagaatgtcctcatctttgaccttggaggtggtaccttcgatgtc

SEQ ID NO: 59431 - DNA, 278 bp, Zea mays
ggtgtctgagggctgcatcaagccattgtgtgaccttcttgtctgccctgatccgagaattgtaacagtttgtctggagggtctggagaatattcttaaagtagggctgcatgactagaccatgggtgcaacaggtgacactatgtctctgctcagatgatcgatgaagcggaaggcctggtaaagatcgagaacctacagagccacgataacaatgaaatctatgaaaaggctgtgaagcttcttgagacatactggatggaggaggaagatgacgc

SEQ ID NO: 59432 - DNA, 110 bp, Zea mays
tctgtatacagctagctctaggtggtcagctgcgtctaccacaatgagcatacatgtatggataaatcttctgtgaaagcattcgatgaataagggttgttttcgtgatt

SEQ ID NO: 59433 - DNA, 271 bp, Zea mays
tgaagcagctccagcagctgtagcacggctcttttcaattgactggtacatggataggattaatggcaagcaggaggtcatgattggatattcagactctggcaaagatgccgggcgtctctctgcagcatggcaaattataaagcacaagaagagctcatcaaagtggcaaagcattatggagtcaagttgacaatgtttcatgggaggggtggaacagttggcagaggaggtggtccaactcatctggccatattatctcagccaccag

SEQ ID NO: 59434 - DNA, 97 bp, Zea mays
acgaggccgacgcgcgcagcttccacgacctcgccgagcacgacgtcagcgtctcctacgccaacatcaccgcggggtccatgagcgcgccattgta

SEQ ID NO: 59435 - DNA, 269 bp, Zea mays
cttctatggcggtgttgacattcacgatagacacagggacatgcgccttgacattgacaatatgtcctatgaggagctattagcactcgaggaaagaataggaaatgtcggcactggcctcagcgaggaagctgtgataggttgctcaaacaaaggaaattttcatcttggacactaaaagcatctttggaccctgaaccatgttgtatctgccaggaggagtacgctgatggagacgacctcgggaggctggactgcgggcacgactt

SEQ ID NO: 59436 - DNA, 271 bp, Zea mays
gacacatttgaaaaggacacggaaatgtggcagcaaagagtagaaaactattggagtttgctgggcccaaaggtaaaaccagacactattagaaacatcatggacatgaaggcaaactttgggtcatttgctgctgcatcaaggagaaagacgtatgggtgatgaatgttgtgccacatgatggaccaagcaccctcaagataatctatgatagagggctgataggcagcaatcacgactggtgtgaagcctctcaacctatcctcgaaca

SEQ ID NO: 59437 - DNA, 275 bp, Zea mays
ggccagtatctggttcatggcgcttttcatctgcatctcagtgaccggcatcctggaaatgagatggagcggcgtggccatcgacgactggtggagaaacgagcagttctgggtcatcgggggcgtttccgcgcacctcttcgggtgttccaaggccttctcaaggtcctcgctggcatcgacacgagcttcacggtgacatccaagggcggggacgacgaggagttctcggagctgtacacgttcaaatggaccaccctgttgataccaccgac

SEQ ID NO: 59438 - DNA, 275 bp, Zea mays
gcggcacaccgcgccgcttcttctcctcctcctcctcctcctccttccgagccgagagaaaggctgctgccagagggacgaggacgagcgaggatccttccgagcgatggagcagtacgaggtggtggagcagatcggccgggggcctacggctccgcctacctcgtcctccacaaggccgagcgcaagaggtacgtcatgaagaagatccgcctctccaagcagaacgacaagttccagcggaccgcttaccaggagatgtccctgatggcaag

SEQ ID NO: 59439 - DNA, 267 bp, Zea mays
gtacgagaccggacatttctgctacatcagcgagatcaacaagagcaacgcctactgctccgcgagctacagggagttgccgtgcgccgcggggcagaagtactaacgggcgcggcccgctgcagatctcgtggaactacaactacggcccgccgggagggacatcggcttcaacgggctcgccgaccccaacagggtggcgcaggacgccgtgatcgcgttcaagacggcgctctggttctggatgaacaacgtgcaccgtgtgat

SEQ ID NO: 59440 - DNA, 276 bp, Zea mays
tgtccatcagttagacttaatgactgaccttctaggcacgccatcgatggatacgatttctcgggtccggaatgagaaagcaaggaggtatctaagtagcatgagaaagaaagagacaatttcgttctcacaaaagtttccgatgcagatcctttagccttggatcttttgcaaaggcttttagcatttgatccgaaagaccgtccaactgcagaacaggcattggctcatccatactttaaagggctagccaaggttgagagagagccatcttgt

SEQ ID NO: 59441 - DNA, 282 bp, Zea mays
agttaaacagaggtcctagatctggccggttcaagaaccagaaattgtacggtcatactgtcactattgctgtgaaagggcagtctctcccttctagtgaaagcaagaatgatagtgctgtgcctgatagagcaaagtacaatagagatacttccctgttcagtacgatgctgcaaagttctttgtcattaaatcgtacagcgaggatgacatccacaagagcgtaaagtacaatgtgtgggcaagcacaaccaacggaaacaagaagcttgatgctgctta

SEQ ID NO: 59442 - DNA, 281 bp, Zea mays
gcagactctcctcagtaactatagttttttttgttccttgggaggatagaaaaaatatatccttggttttcttgaacagataacatttcaggtgtgcttctgaagggagatttcgttgaacaggatgaatgcattggcagcaaccagcagaacttcaagctggcagctaagctgctgggcctcgactccaagctggagaagagcttgctcattccattcagggagatcaaggttgaatgcacaatcccaaaagatgatggaactttggcatcctatgttgg

SEQ ID NO: 59443 - DNA, 270 bp, Zea mays
gacacatttgaaaaggacacggaaatgtggcagcaaagagtagagaactattggagtttgctgggcccaaaggtaaaaccagacactattagaaacatcatggacatgaaggcaaactttgggtcatttgctgctgcaccaaggagaaagacgtatgggtgatgaatgttgtgccacatgatggaccaagcaccctcaagataatctatgatagatggctgataggcagcaatcacgactggtgtgaagccttctcaacctatcctcgaa

SEQ ID NO: 59444 - DNA, 272 bp, Zea mays
cgcccgggaagaaagctgcgcccgccaagaagcccgctgctgcggccaagaaggcccctgccaagaaggccgccccagccaagaaggctcccaccccgtcgcggaaggtgccgtcgcgtaaggcgaagaagtagagcggtgtcttggcaggaatctagggtttcatgctccttcgattttagatgtttactcgtttttgctctagttgtgggtgtcgtgcggggtgggttactaggttgtaaatttgatgccggaggctggggtacacatga

SEQ ID NO: 59445 - DNA, 251 bp, Zea mays
ctagagtgtggagaagaaggacccaaccggcgccaaggtgaccaaggctgctgccaagaagaaatgatgcgatcctgcgcctgctttagcaatacctagttttcatcattacaagttttgtttgtggtcgttgctgttatgtgtgaactgttgagctctgttagcctgtgcacttttatctatttatttggtaccttgttgctatttcaccttctgcaatacaagaatgctgtaagagctatatgttaacc

SEQ ID NO: 59446 - DNA, 287 bp, Zea mays
aacagtttgcagccgaagagatctcctccatggttctcatcaagatgcgtgagatcgctgaagcttaccttggcagcacgatcaagaatgctgttgtcacggtccctgcctacttcaacgactcacagaggcaggccacgaaggacgctggggtgattgctggcctcaatgtgctgcgtatcatcaatgagccaaccgctgctgctattgcctatggtcttgacaagaaggcaaccagcgtcggtgagaagaatgtcctcatctttgaccttggaggtggtacttcg

SEQ ID NO: 59447 - DNA, 293 bp, Zea mays
agtcccattcctccccgtgttctaacaggctgtcgtgagaagtgcatcattcagaaggagaacaacttcaagcaggctggcgagagatatcgttccttcgaccctgcaaggcaagaccggttcatccagcgatgggttgacgcactgacagaccctcgcgtgacccatgaacaccgtaccatttggatctcctactggtcccagtgcgacgccgctcttggccagaagctggcttctaggctgaacctgaagccgagcatgtaagatcgacgaggaagaaagcaggcaccggt

SEQ ID NO: 59448 - DNA, 288 bp, Zea mays
  unsure (1)..(288): unsure at all n locations
gcctcaaacaagaggagtattttggtggagcanagtttatgaagattggagaccttaagggattttttggattgtttatggtccaaatgcagcaacttcggaaaaaattcaaagtcttggattttacctatggatttgggacagctaatactgcacttatatatcatcatggtaaactcatggccttgtcagaagcagataagccatatgttgttaaggtccttgaagatggagacttgcagactcttggcttgttggattatgacaaaaggttgaaacattctttta

SEQ ID NO: 59449 - DNA, 287 bp, Zea mays
accgcagccgccgcccgctcgctcgcctccgctccggcagcgagctctatctcccgcgacgagcagcagctgccaccgacgcacgcagaccgggcaataaatattggtattggtagtgtgatatctataagaagtcaagatggtgaagttcacagctgaagagctccgcgctatcatggacaaaaagaacaacattcgtaacatgtctgtcattgctcatgtggaccatggcaagtctacgcttacagattcccttgtggcagctgctgggattattgcccaggaag

SEQ ID NO: 59450 - DNA, 290 bp, Zea mays
gaaacggtcgaagatgacggcgcgctcccggagaccgtcggcgagggcacccatttcctcgtgccctggctgcagaagcccttcatcttcgacatccgcacgcgcccgcacaacttctcctccaactcggggaccaaggacctgcagatggtcaacctcacgctccgtctcctctcccgccccgacgtccagcacctccccaccatcttcacctccctcggactcgagtacgacgacaaagtgctcccctccatcggcaacgaggtgctcaaggccgtcgtcgcccagtt

SEQ ID NO: 59451 - DNA, 283 bp, Zea mays
ctgcaaaatacagtgggatcaaggttgagttgaccataggatttgagatgggtgtctctaacaagacccctgagattcttaagatgaacccccttaggaaggttcctgttctggagactcgtgatggccctgtttttgagagtaatgctatcgcacgctatgttgctcgcttgaaggatgacaaccctctttatgggtcttcacgtattgaacaagcccacgttgagcaatggatggattttgccgcaacagaagttgatcctggtgttgcatggtacttgta

SEQ ID NO: 59452 - DNA, 287 bp, Zea mays
aaagcattaagaaagaggcatgctggactatttcaaatattaatgctggaaacaaagatcagatacaggctgtcataagtgccgatatcatcgctcctttgttgcaactgcttcaaacagcagagtttgatatcaagaaggaggctgcttgggccatctcaaatgctacctctggtggttctcatgagcaaatcaagtacttggtgtctgagggctgcatcaagccattgtgtgaccttcttgtctgccctgatccgagaattgtaacagtttgtctggagggtctg

SEQ ID NO: 59453 - DNA, 287 bp, Zea mays
caacactcaccgatagcaagtagcgccgccgacgtttcgagagcagagtatccaagctagccaagcgcgcacctcggtgacctagctagttcaggcgacgatatggcgtcaggtcaggaaagcaggaaggagctggaccgcaaggcccgcgagggcgagaccgtcgtccccggcgggaccggcggcaagagcgtcgaggcccaggagcacctcgccgaaggtatatatagccgactgcggctaaccatctgcatatgttaattcactgtcgttggctttaattacac

SEQ ID NO: 59454 - DNA, 288 bp, Zea mays
tgtgggaaattgttggtgatgtggatggtgtcaagattagaatcattgatacacctggccttcgacctaacgtgatggaccagggatcaaacagaaagattcttgctgctgtcaagaactataccaagaaatgtccgccagatattgttctatatgtggatcgtctggatagtctgagccgtgatctcaatgatttgcctcttctgaagactattactgctgttcttggctcatccatatggttcaatgccattgttgcactgacacatgctgcctcagctcctcctg

SEQ ID NO: 59455 - DNA, 288 bp, Zea mays
caaggagttggaaagggtataattggcgcagtgcacaaccagttagcggagttcttgatcttttatcaaaaactactgaaggtgccaatgcggtaaaaatgaaaatatcatcagcgataatggctgaggagcagttgctgcgtaggcgtcttcctcgagctattggtgggaatagtttgctctatccttatgacggacacaaagctactggccaggctatcttgcatctagctgaatgtgctacattccttggtcaaattgatatttttaaaatccgaggaaagtttg

SEQ ID NO: 59456 - DNA, 282 bp, Zea mays
gccaactgctgctgctattgcctatggtttggacaagaagggtggcgagaagaacatccttgtctttgaccttggtggtggtacttttgatgtcagtatcttgaccattgacaacggtgtgtttgaggtgctggccaccaatggtgacactcatcttggaggtgaggactttgaccagaggatcatggagtacttcatcaagttgatcaagaagaagtacagcaaggacatcagcaaggacaaccgtgctcttggaaagctgaggagggaagccgagcgcgc

SEQ ID NO: 59457 - DNA, 283 bp, Zea mays
ggctggatgacgaagtgtcggggcaggcgagcaggctcgtcggtggcgtccaggagacacggccggtggcgccgagaacgtcggctccactgcggttgtcgccgtcgtgtgctcctcccatgtggtggtcgccaactgcggggattcgcgtgttgttctctgccgtggaaaggagcccttagagctgtcgattgatcataagcctgacaggaaggatgaacgagcgaggattgaggccctggggggaaaggtcatccaatggaatggctaccgggtctccggt

SEQ ID NO: 59458 - DNA, 274 bp, Zea mays
gtgacagccgcatcttcttgtgcagtgccagcctcgtctcatagacaagatggtgaaggtcggtgtgaacggatttggccgtatcggacgcctggttaccagggctgccttctcttgtgacaaagtggacattgttgccatcaacgaccccttcattgacgacaactacatggtctacatgttccagtatgactctacccacgcacacctcaacggcacagtcaaggctgagtatgggaagctggtcatcaagggaaacccatcaccatcttcc

SEQ ID NO: 59459 - DNA, 288 bp, Zea mays
caacactcaccgatagcaagtagcgcagccgacgtttcgagagcagagtatccaagctagccaagcgcgcacctcggtgacctagctagttcaggcgacgatatggcgtcaggtcaggaaagcaggaaggagctggaccgcaaggcccgcgagggcgagaccgtcgtccccggcgggaccggcggcaagatcgtcgaggcccaggagcacctcgccgaaggtatatatagccgactgcggctaaccatctgcatatgttaattcactgtcgttggctttaattacacg

SEQ ID NO: 59460 - DNA, 279 bp, Zea mays
ctgggaagaatgttgtacaccaattagatattataacagatcttcttgggactccatcatctgagaccttatcccggattcgaaatgagaaggccaggagatatttgagctgcatgcggtaaaaatatcccgtgcactttactcataaatttcgacatgctgatcctttggctcttcgtcttctagagcgtttgcttgcatttgatcctaaagaccggcctagtgcagaagaggctctagctgatccatactttgcatcccttgctaatgtggaacgtg

SEQ ID NO: 59461 - DNA, 280 bp, Zea mays
gcaaactctctctaccgtccgagaccccaagcaccagcgcggcggcggcgaccatggctgtcggaaagaacaagaggatctccaagggaaagaagggtggcaagaaaaagaccgtcgaccctttctctaagaaggattggtatgacatcaaggcaccgtcggtgttcagtgtgcgcaacatcgggaagactctcgtatccaggacacagggtaccaggattgcttctgagggtctgaagcacagagtctttgaggtttgcctagctgatcttcagggcga

SEQ ID NO: 59462 - DNA, 279 bp, Zea mays
tgtttgcactgtccatctgcagaggcctatagtcccagtagatttatacaggtcaatacgtgattcacaacttattggcctgtcaggatacacaaaggagggtctcccaatttttggcattggtgttggacatagcacatatgacaaagcttcggtccactactatgtgcaatctcatatccagattaacgagtaccgtgatcgtataattttgcctaggctgacacaacagtttgggcggcctgttaccagctgtataaaagtgctggatatgactgg

SEQ ID NO: 59463 - DNA, 280 bp, Zea mays
gtcccctgctccattctcagccgccgccaatcccttcccgtgctccgcaaccgctgagtgagaagaagagatggccggcaagggcgatggcccggctatcgctatcgatctcggcacgacgtactcttgcgtcggcgtgtggcagcacgaccgcgtcgagatcattgccaacgaccagggtaaccgcaccacgccctcgtacgtcgccttcaccgactccgagcgcctcatcggagatgcggccaagaaccaggtcgccatgaaccccatcaacaccgtc

SEQ ID NO: 59464 - DNA, 282 bp, Zea mays
gaagaagggagagtcgtactgaggtgtaagaatggcgagtgcacaggcagtggggcaaggagaacgaggccacttcgttctgaagagcggacacaccattccggccgttggtctaggcacttggagggccggctcagataccgctcactctgttcggaccgccatcgccgaggctggatataggcacgtggacacagctgcccaatacggagtagagaaagaggtcggtagaggacttaaagctgcgatggagggcgggatcaacaggaaagatttgtttgt

SEQ ID NO: 59465 - DNA, 278 bp, Zea mays
cctccaccttgtgctccgtctcaggggaggcatgcagatctttgtgaaaaccctgaccggcaagactatcaccctcgaggtggagtcctctgacaccattgacaacgtcaaggccaagatccaggacaaggagggcatccctccagaccagcagcggctcatctttgctgggaagcagcttgaggacgggcgcacgcttgccgactacaacatccagaaggagagcaccctccacctggtgctgcgcctcaggggaggcatgcagatcttcgtgaaga

SEQ ID NO: 59466 - DNA, 281 bp, Zea mays
cggatcatgaatatgcaaagacttcagcaggaaaggtcacaaaggactgggcaaaggcaatccaaagtgaatgggatcttctacagaaaaacctaccacaatctatatacgttagagtctatgaggacaggactgatctgctgagggctgccatagtcgggccagcaggaactccataccatgatggtctgttcttcttcgatgtccgtgttccttgcgaatacccaaagtgcgcaccaaaagtatactaccattctggcggacttcggctgaacccgaac

SEQ ID NO: 59467 - DNA, 277 bp, Zea mays
tccgccacctctgctgagagcgagaagagatggccggcaagggtgatgggccggcaatcggcatcgatctcggcacgacctactcttgcgtcggtgtgtggcagcacgaccgtgtcgagatcatcgccaacgaccagggtaaccgcaccacaccctcgtacgtcgccttcaccgactccgagcgcctcatcggagatgcggccaagaaccaggtcgccatgaacgccatcaaacacgtctttgatgccaagcgtctcattggcaggaggtttagtga

SEQ ID NO: 59468 - DNA, 294 bp, Zea mays
  unsure (1)..(294): unsure at all n locations
gtncccattcctccccgtgttctaacaggctgtcgtgagaagtgcatcattcagaaggagaacaacttcaagcaggctggcgagagatatcgttccttcgaccctgcaaggcaagaccggttcatccagcgatgggttgacgcactgacagaccctagcgtacccatgaacaccgtaccatttggatctcctactggtcccagtgcgacgccgctcttggccagaagctggcttctaggctgaacctgaagccgagcatgtaagatcgacgaggcagaaagcaagcaccggtgg

SEQ ID NO: 59469 - DNA, 294 bp, Zea mays
ctcaacagcgaatgcgttggcaatggccaaagatcctgaagctgccttctttaaaaggttggaaggtctccaaccctgcgaagtttcagctctcaaatctggaacccatatatttgctgtatatggtgacaattttttcaagccagctagctatatgattgagcgatgtgcgcaaagagttatgaagacacaacagagaggctgaaagagatagaatctaaaattctagctaagcgaaatgatctgcgtcaatttgaaactgagtacagaaaagctttggcacgatttcaagaa

SEQ ID NO: 59470 - DNA, 296 bp, Zea mays
caggcaggcaggtcggcgaggagggcaggaagaccgaagaccgagccgtgcggggtgctcggacgggaacgggacaggaccccaaaatctcagatccttcctgcccgcccgcccgtgcccgtcgacgcgtcgttcttgccggccgcgccccacctccgccctctcctcctccagggggatcggatacgccacaggctgcgcgatggtgctgtgggtcttcggctacggctccctcatctggaaccccggcttcgacttcgacgacaaaatcctcggcttcatcaagggctacaagc

SEQ ID NO: 59471 - DNA, 300 bp, Zea mays
tgcgtgcataaactcaggcaaaatgcattgagactggtgaaaccgttgcaattaagaaggttctacaggacaaaagatacaagaatagggagttacaaataatgcgatcaattgaccattgcaatgtcatttccctgaagcattgtttcttctctaccacaagtaggatgaacttttccttaacttagtcatggagtttgttccagagtcactttatcgcgttctgaaacactacaaagacatgaagcagaggatgccccttatatatgttaaattgtatatgtaccagatattccgggg

SEQ ID NO: 59472 - DNA, 294 bp, Zea mays
accgcagccgccgcccgctcgctcgcctccgctccggcagcgagctctatctcccgcgacgagcagcagctgccaccgacgcacgcagaccgggcaataaatattggtattggtagtgtgatatctataagaagtcaagatggtgaagttcacagctgagagctccgcgctatcatggacaaaaagaacaacattcgtaacatgtctgtcattgctcatgtggaccatggcaagtctacgcttacagattcccttgtggcagctgctgggattattgcccaggaagttgctggt

SEQ ID NO: 59473 - DNA, 290 bp, Zea mays
tctacttttggacctgtggtatgcttcatgaggaggagtactccctggcacggatgttcttcgccaagacgttcgggatggtgtcactgatggacgacactttcgatgtccatgctactctagacgagtgtcacaagctcaaagaagctatgcagagagggatgaaagtgaggtctccattctacccgagtatctacgcttgctgtatatcaaaacacttagcaacttcaaagagtttgaggagatcttggaaccgaacaagaagtaccgcatggcttacacaaaagagg

SEQ ID NO: 59474 - DNA, 294 bp, Zea mays
gcttcttgtcaccctgttgttgtgtaatgctgctgccatggaggcacttcctatatttcttgacagaatgtttcatcctgttgttgctgtggtattgtcagtgacatttgttcttgcctttggagaggttataccgcaagcaatctgtaccagatatggcctagcagtgggtgctaactttgtatggctcgtacgcattctcatggtcatttgctatccaatttcttaccctattgggaaggtcctggactgtgctcttgggcacaatgagtctgcactttttaggcgagctca

SEQ ID NO: 59475 - DNA, 290 bp, Zea mays
ggctctccggaggctgaggacctcttgtgagagggccaagagaactctgtctccatgccagaccccattgagattgactcgctgtacgagggcattgacttctactccaccatcacccgtgccaggtttgaggagctcaacatggacctgttcaggagtgcatggagcctgttgagaaatgcctgagggatgccaagatggacaagagcagcgtccatgatgttgtccttgttggtggctccactaggatccccagggtgcagcagctgctccaggacttcttcaacggc

SEQ ID NO: 59476 - DNA, 292 bp, Zea mays
tcctcgcctccaccccttcccttccatctcctcccacccggcgactcctcttcctctctgccgcgccgatcgattggcccacccatcgatcgagcacggggaagaagattccagtccggagtggtttcaattcggtcgggttcgttgcccgtgtgggtggcgctatggcggcgatggatgcctcggcagataagaacgccgtcttccgcaagcttcgcgccaaatcggacaacaagatgtgcttcgattgcaacgccaagataccgacgtgggcgtccgtcacctacggcgt

SEQ ID NO: 59477 - DNA, 319 bp, Zea mays
  unsure (1)..(319): unsure at all n locations
catacacgcgcccnagctcggcactcagctcgagtccggattcccaggcaggcaagtcggcgaggaaggcaggaagaccgaagaccgagccgtgcgggggctcgtgacggaacgggacaggaccccaaaatctcagatccttcctgcccgcccgcccgtgcccgtcgacgcgtcgttcttgccggcgcgcaccacctccgccctctcctcctccagggggatcggatacgccacaggctgcgcgatggtgctgtgggtcttcggctacggctccctcatctggaaccccggcttcgacttcgacgacaaaatcctcggt

SEQ ID NO: 59478 - DNA, 290 bp, Zea mays
gcccgatgtggtggtcaggaccaccaccgtcgccgtggagccgcggtttagggaaatggtgggcgctggtagggccattcgtggtgaaggccgtcgggttcctgctgctcgcgggcctcttgttccgggtgctctggtcctttccgtcctctccgggccggcgttgcagatcacaaaaggaaaatgcagtcttttcaatggggaatggataccaaacccctctggtccagcctatacaaatgcaagctgtcgatttatcgacgatcaccagaactgcatgatgaatggta

SEQ ID NO: 59479 - DNA, 290 bp, Zea mays
aattcagatcgtgcttggtttcagtggcctttggcgcaatgtcgttaaattgctgagcccattgtctgctgtacctttggtttcgctagctggatttgggctatatgagctaggttttccaggggttgctaagtgtgtggaaattgggcttccggaatcgacctaatgctcatattttctcagtacttacctcatgctgtccatgcggcaaagcctgtgttcgaccggttttctgtgattttcacaattgcgattgtatggctgtatgcgtacattctcacggttagcgg

SEQ ID NO: 59480 - DNA, 287 bp, Zea mays
gtcgtcgctgcctacaggacgccgatatgcaaggccaagcgaggaggcttcaaggacacctacccagaggacctcctcactgttgttctcaaggctgttctggacaacactagaatcaatccagctgacatcggtgacatcgtcgttgggacggtgcttggccctggttcccagcgtgcaaacgagtgcaggatggctgcgttgtttgctggattccctgaaaccgtccctgttagaactgtcaaccgccagtgttcatctgggctacaggcagtagctgatgtcgc

SEQ ID NO: 59481 - DNA, 291 bp, Zea mays
caaaggcagcgctcggaggtggccctctgtcgggtggagtggtggacacatccgcgcccatggccaacggcggcgctgcggccggcaagctcaccgtcgccgagaccttctccaacctcagggagcaaggcaagagtgcattcatcccgttcataactctggtgatcctgacctggtaaccacatcgaaagcattgaagattctcaattcctgcggttcggatgttatagaggttggcgtaccatactcggatccactggctgatgggccagttattcaggcttctgcaac

SEQ ID NO: 59482 - DNA, 284 bp, Zea mays
tccgaattcccaggcaggcaggtcggcgaggagggcaggaagaccgaagaccgagccgtgcgggggctcgggacgggaacgggacaggaccccaaaatctcagatccttcctgcccgcccgcccgtgcccgtcgacgcgtcgttcttgccggcacgccccacctccgcccactcctcctccagggggatcggatacgccacaggctgcgcgatggtgctgtgggtcttcggctacggctccctcatctggaaccccggcttcgacttcgacgacaaaatcctcg

SEQ ID NO: 59483 - DNA, 275 bp, Zea mays
  unsure (1)..(275): unsure at all n locations
ggaggatgcatccacgatcttcattcaaggccttcttggaggtggttaaatggagaagtgttccctgggaagatgttgaaatggatgctatccattctttgcagttaatattacgtggctccctgccagatgaagatgccaacagactcaagactggtccattgtaaaagctccatctgatgatatgaagaagatacaggggctacttgaactgagaacagttacaaatgagatggtccgcttattgangacagcaactgcccctgtcttggctg

SEQ ID NO: 59484 - DNA, 283 bp, Zea mays
cagccctgaagcgttggtgatactcgctagtgcctccgaccttctacttcgtgctaccgatggaatgctcgtcgatggtgaagcttgtactttgccacagcttgagcttctggaagtgaccgctcgggctgtccatcttatcatcgaatgggagattcaggtttatcagttgcagatggtctttcaaatctgctgaagtgccgtctatcaaccaccatccgctgctcttctcacccaagtgcacacgtgcgcgcactcagcatgtctgtcctccgcgacatcc

SEQ ID NO: 59485 - DNA, 286 bp, Zea mays
ctccgcctcgaccggatctcgtcggactcggatccgcccgaccaccccgcgccgccgcagatcaacagagatggcagctgtcgacacattcctcttcacctcggagtctgtgaacgagggacaccctgacaagctctgtgaccaggtctcagatccgttcttgacgcttgccttgctgaggaccctgacagcaaggttgcttgtgagacctgcaccaagaccaacatggtcatggtctttggtgagatcaccaccaaggccaatgttgactacgagaagattgtca

SEQ ID NO: 59486 - DNA, 287 bp, Zea mays
gctgcatcccctcaagattcacgcttgctctctgaaatacaagagcagcagaatttgttgaagacctacgaggtcatggtaaagaagttccagtcccagatccagactagagacactgagataacccatttacagcagcaaattgatgtagctaacttcggaaatcaaagctagagaagacactgaaacagaggggcctacttaacagggagtcagaggaatctgacgaagaagagaactacttttccattgaattgacgccaagtttgtttacatctgctgtcgat

SEQ ID NO: 59487 - DNA, 280 bp, Zea mays
atgcttcaggggcaaaacatttgaacatcacactgacaaggtcaaaatttgaatctcttgtacacaatctgattgagagaactagagatccatgcaagaactgtttgaaggatgccggaatatctactaaagaggtggatgaatcgattctgttggtggaatgactagggttccaaaggtgcaggaggtagtctctgaaatctttgggaagaacccaagcaaaggagtcaatccagatgaagctgtggccatgggtgctgcacttcagggtggcattctc

SEQ ID NO: 59488 - DNA, 281 bp, Zea mays
cacgcttattttctctattgcgacatacgaggctgtgattgatgcttaccttgatgggctagaagcttcgggcttgagcgacttatctcgagttaccagtgtcgcatccttctttgtcagccgagtcgacacccttatcgacaaaatgctgaaaatattggaacacctgaggcacttgccttgagagggaaggctgccgtcgcacaggccaaactagcaaatcggctctaccagaagaaattctctggcccaaggtgggaggcgttggccaagaaaggtgc

SEQ ID NO: 59489 - DNA, 313 bp, Zea mays
atagacctaatcggctcgcgtctcagcgcgtggttggcaatggccaaagatcctgaagatgccttctttaaaaggttggaaggtctctaaccctgcgaagtttcagctctcaaatctggaacccatatatttgctgtatatggtgacaattttttcaagccagctagctatatgattgagcgatgtgcgcaaagagttatgaagacacaacagagaggctgaaagagatagaatctaaaattctagctaagcgaaatgatctgcgtcaatttgaaactgagtacagaaaagctttggcacgatttcaagaagt

SEQ ID NO: 59490 - DNA, 287 bp, Zea mays
atttggtccttgagtatgttccggagacagttcatcgagttgtgaaacatcacaacaagatgcacaaacgcatgccacttatttatgtgaagctttatatgtaccagatatgtagagcattggcttacattcatggtactatcggtgtctgcacagagatattaagccacaaaatcttctggtgaacccacacacccaccagcttaaaatatgtgactttggtagtgcaaaagttctggtcaagggggaaccaaacatatcatacatctgctcgcgatactataggg

SEQ ID NO: 59491 - DNA, 266 bp, Zea mays
  unsure (1)..(266): unsure at all n locations
cgtgccatggtcnccatccgtgtccacaccgtcctcatctccacccagcacgacgagacagtgaccaatgatgagatcgctgctgacctgaaggagcatgtcatcaagcctgtcatccctgagcagtaccttgacgagaagaccatcttccaccttaacccatcttgccgctttgtcattggtggacctcacggcgatgctggcctcactggccgcaagatcatcattgacacctacggtggctggggagcccatggtggtggcgc

SEQ ID NO: 59492 - DNA, 259 bp, Zea mays
  unsure (1)..(259): unsure at all n locations
ggagaacggaaagcaggaaaagcaccttgtcgctacagtcggcaagatcagactctattctaagagctcgatgcgtatggcgaagacagcattcccaggccttaggtccccgattacacatgtagatgttacttatgatgggaaatggattctgggtnaaactgacacatacttgatcttgatatgcactatcttcaaggacaaagctgggacagataagactgggtttagtggccgaatggggaataggattgctgca

SEQ ID NO: 59493 - DNA, 264 bp, Zea mays
gtatcaagggcgtgtgtgagaagaccccattagattggaacacaaggatgaagattatactcggaacagcacgcggcctcgagcacatccattcagaaggcggctccaggctcgcacacggcaacatcaagtcaaccaacgttctgctcgacggagaccacaacccttacgtctcagactacgggctgagctcgttgacgagccttccgatcaccacttcccgagctgtcgctggctaccgagctcaggagaccttcgaatcga

SEQ ID NO: 59494 - DNA, 263 bp, Zea mays
ggaggaaggcccgacaaacagtacaacatccacatgctccaggagagataccagattggtcctgaccagattgaagctctgtatcagtatgccaaatttcagtttgagtgtggtaactactcctgggctgctgagtacctgtaccagtatcgtgctttgtgcacagatactgagcgaagtgtgagtgccctctggggaaagctagcagcagaaatcctaatgcagaactgggatgtggctttggaggaattcaaccgcttgaa

SEQ ID NO: 59495 - DNA, 261 bp, Zea mays
ctcgagccggggacgtctggagttggaagaacattcacaaaagaagttgttgaggccatggcttccttcaatgagaggcctatcatcttttcactgtcaaatccaacctctcattctgaatgtactgctgaagaagcatataactggactcagggtcgtgtaatatttgccagtggcagtccatttgaccctgtggagtacgatgggaaggtttttgtacctggacagtcgaacaacgcctacattttccctggatttggc

SEQ ID NO: 59496 - DNA, 258 bp, Zea mays
accgctgctgctattgcctatggtcttgacaagaaggcaaccagcgtcggtgagaagaatgtcctcatctttgaccttggaggtggtaccttcgatgtctccctccttactattgaggaaggtatctttgaggtcaaggccacagctggcgacacccatcttgggggtgaggactttgacaacaggatggtcaaccactttgtccaggagttcaagaggaagaacaagaaggatatcactggcaacccgagggctctc

SEQ ID NO: 59497 - DNA, 271 bp, Zea mays
cacacacacacaaccagatctcccccaaatccacccgtcggcagctccgcttcaagatgcagatctttgtgaaaaccctgactggcaagactatcaccctcgaggtggagtcgtctgacaccattgacaacgttaaggccaagatccaggacaaatacggcatccccccagaccagcagcggctcatctttgctggcaaacagcttgaggacgggcgcacgcttgctgactacaacatccagaaggagagcaccctccaccttgtgctccg

SEQ ID NO: 59498 - DNA, 215 bp, Zea mays
cccagagatggagatctgtgacttcgacttcgagccctgtggctactccatgaatgctgttcatggcactgccttgtcgaccattcatgtgaccccagaggacggcttcagcaatgaaagctaacgtggtcatgggctttaacccgggctctttctcttatggtgacctggttaagaaggtgctgaagtagtttcgtccaactgacttctctgtt

SEQ ID NO: 59499 - DNA, 258 bp, Zea mays
tgacgggaaatggggggagcatgagcttgactacctgctgttcatcgtccgggacgtgaaggtgcagccgaacccagatgaagtcgctgacgtgaagtacgtgaaccgcgacgagctcaaggagctcatccggaaggctgacgctggcgaggccggggtgaagatctccccctggttcaggctggtggtggacaacttcctcatgggctggtgggaccatgtcgagaaaggcaccctcggcgaggccgtggacatgga

SEQ ID NO: 59500 - DNA, 265 bp, Zea mays
ccattaccaatgccaagaacaagaaaccagagaggacagccgcgaatacaatccgaatcccctccaaaaacccaccataccgtctcccccatctgcaagaacaagatcaggagagcatcctagggggaagaaacaggagggggaaaaagaagcccagtaagaccaactgaccaaacaaaaaggtggcatctttgtgtcaccgaggcaccgccgatcacagaccaaagcccgctcctctggtccatcccaagcgtacagcagccga

SEQ ID NO: 59501 - DNA, 251 bp, Zea mays
gtggctttgttcaatttgttagcagaactgatgctgaagaagcactacaaggattaaatggatcactcattggaaagcaggcagttcgcctgtcatgggtccgcagcccatcgcataagcagtctaagggtgactccgtcaacaggaggaacaacatgtactatggcacacattctacggcggatatggctatgctccccggtgccacacccaaacatgtacgctgcagcgtatggcaacgtaccgctata

SEQ ID NO: 59502 - DNA, 233 bp, Zea mays
accgctgctgctattgcctatggtcttgacaagaaggcaaccagcgtcggtgagaagaatgtcctcatctttgaccttggaggtggtaccttcgatgtctccctccttactattgaggaaaggtatcttgaggtcaagccacagctggcgacaccatctgggggtgaggactttgacacaggtggtcaacactttgtcagagtcaagaggagacagaggatatcctggcacga

SEQ ID NO: 59503 - DNA, 274 bp, Zea mays
cactgagggttatgttggaacaattgcagtttggtaatagaatttgagaggaaattgaaatgaataagagcagctggcctgctctgtttgagccttttcaattttttgaagcatacaagaattatctacaggttgacatcattgctgaggatgatgaagtccttaggctttggaaaggatgggttgaatctcgattgcggcaactaactttgaagattgaacgtgatacatatggcatgctacagtgtcatccttacccacatgaatatgcaga

SEQ ID NO: 59504 - DNA, 272 bp, Zea mays
ctcctcgcgagcccaaaccctaaacctaaacctttcacccgccgccgccgccaccaccagcactgccactccgccaccaccgtcccgaagccccctcccagcgccatcgacttcatctcggattgaagcaatgtcgtcggacgatgaggtcagggacaagaaggagctcgacctctcctccaacgacgttgtcaccaagtacaaggctgccgccgaaatcctcaacaacgctctgaagattgttgtgtctcagtgcaagccaaaagtcaaga

SEQ ID NO: 59505 - DNA, 261 bp, Zea mays
ctcccgctgctgccaatgtcctcccgttctctgataccggcaatgtacttgcgtgcttcgcaacctctgctgagagcgatgcgagatgggcggcaagggtgatgggtcgtgaatcggcatcgatctcggcacgaactagtcttgcgtcggtgtgtggtatccgatagtgtcgagatcatcgccaacgaccagggtaaccgcagcacaccctcgtacgtcgccttcaccgactccgagcgcctcatcggagatgcggccaag

SEQ ID NO: 59506 - DNA, 291 bp, Zea mays
  unsure (1)..(291): unsure at all n locations
cttgggggcgnaggctcggcatncagctgcatcgaagaagaaggcccgacaaacagttcaatatcgacatgctccacgagagataccagattggtcctgaccagattgaagctctgtatcagtatgctccatttcagtttgagtgtggtaactactcctagggctgctgagctacctgtcaccaggtatcgtagctcttgtgtcacaggatactgagacgaagtagtgagtgccctctggggaaagctagtagcagaaatcctaatgcagaactgggatgtggctttggag

SEQ ID NO: 59507 - DNA, 260 bp, Zea mays
tgacgggaaatggggggagcatgagcttgactacctgctgttcatcgtccgggacgtgaaggtgcagccgaacccagatgaagtcgctgacgtgaagtacgtgaaccgcgacgagctcaaggagctcatccggaaggctgacgctggcgcggacggggtgaagatctccccctggttcaggctggtggtggacaacttcctcatgggctggtgggaccatgtcgagaaaggcaccctcggcgaggccgtggacatggaga

SEQ ID NO: 59508 - DNA, 282 bp, Zea mays
acgcactgcagcccgcgccagtaccaatgccaagaacaataaaccagagaggacagccgcgaatacaatccgaatcccctccaaaaacccaccataccgtctcccccatctgcaagacgcagatcaggagagcatcctagggggaagaaacaggagggggaaaaagaagcccacccagaccaactgaccaaacaaaaaggtggcatctttgtgtcaccgaggcaccgccgatcacagaccaaagcccgctcctctggtccatcccaagcgtacagcagccga

SEQ ID NO: 59509 - DNA, 265 bp, Zea mays
aatgaaattgctgctcagatttgtcgtcaggctggtcttgtgaagacattggagaaaggaaagcatgctgagggtggtgaagatgacaactttgctattgtgtttgctgctatgggagtgaacatggaaacagctcaattcttcaaacgtgattatgatgaaatggttccatggagcgggtcaccctttttctgaatctggctaacgaccccaccattgaacgtattatcacccctcggattgctctacaacagcggaatatttg

SEQ ID NO: 59510 - DNA, 265 bp, Zea mays
gcggaatttaagactggtgctgcaaggaaggaatctgctgagaggcacaatggtggcctatgaggctgctcaggacattgctctggctgagctggcagctacccatccgataaggctgggacttgctcttaatttttcagtgttctattatgagattctgaactcccgagacaaagcttgcaacctggcaaagcaggcgtttgatgaagctatctctgagttagacagccttggtgaggagtcatacaaggatagcactctgatc

SEQ ID NO: 59511 - DNA, 298 bp, Zea mays
  unsure (1)..(298): unsure at all n locations
aatagctatcaagtacaataaaatatttgttgatgccttttggaacagtaagaagcaatcttttacaatgcacttggtccggctgatgacatcatgggctgttgtgtgtgatgtttggtacttacctcctcaatatctgagggagggagagacggcaattgcatttgctgagagagtaagggacatgatagctgctagagctggactaaagaaggttccttgggatggctatctgaaacacaaccgtcctagtcncanacacactgaagagaaacaacgcatatttgccgaatctgtc

SEQ ID NO: 59512 - DNA, 288 bp, Zea mays
caatgttaagaatgttgctgtgaaggatctgaagcgtgggtatgtggcctccaactccaaggatgaccctgccaaggaggctgctagcttcacgtcccaggtcatcatcatgaaccaccctgggcagattggcaacggctaatgcccagtgctggactgccacacctcgcacattgctgtcaagtttgcggagctcattaccaagattgataggcggtctggcaaagagcttgagaaggagcccaaattcctcaagaatggtgatgctggtatggtgaagatggttcc

SEQ ID NO: 59513 - DNA, 156 bp, Zea mays
tgatgaatctgcacagtctgctattgataaactcaatgggatgcttatcaatgacaagaaagtgtttgttggaccttttgttcgcaagcaggacagggaaaatgtctcgagtaatatcaaatttagtaatgtatatgtgaagaatctgtcagatac

SEQ ID NO: 59514 - DNA, 291 bp, Zea mays
tctctggtggacaggcgcccggcgggcacaatgtcatctgcggcatctttgattaccttcaggagcgtgcaaaaggtagcaccttgcttggattcaagggaggccctgctgggatcatgaagtgcaaatatgtggaactcacttcagactttgtgtatcgctacagaaaagagggcggattcgatatgatctgcagtggaagggacaagattgaaacaccggagcagttcaagcaagctgaagacacagcaaacaagcttgatttggatggacttgttgtcattggtggtg

SEQ ID NO: 59515 - DNA, 292 bp, Zea mays
tgcttcaagcgtctcattaagggacagaataatccaaaaggacttcgaggagggaatcaaccgcctagttctttgctctggaaaggtgtactatgaactggatgaagaaagaaggaagtcggagcgcactgatgttgctatatgtagagttgagcagctctagtgagttacccctatgactcatccagcgcgagttgaagagatatccaaatgccgagatcgtgtggtgccaagaggagccgatgaacatgggagcatacagctacatcaacccgcggttgctgacggcgat

SEQ ID NO: 59516 - DNA, 287 bp, Zea mays
catcaacctcagctaaggtccccagcggcggcgaggcgatggcggcgcctgtgacggtgtacggaccgatgctctcaccagctgtggcccgcgtggcggcctgcctcctggagaaggacgtgccgttccagatcgagccggtggacatgtccaagggcgagcacaagtcgccgtccttcctcaagctccagcccttcggacaggtccctgccttcaaggaccacctcacaaccgtctttgagtcaagggctatttgccgttacatatgcgaccagtatgcggactct

SEQ ID NO: 59517 - DNA, 273 bp, Zea mays
gaagaaggagaagttctctactcggcttcatctccgtctctgtcttgatggaggttaccatgttcttgacgagtctacaaactacagcagtgacctgagaccaactgccaagcaactctggaagccgtctattggtttgcttgaacttggtgtccttggtgctcaagggattgttcccatgaaaactcgagatggaaaaggttcatcagacacctattgtgttgctaagtatgggtcgaaatgggtaaggacacggacccatcatgacaaccc

SEQ ID NO: 59518 - DNA, 279 bp, Zea mays
atcgtgatagaatactgagaatggtcaagagcctctctcctaaggtggtaactcttgtagagcaggaggcaaacacaaacacagcacctttctttcttagatacatggagactcttgattattacacagcgatgtttgaggcaatagatgttgcttgccccagggatgataagaagcgcattagcacagagcaacactgtgttgcaagggatatcgtcaatttaattgcttgtgaaggtgcggaaaggatagagaggcatgagccttttggaaaatgga

SEQ ID NO: 59519 - DNA, 280 bp, Zea mays
catcagtgaggacagttatggcagcttcagtgctaacagaagcaggcctcacatgtcaaaggatgtgagatggggagccatcaggcgcatggctatccaacaagggagcttgggattaaagaacttcaagcttctcaaacaacttggttgtggggatataggcactgtttatttggctgagttagtgggctcagactgcatgttcgcattgaaggttatggacatcgagtacctcataagcagaaagaaaatgctcagagcacaaactgagagggagata

SEQ ID NO: 59520 - DNA, 289 bp, Zea mays
cttctttcttttgcaggttttcttcttcttggactgggtaaaatacctgctaaacgatgccagactgtttaagtcattccttcgaattacccttacatgtgtgattactgttggcaccctggctcttggtattggcactgcatctggttacatctctccttggacaggacgattttactccctgctagatcctacctatgcaaaggaccatataccaatcatcgcatctgtttctgagcatcaaccaacagcatggtcatctttcatgtttgacttccacatcctcctt

SEQ ID NO: 59521 - DNA, 280 bp, Zea mays
ctagtcccctgctccattctcagccgccgccaatcccttcccgtgctccgcaaccgctgagtgagaagaagagatggccggcaagggcgatggcccggctatcggcatcgatctcggcacgacgtactcttgcgtcggcgtgtggcagcacgaccgcgtcgagatcattgccaacgaccagggtaaccgcaccacgccctcgtacgtcgccttcaccgactccgagcgcctcatcggagatgcggctcagaacaagtcgccatgaacccatcaaaacgtc

SEQ ID NO: 59522 - DNA, 250 bp, Zea mays
  unsure (1)..(250): unsure at all n locations
aagaaggcaaccagcgtcggtgagaagaatgtcctcatctttgaccttggaggtggtaccttcgatgtctccctccttactattgaggaaggtatctttgaggtcaaggccacagctggcgacacccatcttgggggtgaggactttgacaacaggatggtcaaccactttgtccaggagttcaagaggaagaacaagaaggatatcactggcaancccgaggctctccggaggctgaaggactcttgtg

SEQ ID NO: 59523 - DNA, 282 bp, Zea mays
gcaaaatctgcacgagagacagacgacgagatggccgatgcggaggacgccgccgccgcgcgccgacgggccgccataaccgactaccgcaagaagctgctcaactgcagggagctcgagtcgcgcgtcggcaccgtgagagaaagccttaaaaatgcaaagagggattttaccaagactgaagacgacttgaaatctctgcagagcgtggggcaaataattggagaagttctccgacctcttgataatgaacgctttattgtgaaggccagcagtggtccc

SEQ ID NO: 59524 - DNA, 278 bp, Zea mays
cgtcaccaagcgcgccatcggcgttgagatcaacaagcaggttaatggccgcatcatcaggaagcgtatccatgtccgtgtggagcatgtgcagccctcccgttgcacagaggagttccgcttgaggaaagccaagaacgatcagctcaaggttgatgccaaggaccgtggcgaggtgatcagcaccaagaggcagcctgtgggacccaaacctggcttcatggttgagggtgctacacttgagaccgttactcctattccctatgatgtggtaaatg

SEQ ID NO: 59525 - DNA, 140 bp, Zea mays
gttcggagcgcacacacacacaaccagatctcccgcaaatccacccgtcggcacctccgcttcaagatgcagatctttgtgaaaaccctgactggcaagactatcaccctcgaggtggagtcgtctgacaccattgacaa

SEQ ID NO: 59526 - DNA, 270 bp, Zea mays
agatgccgttcttgacgcttgccttgctgaggaccctgacagcaaggttgcttgtgagacctgcaccaagaccaacatggtcatggtctttggtgagatcaccaccaaggccaatgttgactacgagaagattgtcagggagacctgccgcaacattggttttgtgtcaaacgatgttgggcttgacgccgaccactgcaaggtgctcgtgaacattgagcagcagtcccctgatattgctcagggtgtgcatggccacttcaccaagcg

SEQ ID NO: 59527 - DNA, 277 bp, Zea mays
gctagcccttctaaccttgctcgacccttgcccgccgcctgaactcgcctcccccgcggccggtcccctgcatctgttcgccgcgccgcaacccggaggagactacgactacgagcaccaccaggtagcagcaactgttttgctgcaatctgacaaagtggagggtttaagagtcgctgcttcttttatgtctgaacaatctttgctttatttgggattgctgggagagtattcttgcgcgacgaggaaaaggcacaagtttctgctccactgcatg

SEQ ID NO: 59528 - DNA, 302 bp, Zea mays
ctcaaaccctagccgcctcctgcaagtgtcagagctcaggaatctgcgccatggcgagtgagacggagaccttcgcatttcaggctgagatcaaccagctgctctcactcatcatcaacaccttctactccagcaaggagaggttcctccgcgagctcatctccaactcttccgatgcgctggacaagatcagggtcggcagtctcactgacaagagcaagctcgatgcgcacctgagcttgtcatccaccttgtcccagacaaggccacgaacacgctctccatcatcgacagcggcatcg

SEQ ID NO: 59529 - DNA, 286 bp, Zea mays
gcaagaggctggcaatcaatctactgcatgccaccacgaccttgtttcaagggttctgcaccaatcaatctttctgatcgtcttaatcaggtgctccgttgggctcttgggtcagtggaaattctgcttagcagacattgtcctatatgatatggctacaatgggcgattgaagcttttggagaggctggcttacattaacaccattgtttatccaatcacatctgttccgcttatcgcctattgtgtgcttcctgctatctgtcttcttaccaataaatttatca

SEQ ID NO: 59530 - DNA, 293 bp, Zea mays
ggaataccacactgccaacctcaaaatcggaggtattctcaacagctgcagatggacagacgagcgttgagattaatgttctccagggagaaagagagtttgtcagggacaacaagtccgttggaagcttccggttggatgggatccctcctgcacctcgtggtgtcccacaaattgaagtgaagtttgatattgatgcaaatgggatactctcagttgctgccattgataagggcactggaaagaaacaggacatcaccatcactggtgctagtacgttacctaaggatgag

SEQ ID NO: 59531 - DNA, 287 bp, Zea mays
agccgagcgattcggctcgacggctcgagcaaacatggcggacgtcaaggaatgtgtagggcacgagagggttaagcactacgctgacaaaggcataacaatttggagcggtaacgacgacgagtgccacgattctaagtggaaacatggcgctactggggtcatttccgttaccagcaaccttgttcccgggctcatgcacagcctcatgtacaaaggcgagaacgccacgctgaacgagaagctgtcgcccctgatgaaatggctgttctgccagccaaatccta

SEQ ID NO: 59532 - DNA, 294 bp, Zea mays
tgcaccgatttaattgttcagagggtggagtttgtcctcgattcagacaaacgaagctacctcatggatcttattcatgcacaaaaggctaatggcacacatggaaagcacgctcttacattggtctttgtggagacaaagaggggggctgatgcgctggaaggatggctttttagaaatggtttccctgcaactagcattcatggagacaggacacaacaggaaagggagcatgcccttaggtccttcaagagcggagcaactcctatccttgtggcgactgatgttgctgct

SEQ ID NO: 59533 - DNA, 280 bp, Zea mays
catatgtccagttgcaacatgattacattttgggaaactatcctgtcggcagggatgatgcttcacaactctctgctcttcagatcttggttgagattggattcattgataatcctgagtcctgtgttgaatggatatcacttttagagagatttcttcctagacaagtggcgattaccagagcaaagcgagactgggagcttgacatcatttcacgctttcagttaatggaacacttatcaaaggacgatgcacggcaacaatttctcagaatcttaag

SEQ ID NO: 59534 - DNA, 283 bp, Zea mays
ggctgctaaagctgctaagaaagcgcctgacgctttctacgctctccgtctccttgaatcgactggaatcgtcgtggtccctggatctggatttggtcaagttcctggaacatggcacatcagatgcacgatcctgccgcaggaagacaagatccccgcggtgatcagccgcttcagggctttccatgaggcgttcttggccgaataccgcgactaaactgttacgctgtgtgtgagttaagttggaggttcagtagaactgtagaagagctcagtgacagcg

SEQ ID NO: 59535 - DNA, 298 bp, Zea mays
atattatgttgcctccatcaagacgggaattcaaagatatttatgttgtttttgaacttatggagtctgatcttcaccaagttatcaaggctaatgatgacctgacaaaggaacattatcagttctttctctaccaactgatccgtgctctgaaatacatccacacagctaacgtttatcaccgggacctgaagccaaagaatatattagcaaattctaactgcaaactgaaaatttgtgattttggactagcacgagttgcattcaatgataccccaacaacgatcttctggacaga

SEQ ID NO: 59536 - DNA, 283 bp, Zea mays
ggcttgtgcagcaatggccaagatcaaggctcgagatcttcgcgggaagaagaaggaggagctgctgaaacagctggacgacctgaaggtggagctgtcccagctgcgcgtcgccaaagtgacaggcggtgcggcctccaagacctctaagatccgagtcgtccggaaatccattgcccgtgttctcacagttattaaccagactcagaaagaaaacctcaggagattctacaagggcaagaagtacaagcccctggacctgcggcctaagaagacacgtgcc

SEQ ID NO: 59537 - DNA, 291 bp, Zea mays
ggaataccacactgccaacctcaaaatcggaggtattctcaacagctgcagatggacagacgagcgttgagattaatgttctccagggagaaagagagtttgtcagggacaacaagtccgttggaagcttccggttggatgggatccctcctgcacctcgtggtgtcccacaaattgaagtgaagtttgatattgatgcaaatgggatactctcagttgctgccattgataagggcactggaaagaaacaggacatcaccatcactggtgctagtacgttacctaaggatg

SEQ ID NO: 59538 - DNA, 284 bp, Zea mays
ataaaatatgcaattaggtgatacccaggccatctgtgaatatctgcaaaggatgaaacgcgagaatccttcttgctattatgctattcaagtagatggagatgatatgtgtacaaatgtgttttgggctgatgctaaatcaataatggattataactactttggtgatgtagtgtgtgttgacacaagatattgcacaagtgactatgggagacctctactattatttactggtgttaaccatcacaatcagctgattatatgtggtacagcgttgatttatg

SEQ ID NO: 59539 - DNA, 280 bp, Zea mays
gttgagactggtatcatcaagcctggtatggttgttacctttggtcctagtggccttactactgaggtgaagtctgttgaaatgcaccatgaggctctccaggaggcccttcctggtgacaatgttggcttcaatgttaagaatgttgctgtgaaggatctgaagcgtgggtatgtggcctccaactccaaggatgaccctgccaaggaggctgctagcttcacgtcccaggtcatcatcatgaaccaccctgggcagattggcaacggctatagcccag

SEQ ID NO: 59540 - DNA, 284 bp, Zea mays
ggccaagatccaggacaaggagggcatccctccagaccagcagcggctcatctttgctgggaagcagcttgaggacgggcgcacgcttgccgactacaacatccagaaggagagcaccctccacttggtgctgcgcctcaggggaggcatgcagatcttcgtgaagaccctgaccggcaagactatcaccctcgaggtggagtcttcagacaccatcgacaacgtcaaggccaagatccaggacaaggagggcattcccccagaccagcagcggctcatctttg

SEQ ID NO: 59541 - DNA, 281 bp, Zea mays
gaaggaaatcatatttacctatgatgtaggcttcgaggacggtgatatcaagtgggcttctcgctgggacacctacttgttaatgatagatgatcaaattcactggttttctattgtgaactctctcatgatcgtactcttcttatctgggatggtggcaatgattatgctgcgcaccctgtatagagagatctctaggtacaatcagcttgaaactgaagaagaaacccaagaggagacaggatggaagcttgttcatggagacgtattccgccctcctg

SEQ ID NO: 59542 - DNA, 144 bp, Zea mays
agctgacttaattggggtgagtcatttactagttgacgagattcatgaacgcggcatgaatgaagattttctcatcataatactgcgtgaccttctaccaagacgtccagatcttcgccttgtactgatgagtgcgatataaat

SEQ ID NO: 59543 - DNA, 299 bp, Zea mays
ggtgtcgcagcctcgcctttgttgtacgcgcgcgtgtgggcactcagcagcaccttcagaaatggattttttcacagagtacggcgaggggagcaggtacaagatagaagaggtcataaggaaaggcagttacggtgtggtttgctctgccttggacactcatactggtgaaaaggtcgccataaagaagataaatgacatctttgagcatgtgtctgatgcgacaaggatacttcgggaaatcaagttgcttagactcctgcggcatccggatatcgtggaaataaagcatattctac

SEQ ID NO: 59544 - DNA, 293 bp, Zea mays
caaaccctagccgcctcctgcaagtttcagagctcaggaatctgcgccatggcgagtgagacggagaccttcgcatttcaggctgatgccaaccagctgctctcactcatcatcaacaccttctactccaacaaggagaccttcctccgcgagcttatctccaactcttccgatgcgctggacaagatcaggttcgagagtctcactgacaagcgcaagctcgatgcgcagctgagcttttcatccaccttgtcgcagacaatgccacgaacacgctctccatcatcgacagc

SEQ ID NO: 59545 - DNA, 292 bp, Zea mays
gtttgaggaaggaggcgattgggagaggaagaacaggttgaaagtatatgaaggcttgtactgcatggcaaccagaaacttcaagaaagctgccagcttatttttagactcgatttcgactttcacaacttatgagatattcccatatgatacgttcatcttctatacagtcctcacaagtgtcatcacattggatcgtgtatctctgaaacaaaaggtggtagatgcaccagaaatcctggctgtaattggcaaagtacctcacctctccgagtttctcaactccctgtac

SEQ ID NO: 59546 - DNA, 151 bp, Zea mays
gaaacctctcaaaccctagccgcctcctgcaagtttcagagctcaggaatctgcgccatggcgagtgagacggagaccttcgcatttcaggctgagatcaaccagctgctctcactcatcatcaacaccttctactccaacaaggagatct

SEQ ID NO: 59547 - DNA, 279 bp, Zea mays
ctagggtttttgattttagccgccgccgctgctcatctcacatccctcgagaagacgcctgctcctcgccgatcgatacgatggccgtcttctccgacctccacaccgccgacggcctcaagtccctcgaggctcacctcgccggcaaaacctatgtatttgagtgactccattactaaggatgacattaaggtcttcgccgcggtgccgtcgaagcctggcgctgagtttcctaatgccgcccgctggtacgagaccgtctctgcggctgtagcctca

SEQ ID NO: 59548 - DNA, 310 bp, Zea mays
  unsure (1)..(310): unsure at all n locations
tatcggcgtacgaagtcggaatgacgtcagctcacggtatgaggctgacattctccaaagtgcattgagggaaggcgttgataaaataaagtacagagcatggccgttggtaccgtcgatgtctgctaggatggatcaccaaccattggaggtttctccttcatctgactttgtccagataccagctgatgcagctgatgtttgggaagtcgatctcaggcttctcaaatttgaacaaaaattagcgtctggatcatttggtgatctataccatgggacgtactgtagtcaagatgtagctatcanagta

SEQ ID NO: 59549 - DNA, 283 bp, Zea mays
gaccattggtatttctgttgatcaccggcgcaagaacaaatcccttgagggactgcaggacaatgtccagaggcttaagtcatacaaggccaagctggttatcttcccaaggcgtgcacacaaggttactgctggtgactctactccagaggagcttgccaccgctacacaggtccagggtgactacatgccatatactcgatgtgagaaacgttcagttgaggttgtgaaagtcacagatgcgatgaagtcatttgctacctatggcaagctacgccttgag

SEQ ID NO: 59550 - DNA, 292 bp, Zea mays
acggcgaagggccgaatcgcaccgcactgtagggagaagcttctgcaaggttttggagcgggcgatggatgcggcgagcaacggcgggcttctctaccacgaggtgcaggaagggaagctctgcgccgtgcactgcgtcaacaccgccctgcagggccccttcttctccgagttcgacctcgccgcgctcgccgccgacctcgaccagcgggagcgcctggtgatgctcgagggctcccgaagccccggtgcgggcaacgctgctgcaggggatttcttcgccgagggcgag

SEQ ID NO: 59551 - DNA, 285 bp, Zea mays
accgggcagtgaagcagatgccgaacttcatccgccaggaggccgtcgagaaggccgccgagatcgaggccgccgccgccgaggagttccaaatagaacagttgcagctggtggaagctgaaaagaagaagatcaggcaggaatatgaccgggaagatgagcaagttggcatcaagaagaaaattgattactcgatgcagctcaatgcgtccagaattaaagtcgttcaagctcaggatgatttggtaacagatatgtgggagtcggcaaggaaagaggtactgt

SEQ ID NO: 59552 - DNA, 281 bp, Zea mays
caaggttaagtttaagattgtcagcctgaaagtcaaagggccggtggagtacgtccctgaactgtttgatgagcagaaggaccaggtcgcggtcgagcaaatattgcgggtagtattcttggatgctgagcgcccaagcccacaaatggacaaactcaagcgccactagctgaagcagaagcagcccttgaggcacgcaagaaacctccagaggacaatggtccccgtattgttggtgaaggccttgtgattgacgaatggaaggaacgaagagagacgta

SEQ ID NO: 59553 - DNA, 284 bp, Zea mays
gattttagccgccgccgctgctcatctcacatccctcgagaagacgcctgctcctcgccgatcgatacgatggccgtcttctccgacctccacaccgccgacggcctcaagtccctcgaggctcacctcgccggcaaaacctatgtgtctggtgactccattactaaggatgacattaaggtcttcgccgcggtgccgtcgaagcctggcgctgagtttcctaatgccgcccgctggtacgagaccgtctctgcggctgtagcctcaagattccctggtaaggc

SEQ ID NO: 59554 - DNA, 289 bp, Zea mays
aacacgtgggcccggcctcagattcagcgcattcatctggtaagcttgatattggtgagcttgtgcacatattatctgatcaagggaggcagaacatgatcactgcgctggatgtagcaatgcctgccccttctttgacagatagaacagatttgaggaacatacagaggagcttgcattctctgacacctgaaatcagcgacgaggatgaagatccttacgctgttgaatccatggtggttcatggagtcctagatgcaggcgggaaaagggcttccatatctcaggt

SEQ ID NO: 59555 - DNA, 285 bp, Zea mays
cctatttaccagaggcccttcatgaaggggaagctctacattcatttcacggtggagttccccgactcgctggcaccagagcagtgcaaggctctcgagtcggtacttccgccaaagccttcgtccaagctgacagacatggagatagatgaatgcgtagagacaaccatgcatgatgtgaacaacatcgaggaagagatgcgcaggaagcaggctcatgctgctcaggaggcgtacgaggaggacgacgagatgcctggcggagccaaagagtgcagtgcgctc

SEQ ID NO: 59556 - DNA, 283 bp, Zea mays
ctagtcctctgttacttctcccgccgccgccaatcccctcccgttctccgccaccgccaatcccctcccgtcctccgccacctctgctgagagcgagaagagatggccggcaagggtgatgggccggcaatcggcatcgatctcggcacgacctactcttgcgtcggtgtgtggcagcacgaccgtgtcgagatcatcgccaacgaccagggtaaccgcaccacaccctcgtacgtcggcttcaccgactccgagcggctcatcggagatgcggccaagaacc

SEQ ID NO: 59557 - DNA, 283 bp, Zea mays
ctctcaaaccctagccgcctcctgcaagtttcagagctcaggaatctgcgccatggcgagtgagacggagaccttcgcatttcaggctgagatcaaccagctgctctcactcatcatcaacaccttctactccaacaaggagatcttcctccgcgagcttatctccaactcttccgatgcgctggacaagatcaggttcgagagtctcactgacaagagcaagctcgatgcgcacctgagcttttcatccaccttgtcccagacaaggccacgaacacgctct

SEQ ID NO: 59558 - DNA, 282 bp, Zea mays
agtgaaaaggaacaagtctgtcaagccgtttctcgacaagaattaccgtatccagattcttacctcgcatacccttcagccggtccccgttgccattggaggtcctggccttcaccctggagtggaattccggaacgacatccagacccctgggctcgccaacgtatccgcagtcgtgatgaacctccacggatttgatgctcctgctgactacgagcaaaccctcattgaagttgctgacaactaaacacttgccacgtgtgtccaattttggttatatgt

SEQ ID NO: 59559 - DNA, 282 bp, Zea mays
aaagaacagtgaccttgaagaattgcgtgaacttggttctggaacctttggtactgtttaccatggaaagtggagaggttgacatgttgctataaagagaatcaacgatcgatgctttgctgggaaggcttctgagcaagagcgtatgaggactgatttctggaacgaggcagacaagcttgcatctttgcaccatccaaacgtagtagccttctatggtgttgttgtagatggacctggtggatctgttgcaacggtaacagaatacatggctaatggctc

SEQ ID NO: 59560 - DNA, 286 bp, Zea mays
tgtcccgttcgttttcccgcttccacccccgcgacgacgatgacagctctatgttcgatccaccggagccgccggtgaactggggcatgaacatagttccggagaagaaggctttcgtcgtggagaggttcgggaagtatctcaagaccctcgactccgggttccacctgctgatccccgccgtcgaccgtattgcctacgtgcactcgctcaaggaggagaccatccccattcccgaccagaacgcaatcaccaaggacaacgtcaccatacagatcgacagcgt

SEQ ID NO: 59561 - DNA, 289 bp, Zea mays
accaaatactccaaggcacgttatgaagagattgtgaaggaagtctcatcctacctcaagaaagttgggtacaaccctgataagattgcctttgttcccatttctggttttgagggcgacaacatgattgagaggtccaccaaccttgactggtacaaaaggccaaccctgcttgaggctcttgaccagatcaccgagcccaagaggcctttagaacaaagccctagagtagaacacacatgtgtccgtgataaggcaggtgaatctctgtgccgtattggtgcacaaa

SEQ ID NO: 59562 - DNA, 281 bp, Zea mays
agcccagagattatgtcgaagttagcaggagagagtgagagcaatctcagaaaggcatttgaagaagcagagaagaatgctccatctatcattttcattgatgaaattgattccattgcacccaagagagaaaagaccaatggagaagtagaacgtcgtattgtttcacagctactgactcttatggatggactcaaatctcgttcccatgttattgttatgggtgctacaaaccggccaaacagcatcgatcctgctcttagaagatttggaaggtttga

SEQ ID NO: 59563 - DNA, 279 bp, Zea mays
aacaagttttacgaggctttctccaagaacctcaagcttggcatccacgaggactcgcagaacaggaccaagatcgccgagcttctgagataccactccaccaagagtggtgatgagctgaccagcctcaaggactacgtgaccaggatgaaggagggacagaatgacatatactatatcactggtgagagcaagaaggcagtggagaactcccccttccttgagaagctgaagaagaggggctatgaggttctgtacatggttgatgccattgacgag

SEQ ID NO: 59564 - DNA, 283 bp, Zea mays
caccattctgccgttcacacctctctcgctgcctttatttcctgttggcgacgctctcgccaggtcttcggcggcccgttcggcggcgactagcgcctccgtttgccaggtcttcgtcgtccgtttcgccgtcgactggtgcccagcaggtacatcttgaagaatgggggtttaccttagcacaccgaaaactgacaaggtatccgaagatggggaaaacgataaacttaaattcggactttcatctatgcaagggtggcgtgcaactatggaagacgctcac

SEQ ID NO: 59565 - DNA, 151 bp, Zea mays
accgagcggagctgggaagcggaggtctatagaagaaccatatgtgaagattgaaatgcttacaccaaaagattatattggttcaataatggagctgactcaagacagaagaggtgaattcaaggacatgaacttcatcacagaaagcagg

SEQ ID NO: 59566 - DNA, 270 bp, Zea mays
cgcaggcgaaggcgagggtgtgagggaaggagcaccagccatggtgcacgtcaacttctaccgcaactatggtaagacgttcaagaaaccaaggcgtccttatgagaaggagcgtcttgatgctgaactgaagctggtcggtgagtatgggctgaggtgcaagcgtgagctttggagggtccagtatgcactgagcaggatccgtaatgctgcaaggcacttgctcacccttgacgagaagaacccccgtcgtatctttgagggtgaggc

SEQ ID NO: 59567 - DNA, 139 bp, Zea mays
agcagggatgcacaagatgccattcgcgatttggatggtaagaatggttggagggttgagctgtcaaccaaagatggtggtggccgtgcgagaccgtaatggtctgatatgagtgctatgagtgtggtgaagttggcac

SEQ ID NO: 59568 - DNA, 278 bp, Zea mays
atattttgggataatgacagtttagccggtcttttggctatagaacttaaagcagatcttcttgttctactcagtgacgtggatggcctctacagcggtccacctagtgaacctcaatcaaagatgatacatacatacatcaaagataaatatcataacgaaattacttttggggataagtcacgtgtaggtagaggaggaatgacagctaaagtgaaggctgctctcgtggcttcaaacagtggcacacctgttgttattacaagtggatctgcatc

SEQ ID NO: 59569 - DNA, 277 bp, Zea mays
accgctttgcaagcaagcagataagcccacaggtttcaggcggcaatttcgaagttggacaagtgacctacaggttcaacttcatgagatcaagagggccgagacggatgcagtgcaatatccagtgccctgtaggccagggcagcgcttcggatccgtccaaggagaaaacaccctcgccgagttccttggacctgaagaacaaggctccaagatggcacgaccatcttcagtgttggtgcttaaatttcgacggtacggtgacggtcgctccgtg

SEQ ID NO: 59570 - DNA, 277 bp, Zea mays
  unsure (1)..(277): unsure at all n locations
ctagtcccctgctccattctcagcaggccgccaatcccttcccgtgctccgcaaccgctgagtgagcagaagagatcgccggcaagggcgatggcccggctatcggcatcgatctcggcacgacgtactcttgcgtcggcgtgtggcagcacgaccgcctncagatcattgccaacgaccagggtaaccgcaccacgccctcgtacgtcgccttcaccgactccgagcgcctcatcggagatgcggccaagaaccaggtcgccatgaaccccatcag

SEQ ID NO: 59571 - DNA, 276 bp, Zea mays
gaggactacaacaagttctatgaggccttctccaagaacctcaagcttggcatccacgaggactccacgaacaggaccaagattgctgagctcctgaggtaccactcgaccaagagcggggatgagctgaccagcctcaaggattatgtgaccaggatgaaggagggccagaacgacatcttctacatcactggtgagagcaagaaggctgtggagaactccccgttccttgagaagctgaagaagaggggctatgaggtgctgttcatggtggat

SEQ ID NO: 59572 - DNA, 281 bp, Zea mays
cagaggcaaagactcttctagagactgctcactcgttctacctgaatgatgtgagatacagactcgtggagcgcttcaacaaagagactcatgattttgagttcggggacgtccttaaagtgcttgacatgccaaccatgtgacccagtttaattcccaaccaatagcaaatattcctagagaacattgattttctgtcacctcaaatcctcaatttagcacgggagattgctttcttgcatcatcagaggcagtaagatggagccactggatatcgtcct

SEQ ID NO: 59573 - DNA, 274 bp, Zea mays
ttggactgcttgctccctgttgaccattgggtattctgaaccatcgagccatcgctgccaagctgactcgcctccacagtcttcgcgaacgccttggtgccaccttctcctcccatcccaatgaactgatagcactcttttccaggtatgttcaccagggcaagggcatgcttcagcgccatcagctgcttgcggagtctgatgccctgtttgatagtgacaaggagaagtatgcaccctttgaagacattcttcgtgctgctcaggaagcaat

SEQ ID NO: 59574 - DNA, 283 bp, Zea mays
tacgggagcagtcgacgcgccgtcactgaatcctcagatcacggctagccgtaatcacacgccactctgctgactcccggcgagtgtaacattttccttcagccatgggcaaggagaagactcatatcaacattgtggtcattggacatgtcgattctggcaagtcgaccaccactggccacctgatctacaagctcggcggtattgacaagcgtgtgattgagaggttcgagaaagaggccgcggagatgaacaagcggtcattcaagtatgcctgggtgct

SEQ ID NO: 59575 - DNA, 284 bp, Zea mays
acgcagaccgggagtagtcgacgcgccgtcactgaatcctcagatcacggctagccgtaatcacgccactctgctgactcccggcgagcagtgtaacattttccttcagccatgggcaaggagaagactcacatcaacattgtggtcattggacatgtcgctctggcaagtcgaccaccactggccaactgatctacaagctcggcggtattgacaagcgtgtgattgagacggtcgagcaagaggccgcggagatgaacaagagatcattcaagtatgcctgg

SEQ ID NO: 59576 - DNA, 286 bp, Zea mays
ggaggaggccccggcgcgatggagtacctgaccagcgtgctgtcatccaaggtgtacgacgtggcaatcgaatcaccgctgcagctcgcctccaagctctcccaccgcctcggggtcaacatctggatcaagcgcgaggacctgcagccggtgttctcatcaaattgcggggagcatacaacatgatggcaaagctctcccgtgagcagttagcagagggcgtcatctgctcctctgctggaaaccatgcccagggcgttgctctttctgctcaaagactgggttg

SEQ ID NO: 59577 - DNA, 281 bp, Zea mays
  unsure (1)..(281): unsure at all n locations
gttcgtggatcaaaggttcagtgggtccacgcttgaagtgaccgggatagtagttgaatccggggagtgggctattgttgggggcaccggtcagtttgccatggcaaacggtgtcatcttcaagaagttccatgagcagagaagcgaagggaacatcatcaactcaccatccatgctttctgtccggtgctcggaccgagaaagcgctcggccgcaaaagttggaacgtggggtgggagcggcgggtctccggtggacatcacggcagagcnccagcgtct

SEQ ID NO: 59578 - DNA, 246 bp, Zea mays
gagagcatcaatgagaaggaccgctgtccagggtgcaagggtgagaaggtcattcaagagaagaaggttcttgaggttcatgttgagaaggggatgcaacacaaccagaagatcagcttccctggtgaagctgatgaagcgcctgatactgtcactggagcattgtaattcgtcctccagcagaaggatcactccaaattcaaaagacagggtgaagatctcttctatgagcacacttgtctctga

SEQ ID NO: 59579 - DNA, 274 bp, Zea mays
gccacggccggccggtggacgacagcaccacaccacctccaactacccgagaccatcgacgagcatcttcctgcatctgcaatggctgccgctaccgtgtccgtcccccgcatcaagctgggctcccaggggctagaggtctccgcgcagggcctcgctgcatgggcatgtccgccttctacggtccgcccaaacccgagcctgacatgatcaagctcatccaccacgccgtcgccgccggggtcaccctcttgacactccgacatgtacggcc

SEQ ID NO: 59580 - DNA, 286 bp, Zea mays
gtgggagataacaagtacagcccctgccctctcctcgtccagtacgtcgatgctggccggcttgggaagaagcgtggagtaggcgtgtattcgtatgggcacaggccttcgtccgtcaggccaaagtcgtctctgtagacgtgagagcaaactgtgggcgaataaaaccaggtgcgtgttgcaattgcacgtaagagaaaaagggagcacagcctagttcagaggtactcagatggacgcttcaggtcgtgcagattcgtaatggcagggtttgctgatctatgta

SEQ ID NO: 59581 - DNA, 153 bp, Zea mays
gacgggcgcacgcttgccgactacaacatccagaaggagcgcaccctccacttggtgctgcgcctcaggggcggcatgcagatcttcgtgaagaccctgaccggcaagactatcaccctcgaggtggagtcttcagacaccatcgccaacgtc

SEQ ID NO: 59582 - DNA, 278 bp, Zea mays
ctggagcacaatgagaacaagcctgtcacaaacagccgtgacactcaggagatacgcctcgaacaaggccttcagatgctcaagatattcaaggatcatgtcagcaagacttccatcctcgacgactttgccttctatgagagccgccagaagttgatgcaggataagaggtcgaaacagcagcagctccaaaagcaggtctgggacactaggacccccgtttctgtcaccggtgaacgaccgcaggaacctgctgatgggaagccaatcggtccgta

SEQ ID NO: 59583 - DNA, 216 bp, Zea mays
ctggagctcttcctccgcgcgcttatctccaactcttccgctgcgctggcaccagatcaggttcgagagtctcactgacaagagcaagctcgctgcgcacctgagcttttcatccacttgtcccagacaaggcacgaacacgctctcactccgcccacggcatcggcatgaccacgtccgaccttgtcaacaacctcgcgtaccatcgccaggtcc

SEQ ID NO: 59584 - DNA, 270 bp, Zea mays
ggtcttccaagtcaactaaggttggcgacatcatgactgaagagaacaaactgatcacagtgaatcccgacaccacggtcctgcaggcaatgcagctcatgacagaaaaccgcgtcagacacatcccggtgatcgacggcacggggatgctgggatggtctccatcggcgacgtcgtgcgcgcggtggtggccgaccacagggaggagctgcaccggctcaatgactacatccagggaggctactaagacggcgtgtgcagcgacgaccc

SEQ ID NO: 59585 - DNA, 232 bp, Zea mays
cggatcagtgaggacagttatggcagcttcagtgctcacagaagcaggcctcacatgtcaaaggctgtgagatggggcgccatcaggcgcatggctatccaccaagggcgcttgggattcccgagcttcaagcttctcaaacaacttttctcgtgggatattggcactgtatatttggctgagttagtgggctcagactgcatgttcgcattgcaggtctggacatcgagta

SEQ ID NO: 59586 - DNA, 276 bp, Zea mays
ggccgtctcgcacgttcctttccccaactccccagcgcctctccgcgccgcgatccagatccaggttgttcagcatgggtctggtgaaggcaggcgtcgacatggaggagggaaccctagagatcggcatggagtaccggactgtatctgtgtggcccaactctggttatcttggataaagtacagggcccaaagtaccaagacctgtcaacatccgacttggagctggcaccatcgccgtggtcaagtccttgaagttgatggagaaaagctgtt

SEQ ID NO: 59587 - DNA, 275 bp, Zea mays
gcataattgcaggagctgatgagttctcctggcctccgtttgtgatgggatcaatttttcttgcgattcttctaattcatgacaatccaggaaaatccaataaaagattgcattttctaagcgtttctggtcctcttacggctgttgtcttggaccatttttgtgaaaatctttcatccacccgccatatcagtggttggtgacataccacagggtcttcccaggttctccattcctcaaggatttgagcatctaatgtcacttgtgccaactgc

SEQ ID NO: 59588 - DNA, 274 bp, Zea mays
ccctgctccattctcagccgccgccaatcccttcccgtgctccgcaaccgctgagtgagaagaagagatggccggcaagggcgatggcccggctatcggcatcgatctcggcacgacgtactcttgcgtcggcgtgtggcagcacgacccgtcgagcacattgccaacgaccagggtaaccgcaccacgccctcgtacgtcgccttcaccgactccgagcgcctcatcggagatgcggccacgaaccaagtcgccatgaaccccatcaacaccg

SEQ ID NO: 59589 - DNA, 272 bp, Zea mays
gacaactctctctaccgtccgagaccccaagcaccagcgcggcggcggcgaccatggctgtcggaaagaacaagaggatctccaagggaaagaagggtggcaagaaaaagaccgtcgaccctttctctaagaaggattggtatgacataaggcaccgtcggtgttcagtgtgcgcaacatcgggaagactctcgtatccaggacacagggtaccaggattgcttctgagggtctgaagcacagagtctttgaggtttgcctagctgatcttc

SEQ ID NO: 59590 - DNA, 268 bp, Zea mays
gccgaccaccaaggccagcgcggcgaggaccgtggtcttgatgctgctggcggcggcggtctccacgttaggggacatgcagttgcatgagctgccgcaggagcagctggagccacagtcgcacttgccgctgctgcaagacatgctcacggcgaaggggagcaggcggccaccgagggcggcggctgcgactgcaacacctgcaactgcggcaccagctgcggctgctcctgctgcagctgcaactgagccggtcaggcgatggcgc

SEQ ID NO: 59591 - DNA, 281 bp, Zea mays
agagggctcccagcgctttcttcgtgttcatggaggaatttcgcaaggagttcaaggagaagaaccctaagaacaagtctgtcgctgcggtggggaaagctgctggcgacaggtggaaatccctgagcgagtcggacaaggctccctatgtagccaaggctaacaagctcaagctcgagtacaacaaggccatcgctgcctacaacaagggcgagagcactgcagctaagaaggctcctgccaaggaggcagaggaggaagatgaagaggagtctgacaat

SEQ ID NO: 59592 - DNA, 272 bp, Zea mays
ctcgagccgccaagacctcctcagacccgagaagcgcagtgcggccatggacgccaccggcactggagctggagggaaggcgaagaagggagcggccggtcgcaaggccggcgggccgaggaagaagtcggtgacgaggtccgtgaaggcgggctccagttccccgtcggccgcatcgggcgctacctcaagaagggccgctacgcgcagccgtcggcagcggtgcccccgtctacctcgcggccgtcctggagtactcgccgctgaggtct

SEQ ID NO: 59593 - DNA, 177 bp, Zea mays
ctgaaaagctcatggagtatcagaacaaacgcggaggcagggtgaggctccagtcgattgtggcgcctttgaccgagtttgaccaccccgagaaaggcgatgctctgtacgctatggagctgactctggctctggacaagctggttaatgaaagctgaacagcctgcatggtgtggc

SEQ ID NO: 59594 - DNA, 270 bp, Zea mays
ctcgagccgattcggctcgaggcgaagcgagagatccaatggcggtggcggcggggcagtgggtgctcatggcaacggggtggacgccgaccaacattgcggtgatcaagtactgggggaagcgggacgaggcgctcatcctcccctcgacgacagcatcagcgtaacgctcagacccgaccatctctccgccaccacaactgtcgccgtcagcccctcattcccttccgaacgcatgtggctcaatggcaaggagatctcgctattagg

SEQ ID NO: 59595 - DNA, 259 bp, Zea mays
ggtgcaccgagcgctgcctcgactggggcgaggcgggcgagcccgacctcatcgtcgacgacggcagcgacgcacgctgctcatacacgacggtgtcaaggccgctgtggattacgagcagaccggcaagatccccgacccggcgtccaccgacaacgctgcgttcaagatcgtgctcaccatagtccgcgacgggctaaacgctgaccccaagaagtaccgcaagctgaacgagaggcttgtcggcgtctctgaggag

SEQ ID NO: 59596 - DNA, 276 bp, Zea mays
gaacctattaaattacgtgtgagaagcatcttccgtgaagcatgtgacggtgttagacttaatccagaagacgagaagtttatcctggagaaagttcttgagcaccacccggaaaagcaatccaaggtgtctggtgaaatcgactactaacggtcaacaagcaccagactttccaggacactcggtgctttttcgtggtctccacagatggatcccaggcagatttctcctacctgaagtgcctggagaactttgtgaggaagagctacacggagg

SEQ ID NO: 59597 - DNA, 277 bp, Zea mays
gtcagactcttgtgaagagcgccattgtacaagttgatgctgctccattcaagcagtggtacctcactcactatggagtggacatcggtaggaagaagaaggtgcctgttgctaagaaggatgcgactgagggacaagagggtgagctatagctgaggaaacaaagaagagtaaccatgtgcagaggaagattgagaagcgccagcaggaccgtgcactcgacactcatattgaagagcaatttggcagtgggagattgttggcttgcatttctgcc

SEQ ID NO: 59598 - DNA, 278 bp, Zea mays
gtatgactgggatgttgcaactacgtttgcttttctacagaagtatggtcttaccggagagttcaagattaatgttgagtgcaaccatgctactctatctggacatagctgccatcatgaactggagactgcacgcattaatggctgcttgggaacattgatgcaaacactggtgatcctcaagttggctgggacacggatcagttcatgacagacattgcagaggctactttggttatgtcaactgtggttaagaatggtggacttgcacctggtgg

SEQ ID NO: 59599 - DNA, 244 bp, Zea mays
tgttcggagcgcacacacacacaaccagatctcccccaaatccacccgtcggcacctccgcttcaagatgcagatctttgtgaaaaccctgactggcaagactatcaccctcgaggtggagtcgtctgacaccattgacaacgtaaggccaagatccaggacaaggagggcatccccccagaccagcagcggctcatctttgctggcaaacagcttgaggacgggcgcacgcttgctgactaca

SEQ ID NO: 59600 - DNA, 302 bp, Zea mays
ctcggtttcaccgtgtacccatccccccaggtgtccacatccgtggttgagccatacaacagtgtcctgtccacccactctctcctcgagcacactgatgttgctgtcctgctcgacaatgaggccatctatgacatctgccgccgctcccttgacattgagcgcccaacctacaccaacctcaacaggcttgtgtcccaggtcatctcatccctgactgcttccctgaggttcgatggtgctctgaacgttgatgtgaacgagttccagaccaacctggtgcctaccctaggatcacttca

SEQ ID NO: 59601 - DNA, 287 bp, Zea mays
aaaacttcaaatttgggatactgctgggcaagagcgcttcaggacaatcactagcagctactaccgcggagctcatggaatcattattgtatatgacgtgacagaccaagaaagcttcaataatgtgaagcaatggttgaacgagatagaccgttatgcaagtgataatgttaacaagctccttgttgggaacaagagtgaccttactgccaacaaagttgtggcaactgagacagcaaaggcgtttgctgatgagatgggcatcccattcatggagacgagtgcca

SEQ ID NO: 59602 - DNA, 300 bp, Zea mays
gtcagaccaatcaacaaagtgacgcgagcacgagcatccatcgtttccccttcttccccatcgcgtgccctcgccgcagccatcttccatggcggaccagctcacggacgagcagatcgcggagttcaaggaggccttcagcctcttcgataaggatggcgacggctgcatcactaccaaggagcttggaactgtgatgcgctcccttggccagaaccccactgaagcagagctgcaggacatgatcaacgaggttgatgctgatggcaatgggaccattgacttcccagagttcctgaa

SEQ ID NO: 59603 - DNA, 306 bp, Zea mays
cggctttgtggccaagccggcgatgctgccggatggttctgtcaacctcatgctctggaactgcgtcgtccccggcaaggaaggcactgattgggaaggtggatatttcccagtcactctccatttcactgaaaattacccaagtatcccaccaacctgcaagttcccacgaaggtttttccatgtcaacgtctatgattctggggatgtatgcctgtcaatacttggtgatgcatgggcgccctctatcacagtgcggcaaattcttataggcatccaggagctgctggagaacccaaatccagc

SEQ ID NO: 59604 - DNA, 305 bp, Zea mays
cggaggaggagcagcagcagcaggcggcgccgaggagcggcatcccactcagtgcttgcaaccatggctaggggattgaagaagcacttgaagaggctcaatgcgcccaagcattggatgctcgacaagcttggcggagcttttgctcccaagccatcttctggacctcacaagtccagggagtgccttcctctgatcctcatcgtcgggaggggctcaagtatgctctgaactaccgtgaggtcatttctatcctgatgcaacgccatgtacttgttgatggcaaggtcaggactgacaagacc

SEQ ID NO: 59605 - DNA, 307 bp, Zea mays
gcacaagtatcctatgaattccactctgaaaggaagagaaatccagagaagttcagacaccagctaagaaatcagggtacatatgctaagcttggatttaagcattccctaaaccatctttcatcgaggaacatttctcaacttgcaaaggtgaagatcatgaaaagacctggttcccagtgggaagagctaaagattcctcgcagcattcaatcagttatctgcctgaacctgccaagcttctctggaggattgaatccatggggaacacctggcacaaggaaagcacaagacagagacctgactg

SEQ ID NO: 59606 - DNA, 171 bp, Zea mays
attgtctgcaacattggccactttgacaatgaaattgatatgctcggccttgagacctaccctggcgtcaagcgcatcaccatcaagccccagactgaccgctgggtgttccccgagaccaacactggcatcattgtccttgctgagggtcgcctgatgaaccttgtgtgt

SEQ ID NO: 59607 - DNA, 295 bp, Zea mays
cgcatggtcaacaacacccgcctcaacttcgacgccttccacggcgacaaggaccacggcggcgtgcacgacggcaccgccgtcgtgctctgggagtggtgcgagggcgagaaccagagctggaagatcctgccgtggggtcccgaggccaactcctccgcggcccacgcgggaggcccgcacgccgtgcgcgtcttctgcaaggccggcggcgaggactacagcctcacggtgcgcaacggcacggcgtgcctggcgcccaccaacccgcgggacgagtaccagcactgggtca

SEQ ID NO: 59608 - DNA, 292 bp, Zea mays
gcccggtgcatgttatgaccaagggtctgatttacttgggcatgaggctgctgaaattgcaccttcccgtgaaacttgtggacttcatcatcttgaccttggcaaacatccagttcggtgacctctcccgctacggcatagtcaggcccgacatgggcccgcttcttctcaaggccaagactggccggtcggcggtcctagacgttggcacaacccagttaataaagacgggcgatatcaaggtggttggggcgatatctcgcatcagaggaaacacgatggatttcgagga

SEQ ID NO: 59609 - DNA, 300 bp, Zea mays
ctctcctgctcctaccgcagctctccctcaggtttagtgttcgcaatggcggccttcaacaagcttggtggccttctaaggcacagtgctctggtgagcggtatcactggtggctcttctcctgcagtgttcaatgctgcacggctcatgtctaccaagctatttattggtggtcttgactggggtgttgatgacgtgaaactaagagaagcatttagcagctttggagaggttactgaagcgaaggtgatcacagacagggagactgggaggtcaagaggctttggctttgtgaactac

SEQ ID NO: 59610 - DNA, 303 bp, Zea mays
ccgcctcagcccatcgccctccgccacagcgtaccgcgacctcatcgatcaccttcaactttcaatcatggcggacgtcgatgtcgaaccggaggttgccgccggcgctcccaagaagaggacgttccgcaagtacagctaccgcggcgtgcccctagatgctcttctcgacatgtccgaggacgatctcggccagctcttccccgcgcgcgccaggagaaggttccagaggggtctgaagaggaagcccatggcactcatcaagaagctgcgcaaggcgaaaaaggatgctcctgctggtga

SEQ ID NO: 59611 - DNA, 268 bp, Zea mays
cccactcgtgtcctcgaccttgattctgacaaattggctgcattctctgctgcatacgcagaacttgaatctgtactttctggattgaatgtgcttgttgagacttactttgctgatgttcctgctgagtcctacaagaccctaacatctctgagcagtgtgactgcttatggttttgatcttgtccgtggaacccaaactcttgggcttgtcacgagtgctggtttccctgctggaaagtacctctttgctggtgttggggatggac

SEQ ID NO: 59612 - DNA, 310 bp, Zea mays
acgcgcctcaagcaagctgccatcaggagcgggaaccctgtggtgctgtttgagcacgtccttctgtacaacctgaaggagaaaatcccggacgaggagtacgtgctctgcttggaggaggccgagatggtgcggcctggggagcacgtgactatactcacatactcgcgcatgaggtaccacgtgatgcaggcagcgaagacgctggtgaacaaagggtacgatcccgaggtcatcgacatcaggtcgttgaagccgtttgatctgcacactattggcaactccatcaagaagacccaccgcgtgctga

SEQ ID NO: 59613 - DNA, 183 bp, Zea mays
tccagatcgtgtgcttcgaggtccacgccgacaggaacgagaaggtgttcctggccggcgccgacaacgtgctgcagaagctcgaccgggtcgccaaggcgctgtcattcgcctccaaggcggaggaggtggacgaggtgctcggctcgcggcgcgagaaggggttccttcctgcccccaagg

SEQ ID NO: 59614 - DNA, 285 bp, Zea mays
gagacgaggagcacagatctggcgcgagcctggtggcgccggacatctaccaccccgacggcaccgcggccgacgagcacggccaccaccacatgagcgtgttgcagcagcacgtcgccttcttcgaccgcgacgacaacggcatcatctacccttgggagacgtactccggatgtcgtgcgcttgggttcaacatgatcctgtctctcttgatcgctcttgtcgtgaacgggaccatgagctaatgccacgctgcctgggtggctgccgtcccctctgttcccg

SEQ ID NO: 59615 - DNA, 167 bp, Zea mays
agaggagaggttgggtctgggacaccatggctccgatgaagctgtacggggcggtgatgtcgtggaacgtgacgaggtgcgcaacggcgctggaggaggctggctccgactacgagatcgtgcccatcaacttcgccaccgccgagcacaagagccccgagtacctc

SEQ ID NO: 59616 - DNA, 295 bp, Zea mays
gagctctctctctctccgtatccggcggcggaagcggaaccggaagcggaaggaagtaggcggccaccatggtgaagggacgcacggggcagcgcgtcaggctctacgtccgcggcaccatcctcggatacaagaggtccaagtcgaaccagtacgagaccacgtcgcttgtgcagatcgagggggtgaacaccaaggaggacgtcgcgtggtacgctggcaagcgcatggcgtacatctacaaggccaagaccaagagcagtgagacccgctacaggtgcatctggggtaaggt

SEQ ID NO: 59617 - DNA, 296 bp, Zea mays
gcggcagtgcgtagagaggatcgtcgaacagaacagcatgaagatggtcatcgttctcgtcgtgtgcctggctctgtcagctgccagcgcctctgcaatgcagatgccctgcccctgcgcggggctgcagggcttgtacggcgctggcgccggcctgacgacgatgatgggcgccggcgggctgtacccctacgcggagtacctgatgcagccgcagtgcagcccgctggcggcggcgccctactacgccgggtgtgggcagccgagcgccatgttccagccgctccggcaacagt

SEQ ID NO: 59618 - DNA, 300 bp, Zea mays
cttgtgctagcaaaccttgctgcctactctcagcaacagcagtttcttccattcaaccaactaggttcattgaactctgcttcttatttgcaacaacaacaactaccattcagccagctacctgctgcctacccccagcaatttcttccattcaaccaactagcagcattgaactctcctgcttatttacagcagcaacaactactaccattcagccagctagctggtgtgagccctgctaccttcttgacacaaccacagttgttgccgttctaccagcacgttgcgcctaacgctggc

SEQ ID NO: 59619 - DNA, 288 bp, Zea mays
ccgcctaataatcagtctggcaccaaggaaaccggggacgggacagcagaggacctccagccgaagcatccaaaatatgacatccgggtagcaaacgctatgatcaaggcgtacattaccgagggcatgcttgacaaagctgtcgccatgaagaagcgtgccaagatgcgcggcggaaggctgaacgccaagacatgggagatcttcatggagcattacctcaagacgggggatctcaagatggcccattggtgcgcggaccgcgcgatgaagaaggggcacagcagc

SEQ ID NO: 59620 - DNA, 282 bp, Zea mays
cgccgccgacctcttcagcctcgcagcacaccgccgccagcccgagtgaccgctgcagcctagggtttccgtcggcgatggcgggtaatggagggaagggtctgctggcggccaagacgacggcggccaagagcaccgacaaggacaaggacaggaagaaggcccccgtgtcgcgctcctcccgcgccggcctccagttcccggtgggtcgcatccaccgccagctcaagtcgcgtgcctctgcgcacggccgcgtcggcgccaccgccgccgtctattccg

SEQ ID NO: 59621 - DNA, 278 bp, Zea mays
caccaatggctaccaagatattagccctccttgcgcttcttgcccttttagtgagcgcaacaaatgcgctcattattccacagtgctcacttgctcctagtgccattattccacagttcctcccaccagttacttcaatgggcttcgaacatccagccgtgcaagcctacaggctacaactagcgcttgcggcgagcgccttacaacaaccaattgcccaattgcaacaacaatccttggcacatctaaccctacaaaccattgcaacgcaacaacaa

SEQ ID NO: 59622 - DNA, 276 bp, Zea mays
cgtcatctcttctccggcgaagaacccccagtcgcccaccagatcacttgttaaactttgttgaggggtgatggcggtttctttcgcaaacctcagctccgaggcagggcttaaaaagcttgatgagtaccttctcactcgcagctacatcactggctaccaagcttccaaggatgacttggctgtctacacttcgttttcgtctgctccctcgtccaagtatatcaacgtagcaaggtggtttaatcacattgatgcgctcgtgaggctgagcgg

SEQ ID NO: 59623 - DNA, 263 bp, Zea mays
gtacagtcagacattttggctcagcaccgtctgcccagcctgaagaaaatgggttcaagggccacggcatgctggcgccttttacagctggctggcagagcaatgatttgcaccctctgatcattgagagatctgagggttcctatgtctatgacattaatgggaacaagtatctggactctcttgcaggattatggtgcacagctttaggtggtagcgagcctcgattactcaaagcagctactgagcaattaaacaaacta

SEQ ID NO: 59624 - DNA, 258 bp, Zea mays
cgcgccctgacggtgcgggagctacccagcagatgtgggacgccaagaacatgatgtgcggcgcggacccgcgccacggccggtacctgacggcgtccgccatgttccgcgggaagatgagcaccaaggaggtggacgagcagatgctgaacgtgcagaacaagaactcctcctacttcgtggagtggatccccaacaacgtcaagtcgacggtgtgcgacatccccgcccaggggctgaagatggcgtccaccttca

SEQ ID NO: 59625 - DNA, 276 bp, Zea mays
gctgatcctcaccggcgtcgccatcgtaatcgccttggacagcggcaccagaacctctgcctccgcaggtgcttgctggtatcattacaatctggtagttttagtggttgggcttgacttcctactattcagaaacacagtaccgagaagtctttaggtggggtcaaagatggtgtcgctgaagttgcaaaagcgccttgccgcgagctacctcaagtgtgggaaaggcaaggtgtggcttgacccaaatgaagttagtgagatctccatggcaaa

SEQ ID NO: 59626 - DNA, 281 bp, Zea mays
ctcgagcggaccgcgcgcgcgacctccttgaaccactgccggcgcggcggcatatggcccttaaaggcggtggctgctgctacgtacgctgccgtagagtctcggtcgccgcgatagcactaactagtctatgaggtgtgcgttttgtgtgcatgcatgtgtctgggtgcatgcatgcagtgcagtactataagccgtatacgtctctctttgaatcgagaagccggtgtatcaagtacgctcgatatgtctagtttggatgtcatgtttatgatgaggaa

SEQ ID NO: 59627 - DNA, 272 bp, Zea mays
ctccaaagtgggaagacaggacttatttcctcggttggcaaccttgcggctccagttgaagaatggactgttggtggaacagcattaacatcactgatggatgttgagaggaggcacggcaagttcaagccagtgatcaagaaggctatggtcgaacttgatgctgcacctttcaagaaatatgcatcgatgcgtgatgagtgggccctcaagaacagatacatcagccctggccccatccagttcagtggccctggaagtaatgactcgaa

SEQ ID NO: 59628 - DNA, 274 bp, Zea mays
cgcaagctttctgattttggattggccaagctcttgggtgcagggaagagtcatatcacaactcgagttatgggaactttcgggtatgtggcccctgaatatgccaacactggtctgttaaatgagaggagtgatgtctacagttttggagtgctactactggaatcagttactgggagggacccagttgactatggtcggccagctaatgaggtacatctggtcgagtggctcaaaatgatggttggcacgagaagagctgaggaggtggtgg

SEQ ID NO: 59629 - DNA, 272 bp, Zea mays
gcagcagcagaagcagggcgccatgatgacggcgctcaaggccgcgacggccgcgaccttcggcgggtcgatgctggtgctgtccgggctgatcctggccggcaccgtgatcgcgctcacggtggccacccccgtgctggtgatcttcagcacggtgctggtgccggccgccatcgcgctggcgctcatggcggccgggttcgtcacctccggcggcctcggcgtcgctgcgctgtccgtgttctcctggatgtacaagtacctgacgggca

SEQ ID NO: 59630 - DNA, 272 bp, Zea mays
gatcgattggtttcgtaactggtgagggactgagggtctcggagtggattgatttgggattctgttcgaagatttgccgaggggggcaatggcgaccgcggggaaggtgatcaagtgcaaagctgcggtggcatgggaggccggcaagccactgtcgatcgaggaggtggaggtagcgcctccgcaggccatggaggtgcgcgtcaagatcctcttcacctcgctctgccacaccgacgtctacttctgggaggccaaggggcagactcccg

SEQ ID NO: 59631 - DNA, 299 bp, Zea mays
acgatcagcgtagtagctcggaatcggtcgagggaagcacacacagccggtcccgatctccgatcccctcgtcgatccaagatgcagatcttcgtcaagaccctcactggaaagactatcaccctcgaggtggagtcttctgacaccattgacaacgtcaaggccaagatccaggacaaggagggcattctcccggaccagcagcggctcatcttcgctggcaagcagctcgaggacgggcgcacacttgccgactacaacatccagaaggagagcaccctccaccttgttctccgcct

SEQ ID NO: 59632 - DNA, 251 bp, Zea mays
gggagagtgacggaaagcgacgcggcgcgagcgagtgagggccaaggcgaagaggggaagcaccgcaccaggacccttgttcgccgccgccgcctctgatctccgcgaggttgtcaggattcaatatgtcgaccagcacattcgctacttcctgcacgctgttgggcaatgttagaacaacgcaggcctcccagacagcggtgaagagcccttcgtctctaagcttcttcagccaagttacgaaggttcca

SEQ ID NO: 59633 - DNA, 269 bp, Zea mays
agcagatcatcaaagatatcagggagtttaaggagaagaacaaagtggacaaggtagttgtgctgtggactgcaaacactgaaaggtacagcaatgtatgtgctggtctcaacgacacaatggagaatctgctggcatctgtggacaagaacgaggcggagatctcgccatcaacactatatgccattgcctgtgtcacggagggggtgccgttcatcaatgggagcccccagaacacttttgtgcctgggctgattgatcttgctatc

SEQ ID NO: 59634 - DNA, 272 bp, Zea mays
ccgtccggtcagaccaatcaacaaagtgacgcgagcacgagcatccatcgtttccccttcttccccatcgcgtgccctcgccgcagccatcttccatggcggaccagctcacggacgagcagatcgcggagttcaaggaggccttcagcctcttcgataaggatggcgacggctgcatcactaccaaggagcttggaactgtgatgcgctcccttggccagaaccccactgaagcagagctgcaggacatgatcaacgaggttgatgctgat

SEQ ID NO: 59635 - DNA, 270 bp, Zea mays
ctcgagccgcggtgttgacatcagcatgaatactcatctgaagactgtgaagctgacactaaaagggaaaaatcctgttacccttgatcaccttagtgtgaggggaaacaacatccgctattatatccttcctgacagcctaaacctggagactttgctggttgaggaaacaccaagggtcaagcctaagaagcctacttctgggaagcccttgggccgtgggcgtggccgtggtcgtgggcgcggtcggggtcggggacgttgagcatg

SEQ ID NO: 59636 - DNA, 270 bp, Zea mays
attcattaggtggtgtatttggtgatacaaataaaagtgagctcggctgcatttgcatcctacgcattggcttttccaagcaacttccttgctcttgtggacacatatgacgttatgcgaagtggtattccgaatttctgtgcagtggctctagcacttcatgacttagggtacaaggcatctggtattagattagattctggtgatctggcctatttgtccattgaagcacgaaaagtgtttagtgcagtagagaaggaatataatgta

SEQ ID NO: 59637 - DNA, 265 bp, Zea mays
agctcatcaagaatgctgcctacattggcacccccggcaagggtatccttgctgctgatgagtccactggcaccattggcaagcgcctttccagcatcaatgtcgagaacgttgaggagaaccgccgtgccctccgtgagctcctattctgctgccctggtgctctccagtacatcagcggtgtgatcctcttcgaggagaccctgtaccagaagaccaaggatggcaagccttttgttgatgtcctcaaggagggaggcgtcct

SEQ ID NO: 59638 - DNA, 244 bp, Zea mays
gtcctgtggtgttcggaacggggaagaagacacaagcccatcccaaatctaatcgatcttcctcccctcctcaaagaagaaaagaagctgaaccatggggaagagaaagtcagctggtaaagcacctcctaagaagcggatggacaagcttgacactgtcttttcctgcccattctgcaaccacgggagtagtgttgagtgccgaattgacatgaagaatctgattggcgaagatcttgtagaa

SEQ ID NO: 59639 - DNA, 287 bp, Zea mays
  unsure (1)..(287): unsure at all n locations
taatctcggctttcccggaggaaactccaccaagccccaccaacaagaccccgaagccggaaagaaagcccatgttccggggccgcggtaaagggtgggcaanggggctcggcaagggcggcgcgaacgtcaccggaaggtgctgcgcgacaacatccagggcatcaccaagccggcgatccggcggctggcgaggaggggcggcgtcaagcgcatctcggggctcatctacgaggagacccgcggcgtgctcaagatcttcctcgagaacgtcatccgcgacgccg

SEQ ID NO: 59640 - DNA, 264 bp, Zea mays
cggtcgacaatccataactcgcatctctgcgtcatcaagtcagcagcgcagctcggtttcgacaatgtcgggcgcgcggcaagggcggcaagggtctgggcaagggcggcgccaagcgccaccgcatagtcctgcgcgacaacatccagggcatcaccaagccggcgatccggaggctggctaggaggggcggcgtcaagcgcatctccgggctcatctacgaggacgaccgcggtgtgctcaagatctttctggagaacgtca

SEQ ID NO: 59641 - DNA, 168 bp, Zea mays
ctctcgccttctctctcccatcggcacacccgagctcgctccctccttccacgtcgaggtccgagtcctgctttgatggcgaccgacgtggctgagactcccgcgccgttggtggatgcggccccagacgcgcccgccgacgccccggcggcgcctgctgccgacgcg

SEQ ID NO: 59642 - DNA, 272 bp, Zea mays
gcgagtgttcggaagcagagacttggctaatggagaaaaggcagcagcaggatgctctgccaaagcatgctaatccggtcctccttgctgctgaccttaagaagaaagctgaaacacttgacaggttctgcaagccgatcatgacgaaaccgaagccagttcctaagccacagactccgcctccggcagaaacccaagctcctgagcctcagacaccggagcagcagcgatcaaatggcgaaagcacaaccagcgagggagctgcagaggag

SEQ ID NO: 59643 - DNA, 275 bp, Zea mays
cgcgaatcataatgcttttaatttgcttgcaaaatatagcaagagccatcttgttttcaatgatgacatccagggcacagcatcagtggtccttgcaggtttgttagcggcactcaaggtggttggtgggaccttggcagagcacacttatttattccttggtgctggggaggctggaactggtattgcagaactcattgctcttgagatttcaaaacagacgtcggctccaattgaagagtgccgcaagaagatttggttggtggactcaaagg

SEQ ID NO: 59644 - DNA, 269 bp, Zea mays
cttccctgaccgcatgcccaccgagtgggccgaccgccacgctactgagaaccggatgcgcctccacgccctacgcgtgatccgtgagaggaagatggatggtgtagttgttttcgcggacgacagcaatgttcataccatggagctgttcgatgaggtgcagaaggtccagtggatgggtgctgtgtccattggaatccttgcgcatactggaacggcagaccaacttcggctcagcgaggaggacaagcagaatatgcctctcccag

SEQ ID NO: 59645 - DNA, 265 bp, Zea mays
gccaggataaggctgattaaccaagacaaaaacaagtacaatacacccaaatacagatttgttgtgcgatttaccaacaaggacatcacagcacaaatcatctctgctagtatagcaggtgatatggttcttgcttctgcttactcgcatgagttgccacgatatggtcttgaagttggtctgaccaactatgcagctgcctactgcactggccttctgttggctcgccgtgtgctcaagacccgtggtttagataaggcatatg

SEQ ID NO: 59646 - DNA, 256 bp, Zea mays
agtcagttggctgctgtctatatgagctttataccggtaaagtcttatttcctggtccatcaaacaatgccatgcttcggcttcatatggaattgaagggtccattccctaagaagatgcttcgaaagggctgctttactatgcaacactttgatcaagatctcaattttcatgctaccgaggaggatcctgtgacaaaaacggctgtgagaaggttaattttgaacattacaccaaaggatgtcggttttgtgat

SEQ ID NO: 59647 - DNA, 230 bp, Zea mays
caggtgtccaacaccaaaaaacccctcttcttctacgtcaacctcgccaagaggtatatgcaacagcacggcgatgtagagctatccgctcttgggatggccatagcaacagttgtgaccgtggcagaaattctgaagaacaatggatttgctgttaaaaagataattaggacctctactgatgaaatacgcttcaaatcggcgtcattcccaaaggccaaggttgagat

SEQ ID NO: 59648 - DNA, 268 bp, Zea mays
cgcggactgacaggaaagtccctcctcatcctctacggtactgtgcctatctaacacagcaggagattcgcaagacagcatcttcggtgtcccagattgtctcctacaatgataagatcctaattgctgcagttaactgcttgctcaagccgctaacttataatgaatacatttcctggggattccctgaccgaagcttgagaatattaacatatgatcaggatagacttttgtctactcatgaaaaccttcatggtggtagtcaaat

SEQ ID NO: 59649 - DNA, 266 bp, Zea mays
caagaagaagcgtagtcgtcgcccgaaggaaaggcgcggagcaagatgtcgtggcaggcgtacgtcgacgagcacctgatgtgcgagatcgaaggacagcatctcagcgccgccgccatcgtcggtcacgacggcagcgtttgggcgcagtccgagagcttccccgagttaaagcctgaggaggttgctggtatcataaaggactttgatgaacctggtactcttgcaccaactggtcttttcgttggaggtacaaagtacatggt

SEQ ID NO: 59650 - DNA, 266 bp, Zea mays
gagccatcccctctcctcgctacgcttcgcttcctcggcgccgattcctcctcctcctcctccaccctcgtccgtcccgttccggcgcgcgagctcgcccgagatggcgaacgcgagatcgggtgtcgctgtgaacgatgagtgcatgctgaagtttggcgagctgcagtcgaagaggctgcaccgcttcataactttcaagatggacgacaagttcaaggagatagttgtggaccaggtcggggatcgcgctaccagctacgatg

SEQ ID NO: 59651 - DNA, 265 bp, Zea mays
gaaagttaagagcacttctgttccggtcgatgcgttggtctatggtgccttggctgcagctgacctgcagaaggctgtagagaaagagtatgagatggctcttcaggacagagtaatggaagaaaccaaagagtagaagaatgctgtggaagctatatgtctatgacatgcgtaacaagctctacgacaggtacaacgattttgtgacacctgacgagaacgaagggttgattggcaagcttcaggaggttgaagattggctata

SEQ ID NO: 59652 - DNA, 266 bp, Zea mays
ccatccagccgccaccaggtgcagagtctttcgtcatctcttctccggcgaagaacccccagtcgcccaccagatcacttgttaaactttgttgaggggtgatggcggtttctttcgcaaacctcaactccgaggcagggcttaaaaacttagaagtgtcatttctcactcgcagctacatcactggctaccaagcttccaaggatgacttggctgtctacacttcgttttcggctgcttccctcgtccaagtatatcaacgtagc

SEQ ID NO: 59653 - DNA, 267 bp, Zea mays
cgatgaagttgctgggctgacgaaggacagagaaaatggcctgttcaaaccagacccacgttttgaagaagccaagcagtttataaggagtggcgcttttggcatctatgactatgaacctctcttggattcccttgaagggaattctggatttgggcgtggtgattatttccttgttggctatgacttcccaagctacatcgatgcacaggaccgggtggatgcagcctacaaggataagaagaagtggaccaagatgtccatctt

SEQ ID NO: 59654 - DNA, 276 bp, Zea mays
ggtctttgagaaggtgacagaatctcctggaagggtttacatcttgaagtttaagcaagacagcagaaaattcttcttctggatgcaggaaccaaatgctgatggggactcccagacttgcatgcaagttaatgcctacataaatcgatcattagatgctgaggctgatcttcgagtacctattgaagcagaaatgtctgaagatacggctgatgatgatatctcttccagagctgggaatctagttgagagcatgaccgctgatttggctggtga

SEQ ID NO: 59655 - DNA, 276 bp, Zea mays; identical to SEQ ID NO: 59654

SEQ ID NO: 59656 - DNA, 279 bp, Zea mays
gactagttctagaccccctgctcacccacccgtcccctcctgctcgcccatggctcccatcgctgtcggcgacgccctccccgacggccagctcgggtggttcgacgagaacgaccagctgcagcaggtctccgtccacgcgctcgccgccggcaagaaggtcatcctcttcggcgtccccggcgccttcaccccgacctgcagcaaccagcatgtgccaggcttcatcacacaggctgagcagctcaaagccaagggtgtagacgagatcctgcttat

SEQ ID NO: 59657 - DNA, 280 bp, Zea mays
cgaccatgggaaagttaagattggagacttcggtttggcaatggtaatgcagcagaggaaaacacagagtatacaaggcaccttagagttcatggcaccagagctgtttggtgaaaactacaacgagttggtggatatatactctttcggcatgtgcatgcttgagatggtgactggtgagtgcccttacagtgaatgtcagggctttgttcagatatacaagaagatatctgaaggtgtaaaaccagttgctctctccaaggtcaaagatgcagaagta

SEQ ID NO: 59658 - DNA, 276 bp, Zea mays
gaaccatgggaaagttatgattggagacttcggtttggcaatggtaatgcagcagaggaaaacacagagtatacaaggcaccttagagttcatggataccagagctgtttggtgaaaactacaacgagttggtggatatatactctttcggcatgtgcatgcttgagatggtgactggtgagtgcccttacagtgaatgtcagggctttgttcagatatacaagaagatatctgaaggtgtaaaaccagttgctctctccaaggtcaaagatgcag

SEQ ID NO: 59659 - DNA, 279 bp, Zea mays
taggaatcctcttgtgtcctggccgtcggccgtcgctgcgtcgttccagatttggggaaggaaatccggcaccgagattcgagtcgaaaaggacatcatttgctagatggcgcgtaccaagcagaccgctcgcaagtccactggaggaaaagctcctaggaagcaactcgctacaaaggcagcccgtaagtctgcacccacaactggaggagtgaagaagcctcaccgttaccgcccagggactgttgctcttcgtgagatccgcaagtaccagaagag

SEQ ID NO: 59660 - DNA, 279 bp, Zea mays
ctccaaaggaggcccccaagccaaaggtggttgaggcaccagcagaagaggaagcaccaaagccaaagccaaagaatcctcttgacttgctgccaccaagcaagatggtccttgatgactggaagaggctatactcaaacacaaagactaacttccgggaggttgccatcaaaggtttctgggacatgtacgacccagagggctactctttgtggttctgtgactacaagtacaatgatgagaacaccgtctcctttgtgaccctgaacaaggttggtg

SEQ ID NO: 59661 - DNA, 273 bp, Zea mays
cggaaaccaccgagccagccgtttgcttgagtgatgatatacaaacaaacgagtgcctagagaacaatggtggctgttggcaagataaggctgccaacatcactgcatgcaaggatacattccgtggaagagtttgcgagtgtccagttgtgaaaggcgtcagatttgttggcgatggctatactcactgtgacgcttccggatctggtcggtgtgaaattaacaacggagggtgctggaaagataccacgaatggtcggacatactctgcct

SEQ ID NO: 59662 - DNA, 273 bp, Zea mays
aatgacagtttggcaaggctggtggtgacaagtggaagtccctgtctgatgccgtgagtttgtttgttccccagtcccattttaaccgtttgagtccgcagttggttgcggtgtgcgttgttcttacgataagcgtgttgctctagatgtatccgcgctcgtcccctgtgtgtttgtatgtatatcagtaattatattatatatcatgtttacccgatccatcgttagatctgctaaaattccatatgttaaattcgaaatgggttggtatta

SEQ ID NO: 59663 - DNA, 270 bp, Zea mays
tgttaatggaagaagcagaaaggattgctcaaaaggagcaccgttcagagaaattggctgtcatttcgggggttggtactcgccactactaccgcaaactgggttatgagctagaaggaccttatatggtcaaatgtttggcataataccgtttcattttttttcgtgctcatgtagaacagactagtgtttataatgtaacttgtgtagttttttcaaaaaaaaaaaaaaaaaaaaaaaaaaaaaaaaaaaaaaagggggcgcccccct

SEQ ID NO: 59664 - DNA, 277 bp, Zea mays
gactagttctagagcgcgttcgagccggcttccatgatggtcaagtgcgacccacggcacggcaagtacatggcttgctgcctgatgtaccgcggcgacgtggtgcccaaggacgtgaacgccgcggtggccaccatcaagacgaagcgcaccatccagttcgtggactggtgcccgacggggttcaagtgcggcatcaactaccaggcgccgacagtggtgccgggtgccgacctcgccaaggtgcagcgcgcggtgtgcatgatctccaactcca

SEQ ID NO: 59665 - DNA, 178 bp, Zea mays
atcatgcccaaggacatccagctcgcccgccgcatccgtggcgagcgcgcgtagcatcatctccggggatctgatgaatgtctagttaccaaacaaataggctgtattagcgtcgttgttctgtattcgttattttggattcggttgcagtgaaaaacagctttactaatcttatttg

SEQ ID NO: 59666 - DNA, 272 bp, Zea mays
caaggaggcatccacgtcactgcctgacttcaagaaggatgatcagaaggctgtggattctgctctgatcaaggctatcgaggctgtcccgtatctgaaaacctatcttggcgcccggttctctctcagggatggtgacaagccccatgagatggtcttctaagctcttagttttggagttcggaggaagctgttttgtctgtgttcttgtacttctgagttttgtaccagtagcgaatgtttcattgtggttgaaatcttcctgccaaata

SEQ ID NO: 59667 - DNA, 271 bp, Zea mays
ggaacagccaagcccgactacgcaacctgtgtgaagatctccactgatgcttccatcaaggagatgattcctccgggcgctctggtcatgctgactcccctcatcgttggaaccctctttggcgtcgagactctctccggcgttcttgctggtgccctagtttctggagtgcagatcgccatctctgcttccaacaccggcggtgcatgggacaatgccaagaagtacatcgaggctggtgccagcgagcacgcgaggaccctcggtccca

SEQ ID NO: 59668 - DNA, 271 bp, Zea mays
ccctgttctgctgcccaagaagacggcggagaaggcgtccagtgtggggagcaaggaggcaaagtcgcccaagaaggccgccaagtcccccaagaaggcatagactgactgtctggagtgatctgatgtttagcaggaccttgataccagtatgcggtgatgcgtaggctgtagatgggtcgaatgtgcttgtgtgtgtatgtgccctgctgcaagttgccctttgctatttaaaatggaagaagaaatgccttgtttctctgaggttgca

SEQ ID NO: 59669 - DNA, 274 bp, Zea mays
gcaatcacaacgaacagaagctctcgatctcaccgacaccgaggaagaagagatcaatggcgtccgagcagggagtcgtgatcgcgtgccacagcaaggctgagttcgacgcccacatgaccaaggcccaggaagccggcaagctggtggtcatcgacttcactgccgcctggtgcggtccatgccgcgccatcgccccactgttcgtcgaacacgccaagaagttcactcaggtcgtcttcctgaaggtggacgtggacgaagtgaaggaagt

SEQ ID NO: 59670 - DNA, 306 bp, Zea mays
agaagtattcgagtttattgagaaatacaacttgcatgatgccattcatgataagattgtcaatcttatgatagtggacaataaaagaacagttcacctactgatccaacatcgtgataccattcccccatatgaagttgtggagcagctgttgcataccagtaaaaaatgtgacaagagatatttgttacacctgtatttgcatgctttatttgagatagatatacacgctggaaaggattttcatgatatgcaggtggagctttatgcagactacgagacaaggatgctactacccttccttcg

SEQ ID NO: 59671 - DNA, 304 bp, Zea mays
ctttgaccttggaggtggtaccttcgatgtctccctccttacaattgaggaaggtatctttgaagtcaaggccacagctggcgacacccatcttggtggtgaggactttgacaacaggatggttaaccactttgtccaggagttcaagagaaagaacaagaaggatatcactggcaacccgagggctctccggaggctgaggacctcttgtgagagggccaagagaactctgtcttccactgcccagaccaccattgagattgactcgctgtacgagggcattgacttctactccaccatcacc

SEQ ID NO: 59672 - DNA, 305 bp, Zea mays
cagcgagaagaggtttgctggtttcaagaaggatgacaagcagctggatgctgatatccatcgcaagtacatctatggtggccatgttgctgactacatgaggaacctcgctgaagaggagccagagaagtaccagtctcacttcagtgagtacattaagaagggaattgaggctgatgacatggaagctctgtacaagaaggtccatgctgccatccgtgctgatccttctgtggtcaagtcaaccaagcagccaccaaaggagcacaagaggtacaaccccaagaaactgacgtacgagcaga

SEQ ID NO: 59673 - DNA, 102 bp, Zea mays
atagttagttgtttagtattaatatgtggaatagagtcatcccactaaatttgatgaatggacccatgatgcaccccttcattttggataaagtgattcatt

SEQ ID NO: 59674 - DNA, 289 bp, Zea mays
tgtaacagttcaaggcgaagttattgagcactcctttggagaggagctcttgtgcttcagaactttgcaacgctacactgcagcaactcttgagcatggcatgcatcctccgatttcccctaagccagaatggcgtgctctgatggatgaaatggctgttgtatcaactagagaatatcgatcaattgtcttccaagaaccacgcttcgttgaatacttcagatcggctacacctgagactgaatatggtacgatgaatatgggcagcggtcatcaagaggaagcctag

SEQ ID NO: 59675 - DNA, 298 bp, Zea mays
cacttcactaaatctgagctatgctactgtacgaggccctgaactgattaaattcattagcagatgcaaaaatttgcaactcttatgggtgatggacttgattgaagaccatggtcttgctgttgtggcatcgtcttgtaacaaactgcaggagttgcgggttttcccttctgctcctttcgaagcagctgagcaggtctctttgactgaaagaggtcttgttgatgtatctgccagttgcccaatgctggagtcagtcctctacttttgcagacggatgaccaacgaggcccttatt

SEQ ID NO: 59676 - DNA, 300 bp, Zea mays
  unsure (1)..(300): unsure at all n locations
gtttgaactcattaatgagttgcctgaggacaagaccattactgtatacaggtgtggtactttagttgacctatgccgtgggccacacatcccaaataatacctnntgtcaagctttcgcttgtctgaaggcttcatcatcatattggagaggaaaagttgaccgcgaaagcctgcagagagtatatggaatttctttccctgattctcgacgtctcacggaatataaacattttctagatgaagctaagaaacgtgatcataggatattagggaaagcacaggaactcttctttttcca

SEQ ID NO: 59677 - DNA, 302 bp, Zea mays
aggtacttcggcgcccgttcaggatccacatcttcccgagcgagttcttggttgacctcttcccccttcggaccacctccaaggctcttggtgtagcttgccactctcaccaatcaagttttcatgtctgatctcgacattcagatcccaactgccttcgatcccttcgctgaggccaatgctggggactctggtgcggcacagggtcaaaggactacgttcacgtgcgcatccagcagcgtaatggtcgcaagagcctgactaccgtccagggattgaagaaggagttcagctacagcaag

SEQ ID NO: 59678 - DNA, 300 bp, Zea mays
gaggatggccgcaccctcgccgactacaacatccagaaggagtcgacgctgcacctggtgctccgcctcaggggaggcgccaagaagcgcaagaagaagacgtacaccaagcccaagaagatcaagcacaagcacaagaaggtgaagctggccgtgctccagttctacaaggttgacgacgccaccggcaaggtcacccgcctccgcaaggagtgccccaacgccgagtgcggcgcgggggtcttcatggccaacaaccacgaccgccactactgcggtaagtgtggcctcacctacgtc

SEQ ID NO: 59679 - DNA, 298 bp, Zea mays
gcatttagctctggtggacgtgtggttgattccttccgttcgaagcttaaacctaaaattattgaagccttggtttgtactaaggattggaagcttgcttcagacaaagatttggagggtgaaataaaaactataagtgaagctatgaatgctatggaggtggacgatgaggttgcgacttgagatcttcaagcaagcatggattgcttgcactatcttatgttatttaaaaactatcctttattgtaatagtctattgtgttgaactgtcttgtgctatgttaaactcttgggtgat

SEQ ID NO: 59680 - DNA, 299 bp, Zea mays
aaacaatggagccggtgcggaagagcgtgtgcgtgaccggcgctggcggcttcgtcgcgtcggagctggtgaagctcctcctctcccggggccaatacgcggtccgcggcaccgtgcgcgaccctggtgctagcaagaatgcccatctcaaggtgctggaaggagctgaggaaaggttgcagcttctcaaggctgatctgatggactacaacagcattgcatcagcagttgccggctgtgagggtgtcttccatgtagccagtcctgtcctttcccatcgaccctccaaccctgaggtg

SEQ ID NO: 59681 - DNA, 292 bp, Zea mays
gaaccatgggaaagttaagattggagacttcggtttggcaatggtaatgcagcagaggacaacacagagtatacaaggcaccttagagttcatggcaccagagctgtttggtgaaaactacaacgagttggtggatatatactctttcggcatgtgcatgcttgagatggtgactggtgagtgcccttacagtgaatgtcagggctttgttcagatatacaagaagatatctgaaggtgtaaaaccagttgctctctccaaggtcaaagatgcagaagtaaggagtttcata

SEQ ID NO: 59682 - DNA, 276 bp, Zea mays
cgaagataccggatcagaaattcaagggcgatgttagctacttcatctgcagcaggcttggggcaggtccaaaggttgttgttgacgaaggtcaagcactgatcgattcagtcaccggacttccaaaaggcgtgtagttctagatttaggttggaataatggtttaagctggggattaaagacaatggtatcatacaagcaacctgggccggccaataaagatagaacacgttctcgcctaaaaaaaaaaaaaagtaaaacatgtcggctgataga

SEQ ID NO: 59683 - DNA, 288 bp, Zea mays
ataggggttcacgaacatggtgggacaactgcacctggattaccttatgtcgaggaggcaattaccaatgctggtgactggttggttggtgggtgcttggaggttatagaaccaatcaagtacaatgatggtctagatcagtatcgcctgtctccagcacagctgcgtgaagagtttgccatgcgcaatgctgatgcagtatttgcctttcagcttcgcaatcctgtacacaatgggcatgctcttcttatgaccgacacacgcaaacgtctccttgagatgggttat

SEQ ID NO: 59684 - DNA, 294 bp, Zea mays
atatcaacaggggctttgctaccttgagggagattggacatggacacgatctaaagaaattcctaattgttatcgcaggtctctggctcctttcagttcttgggagctattgcaacttcctgacactgttctatattgtctttgtggcactgtacactatacctgttctgtatgagaaatatgaggacaaggttgatgcttttggtgagaaggctatgatcgaactgaagaagtattatgccatcttcgatgagaagtgcctatcgaagattccaaagggcctcaaggataaga

SEQ ID NO: 59685 - DNA, 301 bp, Zea mays
agctacctcaaggctgccgcgctctacacgcaggccatcatgctcgaccccgacaacgccaccctctacaagaactgagctgtagcattcctgcagttggttaagcttagcaaagcgcttgctgatgcagagacaacagtcaggctgaagccacaatgggagaagggtcatttcaggaaaggttgtgttttggaggcaatggagcgctatgaagaggcgatagctgcatttcagatagctttgcagcacaattcacaaaatacagaagtctcgagaaaaatcaagaggctatctcagttgg

SEQ ID NO: 59686 - DNA, 310 bp, Zea mays
attgtttcgttgcattttgagaatccaaatttagaggagctcgaggtgttggatctgcagacactagtttcctacataagctatgcaaggaagtatattcagccacagttaactgatgaagctgcagaggagttaactcgtggctatgttgagatgaggaaaagagggaatagccctgggagcagaaagaaggtcataactgcaactgctagacaaatagagagtttgattcgtctaggtgaagcattagcccggatgcggttctctgaagtggtcgaggtgcgagatgttgtggaggccttcaggcttc

SEQ ID NO: 59687 - DNA, 304 bp, Zea mays
gagagagcgtgtggatttgggggagcttcttcactggagagtggagagctccggtagcgaggcgaaggaaggaagagggaggaggggaatcagagaggtctccccgatggcggactggggccccgtgatcgtagcgacggtgctgttcgtggtcctcacgccggggctgctctgcacgctgccgggccggggccgcgtcgcagagttcggcagcatgcacaccagcggcctggccatcctcgtccacgccgtcctctacttcgcgctcatcaccatcttcctcatcgccatcggcatccacgtc

SEQ ID NO: 59688 - DNA, 291 bp, Zea mays
cacaccccatatgaccctgacaagatccaggaagctgataaacttgtcatagaggagcttacgaggcttacagaactcaatcacgcttacagagaaaaacatcctaagccaatagctgcatcatctcaagattcacgcatgctttctgaaatacaagagcagcagaacttgttgaagacctacgaggtaatggtaaagaagttccagtcccagatccagaccagagacactgagataacccatctacagcagcaaatggatgaagctaaacttcggaaatcaaagctagag

SEQ ID NO: 59689 - DNA, 294 bp, Zea mays
gtacctcgccgccgaggttctggagttggcagggaacgcggcgaaagacaacaagaagacgcgcatcatcccgcgccacgtgctcctggcgatccgcaacgacgaggagctcgggaagctgctggccggcgtcaccatcgcgcacggtggcgtcctccccaacatccactccgtgctcctgcccaagaaggcggcggagaaggcggccagcggcggcagcaaggagcccaagtcccccaagaagggcgccaagtcccccaagaaggcttagaaagtagggtcttcatttgcgct

SEQ ID NO: 59690 - DNA, 298 bp, Zea mays
ctaccagccgcagtacgcggtgtcggagctgaacgagaaggacttctggcgcatgttcgacgcgtcgcactacgagcactgccgccaaaagtacggggcggtgggcacgttcatgagcgtgtactacaagtccaagaaggggcgcaagacggagaaggaggtgcaggaggcggaggcggccatactggagccggcctacgcggacgaggaggcctaaaagctcgtggtcgttttgcttagcccattttaattagaacttgatggatgtagtgtgtgtctgtctcaagtcattttaatt

SEQ ID NO: 59691 - DNA, 284 bp, Zea mays
acgacatcttcgagaagctcgccgccgaggccgtcaagctcgcgcggtacaacaagaagcccaccatcacctcccgtgagatccagacctccgtgcgcctcgtcctccccggggagctcgccaagcacgccgtctccgagggcaccaaggccgtcaccaagttcacctcgtcctaggctgcgtggcctccgcttgcaggcttccctcgtatgttcgcgtgtcttgctgtagttaggtgctgctgtgtctggtctcctccggtagcaactgttatctgatggaac

SEQ ID NO: 59692 - DNA, 283 bp, Zea mays
gctgcaacaagatggatgctactacacccaagtattcaaaggcccgttatgatgagattgtgaaggaagtctcttcctacctgaagaaggttggatacaaccctgataagatccacttcgttccaatctctggttttgaaggtgacaacatgattgagaggtccaccaaccttgactggtacaagggcccaaccctacttgaggctctggacttgatcaatgagccaaagaggccttcagacaagcccctgcgtctcccccttcaggatgtgtacaagattgg

SEQ ID NO: 59693 - DNA, 187 bp, Zea mays
gaaaacactgagagcacagcccaaggctaatgatcaatacttgcccccatttgtgatagttgatgacagcggcaaagctgttggacctgtattagatggtgatgcagttgtcactatcaacttccgggctgatcgcatggttatgcttgcgaaagcactagagtatgcagattttaccaactttgac

SEQ ID NO: 59694 - DNA, 278 bp, Zea mays
ggaacttggtggggattcatcgaagatcgccctagtgaagaggtcagtctcaagtgtatgtgctgatgtatctgaggatcacccaaacatcaagaactggcagatcgaaagctacggcgagcgcgagtaccacagggccaaagtgcacttaagatgtgcgcgtgggcagtccatttccgcaatcaaattcgcaagctttgggacacctacgggaacctgtggagatttccagcaaggagattgccactcagctaactctcacacagtcctagagaaga

SEQ ID NO: 59695 - DNA, 286 bp, Zea mays
gtcagtaaaagcggctagcgttgcttctcaatggttggaattactgcatcaggacataaggggacgtcttgctgctttaaagcgcacaggaagagagtcagaaatgctctacacacggaactgccataccttaccgcgacagaattttcatctaatcaagagaacgaatcatccattgcaaatacttctgagattggatgtactgacaaagcggtttcagaagctcatgtggcacgatggaggtctctgtttgttcagatggacaaaacacttcagggaggaggga

SEQ ID NO: 59696 - DNA, 275 bp, Zea mays
actatccccatcgcagcatcttgccaagaggattgtaaagcttgagaagggtttgagctactattatccagcaatgtgctcaaatcaccaagatgataattctgctcttctgcactatattcagactcatcaggataatgttaagcaaaatgttctacttcaactacttgctcttgttggcaagcagccagcttttcaacaattgcgatcagttgagcaacttggctacatagcgcttcttaggcaaagaaatgattcaggtgtccgtgggttgc

SEQ ID NO: 59697 - DNA, 236 bp, Zea mays
agcgcgtcaccatcatgcccaaggacatccagctcgcccgccgcatccgtggcgagcgcgcgtagccatcatctccgaggatctgatgaatgtctagttaccaaacaaataggccgtattagcgtcgttgttctgtattcgttaatttggattcggttgcagggaaaaacagctttactgatcttatttgtgatctctggtggtcgcttcgcttctaagcgatcatctgtggtgct

SEQ ID NO: 59698 - DNA, 240 bp, Zea mays
cataatgacaaagattgtgattggtggtttgcagatgttgtcgtgcctgaaagaacatatgtgttggattgggtttttgctgacggccacccaggtctgcaaggaattatgacaacaatggaggacatgattttcatgctacccttccaaattccatgactgatgaagagtattggatggaagaagaacaaaggatctatacaaggcttcaacaaaaaaaaaaaaaaggggcgcccgccg

SEQ ID NO: 59699 - DNA, 278 bp, Zea mays
ggcggagaaaggacaaccctgaggcgatggaggaagacgaagtggatgagatcgctgagatcagggcccctcacttcgaggagtcgatgaagtatgctcggcgtagtgtcagtgatgctgatatccgcaagtatcaggcgtttgcccagacattgcagcagtcccgggggttcggcagtgagttccgcttctcggatcagccggcgacagtggtgctgctgctgcagctgatccgtttgcttctgcgggtgctgcggctgatgatgacgatctataca

SEQ ID NO: 59700 - DNA, 139 bp, Zea mays
atggagactcccagaacaccccccaacaaacccttgtattcccaaaggggaatgcaattcctagcactaaagttcttaccttctttaaatccagtacatttgaagttgatgttttgtatgtcgacccaaacggcttaca

SEQ ID NO: 59701 - DNA, 303 bp, Zea mays
  unsure (1)..(303): unsure at all n locations
cgcgcacgtggctcggcttcggctcagggaacttctggggattcatcgaagatcgccctagtgaagaggtcagtctcaagtgtatctgctgatgtatctgaggatcacctaaacatcacgaactggcagatcgaaagctacggcgagcgcgagtaccacagggacactctngcattaagctgtccgcgtgggcagtccatttccgcaatcaaattcgcaagctttcggacacctacgggaacctgtggagatttccagcaaggagattgccactcagctaactctcacacagtcctagagaag

SEQ ID NO: 59702 - DNA, 201 bp, Zea mays
gagcttcgttcgttcagttcatccgtgttcttgtttgcgaggtcgagagagagaggatgtcgtgctgcggaggcaactgtgggtgcggctccggctgtaagtgcggcaacggctgcggagggtaagccccgtccagtccgcgttgcgctctcggccggagtcagatctgacggcggatgaacatgtgtgtatatatatata

SEQ ID NO: 59703 - DNA, 271 bp, Zea mays
atgctcttatcagcagatgagctaaagcctgtaattggtaatctccatccatcagaatacttctatgccaagcaacaagccgactatgtaatatctcaggctgacacgaacaaagatggacaattgagcatgaatgagatgatcgagaacccctatgtcttttacaatgctttattcacagaagatgattatgagcttcatgacgagctccgttagttcccaagtcaagtaagggcacaaacttgtactctgttcttgtttctgcatctgc

SEQ ID NO: 59704 - DNA, 270 bp, Zea mays
gtaccagcactggatcaaggacatgcgccacagcaacagcgtcaacgtcgaggaagggtacccggccttcgcgctcgtcaacagggtcaccggcgaggccatcaagcactcccagggcgagggccacccggtcaagctggtgccctacaaccccggctaccaggacgagtcggtgctgtggacgcagagccgcgacgtcggccacggcttccgctgcgtccgcatggtcaacaacatctacctcaacttcgacgccttccacggcgacaa

SEQ ID NO: 59705 - DNA, 272 bp, Zea mays
gacatcgtagtcgagttcatcaagaacgaggattacaagtatgttcgtgttctcggggccttctacctgcgtcatcatggcacaattgctgacgtctaccagtaacttgagccgctctacaacgactaccgcaagatcagacacaagctcagcgatggacagttcacacttacccatgttgcagagttcattgatgagttgctgaccaaggattactcctgtgatacagccatgcctcgcatccagaaaagtggttcactgaagcgtctgga

SEQ ID NO: 59706 - DNA, 276 bp, Zea mays
acttcagtggtagaaagaaagggaagaacagagagacaaattatttttgaagatccagagcactcttcggcgtattgtcttgcatttagagtggttaatcccaatcatcttcctcctttaaaggagttgatgaagttgatgagaatccaatctctccgttgcaatgcattatataaccacagcgctaccagattatctgtagtccctatccacgcatcacgctctcaggccctaaggtacctgtgtatacgattggggatagaagtgccaaatgtt

SEQ ID NO: 59707 - DNA, 269 bp, Zea mays
atgcaaattgctacagccaatggccctactggctataatagggattacctgttctcaatggagaaggcattagccagcattagccacgaagatgattcgatcatagagcttgcaaacgaggtgaggaaggtgctcaacagaacaaaggagaccaagatcactggtgccaatgcttccctgaaatcacatgcccctcttgtgcacctgtccgcgcttccagaaggcaccgttgtggactcgagatagctcgccttggacgttggacctct

SEQ ID NO: 59708 - DNA, 268 bp, Zea mays
  unsure (1)..(268): unsure at all n locations
acttcagtggtagaaagataggtgagaacagagaggcaaattaattcagnagatccagagcatcttcagcgtattgtcttgcatttagagtggttaatcccaatcatcttcctcctttaaaggagttgaggaagttgatgagaatccaatctctccgttgcaatgcattatataaccaaagcgctaccagattatctgtagtccctatccacgcatcacgctctgaagccctaaggtacctgtgtatacgattggggatagaagtgcc

SEQ ID NO: 59709 - DNA, 270 bp, Zea mays
gatgttgttgacttcgtgcgtcagggagctctcattgccatggcaatggtaatgatccaaactaatgaatcctttgattctcgtgttggagcatttaagcgtcagttggagaagatcattcttgacaaacatgaggcaccatgagcaagatgggtgccatattagcatctggtatcctcgatgctggtggtaggaatgttacaatcaagctcctctcaagaaacaagcatgacaaactcacggctgtgattggtcttgccgttttcagtc

SEQ ID NO: 59710 - DNA, 272 bp, Zea mays
atcaaacttgttggtgttcattgccatctgggatctactattacaaaggttgatatattcagagatgctgcagtgcttatggtgaattatgtcgatgaaattcgagcacaaggttttaagttggagtacctgaatatggaggtggtttgggaatagattaccatcataccgatgcagtcttacctacacctatggatctcatcaacactgtacgagaattagttctctctcaagatcttactcttattattgaacctggaagatccttgatt

SEQ ID NO: 59711 - DNA, 277 bp, Zea mays
accactgtatgagtcttctagagttgttgctcagaaaatgactactgtggcactgcgccaccttagacaaattgctcaagaaacaagtggagaagtagtgtacgccttgggaaggcaacctgcagtcctacggacctttatcaaagactaagcagggggtttaatgatgccattagcggtttcaatgatgatggctggtctgtaatggggggagatggcattgaagacgttgttattgcttgcaactcaaccaagaaaattaggaataccagcaatg

SEQ ID NO: 59712 - DNA, 260 bp, Zea mays
ctcgagcgaattgctgttgttccacctaacagcacagtaatatatgaagttgagctactttcatttgtgaaggacaaggagtcgtgggacttgaacaatgaagagaagattgaggctgctggtaagaagaaagaggaagggatgcattgttcaaatcgggcaaatatgctagagcttccaagcgatatgagaaggctgccaagtacattgagtacgacacttcgttcagtgaagatgagaagaagcaatccaagcaactg

SEQ ID NO: 59713 - DNA, 271 bp, Zea mays
aacggagattccttgccccctttccccttcaccatcgtcgcaaccctagccccgcctcgccgccggcacgccggatcggtcggtgccatgtccaaggccagggtctacgccgacgtcaacgtgctgcgccccaaggagtactgggattcgaggcgctcaccgggcaatggggtgagcaggatgactatgaagttgtcaggaaggtcgggagaggaaaatacagtgaagtatttgagggtattaatgttaacaataatgagaaatgcatcat

SEQ ID NO: 59714 - DNA, 290 bp, Zea mays
acgtggcatagggacctgtgcagggtctgtgaaaacatccccattgtcctctgcggtaataaggttgatgtgaagaacaggcaggtcaaagccaagcaggttactttccacaggaagaagaatctgcagtactatgaaatttctgcaagagcaactacaactttgagaaacctttcctgtaccttgcaaggaagctggctggtgatccgaaccttcactttgttgaagctgttgctcttaagcctccggaagttaccatcgacatggctatgcagcagcagcatgaagct

SEQ ID NO: 59715 - DNA, 266 bp, Zea mays
atcctagctcccgcaactgccgccgccactcccacgcccgcagccatgccgcccaagctcgacccgtcgcaggtggtggaggtgttcgtccgtgtgaccggcggcgaggtcggcgcacgtcgtcgctggccccaagatcggcgcgctcggtctttcccccaagaagatcggagaggacatcgccaaggagacggccaaggactggaagggcctccgcgtcaccgtcaagctcaccgtccagaaccggcaggccaaggtctccgtcg

SEQ ID NO: 59716 - DNA, 274 bp, Zea mays
aggcgatacgcgctccatcatgctgctagaggagaacatttggatgttgtcaagcttcttctccaggctggggcgtcccccaagaaggagaacacttacgggcagacacccgctgatatggctgaccaagacacgaagttcgaaccctgttgactgccaagcaaattgaggcaagcacacacatgagtgatgattaagcggcattggaatccttagttgcaactggtaatgttgagaaatagccgtaacatcttatctgccatccaaacttcat

SEQ ID NO: 59717 - DNA, 280 bp, Zea mays
tactccttgaccaaggtgactttttggtccattttatggatattgctcgagaggagcttacaaagaaaccagaagaaatatccgctgaaaaacttcagtctctgcttgacattgctttacggagtactgcagctgcttcagaccaagccatgaggaattaatctgctgtgtggacaggagttccctccttaagaaactggccactctgaaggacttggatcctgcagataagcttgctgcagcagatgttgatcgatcaatgcaattaagcatcacgggt

SEQ ID NO: 59718 - DNA, 267 bp, Zea mays
atcatcaacgagcccactgctgctgctatcccctacggccttgacaagaaggccaccagctccggcgagaagaacgtgctcatcttcgaccttggtggtggcacgtttgatgtgtcgctcctcaccatcgagggaccatcttcgatgtgaaggccactgcgggtgacactcaccttggcggcgaggacttcgacaatcgcatggtgaaccacttcgtccaagagttcaagcgcaagaataagaaggacataagcggcaacccccgtg

SEQ ID NO: 59719 - DNA, 259 bp, Zea mays
caggagctgagcaagcaagggtgtatcctggaggctgttattgaagcaagtgctactgaaattatcaatctcatggatagcctaaatgaatgggacagtaaagtgggcgatggtgactgtggaagcacaatgatagaggtgcaacagctattcttgaagatatgaaaaagcgttaccctatgaatgatgcagcgggaacaataaatgaaattggggcaacaatccgaaggtgatgggtggaacaagtggaatctgtatg

SEQ ID NO: 59720 - DNA, 266 bp, Zea mays
gcaggctagcagcacagcagcagccagagccatcccctctcctcgctacgcttcgcttcctcggcgccgattcctcctcctcctcctccaccctcgtccgtccccttccggcgcacgagctcgcccgagatggcaacgcgagatcgggtgtcgctgtgaacgatgagtgcatgctgaagtttggcgagctgcatccgaagaggctgcaccgcttcataactttcaagatggacgacaagttcaaggagatagttgtggaccaggtc

SEQ ID NO: 59721 - DNA, 269 bp, Zea mays
caagaagatgctttccatccagctccgtgggtccgcagccaagggcaagctcgtgaaggtcaaggcttcgtacaagctctcggacgccgccaagaaggcatcccccaagaccaaggctaagccggcaaaggccgcgctgccaagaccaccgcccccaagccggccaaggccgccgccgccaagtcaaagaaggcagcggctgccaagccaaagaaggccgctgctgctgggaccaagcgcaaagtgcccgagaagaaggtcgtggcgaa

SEQ ID NO: 59722 - DNA, 263 bp, Zea mays
atctcctcgcatttccttgcaaccgattgccttcccccctcccaacccaagaccgatggcgcccaaggccgagaagaagcccgcggcgaagaagccggcggaggaggagcccgcggcggagaagacgccgccgggaagaagcccaaggcggagaagcggatccccgctggcaagtccgccggcaaggagggcggcgagggcaagcgtggcaagaagaagggcaagaagagcgtggagacgtacaagatctacatcttcaaggt

SEQ ID NO: 59723 - DNA, 262 bp, Zea mays
tgacgagttggtgatgggacaacttctgttgttgttctagctggagaacttctgaaggagtctgagaagttaattaacatgaaaattcatccgatgactattattgcaggttacagaattgctctcgatgtgccagagattctttgctaaaaaagaccatggacaacaaagaaaatacagataaattcagatctgatctcatgaatattgctatgactactcttagttcaaaaatactttcccaagacaaggtgtacttcgc

SEQ ID NO: 59724 - DNA, 268 bp, Zea mays
ggtagatttcgcggcagagggggaagctgtttcttccacaccgcagttcgcgcccaccctgtgccaggcactgctgttgtgcacgccgcacagcagcacacggctgtacaaacgtcctggagtaccatcgaggcgactccgggggcattgtcagcagccagggagttgttgtgacaccctccaagctccacggcctcactaggggccatgaagcaattgcgggacgacgtcgaccgactactcggtatggcacattctatctcgacca

SEQ ID NO: 59725 - DNA, 278 bp, Zea mays
agcaaagatatggagtatgaagcaagacacatgtgtatttgatttcaaggagcataccaaggtgatatacactattcggtggagcccaccaggcccaggcacaaacaatcctaatcagcagttgcttttggccagcgcgcttttgattcaactatcaagctttgggaagtcgagcaaggatgccttctgtacagcttgtctggtcataggcaaccagtgtattctgttgcatttagccccgacggcgaatacttagcgagcgggtccctggatcagtg

SEQ ID NO: 59726 - DNA, 271 bp, Zea mays
gcctgatgagcatccacatgccggcctggccggacgcgctccgcaagggcgtctccacggtcatgatctcctactccagctggaacgggctcaagatgcacgccaaccacaacctcatcacaggcttcctcaaggggagcacccgttccagggcttcacgatctcggactgggaaggcatcgacaggatcaccagccctccaggggcgaactactcctactctgtgcaggcttcaattcttgctggcattgacatgatcatggtgccaaac

SEQ ID NO: 59727 - DNA, 265 bp, Zea mays
tcttgcctgggtaccaacaggtagttcaaggcgaatggaacgtagcaggcattgcccatagagcttatgatcttgaaggaaaaactgttgggactgttggggctggtcgtattggcaggctcttgcttcagcgtttaagccctttaactgcaacctgctttaccatgacagacttcagattgacccagagcttgagaaagaaattggggccaaatttgaggaggacctggatgctatgcttccaaagtgtgatgtgattgtgatc

SEQ ID NO: 59728 - DNA, 259 bp, Zea mays
gaatatttcatgtttctcctcagcacacgtgctgaagaaactgggttgaacttgcagacggcggacactgatcttatatacgacagtgactggaaccctcaaatggaccaacaagctgaagaccgtgccaccgtatagggcagaagaatgaagtgcgtgtgtttgttcttgttagtgtcggctccattgaagaagagatcctggaccgtgcaaaacaaaagatgggtatcgatgcaaaagttatccaggctgggttgtt

SEQ ID NO: 59729 - DNA, 264 bp, Zea mays
tggagacctagttagatgtggtttcacatcatctgaggtgcagaatttcatcaaagcaatattcgctgactcgcctcttaggaaggagtgcctaggatggatcgttaggactccagcttagaatacagaacatcatatttctgtctgtgggtcaatgatttttttcatattcttttgtccaccataccatatagtgaagtattaattggtatgagcccagtttgcactggagacagacttgcaatctgactccctagttcaata

SEQ ID NO: 59730 - DNA, 260 bp, Zea mays
cccgtccttttcctttcataaaccccaagccgcgccgcaatagctcgccccctcgttcgccgcctctcctgctcctaccgcagctctccctcaggtttagtgttcgcaatggcggccttcaacaagcttgtggccttctaaggcacagtgctctggtgagcggtatcactggtggctcttctcctgcagtgttcaatgctgcacggctcatgtctaccaagctatttattggtggtcttgactggggtgttgatgacgtg

SEQ ID NO: 59731 - DNA, 267 bp, Zea mays
aactgccaagtcccttggctatacagaaccagatccacgtgatgatctaggtggaatggatgtcgctagaaaggcattgatcctggctaggcttcttgggcaacagataagcatggagagtatcaatgttgaagtttatatcctagtgaattaggacctgatgcagtgtccacaaaggacttccttgaaagtggtttagtgcaacttgacaagagcatggaagaaagaatcagagcagcatcttcgagaggaaagttcttcgctacg

SEQ ID NO: 59732 - DNA, 276 bp, Zea mays
agcatgagtgtaaccaccagcctaaattgcatggaggacttgtgatcaagcacaatgccaatcaacgatatgcttcaaatgctgtgacagcatttatttttcgagaaattgctgagagacaccagctacctatacaggttttgttgttcgcaatgacatggcttgtggttcaacaattggcccaatacttgctagtggtgttggtatccacactgttgatattggagcaccccaattatcaatgcacagcatcagagaaatgtgtgccgctgacga

SEQ ID NO: 59733 - DNA, 233 bp, Zea mays
aggtaagctcgggcctcgtcctccccggggagctcgccaagcacgccgtctccgagggcaccaaggccgtcaccaagttcacctcgtcctacgtcgcgtggcctccgcttgcaggcttccctcgtatgttcgcgtgtcttgctgtagttaggtgctgctgtgtctggctcctccggtagcaactgttatctgatggaacagtaacaatgcttattgaatccagctagttgctt

SEQ ID NO: 59734 - DNA, 272 bp, Zea mays
ctcgagcgatctaaggagatgaatgagctgaacctaataaggtgccaacacattccgaaacggccgggttgtgattggcatgacctaccggacgagaaggttaagctgtcaaatgggcagatggctgacctgatacctggtgcctgcccaacacagccaagaggcacaatcagtggaaaggactgtacgggaggctggactgggaaggcaacttccccacatccgtcactgatccccagccaatgggcaaggtcggcatgtgcttccaccct

SEQ ID NO: 59735 - DNA, 273 bp, Zea mays
atcaatcacaggctcagtttgtttgtgattgattattactctaagaagggcttggtggtaaatctgcctgcggagaaaccaccaaaggaagtgactgctgaggtgctgaaagccctctcatgatgaaatgccccttttctgagtttattcaggttaagcatgatatgtaccgaaatccctttgtctgggtttcttcacaccagcatcatgcagtttcctttttgtgcgattacaccattttatcatagctttgacaagctcggtaactgtctg

SEQ ID NO: 59736 - DNA, 286 bp, Zea mays
cgcttatttggtatgattaatgaattgcaaactgtttttgacgttgtctccggtgcgagacatcaacaatctaaagagaggtccagtatggacaatggtggtagagccaagcctgtaaagatagaaaataatggaaaagtcacagacgaagcatacgaacatgacagtgatcacggtgaaaccctatgtggaacctgtggtgggatatacaacgcggatgagttttggatcgggtgtgacatgtgcgagcgatggtaccatggcaagtgtgtcaagataactcctg

SEQ ID NO: 59737 - DNA, 274 bp, Zea mays
atggttcttgcttctgcctactcgcatgagttgccacgatatggtcttgaagttggtctgaccaactatgcagctgcctactgcactggccttctgttggctcgccgtgtgctcaagatccgtggtttggatcaggagtacgagggcaatgttgaggccactggtgaggacttctctgttgagccagctgatgagaggaggcctttccgtgctctcttggatgttggccttatcaggactacaacagggaacgtgtctttggtgccccaaggga

SEQ ID NO: 59738 - DNA, 276 bp, Zea mays
caaggtggtgtggggcgaggccaccatggtggaggcagagaggatgttgtttgccgccgcgcttcaggatcccgcgaaccagcgctttgttttgctctctgatagctgtgtcccactctacaatttcagctccatatatacttacctgatggcttcacctaacagttttgtagacagctttgttgctaagacggagaagcgttataatcaaaacatgtctcctgccattccaaaggataaatggaggaaaggatctcagtgggtagtattaatcag

SEQ ID NO: 59739 - DNA, 280 bp, Zea mays
ggaaggaggctgcttgggccatctcaaacgctacctctggtggttcccatgagcaaatcaagtacttggtgtctgagggctgcatcgtgccgctgtgcgaccttcttgtttgccctgatccgagaattgtaacagtttgtctggagggtcttgagaatattcttaaagtaggggagcacgacaagaccatgggcgcaacaggtgacattaatgttttcgctcagatgattgacgacgcggaaggcctggaaaaaatcgagaacctacagagccatgataa

SEQ ID NO: 59740 - DNA, 280 bp, Zea mays
ggcgaccctccctccttcgctccttccgcgccgcctcccggccgtcgccgccatggtgaagtactcgcaggagccgggcaaccctaccaagtcggctaaggccatgggcagggatctgagggtccacttcaagaacacaagggagacagcctttgcgcttcgcaagttgtctttgaccaaggctaagcgataccttgaggatgttattgctcacaagcaggcaattcccttccggagatactgtgggggtgttggtcgcaccgcgcaagctaagtcgcgc

SEQ ID NO: 59741 - DNA, 279 bp, Zea mays
aaggaatctttgaggtcaaggccacagctggtgacacccatcttggtggtgaggactttgacaacaggatggtcaaccacttcgtccaggagttcaagaggaagaacaagaaggatatcactggcaaccccagggctctccggaggctgaggaccgcttgtgagagggcgaagaggactctgtcttccactgcccagaccacgattgagattgactcgctgtatgagggcatcgacttctactccaccatcacccgtgccaggtttgaggagctcaaca

SEQ ID NO: 59742 - DNA, 280 bp, Zea mays
cttgacatgatcatgagcaagttgtgtccaatggaacagtcctatgctagtcagagcaggctctgaaccagatcacttctggaaagctttgggaggacgatcggagtactcgaaagaaaagcgtgtgaaaggttggcctgcagatccacatctgtatgcttgtagatttgaacaaggtttactcaaggtcaaggaggtattcagcttctgtaaggatgacctggcaactgaagagacgttgattctggactgcaatgaagaaatctacgtctgggttggg

SEQ ID NO: 59743 - DNA, 278 bp, Zea mays
gaagagcggcggcgcgggcggacaaggagcaggcggaggaggagttgtgccaagccacaatgggtatctcgcgtgactcgatgcacaagcgccgagccaccggtggaaagcagaaggcctggaggaagaagcgaaagtatgagcttggtcgccagccagccaacaccaagttgtcaagcaataagacggtgaggagggtccgtgttcggggaggtaatgtgaaatggagggctcttcgccttgatactggtaactactcatggggaagtgaaccgtta

SEQ ID NO: 59744 - DNA, 280 bp, Zea mays
atcatctgcagttgtagctatgctggcaaaatcaggtttcacggcggcatttacactgatttttgtatctgagattggagataagacgtttttcattgctgcactactcgcgatgcagtatcaaagagcactggttttacttgggtcaatggctgctctctccctgatgactattgtgagtgttataattggacggattttccagtctgtgccagcacagttccaaacaacgctaccctcaggagagtattctgcagttgctctgctggcattctttggt

SEQ ID NO: 59745 - DNA, 278 bp, Zea mays
ttcaagaaggtgccagattggttcctcgacaggagtgactacaaggacaacaggttctcacagatcatctccaacgccctcggtatgaagctcagggacaacctcagcaagctcaaaaagatcagtcccttgttggatttcatttctagcctacccgatggtgagagcaagtgaacgcatgcgcacttggaagagacaacgtcacatgataaggttgttcaaggcgatgatcaagtggacgtagcggcttatcgacaagcatgttttggtcctggaga

SEQ ID NO: 59746 - DNA, 269 bp, Zea mays
atctggtatttcgaaggaatctacgcatgctccccgcagataccaggtgttcgttttccaggattgactcatcctggtgttgtgggaactgcaccgtcacttgagctcctaaatatatggaatgaaagagagaaaagtttgtctgagacaagcccggagactattaaactgtgtgaagttcggcaccagaggccccttgctcatttaccgacccctgaaaattgcttacttgggaaggtccaagaagggactgctgaatggcacataat

SEQ ID NO: 59747 - DNA, 275 bp, Zea mays
agaaggtttctatgagcggtcccctgatttgctagaggctgcagtagctcacatccagttggtcattgtaaccaagttcatttcgaaggtgcagcaggacattcctggacctggagtgaaggaacagctccagaacctttgcaatgtctatgccctctacattctccacaagcacctgggcgactttctggcaaccgggtgcatcacacccaagcagggagcgctggcaaacgagcagctgggcaagctttacgcacaggtgcgtccaaatgctg

SEQ ID NO: 59748 - DNA, 277 bp, Zea mays
cagatccaatatgaatgctgttgacatcacctctcaatatggatctggtactaatatacaagacaattcccttgtacatgtttcaaaagctaacattagcgggaaggtcctcccaaccataattggaagcaacgtgacagtgggtcacagtgctgtattacatgcatgtaccattgaggatgaagcttttgttggtatgggtgccactctgcttgatggagtggtggttgaaaagcacagcatggttggtgcaggatctcttgttaagcagaataca

SEQ ID NO: 59749 - DNA, 283 bp, Zea mays
aagccgtttttcctcgttctcgatcccccctgccgcttccagctccgatcgatctgatccctccccaccaccacgcccatggcggaccaactcaccgacgaccagatcgccgagttcaaggaggccttcagcctcttcgacaaggacggggatggttgcatcacgaccaaggagctgggaactgtcatgcgttcactggggcaaaaccctacagaggctgagctccaggacatgatcaatgaggtcgatgccgatggcaacggcaccatcgattttccagagt

SEQ ID NO: 59750 - DNA, 269 bp, Zea mays
ggcaagccacaggagtggcgagacagaggacaccttcattgctgacctctcagttggcctgtctacgggccaaatcaagacgggagccccttgccggtctgagcgcctggccaaatacaaccagctgctcaggatcgaggaagagctcggtgatgccgcggtctacgccggagcaaagttcagggcaccagtggagccctactaagaaaggaagaggatgaggatgttttcttgtggagctatactagctcgctgctgccttttgttac

SEQ ID NO: 59751 - DNA, 268 bp, Zea mays
gatactctgcacatttcagagggcaagctcatttctttgggtacgaaggaagatgcggccttcctactaattttgattctaactattgctatgcattaggctatggcgctggtgcccttctccaaagtgggaagacaggacttatttcctcggttggcaaccttgcggctccagttgaagaatggactgttggtggaacagcattaacatcactgatggatgttgagaggaggcacggcaagttcaagccagtgatcaagaaggctat

SEQ ID NO: 59752 - DNA, 268 bp, Zea mays
ggagcgtatacaagatggattactaaggcatcctgcagattcacctctctggaaggattttgaccaaaagcacccagtgtttgcttctgatagtcgcaacattagacttgctttagctacagatggttttaatccgtttaggtccatgaatgttagctatcgcatttggcctgttattctcatcccatataactttgcaccatggttgtgtatgaagcaaacaaatttcataatctcattgctgattccagccggtagatctcctggt

SEQ ID NO: 59753 - DNA, 269 bp, Zea mays
ggaggagattcagcgcatcaaagctgcgaagcagatatccctcacagggaggccttcagcatggctgccaagaattgggcgaagtgtgacccgcgctgctcgacgactgcctctactgccacttctaacagcgctcctgagcctgctagagtcgtcgtgcccactcctcatgtaactgagccacgctttgatctggaggatagggccaaggagcatgtcattgagagcttcgacatcttcaagcagattgagcgcaacatctagatgtc

SEQ ID NO: 59754 - DNA, 282 bp, Zea mays
caagtttgtaatggacgaggtctatgacatggagctctacgagtggaccaaggtggacatctctgatgaggcccagaaggagcgtgtcaatgcgatgattgaggaccaggagccctttgagggcgaggccttgcttgacgcgaaatgcttcaagtgagtgtgcttgcctggagacagaactgtttagcccttgaatttgcctatggaagagtttgcccttttactagtgtcgatgttgatctggtataccttgctatgaactggttaaagtttgtgctggtt

SEQ ID NO: 59755 - DNA, 278 bp, Zea mays
caaatccagtaactcgcatcttcctgcgtcatccaagttctagcagcgcagcgctcggtttcgacaatgtcggggcgcggcaagggcggcaagggtctgggcaagggcggcgccaagcgccaccgcaaggtcctgcgcgacaacatccagggcatcaccaagccggcgatccggaggctggctaggaggggcggcgtcaagcgcatctccgggctcatctacgaggagacccgcggtgtgctcaagatctttctggagaacgtcattcgtgacgccgt

SEQ ID NO: 59756 - DNA, 268 bp, Zea mays
gctcctcctcctcctccccccagtccctcccaggctcccaccccgccttgctcgcagcctccccacaaccctagccctagccctagccctagccctagctctcccacacccgcactgggagatggacggcggcggcacgcaccgcacgccggaagacgtgttccgggatttccgcgcgcggcgggctggtatgatcaaagcgctcaccaccgacgtggagaagttctaccagcagtgtgacccagagaaagagaatctgtgtttgtat

SEQ ID NO: 59757 - DNA, 262 bp, Zea mays
cgaaagatggttctgggtacaagttcttgggtgagatcgttttgcaccttgacaagataaaccctcaggtggcctcccgcatggtttcagcattttctcggtggaggcggtacgacaagaccagacaagctcttggtaaggcccagctggagatgatcgtgtcggccaatgggctctccgaaaacgtgttcgagattgcttcaaaaagcttggcggattagcttgggcagttccgaggaattgcgagtgggagtgcttaact

SEQ ID NO: 59758 - DNA, 264 bp, Zea mays
ttaccaacaaggacatcacagcacaaatcatatctgctagtatagcaggtgatatggttcttgcttctgcttactcgcatgagttgccacgatatggtctcgaagttggtctgaccaactatgcagctgcctactgcactggccttctgttggctcgccgtgtgctcaagacccgtggtttagataaggaatatgagggcaatgttgaggccactggtgaggacttctctgttgagccagctgatgagaggaggcctttccgtg

SEQ ID NO: 59759 - DNA, 271 bp, Zea mays
cactgggtctaccggtggcggccacggtgaactgcgcggacaacacgggcgccaagaacctctacatcatctccgtcaagggcatcaagggccgcctcaaccgcctcccgtccgcctgtgtcggcgacatggtcatggccaccgtaaagaacggaaagcccgacctcaggaagaaagtgatgcccgccgtcatcgtccgccagcgcaagcgtggcgtcgcaaggacggtgtctacatgtacttcgaagataatgctggagtgattgtgaat

SEQ ID NO: 59760 - DNA, 289 bp, Zea mays
ccagaccaccaaacaagtgccagcgccctctcgcagtcgccgcaatggagagcaccttcatcatgatcaagcctgacggcgtccagaggggcctcattggtgagatcatcagccgttttgagaagaagggcttctacctcaaggccttgaagcttgtcaacgtggagaggtcgtttgccgagaagcactacgccgatctcgcctccaagcccttcatccagggcctcattgactacatcatctctggccctgtggtggccatggtctgggcaggcaagagcgtcgtcac

SEQ ID NO: 59761 - DNA, 291 bp, Zea mays
cagccctgagcaggaagatggaggtcccatactgcattgttaaaggaaaggctcgccttggatcgattgttcacaagaagaatgcatcagtcttgtgtcacaccactgtcaagaacgaggataagcttgagttcagcaagatcttggaggctattaaggcaaacttcaacgacaagttcgatgaggtcaggaagaagtggggaggtggcatcatgggatccaagtcgcaggccaagaccaaggcccgggaaaagctgctcgccaaggaggctgcgcagcggatgacctaga

SEQ ID NO: 59762 - DNA, 291 bp, Zea mays
acacgccttgcccggtgtgcaccgacgaaaccagcgacagcagcacagagacgaacggcgtggtatcctcctgcctcagctgcttcctagctgggggtgctctctaccgtttcgagtacgcagtcaacccggcgctcttcctcgccaaagcgcgaggagggacgcgcacgctcgctccctctgaccctgacgacacggtggctcgccgcgccagatacctgctgagcaacggtttcaggtgctacaacctgttcaagagcaactgcgaggacttcgcgatatactgcaaga

SEQ ID NO: 59763 - DNA, 289 bp, Zea mays
ggcgaccgtctcacccgcgccgcaaaggtgctcgagcagctcagcggccagacccccgtcttctccaaggcgaggtacacggtgcggtcgttcggcatccggcgtaacgagaagatcgcctgctacgtcacggtgaggggcgagaaggccatgcagctgcttgagaccggcctcaaggtcaacgagtacgagctgctcaggaggaacgtcagcgacaccgggtgctttggtttcggcatccaggagcacatcgaccttggtatcaagtacgatcgctccacagggatct

SEQ ID NO: 59764 - DNA, 285 bp, Zea mays
attactcatgtatggtggatcttctctgccgagctggtctgcttgaaagagctgtcaacatgatccattcaatgccctttgagccacatccttctgcctatggcaccttgctgactgcttgtagagtttataagaatttggagtttgctgagtttgctgctagaaagctgattgaacaggatccacagaatgcaggtgcctatgtacagctggcaaatatttatgcggtggcaaataagtgggctgatgtctctagagtaaggagatggatgaaggataatgcgg

SEQ ID NO: 59765 - DNA, 287 bp, Zea mays
actcgcatcttcctgcgtcatccaagttctagcagcgcacgctcggtttcgacaatgtcggggcgcggcaagggcggcaagggtctgggcaagggcggcgccaagcgccaccgcaaggtcctgcgcgacaacatccagggcatcaccaagccggcgatccggaggctggctaggaggggcggcgtcaagcgcatctccgggctcatctacgaggagacccgcggtgtgcccccgatctttctggagaacgtcattcgtgacgccgtcacctacactgagcacgcccg

SEQ ID NO: 59766 - DNA, 287 bp, Zea mays
acttcactggcaccaatcagtgcagaagcgggtgccacacgcgctggtggtttcaagtccatgtattctgatagagtttttctgtctcacatcaccagtgatcctgctatgggccaggaaaagcctgttttcttcagtctgtatgccatcataagccacatcaagcctgatcagaatatgtggtaccgtgcttgcacgacctgtaacaagaaggtgactgaagcttttgggtctggatactggtgcgaggggtgccaaaagaattactctgagtgctcgctgagata

SEQ ID NO: 59767 - DNA, 285 bp, Zea mays
agtcaaggagctatttggtggggctggttccacaaccacacattgatttatactagaccacatcttgtggagttgatgtattctaccaatgtcgtcatatctaatctaaccttcaagaactcgccgttttggaatatccaccctgtgtactgcagccaagtgcttgtccggcatgtcacaatcctagcgccttttgcatcgccaaacaccgacggcgttactccagactcttccacgaatgtgtgtatcaatcattgctatgtaagacatggcggtgatgttatt

SEQ ID NO: 59768 - DNA, 290 bp, Zea mays
gcttatcatccgcgcctctacatttcttctctctctgctcctccgcctccgcctccgcctgatccatccaagacagggatcgccatgtcggactcggaggagcaccacttcgaatcgaaggccgacgctggggcgtccaagacctacccgcagcaggctggcaccgtccgtaagaacggcttcatcgtcatcaagaaccgtccctgcaaggttgtggaggtttctacctccaagactggtaagcatggccacgccaaatgccactttgtcgccatagacatattcaatgg

SEQ ID NO: 59769 - DNA, 280 bp, Zea mays
ctttgaggtcagggccacagctggtgctgctcaccttggaggacgaggacttcgacaacaggatggtaaaccactttgtcgaggaattcaagagaaagaagaagaaggacattagcggcaaccctagggctctaaggaggctaaggacagcctgcgagagagcgtcgaggaccctctcctcctatttagaggcgagcattgagattgattgcttgtatgaggacatcgacttctactcagccatcacccgtgccaggtttgaggagctcaacatggatct

SEQ ID NO: 59770 - DNA, 283 bp, Zea mays
cttcgttcccatttctggttttgagggcgacaacatgattgagaggtccaccaaccttgactggtacaaaggcccaaccctgcttgaggctcttgaccagatcaccgagcccaagaggccttcggacaagcccctgcgtctgcccctccaggatgtgtacaagattggtggtattggaactgtaccggttggtcgtgtggagactggtgtcatcaagcctggtatggtagtcacctttggtccaactggcctgactactgaggtgaagtctgttgagatgcac

SEQ ID NO: 59771 - DNA, 279 bp, Zea mays
gtcagtaaaagcggctagcgttgcttctcaatggttggaattactgcatcaggacataaggggacgtcttgctgctttaaagcgcacaggaagagagtcagaaatgctcttcacacggaactgccataccttaccgcgacagaattttcatctaatcaagagaacgaatcatccattgcaaatacttctgagattggatgtactgacaaagcggtttcagaagctcatgtggcacgatggaggtctctgtttgttcagatggacaaaacacttcaggag

SEQ ID NO: 59772 - DNA, 277 bp, Zea mays
tgaatatcaagagaaccatataaggatatatcaatgctggttttgctggaattatgcttgaggatcaggtggcacctaaagcatgtggacatactgaaggaaggaaagtcatatcaagggaggaagctgtcatgcacataaaagctgctgtagatgctaggaaagagagtggctctgacattgttattgtagcgaggacagattctcgccaagctatttctcatgatgaagcattatggagggtgaaagcatttgctgatgctggagcagatgttct

SEQ ID NO: 59773 - DNA, 280 bp, Zea mays
aactccacctacagccacctcctctgcgtcttcagccacttatgacaaccaggtctgtcctatctgcctcgtgaaccccaaggacatggcgtttggttgtggacaccagacctgctgtgactgcggacagatcctggagtcgtgcccaatctgtcgcactcccatcaccacaaggataaagctatactagcaagtagtggtttggatcattgtcaatgggtggtatactggaggagccacccagcgtcacactggaggatcgtgtcagcatgcccataga

SEQ ID NO: 59774 - DNA, 281 bp, Zea mays
  unsure (1)..(281): unsure at all n locations
gtaggattggaattttgcttaatactctggttatcgcaaattgtgaagttgtgaaacctagggttgcagctgctgaacatatctcacagttcaatgaggaagcacggtcaccttttgtaaagaagtacaaaactatagttcatcctggtgaggttaacagaatcagggaacttccacagaacagtaagaataatngncnatcacactgacagtccagatgtacttatttgggatgttgaagcacaaccaaatagacatgctgtcctaggagcaagcgagtc

SEQ ID NO: 59775 - DNA, 277 bp, Zea mays
cgtgatggcaatgatgccatacgggctcttgatggttatccatttggccctggcagacgcaggctttcagtagagtggtcacggggtgatcaagctggtagacgtgatggcaacaaaccagaagcaaatactaagccaacaaggacactgtttgtcattaactttgatccaatgaacacaagagtcagtgacatcgaaaggcacttcacaccatttgggaacatatcaagtgttcggataaggaagaactttgcttttgttcagtttgaaactatgg

SEQ ID NO: 59776 - DNA, 278 bp, Zea mays
acaagggttagaagggtggcaagaaaaagaccgtcgaccctttctctaagaaggattggtatgacatcaaggcaccgtcggtgttcagtgtgcgcaacatcgggaagactctcgtatccaggacacagggtaccaggattgcttctgagggtctgaagcacagagtctttgaggtttgcctcgctgatcttcagggcgacgaggatcaagcttacaggaaaatcaggctccgtgctgaagatgtgcagggcaggaatgtgctcacaaacttttggggt

SEQ ID NO: 59777 - DNA, 282 bp, Zea mays
cattttagccgccgccgctgctcatctcacatccctcgagaagacgcctgctcctcgccgatcgatacgatggccgtcttctccgacctccacaccgccgacggcctcaagtccctcgaggctcacctcgccggcaaaacctatgtgtctggtgactccattactaaggatgacattaaggtcttcgccgcggtgccgtcgaagcctggcgctgagtttcctaatgccgcccgctggtacgagacgtctctgcggcggtagctcaagatctctggtaggctg

SEQ ID NO: 59778 - DNA, 280 bp, Zea mays
  unsure (1)..(280): unsure at all n locations
ggaagttcgagaccaccaagtactactgcactgttattgatgccccgggacaccgtgacttcatcaagaatatgatcactggcgcttcccaagctgactgtgctgttcttatcactgactcaaccactggtggttttgagggcggtatctcgcagtctcgncagacccgtgagcatgctctccttgctttcacacttggtgtgaagcagatgatttgctgctgcaacaagatggatgctactacacccaagtattcaaaggcccgttatgatgaacttgt

SEQ ID NO: 59779 - DNA, 277 bp, Zea mays
agcgcgtataaattgggggaaggaaaattccagcggacgagcgctctagccgtttttcctcgtcctcgatccagcccctgccgcttccagctccgatcgttctgatccctccccaccaccacgcccatggcggaccaactcaccgacgaccagatcgccgagttcaaggaggccttcagcctcttcgacaaggacggggatggttgcatcacgaccaaggagctgggaactgtcatgcgttcactggggcaaaaccctacagaggctgagctccagg

SEQ ID NO: 59780 - DNA, 271 bp, Zea mays
gcgtccttatgagaaggagcgtcttgatgctgaactgaagctggtcggtgagtatgggctgaggtgcaagcgtgagcttaggagggtccagtatgcactgagcaggatccgtaatgctgcaaggcacttgctcacccttgacgagaagaacccccgtcgtatctttgagggtgaggcgcttcttcgccgcatgaaccgctatgggctgcttgctgagggtcagaacaagcttgattatgttcttgccctcaccgctgagaacttcctcgca

SEQ ID NO: 59781 - DNA, 275 bp, Zea mays
gcggcgggtctcgcgccgctacatcgagatgttctacgccctgaagtaccgtagcctggcaagccaggttccgctgtccttcgattagtacggggaaagaagaagaagaagaagcccaggccggagaaccatcgcctgcaagtcgatctgtttcaccgcaattcgcattgttagtcgtgtattggagttatgtgtacttggtttccaagaactttggttccttgtttttttttctttcttgtttgagcggttttgggcagcgctggcctggttcc

SEQ ID NO: 59782 - DNA, 302 bp, Zea mays
gcgaaccaagcagaccacaacaagaagaagcgtagtcgtcgccggaaggaaaggcgcggagaagatgtcgtggcaggcgtacgtcgacgagcacctgatgtgcgagatcgaaggtacagcatctcagcgccgccgccatcgtcggtcacgacggcagcgtttgtgcgcagtccgagagcttccccgagttaaagcctgaggaggttgctggtatcataaaggactttgatgaacctggtactcttgcaccaactggtcttttcgttggaggtacaaagtacatggtgatccaagtgaactgg

SEQ ID NO: 59783 - DNA, 96 bp, Zea mays
tcaattttgtggggcgcattttaggacctagaggtaattctctagagcgagtagaagcatccactgggtgtcgtgttttcattagaggaaagggtt

SEQ ID NO: 59784 - DNA, 212 bp, Zea mays
  unsure (1)..(212): unsure at all n locations
aanagatttgttgaagaatgaatgcactcatattgtggttggcacgcctggtaggatacttgctcttggcagggataaggatctctccttgaagaatgtgaggcacttcattcttgatgaatgtgacaaaatgctggaatcacttgacatgcggagagatgttcaggagatcttcaaaatgactcctcatgataagcaagtcatgatgtttt

SEQ ID NO: 59785 - DNA, 301 bp, Zea mays
agagagagagagagagagagagagagagcaggaagcaggggctagacgcggatcggcgagcatgaggggcggcggcggcggcgggatgatggacgatgaagagagggtgggccatgcggagatcccgaccagtttcggtcccgagctgcgcgcctgcctccgatgccgcctcgtcaagacctacgaccagttcagggagaacggctgcgaaaactgcccgtttctagagatggacagagagcacgacaacgtcgtcaactgcaccacccccaacttcactggaattattctctgatggacc

SEQ ID NO: 59786 - DNA, 293 bp, Zea mays
aaaaggctcaaccaactcaactcctccggtggtgctgatgacgacgatgaggacgacgagtaaagtttagtgccatcgaagtggtgctatctcaatccagcgatcagcaattgtgtactgtcttatgcggggacctgtagtactgcaataggcatttttgtttaagttttgcgaggtgaacaaaactgtttctgttagtttcgagcttgagctctcaatgtttactctttacattgaaatgctgccgtttggacatgttttttctgagttctacacctgcttgtcttgctaag

SEQ ID NO: 59787 - DNA, 294 bp, Zea mays
acctgctggaactccatatgagaacggagtattcaggatgaagctattattgtcacgcgatttccctcaatctcccccaaaagggttcttcttgactaaaattttccatcctaacatagctactagtggtgagatatgtgtaaacacactgaagaaggattggaatcctggccttggattaagacatgttcttctggttgtgagatgccttctgattgaaccatttcctgaatctgcacttaatgaacaagctggaagagtactgaaattatgaggaatatgcacgcatgccag

SEQ ID NO: 59788 - DNA, 302 bp, Zea mays
gcggaaggagtcggagggaaccgaaaactcagggtctcgaatttcctaggagcggaggcgatggctgggaatggaggaaaaggattgctcgccgcgaagacgacggcggccaagtcggcggagaaggacaaggggaagaaggcccccatctcacggtcctcccgctcgggcctccagtttcctgttggacgaatccaccgtcagctgaagcaaaggactcaggcaaatggccgcgtaggtgccactggagccgtctactctgccgccatcctggagtacttgactccgaggttctggagctg

SEQ ID NO: 59789 - DNA, 300 bp, Zea mays
aagagtagacattggtgattataacaccagcaccagcatcagtgaggacagttatggcagcttcagtgctaacggaagcaggcctcacatgtcaaaggatgtgagatggggagccatcaggtgcttggctacccaacaagggagcttgggattgaagaacttcaagcttctcaaacaacttggttgtggggatattggcactgtttatttggctgagttagtggggtcagatcaccgttcgctttgaaggttatggacattgagtatctcataagcagaaagaaatgctcagagcacaaa

SEQ ID NO: 59790 - DNA, 273 bp, Zea mays
taccacggccatcttgccaggtctgcaaaaaatatacgcgcgcctacttacattgcctggtcacaaaagatgctatgggttctcagctgctgtcatatcataacttatcatttatgatgcggttaagtagagacctccacatgtctattcttgaaggacgatttgcagaattcgtgcgaggattcttgagggtgcagtttccaacgggagacgttccgcagtgggttcgcaacgcgatggaggtcgctggcattgacatatccgagtgctgtg

SEQ ID NO: 59791 - DNA, 297 bp, Zea mays
  unsure (1)..(297): unsure at all n locations
acgcaagaagctcattcagatcgatgtgagctcggatacagtgtgcncttggtgctttgtcggtaaaaagaaccttgagaaagcaatggagcaaagcaagggcaagtttgatttcgaggtccgttggcatccattctttctgaaccccgacgcgcgaaaggagggcgtcaagaaatctgacttcttcaagatgaagtacggtcctgtccaatatgagggtgcgatgtctcgcatgactgagatatttcgaggactcgggcttgaatacgacatgtcaggatgacagggaacacgatg

SEQ ID NO: 59792 - DNA, 250 bp, Zea mays
aggttgctatgaggcaaaagttaggcgagttgtggtggtgtcttcatgtggagctgtgtatgctaatcctatttatccgaagggtaaggtgtttgatgaagactgctggtcagatgaggattactgcaggaagaaggaggattggtatttagtcaccaaaacactgtcggaacgagaagctcttgcttttgcagcaaaaacagggctggacgttgtaactgtttgtccgtcattagtattggaccttgat

SEQ ID NO: 59793 - DNA, 294 bp, Zea mays
  unsure (1)..(294): unsure at all n locations
gaatgatcccgcggcgcacagccacccttctctcctctccgctcccaatctttgtcgtcgcctccctcgaagtcgccgctgccttcattccaccatggcgcttcacgccccggtcctcgtgatgaaggactcgctgaagcgggagtctggcgcgaaggttcacaaagccaacatccaggcggccaaagctgttgtcatcttcantcgcactacattgggtcccagatccatgctgaaaatgcttctggacgctggacgctggtggccttttatttaataatttgtaaattatat

SEQ ID NO: 59794 - DNA, 294 bp, Zea mays
  unsure (1)..(294): unsure at all n locations
aggtaatgaccctgctctcttctatttgtctgctcagtgacttttatttttcaatgaactttcctgggtacttttgcttttgtaggaccaggatatccggtttaccactccttatatgatgactacgtatggatggcgaaattcggagatcctgcgttctgtnagcatgtggcagctgctagcatatggggaatgatggctttgaggttggcaaatgaagacatcctacccttcaattacatgtcctatgcaattgagcttgaggcatacacaaaaacgtagagaatgaagtga

SEQ ID NO: 59795 - DNA, 302 bp, Zea mays
agaaagaagcagcctgggcaatttcaaatgccacttctggtggcacacatgatcagatcaagtaccttgttgcccagggttgcattaagccactctgtgatctgcttgtttgcccggatcccagaatcgtaacagtttgcttggagggtctcgaatacatcctgaaggttggcgaggcagagaaaaaccttggtgcaggtgatgtcaatgtctatgcacagatgattgatgatgctgagggcctggacaagattgagaacctgcagagccatgacaacaccgagtatatgagaaggctgtga

SEQ ID NO: 59796 - DNA, 294 bp, Zea mays
  unsure (1)..(294): unsure at all n locations
agcttccctttccgtctccatagcttctgcntcagtncgccgtctccactccgcgttccctggctgcctgcgttgcgtcttgggggagagagagaagtgggagacctacgagaggctgccgtgtagggactagggaccgtagagtaagcgacagctaaggagggagagggggatggctgggatcgggccgatcaggcaggactgggagccggtggttgtgcggaagaaggcacccaccgccgctgccaagaaggatgagaaggccgtcaacgccgcggccgctccggcgcggag

SEQ ID NO: 59797 - DNA, 290 bp, Zea mays
actagctcgcgcaaaagcggcacaggaaatatatttattaagaatcttgataagtcaatagacaacaaagctttatatgacacattctgtgcatttgggaatatactttcatgtaaaattgcaacagacccttcaggagaatcaaggggctatggttttgttcagtttgagaaggatgaatctgcacagtctgctattgataaactcaatgggatgcttatcaatgacaagaaagtgtttgttggaccttttgttcgcaagcaggacagggaaaagtctcgagtaatatc

SEQ ID NO: 59798 - DNA, 291 bp, Zea mays
agcatttgttctgaaattctcagcaattgaaatatacaatgaagctgtaagggatcttctgagtgcagaaaacactcctcttagactctgggacgatgcagagaagggcacctatgtggagaaccttacagaggttgtgttaagggactggaaccacttcaaggggcttatttctgtatgtgaagctcaaagaaggacaggggagaccttcttgaatgaaaaaagctccagatctcatcagatactgagatgcaatgaaattctgcacgggagttctagggaaggacaagt

SEQ ID NO: 59799 - DNA, 285 bp, Zea mays
catcttgaggacctgtctgacacttcttctcaagatcaggcaatatactagtaagctgcctgatcttgagaagaagcttgaggacctgtctgaagcaaacccaagcgctgacatggatgagatggtgaaggcaattgcgtccagggtaactacattgataccaaaagctgcatcttttacttcttcccagatggcaacctcaagcaatggattcgactcctcggttatgtctacggcagcgacaaccggaagctctggaagcacggtgactgccttggggttgta

SEQ ID NO: 59800 - DNA, 255 bp, Zea mays
  unsure (1)..(255): unsure at all n locations
caggccttggagttgagggcattagngatctgatatcntggcaagggtgancttaaggctgtcagcaacgtagataacattattggaccagcgattgttggagaggaccccactgagcaggttgagattgacaacttcatggtccaacagcttgatggaacctccaatgagtggggctggtgcaaacagaagcttggagcaaatgccatccttgcggtttcacatgctgtgtgcaaagctggagctatggtgaag

SEQ ID NO: 59801 - DNA, 278 bp, Zea mays
gcgctcaagttctcgcgcccacagccaaatttttctccactcaatcgcggcataagctgcactgcagccatggacgccagcggagccggtagcaaggcgaagaagggggcggctgggcgcaaggctggcggccccaggaagaagtcggtgtcgcggtccgtcaaggccgggctgcagttccccgtcggccggatcgggcgctacctcaagaaggggcggtacgcgcaggcgtgggcaccggcgccccgtctatctcgccgcgtgctgagtacctcgcc

SEQ ID NO: 59802 - DNA, 285 bp, Zea mays
  unsure (1)..(285): unsure at all n locations
acgaatcggngcagcaaggatatggcccttcaggaatcccgggaacggatggctcaatgagtatggacttgaaagcctttccaccaggatatggacctgctggagaaaaccagggcggtggtgcttcagggagcgtcataagcccccaagctcggtctgcagagaacgtagagttttcagacgacgctagaaaaaaggctatacagcgggagctgagacggcggcagaagttcaggtgatggccgtgatgcgaatttctgatcttgctcacgaattttgactacg

SEQ ID NO: 59803 - DNA, 271 bp, Zea mays
aggaggaagtgacgacgatgatgatggtggagaggatgaagaggaggatgatgacgacgatgatgatggggatggtgacaatgaggaagatgaggaggaagaagaggaagaggatgatgacgatgatgtcccccaaccacctactaagaagaggaaatgatagatggctgtgatttggttggctgagcacttacatgcaggaatgctccctgttcgcccctgcctagcagtctcctgtttagtgggtagggggttttagcttgatcgggac

SEQ ID NO: 59804 - DNA, 282 bp, Zea mays
atcttcgcacgagcgcaagaccatccacccaccagttcgaagcggaggcgaccggcaacctgcggcggcgatgtcaggcaggggcaagggcggcaaggggctcgggaagggcggcgcgaagcgtcaccggaaggtgctgcgcgacaacatccagggagacacgaagccggcgatccggatgctggcgaggaggggttgcgtgaagcgaatctccgggctgatctacgaggagacccgcggcgtgctcaagatctttctcgagaatgtcatcccgacgctgtg

SEQ ID NO: 59805 - DNA, 299 bp, Zea mays
  unsure (1)..(299): unsure at all n locations
cgtcgtccgccgattcgatccggttcttccaacccaggggcagtgatggcgacgaagacgagcgtgggcaccctcggcgaggcggatctgaaggggaagaaggtgttcgtgcgcgccgacctcaacgtcccgctcgacgatgcccagaagatcaccgacgacatccgcatccgtgcctccgtccccaccatcaagttcctcctctccataggcggcaaggtcatcctcgncagctcactgggtcgtccaaaaggtgtcacgccaaagtacagcttgaagcctctagttccacgcttgtc

SEQ ID NO: 59806 - DNA, 135 bp, Zea mays
catatcagtatagttgataaatactatgatcttgccactagcttctatgagtatggttggggtgaatccttccactttgctcacagatggaatggagaatccttacgtgaaagcatcaagcgacatgagcatttt

SEQ ID NO: 59807 - DNA, 259 bp, Zea mays
tgtgagcatatcttactttaacattgtgtttcattcaactacatatgctaactgatccatgaatacatagtacttcagagttcagagtaacctgtgatggagagtatcgaagcaaatgtaaaatgccgatcttatctaagaaaatacatgcacatataagaatatcggtgtaattaacgttgaactttgttgcaagattgctaaatatgcaacaacctgtggagtgtgtattcaaaaatggcattctcaacactggtac

SEQ ID NO: 59808 - DNA, 271 bp, Zea mays
ctcgacgcggatattcttggtggatatatgcggtggtaacctgtaaattttgtgtcgagatttgatgatgataaggacaccagtgctttatatgaagaactttgggaggatattcctagtatgtgaaagagtaaccctaacactatatttaccaggaattgtaactcttttatgtgatggcatgtcattgtcatcatgggctggtagagaaagtcagctaggctataaagagctatgtatgttctaggagaccccttcaggaactacagat

SEQ ID NO: 59809 - DNA, 300 bp, Zea mays
ccgtggaatcgggataacaagaagtgacaacagcttaattcgcgttgatcgtctagaataccacatcagggaagagcttaacaaaacagcccctcgaaccatggttgttttgcgccctctaaaggtggtaataactaacttggaagaaggaaaagtactagaccttgatgggaaaatgtggcaagttgttctgatactgatgcttcctctcactataagcttccgttctcaagaactgtctacattgagaaactgattttcgcttaaggactcaaagactactatgggctggccctggta

SEQ ID NO: 59810 - DNA, 276 bp, Zea mays
aggacttggagcgtgcggcgtcggagttcgccggcggtgaggaccagaagaggaagggaaccaaacaaagatgggctgctccatctcggggctcaacgcgctctacgacgcggccacgggcggcggcgacgtctggatcaacgagcgccgcttccgcgtccttcgccagatcggcgagggcgggttcgcttcgtctactcgtcagagagcacagctcgctcggcgcggcgttcgtctcgtgacccgcacgtctaaggatggaagatgcatgagaag

SEQ ID NO: 59811 - DNA, 297 bp, Zea mays
  unsure (1)..(297): unsure at all n locations
ttcattatgggcatcctgatatctttgatcgacttttccacctcacacgtggagttgtaagcaaagcttctaagattatcaatcttagtgaagacatatttgctggatttaattcaacactgcgtgaaggaaatgttacacatcatgagtacatgcaagttggcaagggcagagatgttggtctcaaccagatctcactatttgaagcaaaaatagcaaatggtaatggtgaacagacgctgagccgtgacgtgtaccgtcttggacatcgtattgacttgnggtttatgtgtcctg

SEQ ID NO: 59812 - DNA, 227 bp, Zea mays
cgaaccgaatcctccgcaactcgccgccgccgggtccgaccgacccggtcatatcgatcgaggatgtcgtacgcctacctcttcaagtacatcatcatcggcgacacaggcgtggggaagtcgtgcctgctgctgcagttcacggacaagcggttcttccccgttcacgacctcaccatcggcgtcgaattcggcgcccgcatgatcaccattgaaaataaggccat

SEQ ID NO: 59813 - DNA, 285 bp, Zea mays
tatctctctcttgctcgcactcgcggagatcgaagagaagcgcaggaggccccagcactagcgccgccccgccgccgcatcagacatggcgctggccgctcgcctcgtctcgcgctcccgtcagctatattcggttcaagccactttggggcctggaggtgtcactcaagttcgctcctttgccaaggatgcagctccagctgaccgtcctcctgtcagtggggatgatctcctgaagggcatattctttgaggtaaagaagagtttgagacagctcttggtgtc

SEQ ID NO: 59814 - DNA, 294 bp, Zea mays
gacattctcgcagtatcctccccttggtaggtaagctgtccgcgacatgaggcagacagttgctgttggagtcatcaagagtgtggagaagaaggacccgaccggcgccaaggttaccaaggcagctgccaaaaagaaatgatgcaacctgtcgttaatcctgtatctgcttttgcaatacctgacttgtcactccatcccgaagttttgtatgcggttgttactgttattgtgtactgttaagctctgctgcggcgtgcactgttgtttgggtagcgtcaacgtcgagcgcca

SEQ ID NO: 59815 - DNA, 293 bp, Zea mays
cagcgagaagaggtttgctggtttcaagaaggatgacaagcagctggatgctgatatccatcgcaagtacatctatggtggccatgttgctgactacatgaggaacctcgctgaagaggagccagagaagtaccagtctcacttcagtgagtacattaagaagggaattgaggctgatgacatggaagctctgtacaagaaggtccatgctgccatccgtgctgatccttctgtggtcaagtcaaccaagcagccaccaaaggagcacaagaggtacaaccccaagaaactga

SEQ ID NO: 59816 - DNA, 292 bp, Zea mays
ggagagagcagcgaccatggcctaggtgggtttgagatccgagggaacagatggattactagctagggagtgacaactaagagcaacctgtggagatgctatacaaatgtcacaggagttagcctagccagtgggttcaagtgtaggatgaggtatctggcatgatgttgtagcatgggcaaatcgagatgagtgagcaatcaggttgttgtctgttgattcttttagctgagctgctgaggccttgatcctgtatttaagatgtcaggccttgattctttcagcaagcgtt

SEQ ID NO: 59817 - DNA, 292 bp, Zea mays
ggattatgaaccacagacaggttgtcttaggtggatgaacgagttctcacagtatcacaacaaggttcttgtggagcagctcaagaagcttcgcaagcttcatcctggagcaaccatcatctatgctgattactatggagctgctatggaaattttccttaaccttgaacaatatgggatcgaatatcccctagtggcttgctgtggtggagaaggaccctacggtgtgtccccatctacaggctgtggattcgggaatataagctgtgcgataatccagaggcgtatggat

SEQ ID NO: 59818 - DNA, 284 bp, Zea mays
gaaatggtatccaggactgtgtattgtactaacattgacaagaagatcgcagaagatgaagtgaagcaattctttgagggaacatgtggtgaagtttctcgtctgaggctacttggtgattatgtgcactccacatgcatcgcttttgttgagtttgtccaagcagatagtgctattctcgctctgaactgcagtggcattgttcttggaacgcttcctgttagggtgagcccatcaaagacaccagtccgctcgcgatcgcccgtgtgacgtcatactgaatt

SEQ ID NO: 59819 - DNA, 108 bp, Zea mays
caagaagctggtaatcaaggagattcccttcggtgacgccgctctcctcgcgggcgcgcacaggtacgagtcaatgcgcagtctctggatgtcgtcctgccagatcac

SEQ ID NO: 59820 - DNA, 278 bp, Zea mays
cttcctgcatgagctgctgtacggcaagaccccgttcaaggggtcagggaaccgtgccaccctgttcaacgtggtaggccagcaactgaaatttccagagtcgccgtccacaagctactcgagcagagacctcatccgtgggctctcggtcaaggagccgcagagccgcctgggcgtgaagcggggagcgacagagataaagcagcatgccttcttcgagggtgtgaactgggctctcatccggtgcagcactcctcccgaggtcccgaggcctgttg

SEQ ID NO: 59821 - DNA, 288 bp, Zea mays
ctgcagagtgggatccttcatgctgaagagaaggattacaagactgcttacagctacttcttcgaagcatttgaagctttcagttcactggaagatcccaaggctatcttcagcttgaagtacatgcttctgtgcaagataatggtcaaccaagctgatgatgttgcaggaatcatctcatcgaaggctggcctcaagtatctgggtcctgatgttgatgctatgaaagctgtggccgatgcctactccaaaaggtctctgaagtacttcgaaactgctctccgtgat

SEQ ID NO: 59822 - DNA, 285 bp, Zea mays
aaaagttgaaatgagacctaatctgattctcaatgctgagaaagagcttgggattgttgctggacttcaggaccgagtggcacaggtttatggtggactagtttatatggattttagccagggtcatatggtcaagctgggtcatggcatttacatgccattggatgtcaatctgcttcctcctctatacctcatctatgccgataaccccagtgactctggcaaggtccacagcactgttagacaaagatggctgtcaggtgatgattttataacatcacgtat

SEQ ID NO: 59823 - DNA, 289 bp, Zea mays; identical to SEQ ID NO: 9598

SEQ ID NO: 59824 - DNA, 278 bp, Zea mays
ctgaaaaggtactgttggatcaaaattttattgaagacatgcgtaccatgccaatctacattcaaggaaaaactaaaaacctcatggaacgcgctatttggaacgacacatctttcctaagtaacatgaatgtcatggattactccttgcttgttggagttgacaaagagaagaaagagcttgtatttggaattatagattatttgagacaatatacctgggacaaacagctggaatcttgggtgaagacatctcttgttgttccaaagaatctatcc

SEQ ID NO: 59825 - DNA, 274 bp, Zea mays
gatttcggcctggcgcgatggcaacctgatggagacatgggcgttgaaacaagagttatcggcacattcggctatctggctcctgaatatgcacagagtgggcaaataacagagaaggctgatgtatactctttcggggttgtgttagtggaacttgtcactgggcggaaggctgttgacattaaccgaccaaagggtcagcagttactaactgaatgggcacgcccattcttggaggagtatgcaattgacgagctcatagacccacgactcg

SEQ ID NO: 59826 - DNA, 278 bp, Zea mays
accggttcgtcaagtggcccaaggtcgtgcgtatccagcggcagcgccgcagtcctcaagcagcgcctcaaggtaccaccggcgctcaaccagttcacccgcaccctcgacaagaacctcgctacgaacctgtttaagatgcttctcaagtaccggcctgaagacaaggctgccaagaaggagaggcttctgaagagggcccaagctgagaatgaaggaaaaactgttgagtcgaagaaaccaattgttgtgaagtatggccttaaccatgtgactta

SEQ ID NO: 59827 - DNA, 266 bp, Zea mays
atcgagaacggatggaaccggtgttactttaatatcagcgaaatgggtttttctgcgtacctttgttatatggctatgtatctcatttttgtggagtttggaatttactggatgcacagagagttgcatgacctaaagccactataccaacatctgcatgcgacccaccatatttacaacaaggagaacaccttgtctccgtttgctggactcgcgtttcacccactggatggtattctgcaagcgataccgcatgtgcttgcgct

SEQ ID NO: 59828 - DNA, 262 bp, Zea mays
cctcccaccgcctcgaggatatcgacgcgtgctccgccgagtgcgaggtccacatcgcgcaggagtggctcgacaagctgccgccaccgtcctacgaggagcggtacgtgctcacgcgcgcgtccaggaaccgcgagctcaacaagcacgcgcgcctgggctgccaggtcgtcctcacgccggagctgcatggcatggtcgtcgctgtccccgagcctaagccgtgggacatcccgtaatggcctgccgcgacgaatggcaa

SEQ ID NO: 59829 - DNA, 273 bp, Zea mays
ctcgagccgattccgcattcgttccaactcctgagcactttctcctcgtccccgacaagacaatcgaagccgagatacggccatggactccaccggcaccggagcagggggtaaggggaagaagggagcggccgggcgcaaggtcggcgggccaaggaagaagtcggtgtcgaggtccgtgaaggccgggctccagttccccgtcggccgcatcgggcgctacttgaagaagggccgctacgcgcagctgtacggcaccggcgcccccgtcta

SEQ ID NO: 59830 - DNA, 257 bp, Zea mays
gactagttctagatcaccagcctacgagcctggaggaggtccgcactctgtggatcggcgacctccagtattggaccgacgagaactacctctacagctgcttcgctcacaccggggaggtacaatctgttaaaataatacgcaacaaagtaacaagccttcctgagggttatgggtttatagagtttgtttcacatgaagctgctgagaaaattctccagacttacaatggcacacagatgcctgatactgaacac

SEQ ID NO: 59831 - DNA, 267 bp, Zea mays
ccatctcccaacccctacactcccggcggcggcgcaggagcagcagcacccgaggatggtgaagttcctcaagcccggcaaggccgtgatcctcctgcagggccggttcgccggcaggaaggcggtgatcgtgcgcgtgttcgaggagggcacccgcgaccgcccctacggccactgcctcgtcgccggcctcgccaagtaccccaagaaggtggtccgcagggactcggccaagaagacggcgaagaagtcgcgcgtcaagtgctt

SEQ ID NO: 59832 - DNA, 266 bp, Zea mays
gactagttctagatcggaaaaatcctcctcctccgggtcttcctcaaccaaatccaaggtcccaccggcgaacctctcggcttaatcatgtctaggccgcggaagggccggaaagggtcctgggcaagggcggggccaaccgcaaccgcaagtgctgcgcgacaacaatccagggcatccaccaagccggcgattcgcagtttggcgaggaggggcgcgtcaacgcatctccgggctcatctacgaggagaccgcggcgtgctcag

SEQ ID NO: 59833 - DNA, 268 bp, Zea mays
gggagaagatgacccacatcatgtttgagaccttcaatgttcctgccatgtatgtcgccatccaggctgtgctttccctgtacgccagtgggcgtacaactggtattgtgttggactctggtgatggtgtcagccacaccgtgccaatctacgaaggttatgcccttcctcatgccatcctgcgtcttgaccttgctgggcgtgacctgactgacagcctgatgaagatcctcaccgagagaggttactccttcaccaccacggccga

SEQ ID NO: 59834 - DNA, 270 bp, Zea mays
gaaagattggagaaagggtgcacagtggtttacagtgaaacggcagcatgcagttcttattcttgctgacaccctttactatgggaagttcaagcgttactgtaagccaggaaatgagtggcatcactgctattcagatgagcactacttgccaactctcttcaatatggctgacccgactggaattgcaaactggtcagtgacgcacgtagattggtccgaaggaaatggcatcccaaagtctacagggctgtggatacgagcttcgag

SEQ ID NO: 59835 - DNA, 254 bp, Zea mays
caaacaacgctagaggcatagcgaaattcaatgttccattggcacacatgatgtttgccggggctgacttcattatcgtcccaagcaggtttgagccatgtggtctcattcagctgcaagggatgagatatggagtgattcctatctgttcatccactggaggacttgtcgacacggttgaggagggcgtcaccggattccacatgggttctttcaatgtcgagtgtgaaactgtagacccagtcgacgtgaca

SEQ ID NO: 59836 - DNA, 245 bp, Zea mays
gaaaaaatgtttttcatatttctcccttttcccagatgattataaatttgataagtctgagattattcgtttatgggattcaataggaatcattggttctattatacagcaaaagaaaatagaggacataggatcggattattttgatgaactattagatagtggttttcttataaaagggagcaatgatttttatgtaatgcatgatttaatcaaaaaaaaagttataaaaaaaaagggggggc

SEQ ID NO: 59837 - DNA, 266 bp, Zea mays
  unsure (1)..(266): unsure at all n locations
acatgaagggtttgcattcatctacatggaagacgaacgtgacgctgaagatgctatcagtagacttgatggaattgattttggcagaaaaggaaggagaatcaaagttgagtggaccaaggaggatcgcactgctgatcgaagaggcaactcaaggaggtctccaaccaatgcaaaaccgaccanaaccttgttcgtgatcaactttgacccgatcaacacgagaattcgagatctggagaggcactttgataaatatggcaggg

SEQ ID NO: 59838 - DNA, 264 bp, Zea mays
ccttcacgccagtctcggtctcttccgaaggcgtcgcgcgcggttgtttgagaggagaggaggaagatgagggagtgcatctccgtccacatcgggcaggccggcatccaagtcggcaacgcgtgctgggaactttactgcctcgagcacggcatccagcctgatggccaagtgcctggagataagaccgcgggacatcacgatgatgccttcagcaccttcttcagccagactggtgctgggaagcacgttccccgtgcaatc

SEQ ID NO: 59839 - DNA, 265 bp, Zea mays
agcgcaagagtcaatatcttgatgacattgctactctcactggaggcactgtcatcagagaagaagttggattatccttagacaaggcagacaatgcggtcctaggaactgctgctaagcttgtagttactaaggattcaacaacaatagtgggagatggcactacacaggaggaagtgaacaaaagggtgacacaaatcaagaaccagattgaggctactgaacaagaatatgagagagagaaactaaacgagaggatagctaa

SEQ ID NO: 59840 - DNA, 295 bp, Zea mays
ttcgatgtaggtacgaaactcggaatccggtcgaactcagccgtcaatataattcttggtggttatgataaggatgttggtgcttccctctactacatcgactacattgcaaacttgcacaagattgacaaaggtgcttttgggtacggatcatacttctgtttgtctctgatggacaagttgtaccacccggacatgactgttgaggaagcagtagatcttgttgacaagtgcatcaaggagattcggctgcgattggttgtcgcgcctcagaactttgttatcaagattgtcg

SEQ ID NO: 59841 - DNA, 261 bp, Zea mays
gacaacggtctctaacgtccgagaccccaagcaccagcgcggcggcgggggcggcggcgaccatggctgtcggaaagaacaagaggatctccaagggaaagaagggtggcaagaaaaagaccgtcgaccctttctctaagaaggattggtatgacatcaaggcaccgtcggtgttcagtgtgcgcaacatcgggaagactctcgtatccaggacacagggtaccaggattgcttctgagggtctgaagcacagagtctttg

SEQ ID NO: 59842 - DNA, 258 bp, Zea mays
tcatatctatagaggtcaacctcgaaggcatcttctgacaactggatggagttcatttatcaataagaagaaactagtctcaggggatgcagtcttgtttcttagaggtaatgatggtgagctaagattgggtgtgaggagagcagttcaactgaaaaatgaagctctacttgaagctgtcaactgtactgattcgaagctacttatgctgtctgctgtcgccaattctttggacaacagaagtatatttcacatctg

SEQ ID NO: 59843 - DNA, 263 bp, Zea mays
tcagctcgccgccacgagagccggctcggtcggttcgtcgaagatcccggatctgctctgtcacgaggtctttcggcgggtgttgtctcgcgaggtgtagcgagccaagttcaggagagtttcgagaagctgaaatggctcctaaagctgctcctgccaagaagggtgatgccaagacccaggccttgaaggttgccaaggctgtgaagtctgggtcagtaaagaagaccaagaagatccgcacgtccgtgacatttcaccgc

SEQ ID NO: 59844 - DNA, 256 bp, Zea mays
actgcagcctccctacctgaatatgctataacatcattgtatgattcaagccccttatctgagcataagagtagagggaactatgctgcattccgtgtatggtcaccttattgtagctattgttgcgacgggccttgtgattttgagtcttgttttaacttttgcagtcttatcggctgtggattcaaaatgaacgaactgaatattcaaaacatgtttgccaaaaaaaaaaaaaaaaaaagggcggccgccgact

SEQ ID NO: 59845 - DNA, 258 bp, Zea mays
gatactcttctcaatggcagacctgcagcgatcaataccttcaatggttgacggcctaaatcaggccagaggaaaattctgttttgctcattcaagaggaattttgttaaggaagctaaggtggctcagttctctggttatgtgtcagaacactcagcataccatcatggtgagcagagtttagcaggtacaattattggaatggctcagaactttgttggcagcaataacatcaaccttatgtaccctagtggtcag

SEQ ID NO: 59846 - DNA, 261 bp, Zea mays
ccctagcagcagatcctcgtgcaacgcaaagcgctagccttcctactgtcccgatggcccgcacgaagcagacggcgaggaagtccagcggcggcacgcgcgccaaggaagcagctggccaccaaggcggcgcgcaagtctgccccggcgaccggcggagtgaagaagccccaccgtttccgccccggcaccgtcgcgctccgggagatccgcaagtaccagaagagcacggagctgctgatccgcaagctgccgttccag

SEQ ID NO: 59847 - DNA, 105 bp, Zea mays
ccgtggtgatgtggtccccaagatgtgaatgctgctgtgggcaccatcaagaccaagcggcacaatccagttgtggactgggtgccaactggccttaagtgcggc

SEQ ID NO: 59848 - DNA, 260 bp, Zea mays
catatcagtatagttgataaatactatgatcttgccactagcttctatgagtatgcgtggggtgaatccttccactttgctcacagatggaatggagaatccttacgtgaaagcagccagcgacatgagcattttcttgccctgcaacttgggttgaaaccaggaatgaagggtttagatgtgggctgtggaataggtggaccactgagagagattgcaagatttagctcaacttcagttaccggattgaataacaacga

SEQ ID NO: 59849 - DNA, 289 bp, Zea mays
agaacccttgctgattacaacatgtcaaaggcaatccacccttcacttggtgcttcgtttgataggtggtatgcagattttcggtaaaactttgaccggaaagaccataaccttggaggtggagagttcagataccatagacaatgtgaaagcgaagattcaggacaaggaaggtatcccaccagaccaacagaggcttatctttgccgggaaacatcttgaagatggaagaacccttgctgactataacatccagaaggaatctaccctgcactggtgttgcggcttc

SEQ ID NO: 59850 - DNA, 277 bp, Zea mays
aggacaccgtggggcagtacattccaacttcgggttcactcttcctggggctctaccgtgtcgtccatggcatcgatggtttcgatcccaagttcaacattgtctcccctggagaagacatgagtgtttactacccgtatagggaaacggacaagagattcactgccttccatcctgaaatcgaggtgctcatctacagcgacgtcgagaactccgagcacaagttcgtgctgaaggacaagaagaagccgatcatcttctcgtggcgcgtctcgac

SEQ ID NO: 59851 - DNA, 279 bp, Zea mays
gctctacaagggaattgttcctctctggggtcgtcagattccttataccatgatgaagtttgcttcctttgagaccatcgttgagcttatctacaagcatgctgtgcctgttccgaagtctgagtgcagcaagactacccagttgggtattagctttgctggtggttacattgccggtgtcttctgtgctattgtttctcacccggctgacaaccttgtgtctttcctgaacaatgccaagggagctacagtgggagatgctgtaagaagcttggtctc

SEQ ID NO: 59852 - DNA, 285 bp, Zea mays
gcacaaaagaagtctgaaagagagatgagttgaaggagaaatttgaaaagaatattcaagaggtagctgagaagttccaaaacactaacttgtatctgaagaacttagatgataacattgatgatgaaaagttgcgtgaaatctttgctgagtatggcaatattacttcttgcaaggttatgcgggattcttatggtgttagcagagggtctggatttgttgcattcaaatctgctgaagatgctaaccgagctcttaccgagatgaatggcaaatggttggaag

SEQ ID NO: 59853 - DNA, 271 bp, Zea mays
ctcgagcggaaaaatatcccaaaccctagctcccgatctcgatggcgaaccctcgcgtcttcttcgacatgaccgtcggcggcgccccggcgggccggatcgtgatggagctgtacgccaacgaggtgcccaagaccgcggagaacttccgcgcgctgtgcacgggcgagaagggcgtgggcaagtccgggaagccgctccactacaagggctccaccttccaccgcgtcatccccgagttcatgtgccagggcggcgattcacccgcggc

SEQ ID NO: 59854 - DNA, 258 bp, Zea mays
attttgcaagctgttttatctgcaatcagcaaaggcatttgagcaagaactgccctgaaaacaaacatggcatctatccaaagggtggttgttgtaaggtatgtggcgaagttacccacttggccagacattgtccgaataaagggagacaagatttgatatcctccagagatgatgatgtcaacatggaagagcacagtcaggaatgtcctgcggttcaccatggtggagatgacctagaagatgatttcgttaatg

SEQ ID NO: 59855 - DNA, 263 bp, Zea mays
agtcagcaacagatattcccagaggtggtcgtggctagcgctatgctactggacgtggaatgcctgatcctggcatgcataatgttggtgctgtgatgccatctccatatgagatgggatggatggcaatgagagatgctggtgtctcacaacctgttccaattggggcagtagccagtgcgcttgctaacgcctcaccagatcagcaaagactgatgcttcgtgagaacctgtatctcttgttgaacagtggagcgtacagg

SEQ ID NO: 59856 - DNA, 284 bp, Zea mays
attcttgaaataggggttattctgggaccagaagtgactctgagaactttgaaattcctagtgtagttataaaagaactcagtgaggctgtgtctgcagctgtgaggttactctcaaagttattgaactttgatcttttcatccgcagcataaacggtgaaaaaatcacttctttgctaagaagaacgctcaaatcaaatttcccccttcagtcaaaggattgtcttgcggcatgcctcattaagctagaatccagagctggcttataggagatcatggtgtta

SEQ ID NO: 59857 - DNA, 259 bp, Zea mays
attgatgcagatgaacctcttgtttcggtgctccatctatacgatgtcgtcaacgcacctggtgtcacagccgacatcagccacatgaacactggtgctgtggtacgtggcttcttgggccagccacagttggaaaatgccctggctggaatggatcttgtaataattcctgctggtgtccctcggaaacctgggatgacaagggatgatttgttcaacataaatgctggaatagtccgtaccctgtgtgaaggatgca

SEQ ID NO: 59858 - DNA, 123 bp, Zea mays
cttagcggtcaatgatgagactgttaagtttgaaatctgggatactgccgggcaggagaagtatcatagcttggctcccatgtactataggggtgcagctgctgccattgttgtctatgacat

SEQ ID NO: 59859 - DNA, 272 bp, Zea mays
atcaacgccgccggtgcgtcatcgagaccatctacatcgtcatgtacttcgtctacgcgcccaagaaagccaagctgttcacggccaagatcatggccctcctcaatggcggcgtctttggggtcatcctcctgctcacccttctcctcttcaagggtagtaagcgcgttgtgctgcttggctggatctgcgtcggcttctccgtcagtgtcttcgtcgcgccactaagcatcatgaggcgcgtgatccagacgaaagcgtagagtacatgc

SEQ ID NO: 59860 - DNA, 268 bp, Zea mays
agattctacatatcctggagtatgttcatcctggttcaatccataagtatgttcatcaacactgtggatcgctgacagaagcagtcatccgtaacttcacacgtcatattctcaagggtcttgcttttttacatagccaaaagattatgcatagggatatcaaaggggcaaatttgttagttgatattaacggtgtagtgaaattggctgacttcggaatggcaaagcatttgagtactgcagctcctaatcttcattgaagggaaca

SEQ ID NO: 59861 - DNA, 266 bp, Zea mays
caagcaaccaccgctccccgatctcgtcgagaggaagcccaatcccgaaaccgccgccctattccaatggcgcccaaggccgagaagaagcccgccgccaagaagcctgcggaggaggagccggcggcggagaaggccacggcggggaagaagcccaaggccgagaagcggctccccgcgggcaagtccgcaggcaaggagggtggcgagaagaaggggaagaagaaggcaaagaagtcggtggagacgtacaagtctacatcttc

SEQ ID NO: 59862 - DNA, 282 bp, Zea mays
cgtttaccgccgccgacttctgattctaccaccacccgcctcctctcgagttcgatctgtttgctcccccagacatgtcgggccgcggcaagggaggcaagggcctgggtaagggcggcgcgaaacgccaccgcaaggtgctccgcgacaacatccagggcatcacgaagccggccatccggaggctggctcgcaggggcggcgtgaagcgcatctccgggctcatctacgaggagacccgcggcgtgctcaagatctttctcggaacgtcatccgcgacgc

SEQ ID NO: 59863 - DNA, 295 bp, Zea mays
ctgcacagacgaagtcggatcggtcgggttctgactcgtacaagatgttagcgaccggaaggacctgagaagagccaatttctcaagcacggtgatgctggtatggtgaagatggttcccactaagcccatggtggtggagaccttttctcagtatcctcctcatggtcgatttgctgtccgtgacatgaggcaaacggtggctgtcggagtcatcaagagtgtggagaagaaggacccaactggagccaaggtgacgaaggctgctgccaagaagaaatgtctatctggctggt

SEQ ID NO: 59864 - DNA, 260 bp, Zea mays
gatgactgatgggagatctctctgctgatatcaaggtaggatccagatgtgaggttgaacctggggcaaaaaggggtgttgtaaaatttgttggccgggcagaatcactgggtcctggtttctgggttggtgtccaatatgacgaacccacgggcaaacatgatggcatggtcaaaggagtacgctacttcgaatgccctccatctcatggtggaatggttagaccagagaaagtgaaggtcggtgactccctgaacgag

SEQ ID NO: 59865 - DNA, 269 bp, Zea mays
agttgttttcagtgtgatgactccaaagaaaacaacaccttctgaaaatgggtccaaggaatcaacaagttccagttcagcaggtgttgttttcagtagtgaggcctccaaagtaaagctggaaaaatattgccaatttatctggtggtgagaagacacttagttcactggctttggtgtttgctcctcaccactataaacctactcctttatatcgtatggatgagattgatgctgcgttggactttaaggactatcaattgtgggac

SEQ ID NO: 59866 - DNA, 266 bp, Zea mays
attgtggcgacttgaagcccaagtatgttctcatggaaaatgtggtggacatactcaaatttgcggatggttacctaggaaaatatgctttgagctgccttgttgctatgaagtaccaagcgcggcttggaatgatggtggctggttgctatggtctgccacagttcaggatgcgtgtgttcctctggggtgctctttcttccatggtgctccctaagtatcctctgcccacctatgatgttgtagtacgtgaggagccctaatgc

SEQ ID NO: 59867 - DNA, 266 bp, Zea mays
agaagataggcacggtgaactgctgtagattttgtgtaagacaataatggctgccaaatgttttataaggtacggaagttgtagattgcgaccatgtatgagaattttccccaccgctactcatctctttgccaccactattttagtcatcagtgctggatgggcaccctgtttattacgacgtaccctttattgctatagcattgtaataagcgatgggcatgcttgtagttgaataagtacaatgtccagtattcaaacatcag

SEQ ID NO: 59868 - DNA, 148 bp, Zea mays
aagcaatcccaaaccccggtttcagaaccttctcgaagctccccggcggctcctccactcggaccgatggggaaggaaccaatgcgcgtgctcgtcactggcggcgccagacaaattggatatggcctggttcccatgaatgctaagg

SEQ ID NO: 59869 - DNA, 113 bp, Zea mays
ctctccgttccaagatgtcgaagcgagggcgtggaagttcggctggtaacaagttccggatgtcactgggtctaccagtggcagctactgtgaactgtgccgataacactgga

SEQ ID NO: 59870 - DNA, 264 bp, Zea mays
  unsure (1)..(264): unsure at all n locations
gtagaactccgacacaaaacgatgcacaggcaggtgaaggccggtgatgaaaaatgcctcaaaaacaaccaattcgccctcgggctcgggggactcctctgcccccgggacccaaccaaccccgccgccaaaataccctaaccgttgcatatcctgcacgcagaccaacaacatccgcgaaacaccgaattccactgtatcacccggtcgcaattccggcgncgccacagtgcccgagagatcttcagaagacgctcggccatc

SEQ ID NO: 59871 - DNA, 224 bp, Zea mays
cgaggatcacacttctagagcgaaggaaaaatatccccaaatcctagcttccgatctcgatggcgaaccctcgcgtcttcttcgacatgaccgtcggcggcgccccggcgggccggatcgtgatggagctgtacgccaacgaggtgcccaagaccgcggagaacttccgcgcgctgtgcacgggcgagaagggcgtgggcaagtccgggaagccgctccactac

SEQ ID NO: 59872 - DNA, 302 bp, Zea mays
cgcagactggtagtagccggcgcgccgtcaccgtatcctcagatcagaggcgagcagaaaccacaccactctactgacgcccgacgagcagtgtaacattttccttcagccatgggtaaggagaagactcacatcaacattgtggtcattggccatgtcgactctggcaagtcgaccaccactggccacctgatctacaagcttggaggtattgacaagcgagtgattgagaggttcgagaaagaggctgccgagatgaacaagcggtcattcaagtatgcgtgggtgcttgacaagctcaa

SEQ ID NO: 59873 - DNA, 302 bp, Zea mays
gaaggcaccacacaggtgtatcaatatgcttcaagattgcagaagtgttgatgagtttgagaggctcaacaaaattaacgagggcacatatggtgttgtatacagagcaagggataagaagacaagtgagattgttgcattgaagaaggtaaagatggagaaggagcgagaaggtttcccattaacctctcttagggaaataaatatcctcttgtctttccacaatccttcaattgtggatgttaaggaagtagtagttggaagtagtctagatagtatttttatggttatggagtacatgg

SEQ ID NO: 59874 - DNA, 299 bp, Zea mays
ggagctgactgactggtggaagaaggccctggagagcgagaacgtggactcggtgaagatcagcaaccggctgcatgacaccccctgcgtcgtggtcacctccaagtacgggtggagcgccaacatggagaagatcatgcaggcgcagaccctgtcggactcgagcaagcaggcgtacatgcgcggcaagagggtgctcgagatcaaccccaggcaccccatcatcaaggagctccgcgacaaggtcgcccaggacaacgagagcgaggagctgaagcacacggcgaggctggtgtacc

SEQ ID NO: 59875 - DNA, 311 bp, Zea mays
ttaaaaagccggcggcgagaaggtgggttggggaatctgaagcgatcagagaaggcaagcttgcttgcttgcttctccaccgaatcccccatctcgcgccctccgtctctcgccgcggagactcgcccccccgctgatggaccagctcgtcaatttcatcatccgcccgcccagagctgactacagtccaaatgatgatctattagagcaggagtttatgctgaagggaagatggttcctgaggaaggatttggaggtaaaaaatggtcagggcaagaagttacaatgtagtcactacatgcctgttgtga

SEQ ID NO: 59876 - DNA, 317 bp, Zea mays
cgctccgccgccgccgaaacagcacatcgctctctcgatctcagccatggcggaggtggagcagccccaggacgcggtgaagctcttcaaccgctggaccttcgacgatgtccaggtgaacgatatctcgctgaacgactacctggctgtgactgcggcgaagcacgcgacattcctgccgcactccgcggggcgctactccaagaagcggttccgcaaggcgcagtgcgccatcgtcgagcgcctcaccaactcgctcatgatgcacgggcgcaacaacggcaagaaggtcatggccgtccgcatcatgaagcaca

SEQ ID NO: 59877 - DNA, 313 bp, Zea mays
gaaacagaagtctgtgccccacctacataactcttttgattattacagcctgcagcaaggtcaactgttcctggaggtcctagtgtggcctgcagcactgccaaagctgttgaatgggacgcatcctggtccaagaaccttgatccttctggccgtgctgctttgggtgttcacgatgctgcgtatgaagacactgcagggaaaactcctgcctctgctgatcctgtctcagacaagggccttcgtccagcgattggcgtaacctagggacatcgttgcttcagcacagtgtctaacttatgctatcaccagc

SEQ ID NO: 59878 - DNA, 300 bp, Zea mays
ggccaccgtaaagaagggaaagcccgacctcaggaagaaagtgatgcccgccgtcatcgtccgccagcgcaagccgtggcgtcgcaaggacggtgtctacatgtacttcgaagataatgctggagtgattgtgaatcccaagggtgagatgaaaggttctgcaatcactggacctatcggcaaggagtgtgctgacctttggcctaggatcgccagtgcagcaaatgccatcgtttgagagcttgttggaatgtgtttagacttgagtatgatcatctcaattgtgtgttgcaggtgttg

SEQ ID NO: 59879 - DNA, 297 bp, Zea mays
gtttaatacacatgcttctcaagctgaggtattctctgatatccaacctctgatcagatcagttcttgatgggtttaatgtgtgcatttttgcctatggtcaaactggatccggaaagacttacacaatgagtgggccaggcacatcaaaagaagattggggtgttaactatcgagctttaaatgacttgttcgacatctctctaagtagaaggaatgctttctcatatgaggtgggagtgcagatggttgagatttataacgagcaagtgcgggatcttctctcaaatgatattgc

SEQ ID NO: 59880 - DNA, 295 bp, Zea mays
ggacttccatgcaagagtttcagactttggtctagccaaacttggatctgatagagctggtggccatgtctcaactcgagttttgggcacacaaggctatgttgcaccagaatacgcattgactgggcatttgactaccaaatcagatgtgtacagctacggtgttgtgcttttggaattacttactggcagagtaccagttgatatgaagaggcctcctggagaaggtgttttagtaaactgggcattgcctatgctcactgaccgagaaaaattgtgcggatcttggatccag

SEQ ID NO: 59881 - DNA, 266 bp, Zea mays
attttgcaagctgttttatctgcaatcagcaagggcatttgagcaagaactgccctgaaaacaaacatggcatctatccaaagggtggttgttgtaaggtatgtggcgaagttacccacttggccagacattgtccgaataaagggagacaagatttgatatcctccagagatgatgatgtcaacatggaagagcacagtcaggaatgtcctgcggttcaccatggtagagatgacctagaagatgatttcgttaatgcagaagaa

SEQ ID NO: 59882 - DNA, 301 bp, Zea mays
tggccaacccaacccaacccaacccaccactgcctccctccccgttccccagtcaccaccccgaccggctggtcctcctcctttccccgcgccatcctcgaggcatcgccggcgccgcaacttcgttcaggaggaagcccgcacccggccccgatccgatggccaacagcaacctcccgcggcgtatcatcaaggagacgcagcgactgctcagcgagccagcgccggggatcagcgcgtcgccctcggaggagaacatgcgctacttcaacgttatgatccttgggccggcgcagtcgcc

SEQ ID NO: 59883 - DNA, 307 bp, Zea mays
tccaaggtttttcacctcttggagcgcaccaacaccacccggagaccggagcgactcgccaccggcgcggaaaaggagggcggaggctcgatggcggatgagaatcaggctggaaagaaagaggaggaggaatttagcacaggccctctgtcagtcctaatgatgagtgttaagaacaacacccaggtcctcatcaattgccgcaacaacaagaagctacttggccgtgttcgtgcttttgatcgccactgtaacatggtgctcgagaacgtgcgtgagatgtggacagagatccccaagactggca

SEQ ID NO: 59884 - DNA, 299 bp, Zea mays
acacatattccctgcctctcgctagcgccttccctccgcaaacggaaggctctcgtgaccaccgggatgtccgccatggagaccgacatcaacgcgccgccgccgcccgccccagctggcgagggatcctctgcggccggtccgtcctcctcccgcaagcccaacaagcgcttcgagatcaagaagtggaacgccgtcgcgctctgggcatgggatatcgtcgtcgacaactgcgctatctgccgcaaccacatcatggatctatgcatcgagtgccaggcgaaccaagccagcgcgac

SEQ ID NO: 59885 - DNA, 298 bp, Zea mays
ggtgaaacaatgaaaaacaacattgatgttttggtttgcaaagctgaatactaccaccagagtggagagtaccaaaagtgttttaaactcacatcctcgttacttgagagagaccctttccatctaaagtgcacattagttcatttggcaactgcaatggagcttggtcattccaatgatctttatcttttagcatgcaacttagtgaaggattatcctgaaaaagctctttcatggtttgctgtcggttgctattactattgtattaagaagtatgatcaagcgcgaagatacttcg

SEQ ID NO: 59886 - DNA, 297 bp, Zea mays
ggagatatatcgtgtgttgaagcctggccagtgctttgccgtgtacgagtggtgcattacggatcactatgatcctaacaatgcaacccacaaaaggatcaaggatgaaattgagcttggcaatggcctgccagatatcagaagcactcggcaatgtctccaggcagtaaaagacgccgggtttgaggttgtttgggataaggatcttgctgaagattctcccttgccttggtacttgcccttggatccaagccgattctccctgagtagcttccgtttgacctctgtgggacgcat

SEQ ID NO: 59887 - DNA, 281 bp, Zea mays
ggctcgaggacaaataataaaatgtgaagacccaaatgcgaacctctactcctttgtcggttcaatggaatggagaggccagcagtatcccctgtcacccctacagcttcttctccgggactcaaaactacggaacacagactacatatatggggctgtcatcttcacaggtcatgatacaaaagtgatgcaaaatgcaacagatccaccatctaaaagaagtaagattgagaagaaaatggatcaaattatttacgttctgatgtcttctctactcatga

SEQ ID NO: 59888 - DNA, 297 bp, Zea mays
gatcccagcatccgagagagctccacaggccaggtccccatcgccgcggcgcttgccccacctctcccccgcccggtagtagcctcgccgccgttgccgagatggggttcgtgtccttcgtcgggagggtgctcttcgtcgccgctttcctcctctccgcctaccaggagtttaatgaattcggtgctgatggtggaccagcagctaaggcccttcggcccaaattcaacgtgtttgtcaaaaatgtatctgctcatctgggagtagctgtgccacacattgagttgaagcatgtga

SEQ ID NO: 59889 - DNA, 163 bp, Zea mays
  unsure (1)..(163): unsure at all n locations
gatgaatgaagactatctctgtgccaaactacacttagtagctcttgctggatcagaacgcactnagagaactggttcagatggcctgcgcttcaaggaaggtgttcacatcaaccgaggacttctcgctctcggcaatgtcataagtgctcttggagatgag

SEQ ID NO: 59890 - DNA, 304 bp, Zea mays
ctcaatccatcccgcctccagacccgaactccaagtcgccccgcatcgatggcgcccacggccgagaagaagcccgcggcgaagaagccggcggaggacgagcccgctgccgagaaggcgccggccgggaagaaccccaaggcggagaagcgtgtcccagcaggcaagtccgccggcaaggagggcggcgagggaaagatgggccggaataatggcaacaggagcgtcgacacctacaagatctacatcttcaaggtgctgaagcaggtgcaccctgacatcggcatctcctctaaggccatgt

SEQ ID NO: 59891 - DNA, 278 bp, Zea mays
  unsure (1)..(278): unsure at all n locations
cggtgtcaattgccacggactaatgccttctactcagttcaacctccaaagcatgaccggtctgacaaaccactgtgtccaggagcccatgtatgccactggtgtggtacctggaacggtgataaaatatgtagtagctgtaagaaagcaagatactgttctgagaaacatcaggcactgcattggcgtactggtcataaaaatgattngctccagataataagttcttccgctgcttcaaattcagttttgccaactgttggaaaagtcctgctaac

SEQ ID NO: 59892 - DNA, 295 bp, Zea mays
atggaagcatagatggctttaatgagctgaaaagagggccaagaagtggtatgtacaaaaaccagctggggcttgaagctactacccaagcaccagcaaaagagcaggatcttttgtttgctaatggtccacatcctgccatgaaggatcagtataatcaggctgactttgcggaaacatactcagacgctaaattcttcattattaaatcttacagtgaagatgatgttcacaagagcgttaagtacaatgtgtgggctagcactcacaatggtaataagaaacttgatgctgc

SEQ ID NO: 59893 - DNA, 292 bp, Zea mays
agggcaggtctttgccttcggtcgtgtcttctcagggaaggttgctactggtatgaaggttcggatcatgggtcccaactatgtccccgggcagaagaaggatctgtatgtcaagagtgtccagcgtactgttatctggatgggaaagaaacaagagtcggttgaggatgttccgtgtggtaacactgttgctatggttggtctggatcagttcatcacgaagaatgctacactcactaatgagaaggaggctgacgcttgcccaatcagagcaatgaagttctccgtctct

SEQ ID NO: 59894 - DNA, 295 bp, Zea mays
agcgaggccagcgacaaatgccagaaggagaaacgaaagacaatcaacggggacgatttgctctgggcgatggccactttaggattcgaggagtacgtcgagcctctcaagatttacctacaaaagtacaaagagatggagggtgatagcaagctgtctacaaaggctggcgagggctctgtaaagaaggatgcaattagtccccatggtggcaccagtagctcaagtaatcagttggttcagcatggagtctacaaccaagggatgggctatatgcagccacagtaccacaatg

SEQ ID NO: 59895 - DNA, 294 bp, Zea mays
cttgtatgatcaggcagaaaagcttagatcaaaggcacctcgttttgaagcacattccaaccaacaattctgccgatacttgttctacttgggcaaaattaggacaattcagttggagtacactgatgctaaagaaagcctcctgcaagctgctcgtaaggcaccaacaactgcccgtggttttcggatccagtgcaacaaatgggctatcatagtgaggctgctgcttggtgagattccagagaggactgttttcatgcagaaaggaatgaagaaagctctgacaccttattt

SEQ ID NO: 59896 - DNA, 300 bp, Zea mays
agaggcttctggcttgagcgacttatctcgagttaccagtgtcgcatccttctttgtcagccgagtcgacacccttatcgacaaaatgcttgagaagattggaacacctgaggcacttgccttgagagggaaggctgccgtcgcacaggccaaactagcaaatcggctctaccagaagaaattctctggcccgaggtgggaggcgttggccaagaaaggtgccaagaaacagaggttgttgtgggcatccaccggtgtcaagaacccagcttatcccgacactctttacatcgacagtct

SEQ ID NO: 59897 - DNA, 291 bp, Zea mays
gcttaatgagtggaaccaggaattggatgagatgactgagctagagaagcggacagcaaaggggaagtccatggttgcaacattcaagcagtgtgcacggtatctcagcccgcagtttgagttctgcagaaagaaggtacttcctgatgatatccgtcgagcgttgcttgttattgtcgagtgttgcatgaagcgagattatttagcagcaatggaccaatatatcaagttggcaatcgggaatgcaccatggcccaaaggagtgactatggttggcatccacgagcgttc

SEQ ID NO: 59898 - DNA, 241 bp, Zea mays
aggagttcaaggagaagaaccctaagaacaagtctgtcgctgcggtggggaaagctgctggcgacaggtggaaatccctgagcgagtcggacaaggctccctatgtagccaaggctaacaagctcaagctcgagtacaacaaggccatcgctgcctacaacaagggcgagagcactgcagctaagaaggctcctgccaaggaggaagaggaggaagatgaagaggagtctgacaagtccaa

SEQ ID NO: 59899 - DNA, 296 bp, Zea mays
gctggttcatcgatcagaagacagaatacatcgctgttcctctctggtttcagccccatttccttggacgtgcagttctgggagtttgaacaattcatcaacagaagccaactcgtctacaacaacaaaggcggtatctacagggagatcctaccaaaggcggagtacttctcccaggcactttacaccttcgacatcggtcaaaacgacatcacctcaagctactttgttaacaataccaccgcagaagtcgaagccataatccctgatctgatggagaggctcacatctataat

SEQ ID NO: 59900 - DNA, 297 bp, Zea mays
cagcgccatccgaaagcagtttggctctcaagatggtggacctgagactaaggtccttgattacaagactcaacaaagcagactctttccgttgctggcttcagcatatgcatttagatttgtgggtgactggctgaagtggctatacatggatgtcactcagaaactggaagctaaagactactcaacactgcaagaagcccatgcctgtactgctggtttgaaggctgtgacaacatctgcaacagctgatgccattgaagaatgtagatagctctgtggcggacatggttacct

SEQ ID NO: 59901 - DNA, 289 bp, Zea mays
aacaccttctgaaaacaacaccttctgaaggtgttgtttccagcttttctttggaggcctcacactgaaaagctggaaaaatattgccaatttatctggtggtgagaagacacatagttcgctggctttggtgtttgctcttcaccactataaacctactcctttatatgttatggatgagattgatgctgcgttggactttaagaacgtatcaattgtgggacactatgtgaaagatagaaccaaagatgcgcaattcatcattataagtctgaggaacaacatgttt

SEQ ID NO: 59902 - DNA, 291 bp, Zea mays
cagaagttctacaacgtgttgattgaggagctgcctgccaatgttgctgaccttctgtgatcaatttgaagaaaaaacaaaacaaaaaagggtggtgagggaacctggtaaggattggttttgtcgaaataccgtgggagagggggtgataaggacggtggggggtttctatgttgaagtcgtggtcatggacaatttgtgattttttctcctttatgccatgttttggaatttttgtagctgcctaggccttgtggtaatgtgctgctgtgggggttcattagtatgaag

SEQ ID NO: 59903 - DNA, 293 bp, Zea mays
gagaatgaagcttcttcaagatcttgttcctggatgcagtaagatcactggcaaggcagtcatgctcgatgagattatcaactatgtacagtcattgcaacgacaagtggagttcttgtcaatgaaactttcaactgttaaccctgaacttggctttgacattgagcagatcatatccaaacaaatgatgctttcacaagacagacatcttgctttctatggagtcgatccaggatctagcagccttactgctccattcaaccaaggaatcgtgcagccagcaatgatgtgca

SEQ ID NO: 59904 - DNA, 298 bp, Zea mays
agagaagcaccctatgtggatcaagctgggcagaagaagcaggactatgagaagaccaaggcaaatattgagaaggagagcacaagctcaaagaaggctaagactgatgacgacgatggctcgaagtccgaggtcgatgatgaggatggcggtagtgacgaggaaaacgacgacgacgagtaaatagtatctccgctgtcgtgaggtagcaaatcgattgttaggtccccaattagctcactggtttgctatctttaatgttaagttgtttggaacaggtgtttatgaaggggatcta

SEQ ID NO: 59905 - DNA, 311 bp, Zea mays
atccagtatggcttgagctgcggcatgcacatatagctcatgttaatgaaacgctacatgaaaagatgaccagttttgtatcaaagaacaaagcagctcaactacagcaggcaagatctggtggagagttatctaccaagcagttgcagaaaatggttcaagctcttccacaatacagtgatcaaattgactagctcacccttcatgttgagattgcaggaaaactcaataacataatcaaagaacaccaccttaaagatgttggacagctagagcaagatcttgtgtttggtgatgctgggacaaaagaa

SEQ ID NO: 59906 - DNA, 255 bp, Zea mays
aagaactggttgccaaagatctccatggcactgaatggcattttcggcacatttttcgagggcaacccaagaggcatctccttaccaccggctggagtgtctttgttagctcaaaaagattggtttctggggatgcattcatcttcatgagaggtgaaaatggtgagctacgggttggtgtaaggaggctcatgagacaagtaagtagcatgccgtcatctgtcatatcaagccacagcatgcatcttggagtat

SEQ ID NO: 59907 - DNA, 261 bp, Zea mays
ccagcttgatggttttgaagcttcaaacaaaattaaggttttgatggcaacaaacagaatagacattttggatcaagcccttttgaggcctggccgcatagacaggaagattgagtttccaaatcctaacgaggactcacgtttcgatattctgaagatccattcaaggaaaatgaacttgatgcgtggtatcgatctgaaaaagatcgcagaaaagatgaatggggcctcaggagctgagctcaaggccgtctgtacaga

SEQ ID NO: 59908 - DNA, 269 bp, Zea mays
ggagcttatgttgctgtcaagcaagagatgatgcaacctactgccagcatcaaggacagaccagcatatgcaatgatcacagatgctgaggaaaagaatctgataactcctggaaagacaactctgattgagcccacgtcaggcaatatgggtatcagcatggcatttatggccgccatgaagggatacaagatggttttgaccatgccctcttacacaagcttggaaagaagggtgaccattaaagtgtttggagctgcatgaatcct

SEQ ID NO: 59909 - DNA, 256 bp, Zea mays
aggaatacaagggcatcttctggcaggaggacatcatccccttcttccagaacgtgaccatccccaaggactgcgacaccgtccaaaagtgctacatctacctctctggacaagtgaaggagaagctgggcacgattgacccctactttgtcaagctcggtgacgccatggtcacctggatcgaggcctgggatgagctgaacccgtcgacccctgccgccgcaaatggcaaggccaagtagatgtgccatcactt

SEQ ID NO: 59910 - DNA, 253 bp, Zea mays
  unsure (1)..(253): unsure at all n locations
gctcttctgggctcatctgcaagcaagtacagtgcattagactgtcagaggccagaactattgaataagaggaaagttcagggaaaaattcttttgtgtggctattcattcaattacatttctgggacagcctcaataaagaaagtgtctcagacggccaggagtctcggcgcactnggctttgttgttgctgtggagaatagttacccaggaacaaaatttgaccctgtaccagtcagcatccctggaattc

SEQ ID NO: 59911 - DNA, 254 bp, Zea mays
gccaagagcagctcatctgtggagaagagctacgagctgcctgatggccaggtgatcaccattggggcggagaggttccgatgccccgaggtcctcttccagccttccttcattggtatggaagctcctggcatccatgagaccacctacaactccatcatgaaatgcgacgtggatatcaggaaggacttgtatggtaacattgttctcagtggtggcacaaccatgttccctggcatcgctgaccgtatgag

SEQ ID NO: 59912 - DNA, 259 bp, Zea mays
gagtacatggaacatgatcttaaaggtgtcatggagaccatgaaacaaccatatacccaaagcgaggtaaagtgtttgatgcttcagctgctagaaggtgtaaaatatctacatgacaattgggtgcttcatagggatctgaagacctcaaatcttttgttgaataaccgtggtgagttaaaaatatgtgattttggactgtctcgtcaatatggaagcccattaaaaccttatactcaactggttgtgactttgtggt

SEQ ID NO: 59913 - DNA, 258 bp, Zea mays
cgtgctttgtgcacaaacagtgagcgaaatgtgagtgccgtctggggaaagctggcagcagaaatcctaatgcagaactgggacgtagctttggaggaactcaaccgcttgaaggaaataattgattcagagaacttctcatcacctctgaatcagctctagaacaggatatggctgatgcattgggctctgttcatcttctttaaccatgaaaatggtagaaatgggatcattgatctgttcttccaggacaggtac

SEQ ID NO: 59914 - DNA, 271 bp, Zea mays
ccgcgaggttgtcaggattcaatatgtcgaccagcacattcgctacttcctggacgctgttgggcaatgttagaacaacgcaggcctcccagacagcggtgaagagcccttcgtctctaagcttcttcagccaagttacgaaggttccaagcctgaagacctccaagaaactggatgtctccgccatggctgtatacaaggtgaagcttgtcgggcctgaaggtgaagagcacgagtttgatgctccagacgacgcctacatccttgacgc

SEQ ID NO: 59915 - DNA, 212 bp, Zea mays
tgaaggcacaggcgctcagggactcgagcatgtctgggtacatgtcctccaagaagaccatggagatcaacccggacaacgccatcatggaggagctgcgcaagcgcgcggaggccgacaagaacgacaagtctgtcaaggaccttgtcacgcttctgttcgagacggcgctgctcacctcgggcttcagccttgacgaccccaacaccttc

SEQ ID NO: 59916 - DNA, 254 bp, Zea mays
ccttcctctcccgagccaagatgaatgttgaaaagctcaagaagatggcaggtgctgtgcgcaccggggggaagggtagcgtgcgcaggaagaagaaggcagtccacaagactacaaccacagatgacaaacggcttcaaagcaccttgaaaagaataggagtgaacagcattcctggtattgaagaggtcaacatctttaaggatgatgttgttattcagtttgtaaatcctaaagtgcaagcgtcaattggt

SEQ ID NO: 59917 - DNA, 251 bp, Zea mays
gagaatacatacattaattattgcatgaatccagtaaaaagttaaaacgaattttaatttgagacggagggagtattacttaatttattttggcattctcatcaacttcatgccatagtaaatgatacttggcttcatgaccttcaccaagttgggtcttttttgaacttttgaaggagcataaacttggcttgtcttttcttacattttcagttgctcagtgcacgtgatatggctgaacggaaagtaat

SEQ ID NO: 59918 - DNA, 255 bp, Zea mays
acagatcacacacactcgagaactccatttcgatcccatttgaaatcaacccatcctcgtttcctccgtctagcagcctctcaccctcatggccaagatcaagatcgggatcaatgggtttggcaggatcggaaggctggtggccagggtggccctgcagagcgacgacgtcgagctcgtcgccgtgaacgaccccttcatcagcaccgattacatgacctacatgttcaagtatgacactgtgcacggacagtg

SEQ ID NO: 59919 - DNA, 259 bp, Zea mays
cgtgctttgtgcacaaacagtgagcgaaatgtgagtgccgtctggggaaagctggcagcagaaatcctaatgcagaactgggacgtagctttggaggaactcaaccgcttgaaggaaataattgattcaaagaacttctcatcacctctgaatcagctctagaacaggatatggctgatgcattgggctctgttcatcttctttaaccatgaaaatggtagaaatgggatcattgatctgttcttccaggacaggtact

SEQ ID NO: 59920 - DNA, 252 bp, Zea mays
ctggaaaagagttcaggcaatgaacagctgattctaaccaccatcatccggcacttggatcacaaaaatgttttacacgatcctcagacaaaatcagatattattcagacagcaacgtccttggcacgacaacttcgatctcgaggatttgctgttgaacttgtagtggcaggtgacttgtgcaagcacttaaggaaaacacttgaggccgtggaatcaggcaatgttgaagatcagaatttgaacgaaccc

SEQ ID NO: 59921 - DNA, 253 bp, Zea mays
gaaggaagggggacgcggaggaagatggggctcgcgttcgggaagctcttcagccggctcttcgccaagaaggagatgcggatcctcatggtcggcctcgacgccgccggtaaaaccaccatcctctacaagctcaagctcggcgagatcgtcaccaccatccccaccatcggtttcaatgttgaaactgttgagtacaagagcattagcttcactgtctgggatgtcgggggtcaggacaagatcagacctc

SEQ ID NO: 59922 - DNA, 259 bp, Zea mays
cacaaggataccttggtgtactattttgggacatgggaaagctgtcagttatgtgaggttcttggatccagacacacttgtctctgcatcaaccgacaacacattgaagatatgggatcttaaccagactaattgcagtggattatctaccgattcttgccgcctgactctgaatggtcataccaacgagaagaattttgtagggctatctgttcatgatggatacataacttgtggctctgaaaccaatgaagtgttt

SEQ ID NO: 59923 - DNA, 270 bp, Zea mays
gcgcagactgcaagtcaaagggtcctcgatgggcaagtgtgaatctaggtatctttatatgcatgacatgttctggcattcatagaagcctgggggtgcacatatctaaggtaagatctgccaccctggatacatggctgccagagcaagttgcatttattcaatcaatgggaaacgaaaaagcaaatagctattgggaagcagagctgcctcctaactacgatagggttggaatagagaatttcatccgtgcaaaatatgaggacaaga

SEQ ID NO: 59924 - DNA, 258 bp, Zea mays
ttaaaaagccggcggcgagaaggtgggttggggaatctgaagcgatcagagaaggcaagcttgcttgcttgcttctccaccgaatcccccatctcgcgccctccgtctctcgccgcggagactcgcccccccgctgatggaccagctcgtcaatttcatcatccgcccgcccagagctgactacagtccaaatgatgatctattagagcaggagtttatgctgaagggaagatggttcctgaggaaggatttggaggt

SEQ ID NO: 59925 - DNA, 246 bp, Zea mays
tgttgctggattttctgatgcactcaatggaggatatgaatcatggggatccagaaggcaaagaagacctttccaaaaagtggtccccatgattcatatcctccattgagtgcatcatggggaccactttttggaaaggtctactttgccttctgggtcattttccatctctacccattcctcaagggtctcataggtcgacacggccgaactccaaccattgtcattctgtagtcagtgcagttg

SEQ ID NO: 59926 - DNA, 250 bp, Zea mays
caagatcgggatcaatgggtttggcaggatcggaaggctggtggccagggtggccctgcagagcgacgacgtcgagctcgtcgccgtgaacgaccccttcatcagcaccgattacatgtggaagcaccatgaggtcaaggtgaaggactccaagacccttctctttggtgagaaggaggttgctgtgtttggctgcaggaaccctgaggagatcccatggggttcggttggcgctgaatatgttgttgag

SEQ ID NO: 59927 - DNA, 252 bp, Zea mays
agctactcagttgggcacagcatcttccgccctggccgggtgtcccatgccttgagtgaggatgcgctggcacatgctctgatggacaataagttcccaactgagacactcaaggattatgaggagtggactattgatctggggaagctccacttgggaatgccctttgcacaaggtgcctttgggaagctctacaggggaacatacaatgggatggatgttgctattaagcttttggagcgacctgaggct

SEQ ID NO: 59928 - DNA, 254 bp, Zea mays
cagtgacaaatgttaagagtccagtgaacaagtggcgatgtggtgcggctcctatttcgtctatgatgactgtgcagcgatggtcgcgtggcccttcagccacccaaatcggaaagcctgctgttcacatggctagcgttgacttgaaaggaaaagcatacgatgtattgaggcagaattcttccaggtttttgttggaagatgtctacaggaacccaggtccgctccagtttgaaggaccaggtgccgattca

SEQ ID NO: 59929 - DNA, 256 bp, Zea mays
  unsure (1)..(256): unsure at all n locations
cgcccttggcccccgctcgccggagtccccggggactctgttcgtcaccaccaggagggtgatttggctcagcgaagtnagaagggcaagggctacgcggtggacttcctcgccatctcgcttcacgctgtgtcgcgcgacctcgaggcgtacccctcgccctgtatctacactcagattgaggcagccgttggtacagaagaggaggctggggaatcaaatcctgaagcaaatgaactagagctatctagagtat

SEQ ID NO: 59930 - DNA, 268 bp, Zea mays
gcaggatcgactgattggccatgtccttgatgactgtaaacttgttacaagaattctggaagcagagaagaactctgttctgtcgtcagatttaactaagcatactatgtcttcagagggaagatctcccccaaggataggaattgttggtcatatgacacggatagctaacaggctccttcagctggtcaacacaaacatcatggttcaatcacatttgcagcaaaattctgattggattgagtggcatgccagtaccctgacgaat

SEQ ID NO: 59931 - DNA, 164 bp, Zea mays
gtaccacattgcaatatagattgggtacccaatgcaatatagattgggtaccacattgccatctgcattggagatgccaatggcaagctcatgcttgcccatgctgccagtgcacaaggaatttcagttgttgaacaaatatctggtaaggatcacatcctaaa

SEQ ID NO: 59932 - DNA, 249 bp, Zea mays
actcgagcgaatcggctcgacaattgctgatacagggaggacatatccagatgaatgacgtgctacacaaggagaaactcatgtaatcaatattgaaaatgatacttctgaagagtttcgattaggaagcacgttaagacggacatcaccagcaaaattgacaacacctgctcagaagcacagaagggtttctggagatgactatcataatggaagtgttcctctgaaggatagtacatatctgcagat

SEQ ID NO: 59933 - DNA, 251 bp, Zea mays
acactgcccgagacatagacagcgggacgtcgagatggccgacggggaggacgccgccgccgcgcgccgccgggccgccatcacagactaccgcaagaagctgctcaactgcagggagctagagtcgcgcgtcggcaccgtgagagaaagccttaaaactgcaaagaaggattttaccaagactgaggacgacttaaagtctctgcagagtgtggggcaaataattggagaagtactccgacctcttgata

SEQ ID NO: 59934 - DNA, 83 bp, Zea mays
agatttctgatgatgaagatgaggaagagaagaaagacgctgaggagggaaaggttgaggatgttgacgaggagaaggaagag

SEQ ID NO: 59935 - DNA, 254 bp, Zea mays
caaggctgaagcatttttcggcaatgaacaagctcaagaagatggcattaagggttattgctgaaagcctgtctgaggaagagattggaggcctcaaggagttgttcaagatgattgatactgacaatagtgggactataacatttgatgagctgaaagatggcttaaaaagggtaggctccgaattaacagagaacgaaatccaggctctaatggaagcagctgatattgataacagcggaaccatcgactat

SEQ ID NO: 59936 - DNA, 258 bp, Zea mays
cattatggcttagagactatagtagcacagcggaggtaagacgtcggaaagttctggatatacaaaactttatgcagaaccctcagctgcaggagtttgaattccagaactttccgacttcttacctccgctgtgctgctcatcgtgttgcacaacattatggcttagagactatagtagcagatagtttagtagaaggctcagttagcaggattgttgcaagaaacacagcagaaagcaggtatcctgcaatttttt

SEQ ID NO: 59937 - DNA, 253 bp, Zea mays
ctgaagctaacttaagggaaatgagatggccaatggcaacactagtcatcgcttcaagctcttgcttttccttctaactctgcactcttcattcgctgagattttcttcgaagagagattcgaagatggatggaagagccgttgggtgctatccgattggaaaaggagtgaaggtaaagcgggtaccttcaagcacacagcaggaaaatggttcggggatcctgatgacaaaggtcttcagacatataatgac

SEQ ID NO: 59938 - DNA, 290 bp, Zea mays
gaagtacaagcctggtaagtttccattggctattgtcttggcgccaacaagagaacttgcaaaacaggttgagagggagttccttgattcctcccctttggaaacgctgtgtgtatatggagggactccaattatgcagcaaataaaacaacttaattatggtgttgatgtggtcattgggacacctggacgtgtgattgatctgctaaaaaggggtgctcttagtttggcagagatccggtttgttgttctcgatgaagcagatcagatgttgtccgtcgggttcgata

SEQ ID NO: 59939 - DNA, 290 bp, Zea mays
cgacgcctacctgttcagcctgatcgacgaggacgacaagagcatccagccggggaacttcgagcggcactggggcatcttcacctacgacggcctgcccaagtaccagctgaacctggggtcgtcgaacgcgggcggcggtggcctcgtgagagccaagggcgtgaagtacctcgagaggaagtggtgcgtgctgaagccttctgtgaacctcaacgacccgaagctggccgacaacgtgggatacgcgtgctccatggcggactgcaccagccttggctacaagacgt

SEQ ID NO: 59940 - DNA, 292 bp, Zea mays
gtccttcaagcagaccaaaacgatgatacctgtggatcatgtggcgatggtggtgaactgatatgctgtgacaattgtcctgctagttaccatcaagcctgcttgtcttgccaggatattccagatggcaactggtactgctctagctgcctttgcgacatttgtggtgaagtaatcgattcaaaggagcttgtaacttcccttcctgctttagattgctcacagtgcgaacgccaataccatgtaaaatgtgtatctgccaaagttccgtgcaatgaggatggatctggta

SEQ ID NO: 59941 - DNA, 290 bp, Zea mays
actagttctagatcccggctccgtcgtcgcgtgccatcctagggtttctttccccgtcggcgcctccccagatttggccgccgccgccgctgacccaggttgtcttgatggcgcccgctgtagaagccgtgaaggagacaggcaccttccagaaggttcctgccttgaacgaaaggatactgtcatccatgtccaggaggtctgttgctgcacacccttggcatgatctggagataggtcctggtgctccaaccatattcaactgcgtcattgagataccaaggggcagc

SEQ ID NO: 59942 - DNA, 290 bp, Zea mays
gccgataactctgtccgaatgtgggatcgtcggaatctgggttcaggaggacgtggttctccaattcacaaatttgaaggccataaagctgctgttctttgtgttcagtggtcacctgacagagcatctgtttttggaagttctgcagaagatggtttcttaaacgtgtgggatcatgagaaggtggggaagaagagaaattctaatgtcccagccgggcttttctttcagcacgctggtcatagggataagattgtagacttccactggaattcgtcagatccttcgac

SEQ ID NO: 59943 - DNA, 289 bp, Zea mays
ggaatactagatgcaaatagtgtcatttcagagccagttgtaatcgagggaaaagtgttccgtgagatgtctgaaagtgcaagaggagaggccgccgacaagataattgtgatggggagatcctcgccaaatgataaacttttgcttgtccaagctttaaaacgaaaaggccatgttgtagctgttactggtgatggcacaaatgatgcccctgcattgcacgaggccgatataggtctttcaatgggcatttcagggacagaagttgctaaagaaagctctgacatta

SEQ ID NO: 59944 - DNA, 297 bp, Zea mays
ctttcgtcatctcttctccggcgaagaacccccagtcgcccaccagatcacttgttaaactttgttgaggggtgatggcggtttctttcgcaaacctcagctccgaggcagggcttaaaaagcttgatgagtaccttctcactcgcagctacatcactggctaccaagcttccaaggatgacttggctgtctacacttcgttttcgtctggtccctcgtccaagtatatcaacgtagcaaggtggtttaatcacattgatgcgctcgtgaggctgagcggaattactgcagagggcc

SEQ ID NO: 59945 - DNA, 287 bp, Zea mays
aagagagcttgacaaggagctcagacaagtcacgaaacagaagaatgaagctgttcgaagccaggattttgagaaggctggggaattgagagaccgtgaaatggaattgaaggcccagataacagcactcattgacaagagcaaggaattgagcaaagcagaggaagagtctggagagacaggacctatggtcaatgaagaagatatccagcacactatatcttcatggactggcatccctgtggagaaggtttccagcgatgaatctgataagcttcttaagatgg

SEQ ID NO: 59946 - DNA, 279 bp, Zea mays
attgttcttcctcagtagtgtcatttacgcttctcttctctgcagcaactatgcctaaccctaaggtcttcttcgacatgaccatcggcggtcaatctgctggccgcatcgtgatggcgctctacgccgacgtcactccccgcaccgccgagaacttccgcgcgctttgcaccggcgagaagggcgtagggcggacggcaagcccctccactacaagggctcgtccttccaccgcgtgatcccgagtttcatgtgtcagggtggcgacttcaccgccgg

SEQ ID NO: 59947 - DNA, 291 bp, Zea mays
gtgactgtccagtctgctatgggggaggagcagatctgcgcgctgaaggatgttggccccaagtaacttccctgccttggaatactgtatctcaaaacctaaatcgaaaaaagaagtgtatcaaggattgctacagagacatccatctggcttgagctggcttttgctatgtcaaacacaagtgcagggatcgctgggtgttgcaccgtgtctgcattatctgtggttacattctggaccctgtattttctatgcttttatgcccctactgtttagtattaattatcaata

SEQ ID NO: 59948 - DNA, 290 bp, Zea mays
actgagaagtttgatgcatctaaaacaaaagatagcgagttccaccttcttgatgggagctcagtccaagcacctttcatgtccagtacagacaagcaatatattgtgagctacaacaacttgaaggtgcttaagcttccataccagcaaggtgcggacaagaggcagttctccatgtacattcttcttccagattcaaaagatggcatctggagcttggctgaaaagctgaactctgaaccagagttcctggagaaccatgtcccaatgcacaaggttccagtcgggca

SEQ ID NO: 59949 - DNA, 286 bp, Zea mays
tgtggctggtttccagtgggcatcaaaggagggtgcactggctgaggagaacatgcgtggaatttgctttgaggtctgtgatgtcgttcttcatgctgatgctatccacaggggtggtggtcaggtcattcgcactgccaggagggtcatctatgcctctcagctcacggccaagccaaggctgctggagccagtctacctggtggagatccaggccccagaaaatgcacttggtggtatctacggtgttctgaaccagaagagaggtcatgtctttgaggagatg

SEQ ID NO: 59950 - DNA, 288 bp, Zea mays
tttcttttctgcttccagacattgtccacgagctagtgcactggtgtcgctcgcaaccaaattaaggactgaggcatggcatccaagggcgtcctcttcttggctctcaacctcctgttcttcacagtggccaacgcctgcggcagctgcccgaccccaacgcccccggtcgagccaccgccgccgcctcctgctaccccacccccttcatcctccagtgggaagtgcccgctgaacgcgctcaagttcggcgtgtgcgtcaatgcgctcggcctcgtcaaaggcgag

SEQ ID NO: 59951 - DNA, 281 bp, Zea mays
gatggctgctcaggtacctgttagcggcccgtgcgtcacatgtattggcaaatgtggatcagggaacttcgtcaagatgcttcacaattgaattgagtatggttgcatgcaacttatcgacgaggcttatgatttactcaagtcggtgagtaagctcatcaacagcgagctgcatcaggtattctctgagtgtgaatcaaggtgagctcctcagtatcttgattaagatcacggccgacatcgttggtatctaggatcacaagggtgaatgctacctcgtc

SEQ ID NO: 59952 - DNA, 285 bp, Zea mays
agttagaatccttgtaaagcgtgatgagctgaccctggagggcatcaaacaattttttgttgctgttgagaaagaggaatggaagtttgatactctttgtgatctttatgatacactcaccatcacacaagctgttattttctgcaatacttttagaaaggtggattggcttactgaaaaaatgcgcacaataacttcacagtatcggctatgcacggtgacatgccccaacaagaaagggatgccattatgggcgagttcaggtccggcgcaactcgtgtgcta

SEQ ID NO: 59953 - DNA, 288 bp, Zea mays
acgaatccaaccgaagcgagagtgagcaaggcagaggcgtcgtgaccggcgatggaacggctgcagcggatctttggcgcctccggcatggggcagccgacgacggactcgccgctgctcgattcctccgagcaggtctacatctcctccctagcgcttctcaagatgctcaagcacgggagggctggggtgcacatggaggtcatgggcctcatgctcggcgagttcgttgacgactacaccgtcagggtcgtcgacgtcttcgccatgccgcagagcgggactggt

SEQ ID NO: 59954 - DNA, 289 bp, Zea mays
cgctagctccatagcacttgttccagctagctaggagagagagcttgtttaggcggcggcaagatgaacaggaagccaggagactgggactgcagggcgtgccagcacctcaacttcagccgtcgggatgcatgccagcgctgcagtgaaccacgtggagttggtgatcgtagcggcggtggtggcgacttgggtgggcgtggtggttcctccttcggcggtggctttagtgctggctctgatgtccgccctggtgactggtactgctcctgcggcgcacacaacttcg

SEQ ID NO: 59955 - DNA, 289 bp, Zea mays
aaggagtctgctctggggaacatcccgaccattgccttctgcgacactgactctcccatgcggtatgtcgatatcggcatcccagccaacaacaaggggaggaacagcattggatgcctgttctggcttttggccaggatggttctgcagatgaggggcactatcctccctgggcacaagtgggaagtcatggttgatctgttcttctacagagacccagaggaagcaaaggagcaggaggaggaagctgctgcggcccctgagtttgctgcagtcactgattaccaag

SEQ ID NO: 59956 - DNA, 289 bp, Zea mays
tgatgaagagcggcaagtacaccctgggctacaagaccgtcctcaagacgctgcgcaactccaagggaaagctgatcatcatcgcaaacaactgccctccacttaggaagtctgagattgagtactacgccatgctggccaaagttagcgtgcaccatttccacggaaacaatgttgatcttggcactgcctgcggcaagtactacagggtgtgctgcctcagtatcatcgacccaggtgactcggacatcatcagtaccacccctggcacccagtgagccagccccgg

SEQ ID NO: 59957 - DNA, 287 bp, Zea mays
cacaaagacagtcctgctgccaagtatttgatggagcgtggtgtggaccggaaggacttcaactcatatggtagccgtcgtggtaatgatgaagtaatggcaaggggaacgtttgcaaacattaggatcgtgaacaagtttttgaacggagaagttggacccaagaccattcatgttcctactggggagaagctttctgtttttgatgcggccatgagatacaaatctgagggccatgctactataatcctcgctggcgctgagtatggaagcggcagttctcgtga

SEQ ID NO: 59958 - DNA, 284 bp, Zea mays
ggcagaccggctattggctccattgctccaatgtctgctttggctgccttgcctcgatggaccggatgcagtgaggaatccagccgaacgacagttttgaaggataggaaggggagctggaagcagtcacgcaggcagcctcgccgtgattcatatggaacaagctggagtcagtttctgctgtgccactcactgtttaccttaagattattacctgtgttgttgtcctttgctcgttagggctgataacataatgactcattagaaaatcatgcctcgttttt

SEQ ID NO: 59959 - DNA, 285 bp, Zea mays
gaagaacgaacctgagtttgctaagaagctagcatctgttgctgacctttatgtcaatgatgcttttggcacggcacacagagctcatgcttcaaccgaaggagttaccaagtatttgaagcctgctgttgccggcttcctcatgcagaaggaacttgactaccttgttggagctgttgccaacccaaagaagccatttgccgctattgttggtggatccaaggtctcaagtaagattggtgtcattgagtccttgctggcgaaggtcgatatcctcatccttgg

SEQ ID NO: 59960 - DNA, 283 bp, Zea mays
tgaaccacggcaacatcgtcagattacatgatgttgtccacagcgagaagcgcatataccttgtcttcgagtacctggatctggacctcaagaagttcatggactcctgcccggagtttgctaagaatcccactttgatcaagtcatacctctaccagatactccacggtgttgcgtactgccattctcatagagttcttcatcgagacttgaaacctcataacttattgcttgatcggcgcactaatgcactgaagcttgcagactttggtttagccagggc

SEQ ID NO: 59961 - DNA, 289 bp, Zea mays
agcaatctcgtccccaaacaagcaaccaccgcctccccgatctcgtcgagaggaagcccaatcccgaaaccgccgccctattccaatggcgcccaaggccgagaagaagcccgccgccaagaagcctgcggaggaggagccggcggcggagaaggccacggcggggaagaagcccaaggccgagaagcggctccccgcgggcaagtccgcaggcaaggagggtggcgagaagaaggggaagaagaaggcaaagaagtcggtggagacgtacaagatctacatcttcaag

SEQ ID NO: 59962 - DNA, 272 bp, Zea mays
gcccccatattgtggttggcacgcctggaaggatactagctctagctagagataaggaccttcccttgaagaatgtgcggcatttcattcttgatgaatgtgacaagatgctcgaatcacttgacatgcgcagagatgtccaggagatcttcaaaatgactccgcatgataagcaagtgatgatgttttcagcaacactcagcaaggagattcgacctgtttgcaagaggttcatgcaagatcctatggaaatttatgttgatgatgaggct

SEQ ID NO: 59963 - DNA, 284 bp, Zea mays
gcacgacgcacgcagagccgcagagatccgtcacactgcaagttttgaaaactgaactgtaagatggcatcagcagagctttcccgtgaggaatatgtgtacctggcgagctcgccgagcaggcagagaggtacgaggaaatggttgagttcatggagaaggtagcgaaaactgttgactcggaggagctcactgtggaggagcgcaacctcctgtctgttgcatacaagaacgtcattggagcccgccgtgcctcatggcgcatcatctcctccatcgagcag

SEQ ID NO: 59964 - DNA, 285 bp, Zea mays
gacgagacaaatatcgcaacccaaaaggttctgaagggttctaaagataaaagaaaggaaacctttgcagaaggcaacactcaggaggaatgcaagtattattcaacacctggaggatgcaaattcggtaaaacttgcaaatacctccaccgtgagggaaatggagggaaaacagaggttgaaaaagctgagctgaactttctaggtcttccactgcgaccaggtgaaaaggagtgcccatactatatgcgcactgggagctgcaaatttgcgactaactgcaat

SEQ ID NO: 59965 - DNA, 290 bp, Zea mays
gagcaaggccgtgggatcggaattcccttccggacaagacacctaccaccacccaccacccagcgcaaggccaggcggcccaggccaccactccttaccttttccccctcttttgttccttcattcacgaatcccgtcttcttcctttcttggccttctccacctcatcgccgagacgagatctctcccacacgaggaagggagagatgggcgggcgggtggatcacgagtactcctacctgttcaagatggtcctcatcggagacagcggcgtcggcaagtccaatatc

SEQ ID NO: 59966 - DNA, 268 bp, Zea mays
attgattctgctgttctctcaaggctgaagcatttttcggcaatgaacaagctcaagaagatggcattaagggttattgctgaaagcctgtctgaggaagagattggaggcctcaaggagttttcaagatgattgatactgacagtagtgggactataacatttgatgagctgaaagatggcttgaaatgggtaggctctgaattaacagagaacgaaatccaggctctaatggaagcagctgatattgataacagcggaaccatcga

SEQ ID NO: 59967 - DNA, 267 bp, Zea mays
aaagaaatggcccagggtcataatggagaattggctgaagggaccataaggagcgtggggctggatcccattatggatatcttgcaatcaccttctcgctggcctttggaattcgagaagaacagcaggagatcattgacctgtggcatggatgcaacgtttccttggtccacaggacttactttttcctgctgttcaaaggggacccagccgacgccatttacatggaagtggagcttaggaggttatcatttctcaagaacacat

SEQ ID NO: 59968 - DNA, 265 bp, Zea mays
aaggtctcaagtaagattggtgtcattgagtcgttgctggcgaaggtcgatatcctcatccttggtggtggtatgatctacacattttacaaggcacaaggatattctgttggaaaatcttcgtggaagaggatcaacttgagctcgcaacttctcttattgagaaggcgaatgcaaagggggtttctcttttgcttcccactgatattgtagtagcggacgaatttgcagccgatgctgagagcaagattgtccctggcactgc

SEQ ID NO: 59969 - DNA, 268 bp, Zea mays
ggacaaactgttctgtcatatgttaatatggtgtgttcgaccttgaggtactccatcccaaaatctattgtttattgccaagtgcgagaggccaagcgctcgctgctcgatcacttcttcatgaactgggagcaagagagatgaagcaactttccaagcttctcgacgaagatccagcagtcatggaacgcagaactaaccttgcaaagaggctggagctgtaccggagtgcccaatcggaaatcgatgcagtcgcatggtccaaata

SEQ ID NO: 59970 - DNA, 269 bp, Zea mays
caaagctgttatccaagctgagttggcagttgagggcttaacatggcatgtcacatgtgttagcatgggcaacccccactgtgtcacatttggggcaaacgagttaaagaccttgcagatcgcgatttaaaactcagcgaaattgggcctaaatttgagcatcatgaaatgtttcctgctcgcacaaacacagagtttgtacaggttttgtctcgctcacacctcaaaatgcgagtctgggaacgtggtgctggagcaactcttgcctg

SEQ ID NO: 59971 - DNA, 266 bp, Zea mays
aaagactctgataagaagagcacagaggaagctaacattcttgtgccagctagtcaggcatcaaatgttataggaaaatctggtgctgtcatcaagcatcttcggtcaacatcaagagcattcttaaagtgagcccaaaagatccaagtgaccctacacattcatgtgctatgagttttgataattttgttcagataactggtggtgctgaagctgttaaaaaagcactgtttggagtatcaaccatcatttacaagcacccatca

SEQ ID NO: 59972 - DNA, 273 bp, Zea mays
attggatcagaagaccttgctgctaaccatgacgtgatgcaaattgttgaagtattggatgatagaacaagggattcaagattacttgccttgcttgacaaataccatcaagcacaaagcaacaggttttggtttttgtgctgtacaagaaagaagctgcacgagtggaaacaatgcttcagagaaggggatggaaggctgtttcagtccatggcgacaaggctcagcatgatagaacaaaagctttatctttatttaaagaagggaaatgcc

SEQ ID NO: 59973 - DNA, 279 bp, Zea mays
tgacattcactttccccgaagatgcaatgactagctcgggtgctcctttctggtctgctcctaagcggttcccgcgacctctggagttctcgtcttccgactcaagtcaccttaacttcttgttggctgcatcttattaagggcagagacatttggaatacacatacctgattgggctaagaacccaaagaaactggctgaagctgtggacaaggtcattgttccggatttccaaccaaaacagggtgttaagatagagacagacgagaaggctactag

SEQ ID NO: 59974 - DNA, 263 bp, Zea mays
tgtgagattgctctcagcacgttgctggacgagttgcagcctgaccaatggccagtcgaggctgggaaccgtgcgatccgttgcactggtgttgcgctcagtgtagctgctgggttactggtgcttgcatgcctggaacaggtgcaaggatcatcgcattgctaggtggtccgtgtactgagggacctggaatgattgttttcgcagatttgtcagaaccagttagatcacataaggatcttgacaaggatgcagctcctcac

SEQ ID NO: 59975 - DNA, 263 bp, Zea mays
gggatcacatgcagttcaaggatgtctgtgttaaagttgcaaatgtcgagctatattacaaggcagttcacttttatttgcaagagcatcctgatctcatcaatgatatgctaaacgtgttgcacttcgtttagatcacaccagagttgtagacataatgcgcaaggctggtcagttgcatcttgtgaaaccatatatggttgcagttcagagtaacaatgtatctgccgtgaatgaagccttgaatgagctttatgtcgaag

SEQ ID NO: 59976 - DNA, 268 bp, Zea mays
gcgtcttgaaaggggagagagagagagagaagagagagagaagagagagagagagagaggagtgggagacccgcgagaggctgccgtgtagggaccgtagactcagcgactgcgaaggaggataaggggatggccgggatcggaccgatcaggcaggactgggagccggtcgttgtgcggaagaaggcacccaccgccgccgccaagaaggatgagaaggccgtcaacgccgcgcgccgcgccggtgcggagatcgataccatgaaga

SEQ ID NO: 59977 - DNA, 262 bp, Zea mays
caacgaatattcaaaccgaaaacaatggagccggtgcggaagagcgtgtgcgtgaccggcgctggcggcttcgtcgcgtcggagctggtgaagctcctcctctcccggggccaataccggtcccggcaccgtgcgcgaccctggtgctagcaagaatgcccatctcaaggtgctggaaggagctgaggaaaggttgcagcagatcaaggctgatctgatggactacaacagcattgcatcagcagttgccggctgtgagggt

SEQ ID NO: 59978 - DNA, 263 bp, Zea mays
ttaagccatcagtcgttgaagctgctgctgtatctgggttatctagtgtctctgccattgcccatggatggtgctgtctttcaaagtatttgtatggtttgtgtcgtgagtcgtgactggctggtttcatggaccagttgtgttctcgtgacccaaaactatcgtgcgaccgcatatggcttaatcatgaataaatgttgtttgaatttaaaaaaaaaaaaaaaaaaaaaaaaaggggggccgccgattattgaccccttcgc

SEQ ID NO: 59979 - DNA, 266 bp, Zea mays
taggccttttacactttccatggccaatgcgggacctaacaccaatggttctcaattcttcttcaccactgtagcaactccatggctagataacaaacacacagtgtttggtagagttggaaagggatggatgttgtccagcaaattgagaaggtcaagactgacaagaatgacaaaccatatcaagatgtaaaaatcttgaatgttacagttcccaagacataagcgcgtgatcagttgggttcggaaattgtgcctgcactcct

SEQ ID NO: 59980 - DNA, 267 bp, Zea mays
ggggaaggacggcgcgtccaagcctccggagccgcccaaggactacatccacgtccgggcgaggcgcggcgaggcgacagacagccacagcctcgctgagagggtgagaagggagaagatagccagcggatgaagcttctgcaggatctcgtcccgggctgcaacaaggtggtcggcaaggcggtgatgctggatgaaatcataaactacgtgcagtccttgcaacggcaagtcgagttcctgtccatgaaactggccaccgtgaat

SEQ ID NO: 59981 - DNA, 264 bp, Zea mays
tctttgcttaactttattctgcccaatatttttaattcatctcagaattttgaggaatggtttaatgcaccatttgcatgtgatgttagtcttaatgatgaggaacagctattaatcatcatcgtctgcatcaagttttgcgtccatttttgctgaggaggaaaaaagatgaagtggaaaaatatctccctgtcaaaacacaagtaattctcaagtgtgatatgtctgcttggcaaaaagcatactatgaacaagtcacaagca

SEQ ID NO: 59982 - DNA, 254 bp, Zea mays
gaagaacgagctgcccttgaggcaaagtaccagaagctttatgaacctttatacacaaagaggtatggaattgtaaatggagaagtggaggtagatggtgtttgtgatgaccggccagtgagaatactgttgagggaaaagaaccagacgctaaaggagttccagacttttggcttactgccatgaaaacaaacgaggttttgtctgaggagatacaagagcgcgatgaagccgctttgaaatatctaaaagat

SEQ ID NO: 59983 - DNA, 263 bp, Zea mays
ccaaggttcagccaacaacattgatcccaaagcaagttgggaatatgtatacagcatcactctatgctgctcttgcatcggttatacataatagacatgaaactctggcaggccagagattgttatgttttcgtatggcagtgggttgacatcaacaatgttctctttcaagattaatgaaggccatcaccctttcagcttgctaaacattgcaaacataatggatgtttccaagaaattgaaggcaagacatgtggtcccgc

SEQ ID NO: 59984 - DNA, 263 bp, Zea mays
aaagaattccctcccctagccgccgccgccgctcgtctccctgagaggtgccgggaccgaggaactggccgagttctaggtagagaatcggttttgcttgtctcagcacggggtctgctcgtctggtggtggtgaaggggagaaattcgtgagatctgttccggatcaggcgtgcgagctcgggaatcaggggtttcacacatagcttcgtcgatttgaatttgatgtactaatggagtctaagggtggcaaaaagtctagca

SEQ ID NO: 59985 - DNA, 271 bp, Zea mays
cggaacttcaggcctgaaagtctccttggagaagggggttttggatgtgtttttaaaaggtggattgcagaaaatggaactgcacctgtgaaacctggtacaagtctcacagttgctgtcaaacgctgaaccatgacgggcttcaaaggcataaagaatgggtggctgaagttgattttcttggaaatcttcaccatcccaatttggtcagattgattggatattgtgttgaagatgaccaaaggttgctggtctatgaattcatgcctcg

SEQ ID NO: 59986 - DNA, 263 bp, Zea mays
agggcaggttctttgccttcggtcgtgtcttctcagggaaggttgctactggtatgaaggttcggatcatgggtcccaactatgtccccgggcagaagaaggatctgtatgtcaagagttccagcgtactgttatctggatgggaaagaaacaagagtcggttgaggatgttccgtgtggtaacactgttgctatggttggtctggatcagttcatcacgaagaatgctacactcactaatgagaaggaggctgacgcttgcc

SEQ ID NO: 59987 - DNA, 266 bp, Zea mays
ctctcttgctcgcactcgcggagatcgaagagaagcgcaggaggccccagcactagcgccgccccgccgccgcatcagacatggcgctggccgctcgcctcgtctcgcgctcccgtcagtatattcggttcaagccactttggggaatggaggtgtcactcaagttcgctcctttgccaaggatgcagctccagctgaccgtcctcctgtcagtggggatgatctcctgaagggcatattctttgaggtaaagaagaagtttgaga

SEQ ID NO: 59988 - DNA, 264 bp, Zea mays
ccccggaccagcagcggctgatcttcgccggcaagcagctggaggatggtcgcaccttggctgactacaacatccagaaggagagcaccctccatctggtgctccgcctgaggggtgtatgcagatctttgtgaagaccttgactggcaagaccataaccctggaggttgagagctctgacaccatcgacaacgtgaaggctaagatccaggacaaggaggggattcccccagaccagcagcgtctgatcttcgccggcaagca

SEQ ID NO: 59989 - DNA, 262 bp, Zea mays
atgttccggattctacctatgatatgattggaggccttgaccagcaaattaaagagatcaaagaggtcattgagcttccaatcaaacatccggaactgtttgagagccttggaattgacaaccaaagggtgtccttctttatggacctccgggcacaggaaagacattgttggcacgtgcggttgctcatcacactgactgcaccttcatcagggtgtctggttctgagttggttcagaagtatattggtgagggctcccgg

SEQ ID NO: 59990 - DNA, 262 bp, Zea mays
tgatgacacagccgtgaaggtggttgatattgttgacacattccgtctacaggagcaacctccttttgacaagaaatcatttgtctcttacattaaaaaatacatcaagaatctcactgctgtgttggagccagagaaagcggatgagttcaaaaagggtgtcgagggtgcaaccaagtttctccttagcaagctgaaggaccttcaattttttgttggtgagagcatgaaggatgatgcgtccgtggtattcgcctattac

SEQ ID NO: 59991 - DNA, 265 bp, Zea mays
ggaaagtttttataaaggtctgtgtctttctctgatattctcagtttctcagtctctactgtatatctgcttctaattatatgtgctcttatccctgttcttggtgcaaaaggtgatatgattttgtgggtggtttcattcattggaatgctcttcaattttcttacgcttatttacattggtgtaatgctttctctgttggttccaccactctatgagaagtaccaggaccaggttgatgagaaggttggtgtagcgtacagtg

SEQ ID NO: 59992 - DNA, 251 bp, Zea mays
agaaggtcgccgcctgcaagactggcaaagcgcgccttgaggagctgttcaagaccggcaagaacaggtggttctctaccaagctccgcttctagatgctcggcctcccgaatagtcctgcttagctgtcgatttgttgtatcggacacactccatctctgtattcgtattaccatgaatatttcgtgtttagtcctggggctctcagagataaatttgctacgatatgccgttgttgtgatacatgtctt

SEQ ID NO: 59993 - DNA, 266 bp, Zea mays
ccctgctgcaaagaaggataatgctgagggacaagaggttgaggcagcagctgaggaaacgaaaaagagcaaccatgtcacgaggaagcttgagaagcgcaaggagggacgtacccttgcccacacattgaggagcaatttggcagtggacggttgctggcatgcatttcttcccgccctggacagtgtggccgtgctgatgggtacatccttgagggtaaagagcttgagttctacatgaagaagctacagaggaagaagggcaa

SEQ ID NO: 59994 - DNA, 264 bp, Zea mays
gcaagacgctcgtcgccaggaacgtcatcccggccaactggaggcccaacaccttctaccgctccttcgtccagtacagctagctagctagctggtttgcgcccctagttcaccaccaccactactaccaccgccacccactagactactgcttctgctaccaaatactacggcggaacggaacggctggttgccgccgccgccgtcgtccttggaaaggttgaggcgtctcttggtcatccgtatcgttaccgttgtcatggt

SEQ ID NO: 59995 - DNA, 262 bp, Zea mays
aaatctgatttggcggaaaaagatatcccagctttggctgatatagttggtgatgaggacaaggctaaagaaattgttgaagcagcaaaggcttcaatgggccaggatctgtcaccagttgatttgatcaatgtccagcaatttgcccaaagggttatgaatctctctgagtatcgcaaaaacctttatgaatatctcgtgactaagatgaatgatattgcgcccaacctgacatcattgattggtgaagtagttggagctc

SEQ ID NO: 59996 - DNA, 268 bp, Zea mays
atcaaccgagaggtttatccaagcattggccttgccttccgcacgatctataagacggatggtataggtggtttctatgctggcctgtggccaacgctgattggtatgattccttacacacatgttacttctttatgtatgaaacgatcaagacctcttactgccgcttgcataagaagtcgtctctgagccgccctgagcttctacttatcggcgctctttcaggtcttactgcaagcacaatcagcttccctctggaagtagcaag

SEQ ID NO: 59997 - DNA, 272 bp, Zea mays
cggtgttgataccgtgccagtacttgttggaccagtctcgtacctgttgctctcaaagcccgccaagggtgtggagaagggattccctcttctttcccttcttagcagcatcctcccagtctaaaggaggtcattgctgagttgaaggcagctggggcttcatggattcagtttgatgagcccactcttgtcctcgaccttgattctgacaaattggctgcattctctgctgcatacgcagaacttgaatctgtactttctggattgaatgt

SEQ ID NO: 59998 - DNA, 155 bp, Zea mays
actgaaactgtgcttcgccaagcccttggtgagaggattaggccagttctcacggtgaacaagatggacaggtgcttccttgagcttcaggttgagggtgaggaatcgtatcagactttctcccgtgtcattgagaatgccaatgtcatcatggc

SEQ ID NO: 59999 - DNA, 288 bp, Zea mays
ctcaccgacaaggttgctgctgtgcaaaaggtcatagagaatatgcaagagcaggtctcctatccagctgaccaacaagtccttatacatcaaggaaaggtgctcagcgatgacaccacattagaggaaaatcaagtgactgagaataatttccttgttataatgctcagacagaacaagggatcatcaagtgcagcaccggctaagacaactgcgaatcaggcacctcctactcagacagtgcctgttgttccacctcaaacgtcagcagccccagctgcaccagca

SEQ ID NO: 60000 - DNA, 154 bp, Zea mays
acgcaattggaaaggatgttcaggccatgaaggcagtcgttggagaggatgcactctcgtctgaggatctgctttacttagagttccttgacaagtttgagaggaagtctgtgacacaaggagcatacgacacacggaacatcttccagtcact

SEQ ID NO: 60001 - DNA, 226 bp, Zea mays
tgtggactgctgtttgattccagagtctccattttatctggatggagagggtggattgcttcaatatgtagagaagaggctgaaagagaacaagcacatggttattgttgttgctgagggagcagggcaggatcttatcgcgaaaagtttagccacatcagatcaacaagatgcgtctggaaataagctgcttcttgatatacgtctttggctgactcacaagata

SEQ ID NO: 60002 - DNA, 286 bp, Zea mays
gggcgatgtgaaattaacaatggaggatgctggaaagataccaagaatggtcggacatactctgcctgtaatgatgatggctgcaaatgcccagatggattcaagggtgacggtaggcacaaatgtgaagatattgatgagtgtaaggaaaggactgcgtgtcaatgcaaagaatgcaaatgcaaaaacacatggggaagctatgagtgtggctgcagtggaggcttgctttacatgaaggagcatgatacatgcataagcaaaagtggagcatcagaagcaggtt

SEQ ID NO: 60003 - DNA, 285 bp, Zea mays
acgcaattggacaggatgttcaggccatgaaggcagtcgttggagaggaggcactctcgtctgaggatctgctttacttagagttccttgacaagtttgagaggaagtttgtgacacaaggagcatacgacacacggaacatcttccagtcactagatcttgcatggacattgcttcggatcttccctcgcgaacttctccaccgtatcccggcgaagaccttggaccagtactatagcagagatgcctcccactgaatcactgatcgttgatcagtgttccaat

SEQ ID NO: 60004 - DNA, 144 bp, Zea mays
agtactgaaaccaccccggcgagctacatcgactcaaccggctgaaaacttgctactgtacatctcttgcacaactcacgtggtaagcaccgcgttggtagtcgagcgagtagaagaaggacatgcttatccagtacaacatcc

SEQ ID NO: 60005 - DNA, 300 bp, Zea mays
gcggtgtcaaggttgagttggtgaaggattttcaaatgggtgtctccaacaaaactccagagttcctcaagatgaaccctattgggaagattcctgtcctggagactcctgatggtcctgtttttgagagcaatgcaattgcaagatatgttactcgcttgaaggctgataacccactttatggatcttcactgattgattatgcccatattgagcaatggattgactttgctgcaacagagattgatgcaaacattggaaagtggttgtacccacggatggggttttatccccatgctg

SEQ ID NO: 60006 - DNA, 283 bp, Zea mays
caagcctgtgaagaaaaagaagatcaaaagagaaattaaaattcttcagaatctttatggaggccctaacattgtgaagctgcttgatattgttagagatcagcattcaaaaacaccaagcttgatctttgagtatgtcaacaacacagatttcaaagtcttgtacccgacactaacagattatgacattcgatattacatctatgagttactcaaggcattagattactgccattcacaaggtattatgcaccgagatgtgaagccccacaatgttatgata

SEQ ID NO: 60007 - DNA, 279 bp, Zea mays
ggcagcgtggcaacgagagcaacgaagtattcaaaccgaaaacaatggagccggtgcggaagagcgtgtgcgtgaccggcgctggcggcttcgtcgcgtcggagctggtgaagctcctcctcccccggggccaatacgcggtccgcggcaccgtgcgcgaccctggtgctagcaagaatgcccatctcaaggtgctggaaggagctgaggaaaggttgcagcttctcaaggctgatctgatggactacaacagcattgcatcagcagttgccggctgtg

SEQ ID NO: 60008 - DNA, 259 bp, Zea mays
gaaacagaagtctgtgccccacctacataactcttttgattattacagcctgcagcaaggtcaactggtcctggaggtcctagtgtggcctgcagcactgccaaagctgttgaatgggacgcatcctggtccaagaaccttgatccttctggccgtgctgctttgggtgttcacgatgctgcgtatgaagacactgcagggaaaactcctgcctctgctgatcctgtctcagacaagggccttcgtccagctattggcg

SEQ ID NO: 60009 - DNA, 278 bp, Zea mays
gttggtgcctctggggctttgtttggcctccttggatctatgctttcagagcttattataaattggactatctattccaacaaggcagcggcaatcataactctactttttataattgtaattaatctggccattgggatattacctcatgctgataattttgcccacattggtggatttgcttctgggtttcttattggatttgtgctgctggcaagacctcaatttggttggatggaacgcagcgagctacctcagactagtcaacctccaaagta

SEQ ID NO: 60010 - DNA, 148 bp, Zea mays
tgctcccctgccgccgccgccatgggacactccaacgtgtggaactcgcaccccaagaactacggccctggatctagggtttgccgtgtgtgcgctaacccccacggcttgatccgaaagtacgggctcatgtgctgcagacagtgct

SEQ ID NO: 60011 - DNA, 277 bp, Zea mays
aagctgaggtcgaatctcctcggcacaaagtttgcaatatatgatacccagcccccatgcaatgcagcagaactcgggaaaacaagccgtcggttctactcccggaaggtgtcgccaaaggtctcctccagcacctacaacatagcgcaggtttcatatgagctgaatgtgttgggtactcggggccctaggcggatgaactgtgttatgcactccatccctacctcgtgccttgaggctggtggcactgttcccagccagctggacagcatccttg

SEQ ID NO: 60012 - DNA, 280 bp, Zea mays
aagagctggctcgccccctcatgcttccgcctcgcgtggcactccgcggggacgttcgacgtgtcgtcgaggaccggcggtcccttcggtactatgaagtgcccggcggaactggctcacggcgccaacgcggggctggacatcgccgtgcggctgctcgagcccatcaaggaggagttccccaccctctcctatgccgatttctaccagcttgccggagttgtggccgtcgaggtcaccggtgggcctgagatcccttccaccccggcagggaggacaa

SEQ ID NO: 60013 - DNA, 273 bp, Zea mays
tgacaacatgattgagaggtccaccaaccttgactggtacaagggcccaaccctacttgaggctttggacttgatcaatgagccgaagaggccttcagacaagcccctgcgtctccccctacaggatgtgtacaagattggtggtattggaactgttcctgttgggcgtgttgagactggtatcatcaagcctggtatggttgttacctttggtcctagtggccttactactgaggtgaagtctgttgaaatgcaccatgaggctctccagga

SEQ ID NO: 60014 - DNA, 278 bp, Zea mays
aatcaagatttgtggtcgttgatataaagaagaaccatctgaaggttgttctgaagggccagtcacctatcattgatggtgagctctataagccagttaaggttgatgattgcttctggagcatagaggatggaaaaactctttccatattgcttacaaagcacaaccaaatggagtggtggaagtctgttataaagggtggccctgaagttgatacccaaaaggtggaacctgagaacagcaaactctctgatttggatcctgagactagacaaact

SEQ ID NO: 60015 - DNA, 280 bp, Zea mays
gagacaccccaatgcagtgatgatatggaacagtgccatatctgcctaaccgaatatgaggacggagaccagataagaacccttccgtgcaagcacgagttccacctgcaatgcgttgacaagtggctgaaagaaatacacagggtgtgccctctgtgccgtggagacgtctgcgaagtcgcctcgtgaagaccttggcgctgccatccttccgttgcggcaccggtggatagggcaccaccgccaggcgccagctgttccgtggttgaagctggttcgg

SEQ ID NO: 60016 - DNA, 273 bp, Zea mays
gccaggggtgcccgaaacgaacttcaacaaccggccgaactcgttcaaagtcctttctccgccccgcacctgtgtggcttattaccgtgtagacgaagcaggggctggacgacgtcttcacgcgatagcagagacaggaaagacgtctccagcagagagcatcgacgtcaaagcttccagagctagtagcaaagaagacaaggaggcaacggctggtggcaagaagggatggaagtttgcgcggcagccatccgatcaagataccaaatgaag

SEQ ID NO: 60017 - DNA, 276 bp, Zea mays
gatcactggcacttcccaagctgactgtgctgttcttatcattgactcaaccactggtggttttgaggctggtatctccaaggatggccagacccgtgagcatgctctccttgctttcacacttggtgtgaagcagatgatttgctgctgcaacaagatggatgctactacacccaagtattcaaaggcccgttatgatgagattgtgaaggaagtctcttcctacctgaagaaggttggatacaaccctgataagatccacttcgttccaatctc

SEQ ID NO: 60018 - DNA, 266 bp, Zea mays
gaatcaggtaagctcagagtatgcattgattttcgcaatttgaatagagaaactcctaaagatgaatatcccatgcccatagccgacacattgatcaataatgtgtcaggacatagaattattagctgtcttgatggtaatgctggatataatcagattttcatggccaaagaagatgcgtctaaaacagcctttatatgtccaggcttcattggtttatttgagtgggttgtcatgacatttggtctgataaatgctggtgctac

SEQ ID NO: 60019 - DNA, 292 bp, Zea mays
aaagtatctcatcatacacagcattctctcgcattgtgcttattctacgtgcacttcatgtgaataatgagaaggcaaagatgttgctcaaacctgacaaaacaattgttactgaaccacatcatatatggccaactctgaatgatgaacagtggttgaaggttgaatgtgcactaagggacctcattctttccgattatgcaaagaaacacaatgttaatacttctgcactcacacaatctgaaatgcgagatatcatccttggtgctgaaattgctccaccatcacagca

SEQ ID NO: 60020 - DNA, 292 bp, Zea mays
catgatcagatgatcatgttagaagcagctaaagctacaacagagactgttgatgcattgagaactggagctgcagctatgaaagcaatgcaaaaagcaacaaacattgatgatgtagacaagaccatggatgaaattaatgaacagactgaaaatatgaaacaaattcaggatgctttgtcagctcctctcggagcttctgctgatttcgatgaggatgaactggaagccgaacttgaagaactggagggagcagagttggaatctcagcttctggagcctgttgcagctc

SEQ ID NO: 60021 - DNA, 293 bp, Zea mays
acatgtgatcctcatgccagcaagcttgtggtaaactcagatactcctcaggaggttgaagccgggaagggaatcatatttacctatgatgcaggcttcgaggagagtgatatcaagtgggcttctcgctgggacacctacttgttaatgatagatgatcagattcactggttctctatcgtgaactctctcatgatcgtactcttcttatctgggatgctggcaatgattatgctccgcaccctttatagagatatctctaggtacaatcagcttgaaactgaagaagaagc

SEQ ID NO: 60022 - DNA, 300 bp, Zea mays
tagtgagcgcttcacaaacttctgtcaagggaaactcacaagcagcccatggtcagaattggacggtcatcgataatctttgtctctggttgaagaccagttggtgaatattaaccagaagggtttccttacaattaacagccaacctgctgtaaatggagagaaatccgactcgcctactgttggttggggtggtcctggaggctacgtttatcagaaggcctacctcgaattcttctgcgcaaaggagaagttggaccaactaattgagaagatcatagcattcgcttctctcactta

SEQ ID NO: 60023 - DNA, 298 bp, Zea mays
tgctgttctcatggtttgcagaacctgtgggaagaagggcgatcactggacctcaaagtgtccgtacaaggacctggcaccaccgactgaaactttcacggacaggcctccaacgtcagatggccctcctgcaccaggtggtcctgctaagggagcatatgttcctccaaccatgacaggaggtgctgataggactggagactcgatgcgccgcatgaacgacgagaattccgtccgtgtgaccaacctctcggaggacacccgcgagcctgacctccttgagctcttccgtgccttt

SEQ ID NO: 60024 - DNA, 300 bp, Zea mays
aatctccagaagttcatctagactctcctttgtctcgacatttgatgcatttttatgaacgcatgggtgacacacttgctttacagtatggtggttcggctgctcacaataagatattctctgcgaaaagagggcacttgaagtttgccattcaatctcaagagttctttaggacactgcaacggtactacagtaatgcatatatggatgcttacaaacaagctgcgataaacttatttttaggatacttccagccacaggtgggaaaacctgcactttgggagccagaatctggtgatg

SEQ ID NO: 60025 - DNA, 301 bp, Zea mays
acttcttctacgccactgagtacccagagcaaccaatggttaaccttgagatgtgcatgactggtctggacaagaagaaagcttgtgtctttttcaagactaatgctgatgggaacacaacatgtgccaaggaaatgacaaagctctctggcatctctgaaatcatccccgagatggagatctgcgattttgacttcgaaccctgtggctactccatgaatgcgatccatggctctgcattctccacaatccatgtgacgcccgaggacggtttcagctacgccagttacgaggttatggg

SEQ ID NO: 60026 - DNA, 301 bp, Zea mays
gttccagactagactggtgccctaccctaggatccacttcatgctttcgtcctacgctccagtcatgtctgctgagaaggcctaccacgagcagctgtccgtggccgaaatcaccaacagcgccttcgagccatcctccatgatggccaagtgcgacccccgccatggcaagtacatggcatgctgcctcatgtaccgtggtgatgtggttcccaaggacgtgaacgctgctgtggccacaatcaggaccaagcgcaccatcaagttcgtggactggtgcccgactggcttcaagtgcgga

SEQ ID NO: 60027 - DNA, 294 bp, Zea mays
tcgttgtcaaaagcaaggacatttggattgtggacttctttgcgccatggtgtgggcactgcaagaaattggcacctgaatggaaaaaggctgcgaagaacttgaagggccaagtgaagctaggccatgttgattgtgatgctgaaaagtccttgatgagcacgtacaaggtggaaggttttccaactattttggtatttggtgctgataaggagagcccgttcccctaccagggggctagagttgcatctgccattgaatcctttgcattggagcagttggaagccaactctg

SEQ ID NO: 60028 - DNA, 157 bp, Zea mays
agctcgaagatattgttccttcgtcacacaactgtgatattccgcatgtgaaccgtactgagtatcagctgattgatatatcagaggatggatttgtgagcttcctacttcagatgggaacactaaggatgatcttagactcgcaactgatgagact

SEQ ID NO: 60029 - DNA, 296 bp, Zea mays
cagcaagtaaacgtgtcatccttggaggatgtcataaagcactttatgcagctttccaatgagaaagctgaacaagctaagagtcaggtagaagccctggaagatgctctggatgttgaagatctggaagcagacaagcgtcccgaggacctcatgctcagttttgttagtggggagaaaggaaaggaccgatcagataaagaggttgtaactccatggtttaagttcctctgggagacatacaggactgttctagagatactgaggaacaattcaaagcttgaagcgttatatgc

SEQ ID NO: 60030 - DNA, 295 bp, Zea mays
gtctccctagcaatctctagcagcagatcctcgtgcgaagcaaagcgctagccccttcgtactgtcccgatggcccgcacgaagcagacggcgtggaagtccactagcggcaaggcgccaatgaagcagctggccacgaatgcggcgcgcaagtctgccccggcgaccggcggagtgaagaagccccaccgtttccgccacggcaccgtcgcgctccaggagatccgcaagtatcagaagagcacggagctgctgatccgcaagctgccgtaccagcgcctggttcgtgagatcg

SEQ ID NO: 60031 - DNA, 295 bp, Zea mays
cttattctctgcaggactatgagtatgcgagttttaacccagttgcattcgacattgctaatcacttctgtgagatggctgctgattaccatacagcaacaccacatgtgttggattttacgaaatatcctgacactggggagcagagaagattcgttgaggcataccttagctctgcaggtgaaaagccaacggatggggaagttgaagaactgctagggttgattgcaagtacactcttgcgagccactcttctggggcctgtggggaataatctcggtgagccacgacacta

SEQ ID NO: 60032 - DNA, 290 bp, Zea mays
cagctttgatgagcttgggacattactggggattgatccaaggaaggctgagaagatagcatctcggatgatttatgaggatagaatgcggggctcaattgatcaggttgaggctgtgatacattttgatgatgacacggaagagctgcagcaatgggatcagcagattgctggactgtgccaagccctgaacgacatccttgacagcatgtcaagcaagggaataactattccggtgtgaataaatatctcatgctgtcggtcgatggtgcatggcagaactgcttaca

SEQ ID NO: 60033 - DNA, 289 bp, Zea mays
gttgctagtactattggacaatatggtaatggtttcaagacgagtacaatgaggcttggtgctgatgttttggtcttctcccgtagtcctggaaaatcaggcaaaaggcctactcaaagcattggcatgctatcttatacatttcttaggagcactggcaaagaggacatcattgttcctatgattgattatgaatataaacaaggctgggaaagaatggtccggactacattggatgattggagcacaagcttccaaaccatcattacatggtctcgatattcaactg

SEQ ID NO: 60034 - DNA, 279 bp, Zea mays
ggctcgagcggctcgaggaaggcacctgaaacgcatttggagatccacaggcaaatggtttctcaagcggcaacacaagcatcctcagcctcaaatccaaggcaatcaaggaagaagaaggacaatgacttctggtacgatgtttgtggatgggtgatccttggcgccggcattgacgcttgggttcgattggcaagagcaagcatgcctcccccgacgccaccagccacgtgagaactgatcgagtgacgagtgccaagaacgctttgcaaatgatgg

SEQ ID NO: 60035 - DNA, 294 bp, Zea mays
tgagccacatcagattcatacgttttacgaatcagttggccatatgatccaagctgaatctgacaacactaatagggatgaatacctcaagagattgatgagccttcctaaccagaagtgggcagaaataatcggacaggcaagccaaagtattgatatcctgaagaaccaagatgttatccgatcagttctcaacattctacagacaaacacaagtgttgcgagctcacttgggccacacttcttcccacagatttcactaattttcttggacatgctaacagtctacagaat

SEQ ID NO: 60036 - DNA, 276 bp, Zea mays
gataaattcacaacagtaggaggttatgagcatactgcagaggtaatttatggggacactgattctgtgatggtacagtttggtgtttctacagttgaagatgcaatgaagttaggaagagaagctgcagattatattagtggaacctttaccaagcccatcaaactggagtttgagaaggtctattttccttaccttctaatcagcaagaagagatatgctggtttgtactggacgaatcctgagaaatctgacaaaatggatgcaaaagtaatg

SEQ ID NO: 60037 - DNA, 168 bp, Zea mays
tgacttcatcaagaacatgatcactggtacctcccaggctgactgtgctgtccttatcattgactccaccactggtggttttgaggctggtatctccaaggatggccagacccgtgaacatgctctccttgcgttcacccttggagtgaagcagatgatttgctgctg

SEQ ID NO: 60038 - DNA, 292 bp, Zea mays
gttcactgaggaacaaaatgagctcgtagaatcagctgcagagatgctttatgggctgatccatgcacgatacattctgaccagtaaagggctggctgcaatgctggagaagtataggaactatgacttcgggcggtgcccgcgtgtttactgctgtggtcaaccatgcctgccggttggacaatcagatattcatcgatctagtaccgtgaaaatatactgccccaagtgtgaagacatctactacccacggtccaagtaccaaggcaacatcgacggcgcatattttggg

SEQ ID NO: 60039 - DNA, 173 bp, Zea mays
agcacttaaggctgtactgttgctgtcaaagatctcaaacaaaaacaaccttgttggggatccaatagaaagagaaaggttgcatgacgctattgattgccttctatcttttgcgaacaaagatggcaccttttctacatatgagtgcaaaagaacttattcttggttagaga

SEQ ID NO: 60040 - DNA, 166 bp, Zea mays
catctacaccatcgacgacgactgcttcgttgccaaggacccatcaggcaaggatatcaatgctcttgagcagcacatcaagaacctcctcagcccgtccacaccgttcttcttcaacaccctgtacgacccctaccgtgacggtgctgactttgtgcgtggatac

SEQ ID NO: 60041 - DNA, 158 bp, Zea mays
gtggcaagaaaaagaccgtcgaccctttctctaagaaggattggtatgacatcaaggcaccgtcggtgttcagtgtgcgcaacatcgggagagctctcgtatccaggacacagggtaccaggattgcgtctgagggtctgaagcacagagtctttgag

SEQ ID NO: 60042 - DNA, 289 bp, Zea mays
cctcgcccgcccaaatacgaaagcctcagatctcagtgaccagcgccgccgcttcgttcgtgtcgaggggagaagaggaaatggcggcgagcgagggcgtgctcctggggatgggcaaccccctcctcgacatctccgccgttgtcgatgacgccttcctagcaaagtatgacatcaagctgaacaatgccattctcgctgaggagaagcacttgcctatgtatgatgagttggctagcaacagcaatgttgaatatattgctggaggagccacccagaactctatcag

SEQ ID NO: 60043 - DNA, 288 bp, Zea mays
ttcacgtgcagctgtcgggagcaggcaatggcgccggatctaagcgaactcgccgccgccgctccagcccgtggcgcctacctcgccggcgtcggtgtcgcggtcctcctcgctgcctccttcctcccagtagccgagtcgtcctgcgtgcgagataactcattggtgagagacataagccaaatgccgcaaagcagctatgggattgaaggattgtcacatataacagttgctggtgcgctcaatcatgggatgaaggaggtggaagtgtggcttcagacaataagt

SEQ ID NO: 60044 - DNA, 291 bp, Zea mays
cacttcatataccactccctaggaggacccagcaacacacacagccgagctttgtttaggcaagatgaacaggaagccaggagactgggactgcagggcgtgccagcacctcaacttcagccgccgagacatatgccagcgctgcagcgagccacgtggagttgctgatcgtggcggcggaggaggaggaggcgactacgccagcttcggtggccgcggtggctcctccttcggcggcggctttggcgctgctggctccgacgtccgccctggtgactggtactgctcctg

SEQ ID NO: 60045 - DNA, 291 bp, Zea mays
accatgagctgctgatagaaattgataaaataaatatggaaccaaagatagtacagatcattcctgatgacatgtctgtagatatactgattgagaggatggagtcctccagagatacagtttgttctccaaccttgatatggctaattcagcaatgccaacaccagtctataatcaatgctttgagacgatcattggtgaatgatgctaatagttcgaggcattgttttgagtacttaaacaaaaaggagatgattgttgctcacttagatcgtggtattgatgtctcca

SEQ ID NO: 60046 - DNA, 162 bp, Zea mays
cacaaagtagtgattgccttggtgctgagaatctaattagattgctcaagaattattccagaagccacgagctcaaactggcaattacggtgggtattgttggactccctaatgttggcaagagcagtctgatcaacagcctgaagaggtcccgagtggtta

SEQ ID NO: 60047 - DNA, 286 bp, Zea mays
ggtcttcttaagccctgcagaggtatattactctttggtcctccaggaaccggcaagactatgcttgccaaggctatagccaatgaagctcaagcaagttttataaatgtctctatgtcaactatcacatcaaagtggtttggtgaagatgagaagaatgttcgagcactgttcacgttagctgctaaagtatcaccaaccatcattttcgtcgatgaagttgatagcatgcttgggcagcgtaacagagctggagagcacgaggcaatgaggaagatcaagaatg

SEQ ID NO: 60048 - DNA, 287 bp, Zea mays
tgctgattcatcaaagtgtgttgtactagacattgaggggacaaccactccaatatcatttgtgactgatgtcatgttcccttatgctcgtgataatgtacgaaaacatctgacttctacatttgattttgaggaaactaaagaagacatcaaactattgcgcatccaaattgaagatgatctacgaaatggagttgctggggctgttccagttccacctgatgagggtggcaaagaagaggttatcaattcattggttgccaatgttgaatcaatgattaaagcag

SEQ ID NO: 60049 - DNA, 288 bp, Zea mays
aagctgtgtgaagatgttgcaataaacacagtggcaaatactttggcactggctgaacagcaccactgctatcagctaaaaactgtttgcttaaaatttgtggctctgcctgagaatttgaaagctgtcatgcaaaccgatgggtttgattatttgcagcaaagctgcccatccctcctgaccgagcttcttgaatatgtggccaagataggagagcactccgtgagcccctgcctgtattcaactgaagtccttgatggtggagatgccaatggacgacgcgtgaaa

SEQ ID NO: 60050 - DNA, 274 bp, Zea mays
gtggcttgaagaatataaatttgatgggtttcgatttgatggggtgacctccatgatgtatactcaccatggattacaagtgacattcactgggaactatggcgagtattttggatttgccactgatgttgatgcagtagtttacctaatgctggtaaacgatcttattcgtgggctttatccagaagctgtatccattggcgaagatgtcagcggaatgcctacattttgtatccctgtccaagatggtggtgttggttttgattatcgtctt

SEQ ID NO: 60051 - DNA, 278 bp, Zea mays
ccctctgttcaagcggagagagagtgatagagagagagagagagagagagaagaagcaacaagagcgaacgcaaaaagtacggtacagctcctgagatggcggcgccggcgccgaagcaggaggagctgcagccgcacgccgtcagggaccagctgccttccgtctcctactgcctcaccagcccgcccccatggccggaggcggtcctcctcggcttccagcactacctcgtcatgctcggcaccaccgtcatcatccccaccgcgctcgtccccca

SEQ ID NO: 60052 - DNA, 284 bp, Zea mays
agtgaatcctcgcagagcgacggcggcggcaccgacgagtttatgctagtgaaattagcagagatacggaaggaggttcagtgccctatctgcttaggcattatccggaagacaaggacagttatggaatgtttgcaccggttctgtagagactgcatcgacaaatctatgcgactaggaaataacgaatgcccagcgtgtcgcacccattgtgcaagcagacgttctttgagggatgatcccaattatgatgcactgattgcagccctgtatccagatattga

SEQ ID NO: 60053 - DNA, 272 bp, Zea mays
atcaagttgtggcccttcaaggtcatttctgggcctggtgagaagccaatgattgttgtccagcacaagggtgaggagaagcagtttgcagctgaagagatctcctctatggttcttatcaagatgcgtgagattgctgaagcttatcttggtagcacgatcaagaatgctgtggtcacagtccctgcctacttcaatgactcacagaggcaggccacaaaggatgctggggtgattgctggccttaatgtgctgcgtatcatcaacgagcc

SEQ ID NO: 60054 - DNA, 271 bp, Zea mays
caaccgagctattgtaatagatgaattagcttctgaattgggcctcagtccttcagtgccactgcatgtcgttctgcaagattggatcaggcatacggatgggaaattaagttttcttggatttgtcaagttgttgcatggcatgtccagcaggtccctgtcaaagatgagatagctgtcgataatctctaacgacagcgcgtgtttacaccgtcctgttgacttggttcacaggcaaattaacagggctaaagaatcgtacgattggagc

SEQ ID NO: 60055 - DNA, 275 bp, Zea mays
aaataatgttgctcaaatatgtgtttttgagcttaatggaacacacaaatttgtactcgggaatattcatgttttgtttaatccaaagcgcggtgatgtaaaactgggccagattcgcatgctacttgagaatgcaaatgctcttgctgaaaaatgggataaaattcccatcgtgcttgccggtgatttcaacagcacacctgatagtgctatctacaagttcttgtcgacaatgaagctgaacatttctttgcacgatagaaggcatttatctg

SEQ ID NO: 60056 - DNA, 277 bp, Zea mays
cggctcgagggaagatatctacgctggtgctcatattgtaatagacacagctgctgctcatgagaaaatattggcactgattgaggcaggtaacatagaaccatcagaactaattgcagatatggatgcccagatagcaaaagcaaaggaagaagcattgagtagaaaagatatccttgataaagtagaaagatggatgtctgcgtgtgaagaagaaagctggcttgaagattataaccgggatgacaacaggtataactctagccgaggtgcccac

SEQ ID NO: 60057 - DNA, 276 bp, Zea mays
gttggcttctcctcccccaccggttcgtgttcaggttctggttcgtgggcgagagggaagagatggcggcgtcggacgttgagtaccgttgcttcgttggcggcctcgcctgggccaccgacgaccactccctcaacaacgccttcagcacctacggcgaggtcctcgagtcgaagatcatcctggatcgggagacgcagaggtcccgcggcttcggcttcgtcaccttctccacggaggacgcgatgcgcacgaccatcgagggcatgaacggca

SEQ ID NO: 60058 - DNA, 280 bp, Zea mays
cgtttttcagggtgacgatagacctggtcgagatggtgttcgccaagggtgatcctggcatcgcggcgctgtacgacaagcttctggtttcagaggatctgtgggcattaggggcgcgtctcagagccaactacgaagaaacaaagcagcttctcctgcaggtcgctgggcacaaggaccttctggagggcgacccgtacctgaagcagaggctgcgcatccgtgactcgtacaccacggcgctgaacgtttgccaggcctacacgctgaagcgcatcag

SEQ ID NO: 60059 - DNA, 273 bp, Zea mays
aggaactgtatgttggaagagcacagaagaagtctgaaagagagatggagttgaaggagaaatttgaaaagaatgttcaagaggtagctgagaagttccaaaacacaaacttgtatttgaagaacttagaggagaacattgatgatgagaaattgcgtgaactctttgctgagtatggcaatattacttcctgcaaggttatgcgggattcgaatggtgtcagcagaggttctggataagttgctttcaaatctgctgaagatgctaaccgag

SEQ ID NO: 60060 - DNA, 270 bp, Zea mays
attctttattgtgtccttatccgtaaacatggtaatgacactcataagtgcaatatagtaatcgcagtatggttgtatgaaacttagaggttgtacaagttgtactgacaataagctgggaatactgtaatctttcagctactgctaggacagtaggccacttgtccaagagcactgaagtgatgaaacttgtcaacagcctcatgaaagccccggaggttgcagccacaatgcaggaattcagcaaagagatgacaaaggctggtgtga

SEQ ID NO: 60061 - DNA, 268 bp, Zea mays
gtcactttttatctgcatttttgctacgagcatcctagaaatgagatggagtggtgttggaattgatgactggtggaggaatgagcagttctgggtcattggaggtgtgtcctcacacctctttgctgtgttccagggacttctcaaggtcatagctggtgttgatacaagcttcaccgtgacatcaaagggtggagatgatgaggagttctcagagctatatacattcaaatggactaccttattgatacctcctaccaccttgctt

SEQ ID NO: 60062 - DNA, 268 bp, Zea mays
agagatcttgcaggcggctcgttggcagcagtttctgttcacgctgaaagtcaaggaggagatctataatgatgcgccgcaagtcaagtgcaacattactaaagcagagaagctggatccggcaatagagagattcttaccttctaggggtaatcaatggcctgttgcaggatgacactggctcatcttctggggcgcaaggtgccatggcctacaatgctggtatcagcaacactggcgctggacgaatgtgccaacctccaacatg

SEQ ID NO: 60063 - DNA, 276 bp, Zea mays
aaggaagccaaaaaggaggtcccgaagcctaaggaagctgagaaaccagcagaggaagaggaggctccaaagcctaagccaaagaatccccttgatttgcttcctccgagcaagttgattcttgacgattggaagaggctgtattctaacacgaaaaccaacttccgtgaggttgctattaaaggtttctgggacatgtatgacccagagggctactccctgtggttctgtgactacaagtacaatgacgagaacacagtgtcgtttgtgactatg

SEQ ID NO: 60064 - DNA, 270 bp, Zea mays
gaacgactacctggctgtgactgcggcgaacacgcgacattcctgccgcactccgcggggcgctactccaagaagcggttccgcaaggcgcagtgcgccatcgtcgagcgcctcaccaactcgctcatgatgcacgggcgcaacaacggcaagaaggtcatggccgtccgcatcatgaagcacaccctggagatcatccacctgctcactgacgccaatcccatccaggtggtcgtggacgccattatcaacagtggaccacgtgaggat

SEQ ID NO: 60065 - DNA, 266 bp, Zea mays
catcagctagagatgcagaaatggctgtaaaagcaggagctgagcttataggcatgatactatggcccaactctaaacgctctgtctcgttattggaggcaaaagaaatatcaagagttgcgcaatcttatggcgctgaatcagttggtgtctttgtggatgataatgaagagagaattctacgggtgtctgattcatgtgaccttaactttgtccagcttcatggtgatgaatctcgtgcattggttcatactctttcaaagaat

SEQ ID NO: 60066 - DNA, 267 bp, Zea mays
ggcattaaagtacaaaacggctatggccttactgagacttctcctgttgttgctgctagacgaccattctgtaatgttcttgggacagttggtcacccaataaagcatactgaaatcaagatttttgacattgagactggtgaggtccttccagatggttcaaaggggattgtgaaaattaaaggaccacaagtaatgaagggatactataagaacccatcggctacaaatgaagcttttgatcaagagggttggttcagcactgga

SEQ ID NO: 60067 - DNA, 267 bp, Zea mays
catggccaagttggctgagcaggctgaaaggtatgaggagatggttgagtatatggagaaggtggctaagactgtagatgtggaagagctcactgttgaggagcgtaaccttctgtctgttgcatacaagaatgtgattggggctcgccgcgcttcatggcgcattgtttcttccattgaacaaaaggaggagtcccgtaagaacgaggagcatgtgaatcttatcaaggaatatcgtggcaagatcgaggctgaactgagcaatat

SEQ ID NO: 60068 - DNA, 274 bp, Zea mays
agccttgaatgagctttatgtcgaagaggaggactacgagagactccgtgaatcagttgacatgcatgacaactttgaccagattggtcttgcccagaagcttgagaagcatgaaatgctggagatgaggaggatcgccgcctacatttacaagaaggctggcaggtggaagcagtcgattgctctatcgaagaaagacaacatgtacaaggactgcatggagacatgctcacaatctggcgaccgtgaactgtcagaggacttgctcgtgtat

SEQ ID NO: 60069 - DNA, 270 bp, Zea mays
gtctgctcgttcgatctgtgcagcagatctgaggtcccgggcgaccgtgaagcagcttcaatcgtcggcatggcgctcgtattgcatagtggggctggaaactagaatgccttcaaagcacttattgctgcagaatacagtgggatcaaggttgagttgaccaaggattttgagatgggtgtctccaacaagacccctgagtttcttaagatgaacccccttgggaaggttcctgttctggagactcctgatggccctgtttttgagagt

SEQ ID NO: 60070 - DNA, 132 bp, Zea mays
gaactgctctagtatttgcatttgtaattgaagtctgtcgctttaagcactcttggttctaaagatctctgtgcttttggggggtgtttttgcattgccccagattccaataaactcaccaaattcgggtcg

SEQ ID NO: 60071 - DNA, 276 bp, Zea mays
ggcgcgggcggacaaggagcaggcggaggaggagttgtgccaagccacaatgggtatctcgcgtgactcgatgcacaagcgccgagccaccggtggaaagcagaaggcctggaggaagaagcgaaagtatgagcttggtcgccagccagccaacaccaagttgtcaagcaataagacggtgaggagggtccgtgttcggggaggtaatgtgaaatggagggctcttcgccttgatactggtaactactcatggggaagtgaagctgttacccgcaa

SEQ ID NO: 60072 - DNA, 277 bp, Zea mays
ggcgcgggcggacaaggagcaggcggaggaggagttgtgccaagccacaatgggtatctcgcgtgactcgatgcacaagcgccgagccaccggtggaaagcagaaggcctggaggaagaagcgaaagtatgagcttggtcgccagccagccaacaccaagttgtcaagcaataagacggtgaggagggtccgtgttcggggaggtaatgtgaaatggagggctcttcgccttgatactggtaactactcatggggaagtgaagctgttacccgcaag

SEQ ID NO: 60073 - DNA, 269 bp, Zea mays
atctcctcgcattttccttgcaaccgattgccaatccccctcccaaccaaagaccgatggcgcccaaggccgagaagaagcccgcggcgaagaagccggcggaggaggagcccgcggccgagaagacgaccgccgggaagaagcccaaggcggagaagcgggtccccgcgggcaagtccgccggcaaggagggcggcgagggcaagcgtggcaagaagaagggcaagaagagcgtggagacgtacaagatctacatcttcaaggtgctg

SEQ ID NO: 60074 - DNA, 263 bp, Zea mays
ggctcgagatcaaaaccagatatgctggttatgggaaaaggtaaaatcaacagaagacagagattttcaaagattcctggacaacgtgcaattcaaaacaagtgggatattacgttacgagcgtgtctttggtgaaggttttgtgagcactggtggaatcgagacaacaaaggaatttgtgggcatgctcgatcttaaaccgggccagaaagtacttgatgtcggatgtggaattggaggcggcgacttttacatggctgcaa

SEQ ID NO: 60075 - DNA, 266 bp, Zea mays
ggccactgtggaggcatggcttccacaacaaagatgagaccctgggtgttatggaagtaatgcctccacagtggcctgatcttgtcctggccccacgacatcccagacagtgaagctgatgtggaggcattacttccagaacacccagggtctcatctttgttgtggacagcaatgatagggaccgtgttgttgaagcaagggatgagcttcaccgaatgctgaatgaggatgagttacgtgatgctgtgttgatcgtgtttgcta

SEQ ID NO: 60076 - DNA, 266 bp, Zea mays
ctctctcttgctcgcactcgcggagatcgaagagaagcgcaggaggccccagcactagcgccgccccgccgccgcatcagacatggcgctggccgctcgcctcgtctcgcgctcccgtcagctatattcggttcaagccactttggggaatggaggtgtcactcaagttcgctcctttgccaaggatgcagctccagctgaccgtcctcctgtcagtggggatgatctcctgaagggcatattctttgaggtaaagaagaagtttg

SEQ ID NO: 60077 - DNA, 261 bp, Zea mays
ccagcccaccacagacccgagcggaagaagccatgtccgggcgcggtaagggtggcaaggggctcggcaagggcggcgcgaagcgtcaccggaaggtgctgcgcgacaacatccagggcatcaccaagccggcgatccggcggctggcgaggaggggcggcgtcaagcgcatctcggggctcatctacgaggagacccgcggcgtgctcaagatcttcctcgagaacgtcatccgcgacgccgtcacctacactgagcacg

SEQ ID NO: 60078 - DNA, 268 bp, Zea mays
gctatcgatgcttcagatgggctggacacgcttgcaaaccttgcgattcttggtgaaggtgaagctctcccttcacagccaacaacaaaacatccccgccatcgtccgggctgctcatgcatcgtctgcatccaaccaccaagcgggaagggtccaaagcacaagcaaacttgcacctgtaacgtttgtatgacggttcgccgccgtttcaggacactcatgcttcgacgcgagaagaaggcgacaaaggatctgtctcgcaagaaag

SEQ ID NO: 60079 - DNA, 282 bp, Zea mays
aaggaaccaagacgtaccatgaatgcaagcgagtgtgttgcgcgaggatgcgctcttcaatgtgctattctcagccccactttcaaagtgcgagaattccaggtcaatgatgggtttcctttctcaattgcattgtcatggaatggagactcccagaatgcaccccaacaaacccttgtattccaaaaggggaatgcaattcctagcactaaagctcttaccatctttaaatccagcacatttgaagttgatgttttgtatgtcgacccagataactcacaa

SEQ ID NO: 60080 - DNA, 279 bp, Zea mays
cacacacactcgagaactccatttcgatcccatttgaaatcaacccatcctcgtttcctccgtctagcagcctctcaccctcatggccaagatcaagatcgggatcaatgggtttggcaggatcggaaggctggtggccagggtggccctgcagagcgacgacgtcgagctcgtcgccgtgaacgaccccttcatcagcaccgattacatgacctacatgttcaagtatgacactgtgcacggacagtggaagcaccatgaggtcaaggtgaaggactc

SEQ ID NO: 60081 - DNA, 183 bp, Zea mays
cggctcgagcacacgttcacggtagcgagagtttatcgtcgtcggcggtgaagatggtgtcgctgaagctgcagaagcggcacgacgctagcgtcctcaaatgtgggaaaggccaagtctggcttgacgccaatgaagtcaccgagatctccatggctaacgcccgccagaacatccggaagt

SEQ ID NO: 60082 - DNA, 278 bp, Zea mays
gacattcatatcagcagatgatctccgaataaatttatggaacttggaaataaacagccagagctttaacattgttgatgtgaagcctacaaacatggaagatctaacagaggtgattacatgtgcggagttccatccatcccattgtaatacactggcctatagtagttcaaagggttctatccgacttattgatctgcgtcaatcagcactgtgtgacaaccattcataaatatttgaggaacatgaagcacctggatcaagatccttctttacag

SEQ ID NO: 60083 - DNA, 277 bp, Zea mays
gactctaaaggatattttgacctactgatcaaggtttaccctgatggaaaaatgagtcagtattttgcaagtttgaagccaggagatgttgttgaagtcaaagggcccattgaaaagctcagatacaacccgaacatgaaaaaacaaattgggatgatcgctggtggttctggtataacaccaatgctgcaggttgtcagggctatcctcaaaaaccctaatgacaacactcaggtctccttaatttacgccaatgtgtcaccagatgatatattgc

SEQ ID NO: 60084 - DNA, 271 bp, Zea mays
gcacaaattgcatctggtggtggaaggatgtatgttacgatggaccgttatgagaatgactgggatgtggttaaacgtggttgggatgcccaagtgcttggagaagcaccctacaaattcaaaagtgcacttgaggctgtgaaaacactgagagcacagcccaaagccaatgatcagtacttgcccccatttgtgatagttgatgacagtggcaatgctgttgggcctgtattagatggtgatgcagttgtcactatcaacttccgagctg

SEQ ID NO: 60085 - DNA, 275 bp, Zea mays
ctggatcggatggaatttgcaaggattgtggtagaaaggcagacagcaaaggaagaattatctgtgacaggtgtgaagccgcgtaccatgtttcatgtctcaagcttgccattgatgaagaggccccagcaaaatggtactgtcccacctgcgtcgaaccagacgtacctttaaagagcaacaaccatggcagagcacatgaaggctgcgatgtatgcgagtggcttgaggtggagaagccagaagaacctgccgaagaacctgaattggccgtc

SEQ ID NO: 60086 - DNA, 275 bp, Zea mays
cagcgccatccgaaagcagtttggctctcaagatggtggacctgagactaaggtccttgattacaagactcaacaaagcagactctttccgttgctggcttcagcatatgcatttagatttgtgggtgactggctgaagtggctatacatggatgtcactcagaaactggaagctaaagactactcaacactgcaagaagcccatgcctgtactgctggtttgaaggctgtgacaacatctgcaacagctgatgccattgaagaatgtagaaagc

SEQ ID NO: 60087 - DNA, 276 bp, Zea mays
aacaatgaagagaagattgaggctgctggtaagaagaaagaggaagggaatgcattgttcaaatcgggcaaatatgctagagcttccaagcgatatgagaaggctgccaagtacattgagtacgacacttcgttcagtgaagatgagaagaagcaatccaagcaactgaagatcagctgcaacctaaacaatgctgcctgcaaactgaagttgaaggattacaaggaagctgcgaagctttgcaccaaggttctggaactagacagccaaaatgtc

SEQ ID NO: 60088 - DNA, 271 bp, Zea mays
tagtgagcgcttcacaaacttctgtcaagggaaactcacaagcagcccatggtcagaattggacggtcatcgataatctttgtctctggttgaagaccagttggtgaatattaaccagaagggtttccttacaattaacagccaacctgctgtaaatggagagaaatccgactcgcctactgttggttggggtggtcctggaggctacgtttatcagaaggcctacctcgaattcttctgcgcaaaggagaagttggaccaactaattgag

SEQ ID NO: 60089 - DNA, 271 bp, Zea mays
aagactaaaggagaggggggtcattcctaatgactccgaactgtttggtgcatcatgctatgctgctaaggttactcttacagcacttggtgagatgtttcaagctgcccgtagtatcatgaactggcttggtgactgtgccaaggtaattgcttgtgaaaatgaaccagtgagatggacgactcctcttgggctcccagttgtacaaccatatcgcaaacttgggaggcatcttattaaaacgtcattgcaggttttgacccttcagcgg

SEQ ID NO: 60090 - DNA, 269 bp, Zea mays
acaacaggtttgacgacacaaatccggaagctgaaaagaaattgtccattggatgggatgggaaccctacaaagtaacatacacgagtgattatttccaacctttgtatgagcatgctgttgagttaattcggaaagggctagcctatgtggatcatcagaccgcagaagaaattaaggcgtacagggaaaagaagatgaatagtccatggagggataggccaattgaagagtcattgaatttatttgaagacatgaggcgtgggttga

SEQ ID NO: 60091 - DNA, 283 bp, Zea mays
tgcgttgtgctcttagtttttctgtggagcgtctagttaaccgatgagctgcagggttggaaaaaagagacagtgatagcgaggtccgagggcggtgatcgggttgttcttgcaactgacgagaactcttgtatgtcgaaaagtaaggtcaaagaggtgatcacagtggtggagaaggagctgggatttggtgaagggaaactcctgcataagctttgcaaggtgtatctatacatatctgcacaaaggatcgtggggtgccttgtcactgaaccgataaaaa

SEQ ID NO: 60092 - DNA, 267 bp, Zea mays
cactggcaagacaatcacccttgaggtggagtcttcggacaccattgacaatgtcaaggccaagatccaggacaaggagggcatcccacccgaccagcagcgcctcatcttcgccggcaagcagtcggaggatggccgcaccctggcggattacaacatccagaaggagagcactctccacctggtgctccgcctcaggggtggcatgcagatttttgtgaagacattgactggcaagaccatcaccttggaggtggagagctctga

SEQ ID NO: 60093 - DNA, 267 bp, Zea mays
aaatgagggaacggatcaacaagtgcaaggagtgctgaatcttatagatctagcaggcagtgagcgcctgaacaaaagtggtgccacgggtgatcggttgaaagagacagtggctatcaacaaaagcttgtcatgtttaagtgatgtcatcttctcgattgcaaagaaagaggaacacgttccatttcggaactcaaagctgacatatctgctccagccgtgtctcggaggggactcgaagacactgatgtttgtgaatctgtctcc

SEQ ID NO: 60094 - DNA, 268 bp, Zea mays
caagaggagactgggtggaagtacattcacggtgatgtattccgtttccccaaacagaagtccgtttttgcagcaattattggttctggaactcagcttctcgcccttgcgattttcatcttcctcctcgctcttgtcggcgtcttctacccatacaaccggggagctctcttcactgccctcgttgtcatctacgctctcacgtccggtatcgctggatacacagccacttctttctatctgcaactggagggcacaaactgggtca

SEQ ID NO: 60095 - DNA, 265 bp, Zea mays
attatgacatggctgaatatctgaagctggaaatgctgaaggaaacaggatttgcacacatgagaatctgtgatggtgttggatcatttcttcagctttctggtctacttgccaagtttgcgcttgtgagggaaactgcaaaagcaccatgaactcgttgtattacagatgataatagcttgtgtcatgctgtgctatcatggtaacctagttcagttaatagcgctgtcatgcgtggcttaatttctacagacgtgatgtatct

SEQ ID NO: 60096 - DNA, 265 bp, Zea mays
aagccagatacaacagtgatcttccgcaatgccaagattgatatgttcaagggctcatgagactggcggtggacaagtggggccggcttgaggtgactgattcttctgttttcaaggtgaatgaagacaacaacatgtcactggtggagtacgagctggtggatgtggatgaagaggagtgagctgaagcgatattgcattgccatctgttgggccaagtcgtgctgcggatatgtatttccagctaaaggagggcggtacgttt

SEQ ID NO: 60097 - DNA, 262 bp, Zea mays
gatattttggagatgattttcttcccagttgtgaatgaggcatgcagggttatggatgaaaatgttgtaattcgagcttctgatcttgatattgcttctgttcttggaatgggctttcctaaatacaggggtggtcttgtcttctgggctgacactgttggagcaccttacatacattctaagctaagcaagtgggctgaaatttatggccccttcttcaaaccatcatcatatttggaacagcgagctaagagtggtgtac

SEQ ID NO: 60098 - DNA, 263 bp, Zea mays
aacagagtttgaaagctgcatttgcaactgcacccgctgatccaacagtagacctaaacatgcaactgacaaaactagcgcatggtttgctctctggtaaatattctgctccagcaaaggaggggcaagaagggatacgccctcgcatgtttaagtcagttatcactgcgaaccatcctgatttttcaagcatgagacaacaggatgtccttgaattcttccttcaccttattgacagagttgagaaggcaaaccctggagac

SEQ ID NO: 60099 - DNA, 263 bp, Zea mays
agcatatctgtggaatgactggggatggagtaaatgatgctccagccctgaagaaagcggatatcggtattgctgttgccgatgcaactgatgcagccaggagtgcttcagatattgtcctcacagaacctggacttagtgtgatcattagtgctgtgcttactagtcgtgcaattttccagcgtatgaagaattacacgatctatgctgtctctatcaccattcgtattgtgcttggatttatgctccttgccctcatttgg

SEQ ID NO: 60100 - DNA, 261 bp, Zea mays
ccaaaaggagaaattgtggcccatgttgcaaaagcttaatgttaccatgaaggctgatgagaaggagttgattggcaaagctttgatgaagcgtgttatgcaaacgtggcttccagccagcactgcacttcttgagatgatgatattccaccttccttccccggcaaaggctcaaaagtatcgtgtggagaacttgtatgagggaccccttgatgatgtttatgcaactgctatcagaaactgtgatccggagggtcctct

SEQ ID NO: 60101 - DNA, 261 bp, Zea mays
cccagagggtgcacttgctggttttgatcaagtggtcagtatggagcctgaaaaggctgaatggggatttaaagctcttaaacaaactgtcaagctttactataagctggggaaatacaaagaaatgatggatgcatatagagagatgttaacatacataaaatctgcggtcacccggaactacagcgagaaatgtataaacaacataatggattttgtttctggatcagctagtcagaattttactcttctgcaagagtt

SEQ ID NO: 60102 - DNA, 274 bp, Zea mays
  unsure (1)..(274): unsure at all n locations
tactgctagggctggaaaggatcttgcagtaactatagagttatgcgcaccagatacacagggaccatggtccgcacaaagcatgatgctcataactctatagttactgctagggctggaaaggaccttgtttccagcttggtgtctggattattgacaattggcccccgttttggcggagcaattgatngatgcagcccgatacttcaaagatgcatgtgataggggcctcacaccatacgagtttgttgaaggcatgactaagaagggaatc

SEQ ID NO: 60103 - DNA, 257 bp, Zea mays
attaggtccaagcctttgttgatgctttagaagcacgcaagataaccgttagcgttcgacggacccgtgggcttgacgctaacgcagcctgtgggcagctgaggaatgagtttcagaagaatccactacttgagattgaaccgtcaccctccacagagcggaccctcgtagctgcttaattgaaacacctatcaggttgatgcagcgtgttcaagcatatggaatcgtcatttaatttatggggacataggtgttgt

SEQ ID NO: 60104 - DNA, 261 bp, Zea mays
agatgactacatcggctttaaggttaagacgacgagcccgaagaagtactgtgtccggcccaacagcggcatcgtgccacctcggtccaccagcgatgtcattgtgacaatgcaagcacaaaaggaggcgccaccagacatgcagtgcaaggacaagtttcttgtgcaaagtgtcgttgtggcggaagggaccttagtcaaggacatcactggcgatatgtttaccaaagaatcagctaatgtggtggatgaggttaagct

SEQ ID NO: 60105 - DNA, 258 bp, Zea mays
atggctttttatagcgttctgcgcagttcttctttgtcatactgaacaaaaccaaagctgcgcagaacgctataaaaagtcttaacgggatgcttataaatgataagcctgtttttgttggaccttttgttcgcaagcaagaaagagatcattcttttgacaagacaaaatttaacaatgtctttgtgaaaaatttgtctgagtctaccacaaaggaagatttactcaaaatctttggtgaatatggggatattacaa

SEQ ID NO: 60106 - DNA, 298 bp, Zea mays
accgtcagctgaagcaaaggactcaggcaaatggccgcgttggtgccactgcagccgtctactctgccgccatcctggagtacttgactgccgaggttctggagctggctgggaacgctagcaaggatctgaaggtgaagcgtatcacccctcgccacctacagttggccattcgcggagacgaggagctggacaccctcatcaagggcaccatcgcaggtggaggtgtcatcccgcacatccacaagtccctgatcaacaagtcctccaaggagtgaagactagggaatgcacattg

SEQ ID NO: 60107 - DNA, 296 bp, Zea mays
caagccactccgaggccaagtctagggtttgggaatctgtaggaggggagaggggagcgcgctcagggtcagggaggcgaagatgatcgaggtggtgctgaacgaccgcctggggaagaaggtgcgggtgaagtgcaacgaggacgacaccatcggcgacctcaagaagctggtggcggcgcagacggggacgcgccccgagaagatccgcatccagaagtggtacaacatctacaaggaccacatcacgctcaaggactacgagatccacgacgggatggggctcgagctctact

SEQ ID NO: 60108 - DNA, 295 bp, Zea mays
attccactccgacattcacgtgcagctgtcgggagcaggcaatggcgccggatctaagcgaactcgccgccgccgctccagcccgtggcgcctacctcgccggcgtcggtgtcgcggtcctcctcgctgcctccttcctcccagtagccgagtcgtcctgcgtgcgagataactcattggtgagagacataagccaaatgccgcaaagcagctatgggattgaaggattgtcacatataacagttgctggtgcgctcaatcatgggatgaaggaggtggaagtgtggcttcagac

SEQ ID NO: 60109 - DNA, 169 bp, Zea mays
cctgatgattctggcagctttgtccaggatctgcagatatcaactatgttcacgcaccaccagaagatagtagtagtcgaccatgagatgccgaaccagggatcccagcaaaggaggatagtcagcttcattggtggcattgacctttcttaattgatccatcctcaaa

SEQ ID NO: 60110 - DNA, 292 bp, Zea mays
gaaaaattcctgagcatgttcggtgccaccaaaagactgagctggagaaggctaaagcaaccctgttattggcaactctccctaagtcattaccttgcagggataaagaaatggaggagatatcgatatttgtaaaggatgcaatctgcaatgaccagtgcctaggacggtgcctttatatacatggtgtacctggtactggcaagactatgagtgtacttgctgttatgaggaggctgagatctgaatttgattctggaacactgaggccatattgttttattgaaattaa

SEQ ID NO: 60111 - DNA, 295 bp, Zea mays
agtctggggctatgttgatcgtatcctgggtcagccatcactgataagggagtcatcacgtgggaaatatccctggtctggtttcctctcacgtgctacaagtaccctgactagcaaactgaagaatggaagcaacctagggaaggacagaaatgggtttggtgatgttattctaaatccttctctccagaagagagtgaagcagcttgctaatgccacggccaatacaaaacttcatcaagctcctttcaggaacatgcttttctatgggcctcctggcacagggaaaaccatg

SEQ ID NO: 60112 - DNA, 293 bp, Zea mays
ataaaacaaatggagtgactcccagacgttggatccggttttgtaatcctgcattaagtgcattaatttcaaagtggattggttctgatgactgggtgcttaatacagacaaactggcagaactgaagaagtttgctgataatgaagatctgcattcagagtggcgtgctgctaagaaggctaacaaaatgaaggttgtttctcttataagggagaagacaggatatattgtcagtccagatgcaatgtttgatgtgcaggtgaaaaggatacatgaatataagcggcactgc

SEQ ID NO: 60113 - DNA, 292 bp, Zea mays
ggtgatcaggaagaaccttgtgaagaagtgtgttgagctcttctttgagattgctaagaacaaggaggactacaacaagttttacgaggctttctccaagaacctcaagcttggcatccatgaggactcgcagaacaggaccaagatcgccgagcttctgagatcacactccaccaagagtggtgatgagctgaccagcctcaaggactacgtgaccaggatgaaggagggacagaatgacatctactatatcactggtgagagcaagacgcagtggagactccccttcctt

SEQ ID NO: 60114 - DNA, 293 bp, Zea mays
attgttcttgcttcccgatttccagtcctctgtcgtttgttgtcccatactcccatctgttctccgcgaggcgcaacgaaggcacaaaacccttacctccatcaaaccctagcgctcgtgtccccgtttagctcccgtcgccgctaccatgggctcagatgcggatatggaggactacgggttcgagtactcagacgaggagccggaggagcaggatgtcgatatcgagaaccagtattacaactctaaaggtttggttgagacagacccagagggtgcacttgctggttttg

SEQ ID NO: 60115 - DNA, 292 bp, Zea mays
ccaaggaaggaaactggtggatgcagtttggcaaggaatacgtcctgggctactggccgtccttcctcttctcctacctcgcggacagcgcgtcgatgatcgaatggggcggggaggtggtgaactcggagcccgacggcacgcacacatcgacccagatgggcagcgggcacttcccggaggaagggttcagcaaggcgagctacttcaagaacgttcaggtggtggacagcagcaaccagctcagcgcccccaagggcgtgggcaccttcacagagcagtccaactgcta

SEQ ID NO: 60116 - DNA, 294 bp, Zea mays
tggccattgtatcttagcaccaaaaacactattttgaagaaatatgatggcaggttcaaggacattttccaggaggtgtatgaagctggttggaaaaccaaatttgaagctgccggcatatggtatgagcaccgccttatcgatgacatggtagcatacgcacttaagagtgaaggagggtatgtctgggcttgcaagaattatgatggagatgtgcagagcgatttcttagctcaaggttttggctcattgggtttgatgacttcggtactggtgtgccctgatggaaagacg

SEQ ID NO: 60117 - DNA, 291 bp, Zea mays
caaaatttgcctcaaatgtcatcgagaagtgcttagtctttggaaatcctgtagaacgtcaggttctgattggtgagatgcttggatccactagcgaaagcgaacctcttgaggtaatgatgaaagaccagtttggaaactatgtggtgcagaaggtgttagaaacttgtgacgatcagcagagagagatgatcctaacaaggataaagacacacctgaacacactcaagaagtacacatatgggaagcacatagtagcacgcgtagagaagcttgttgctgctggagaga

SEQ ID NO: 60118 - DNA, 286 bp, Zea mays
aacccgttctccttttccgtctcctcgacgcaactcgtcgccgtcttctccaactcgcacctcgttcctcgccccaccatttgccgctcccgcctacgatgtcgacgagtgaggtgtggagcttgtccgatttcgaaatcagcaagtacatcggtgagggcaggttcggcaaggtctacctcgcccgcgagaagcagagcgggtacgtggtggcgctcaaggtgatatttaaggcgaaactgcagaagtaccacttccacgcgcacctgcggcgggagatcgagat

SEQ ID NO: 60119 - DNA, 290 bp, Zea mays
aatggatcttgattctgaagatgaagacgaggagcgggatgttccagtagtcaaggaaaatggcaaagctgatgggaagaaacagaaaagtcaagaaaaggcagttgctgcaccttcaaaatcaagtccggattccaagaagagcaaggatgacgatgattctgatgaggacgagactgatgattctgatgaggatgagacggacgattctgatgagggtttatcttctgaagaaggcgatgatgattcaagtgatgaagatgataccagtgacgatgaggaggaagaca

SEQ ID NO: 60120 - DNA, 289 bp, Zea mays
gaacagcagcactggaaagaacttacctacctgtacatacaatatgatgaatttgacaatgctgccaccactattatgaaccactctccagatgcatgggatcatatgcagttcaaggatgtttgtgttaaagttgcaaatgttgagctatactacaaggcagttcacttctatttgcaggagcatcctgatctcatcaatgatatgctgaatgtgcttgcacttcgtttagatcataccagagttgtagacataatgcgcaaggctggtcaattgcatcttgtgaaac

SEQ ID NO: 60121 - DNA, 288 bp, Zea mays
caccgttcctccgagcccaggagcagccccgcgccaggaggaagtttgttcttttaacaatatgtcgagggaggagaatgtttacatggccaagttggctgagcaggctgaaaggtatgaggagatggttgagtatatggagaaggtggctaagactgtagatgtggaagagctcactgttgaggagcgtaaccttctgtctgttgcatacaagaatgtgattggggctcgccgcgcttcatggcgcattgtttcttccattgaacaaaaggaggagtcccgtaagaa

SEQ ID NO: 60122 - DNA, 287 bp, Zea mays
agcatatctgtggaatgactggggatggagtccatgatgctccagccctgaagaaagcggatatcggtattgctgttgccgatgcaactgatgcagccaggagtgcttcagatattgtcctcacagaacctggacttagtgtgatcattagtgctgtgcttactagtcgtgcaattttccagcgtatgaagaattacacgatctatgctgtctctatcaccattcgtattgtgcttggatttatgctccttgccctcatttggaaatttgatttccccccattcatg

SEQ ID NO: 60123 - DNA, 284 bp, Zea mays
gtctcgacgtctcgtctcgtctcgtctcgcctgcccgcagccccttggcttcgttccatccggcttctcggcggcggcggagaggagggggatggcgcaccggctgctgcgggacgcgcaggcggacgggtgggagcggtcggacttccccatcatctgcgagtcatgcctcggcgacaacccctacgtccggatgttaagagctgaatatgacaaagaatgcaaaatttgtgcacgtccttttactgtattccggtggcgtcctgggcgagatgcaaggtaca

SEQ ID NO: 60124 - DNA, 286 bp, Zea mays
cttaacatgtctgacctggcactaggtgtgaacagctactatgtactccagatcattgaacaggatgatgggtctgagtgctacgtatttcgtaagtggggacgggttgggagtgagaccattggagggcaaaaactggaggagatgtcaaaaactgaggcaatcaaggaattcaaaagattatttcttgagaagactggaaactcatgggaagcttgggaatgtaaaaccaattttcggaagcagcctgggagattttacccacttgatgttgattatggtgtta

SEQ ID NO: 60125 - DNA, 288 bp, Zea mays
caacaagaagcccaccatcacctcccgtgagatccagacctccgtgcgcctcgtcctccccggggagctcgccaagcacgccgtctccgagggcaccaaggccgtcaccaagttcacctcgtcctaggctgcgtggcctccgcttgcaggcttccctcgtatgttcgcgtgtcttgctgtagttaggtgctgctgtgtctggtctcctccggtagcaactgttatctgatggaacagtaacaatgcttattgaatccagctagttgcttatttgtggatcctctctct

SEQ ID NO: 60126 - DNA, 287 bp, Zea mays
aatctagtttctctgcatgatcaaatttgtgattgtgacaatattttgttacaaatggaaacagttctgactggattccagacagaaattggttccataagttcagagataaaggtccttcaggagaaatctatggacatgggattaaagctgaaaaatcgtaaggctgcagaatctaaattgtcaaaatttgtcgaggatataatagtacctccaagaatgattgacataattgttgatggagaggtcaatgatgaatacatgaaaacacttgagactctaagcaa

SEQ ID NO: 60127 - DNA, 287 bp, Zea mays
cgaaggacatatgtaaacttccttcattcttgtctagtgtccttttcaagaaaatcgatgttgaatgcactagaactgtctcaagggatgcatttgttgagtactggattaacgacaataaggttacaatggatatggctagtcaaatatttgaaatattaagaaagccaggttacacatatctcacccaggatgatttcaagcctgtcctgaaagaactactggcaacacaccctggcttagagtttttacaagggacccccgagtttcaggagagatatgcggag

SEQ ID NO: 60128 - DNA, 285 bp, Zea mays
cacatatctcctcgcatcttccttgcaaccgattgcctattcgcctcccaaccacagaccgatggcgctcaaggccgagaagcagctcgctgcgaagatgccggcggaggaggagctcgcggccgataagacgaccgccgtgaagaagcccaatgcggagaagctggtctccgcgggcaagtccgccggctacgatggcggcgatggcaagcgttgcaagaagaagggcatagcgagcgtggagacgtactagatctacatcttcaaggtgctgacgcacgtgca

SEQ ID NO: 60129 - DNA, 284 bp, Zea mays
ggaggaacaacaagaggttcctggacaccaaagcccgcagatgtctattgttagttctgttactggttttagcacagccagttcttttgggcctcttcatcgtggttcatggtgcactccaccaagattattcctggaagaccagtttgatgccattcctccagagattggcatttcacggaattcaggcagtaagaaaactaaggaagaggaaggagcaaggagaaaagctggagcagtgaaaatcagtccatggacattggcgcggcttaatgcagaggaag

SEQ ID NO: 60130 - DNA, 285 bp, Zea mays
accatatcgacatcgacgccagcgagccaaggacagaacagccggcgcccggccctaaaactgccgtgcagcgtgagagaagcgagggaaagatggaccggtaccagagagtggagaagcagagggaggaggcacccatcaaggaaaacgagatccgcattaccacgcaggggaggatgcgcaactacatcacctacgccaccggcttgcttcaggttctgatgaggttgtattcaaggccatggggagggctatcaataagactgtcatggttgtggaattgat

SEQ ID NO: 60131 - DNA, 286 bp, Zea mays
ggctctgttaagttgccccatatccctcgtcccaagatgaaggtgtgcatgcttggtgatgcccagcatgttgaggaggccgagaagatgggacttgactacatggatgttgaggctctcaagaaaatgaacaagaacaagaagcttgttaagaggcttgccaagaagtaccatgctttcttggcatcagaggccatcatcaagcagattccccgtctccttggtcctggtctcaacaaggcaggcaagttcccgaccctggttactcaccaggaatccctcgagt

SEQ ID NO: 60132 - DNA, 280 bp, Zea mays
aggagaccgaagatgagaagaaggctgctgaagagcgtgctgcagctgccaaggcttctggcaagaagaaagaatctgggaagtcatcagttttacttgatgtgaagccatgggacgatgagactgacatggccaagctcgaggaagctgttaggagtgtccagatggaagggctgctctggggcgcatccaagcttgtcccagttggatatggtatcaagaagctgcaaatcatgatgaccatcgtcgacgaccttgtctctgtcgacactctcattga

SEQ ID NO: 60133 - DNA, 274 bp, Zea mays
ggcagtgatcacagtccctgcttacttcaacgattcacaaaggacagcaaccaaagatgctggccgcattgctgggctggaggttctgcgtattataaatgagcctaccgccgcatcactagcatatggttttgagaaaaagaacaatgaaacaattctggtttttgacctcggaggtggcaccttcgatgtttcagttcttgaagtcggtgatggtgttttcgaggtgctgtctacatcaggtgacactcaccttggtggtgatgactttgac

SEQ ID NO: 60134 - DNA, 279 bp, Zea mays
ggatggcatcctgttcgacaatatcttgattactgatgatgagaaagttgccacctccattctcgagaagacctggaagcccaagtatgatgttgagaaggaaaaggagaaggctgaggaggctgctgctggtgcagatggtctttctgacttccagaagaagatttttgacgtcctgtacaagattgctgatattccgttcttggcaccctacaagaccaagattattgatgttatcgagaagggagagaaacagcccaacatcactattggcatttt

SEQ ID NO: 60135 - DNA, 280 bp, Zea mays
ccttgaatcgctaaatctgggaatttgtccaaaattaagtattctgtgcattgaggccccaaatatgtctataatggagctgaagggttgtggtgtgctttccgaggcttccatcaattgccctcgcttgacatctttagatgcctctttctgcaggcagcttgtggatgattcactgacttgtatgaccgaggcatgtcctctgattgaacatcttatcctgtcatcatgcctatccattggcatcgatggattgtcttcattgcattgccttcataag

SEQ ID NO: 60136 - DNA, 282 bp, Zea mays
acgagacccttcgaccttcgcaacgccgccccaatccccagcaaccactgctccgccgcctccggcgaccgccggagcccgtggtggaggaggacgtggagagggaagatatcgccaatccaaggaggtggggacaagatggtgagctcctcgtcgtcggtggttaacgtgtacccgctcgccaactacacgttcggcaccaaggagcccaagatggagaaggacacctccgtcgccgaccgcctcgcccgcatgaaggtcaactacatgaaagaaggaatg

SEQ ID NO: 60137 - DNA, 278 bp, Zea mays
gcgacggcaacgactggggcgaccgacgctgccgcttcacttgccggttgctcggatcttcttcggcccgttagccgtcgacgagcaacaccagggctaccagatacttcagtggcttcgcaaggatgtcctggtgcactattgagtctgatcctggtgtgttcactgagctgattcagcaaatgcaagtgaaaggtgtacaggtggaagagctttactctctcgatgtgggctctcttagtcaactgcggccagtatatgggctaatttttctcttc

SEQ ID NO: 60138 - DNA, 280 bp, Zea mays
ggaaaacaagaatggttcaacatcacacaagaaaaacggtttctcaagaccactcttgaaatgtgcagaagaggtcctactgaatggcgatgttgcaagtacatctgggaaatccattgcaagcttacaggtggaagcatctgatttggcaaacttccttaccatggatcggaatgggggttaccgaggttcacaaactcttctaagatctgtattatcagagaaacaagagctgtgcttctctgttgtctcattgctctggcagaagctcatagcttct

SEQ ID NO: 60139 - DNA, 116 bp, Zea mays
atagttagttgtttagtattaatatgtggaatagagtcatcccactaaatttgatgaatggacccatgatgcaccccttcattttggataaagtgattcattataaaaaaaaaata

SEQ ID NO: 60140 - DNA, 262 bp, Zea mays
ccataaaatgcacagatgttatctctggtgatagtcctgatgatattgttgaaattcgagctgaatatgatcctttgaagacttctagactgaagggtgttcttcactggattgctgagccaggacctagtgtagagccattgaacgtggaagtaagattattcgagaaattgtgcatgtcagagaatcctactgaattggtagattggcttagcgatcttaacgcacactcggaagatgtgataaaggatacttatgctgt

SEQ ID NO: 60141 - DNA, 277 bp, Zea mays
catcaggaaggaatatgctgctcgtgctgcatcgtatgaggaggcagaaaatactaaacatacagcaagattcaaaaaagaagaggtgaagattgaagcttgggagggtcgtcaagagcaaaaattgaatatgaaatgagaagaatagaggaatttgctgagagaatgagaagtgaggccatggaaaagatggccgaaaagctagagatgacgcgccgcatagccgaagagaaacgagcttcggccaacgccaaaatgaaccagcaagcagctatag

SEQ ID NO: 60142 - DNA, 278 bp, Zea mays
ctgcaagtatcattctcagaagaggtgctggggcattggcttcggcctgcggttcagagtggtctcgctcgacctgaccttcaggaagctttccttggagaacatccttatggcataccggagagccaagacacgggcaattctgctggactacgatggcacgctgatgccacaggcgattaacaagagcccgtccactgaatctgtgcggatcctgaacagcttgtgccgagacaaggacaatgtggtgtacctatgcagcgggtatgaccggcgca

SEQ ID NO: 60143 - DNA, 270 bp, Zea mays
gactagttctagatcgccagcggcgtccgtggagtcaccagcaacccaacgattttccaaaaggccatttcatcgtccagcgcatatgatgatcagttcaagcagctcatttcggcaggaaaggatgcggagagcgcttactgggaactcgttataaaggatatccaagatgcgtgcaaactttttgagcccatctacgacgagactgatggggctgatgggtatgtctccgtagaggtgtctcctaggttggcaaatgacactcaagga

SEQ ID NO: 60144 - DNA, 270 bp, Zea mays
tagactacgacagcgtccgtcgaaccggagggtcggaggcggaggcgaagatgaggaagaagctcggcacccggttccccgcggctcgaatcaaaaagataatgcaagcagatgaggatgttggaaagattgcattagcagtgcctgttttagtctcgagggctcttgaattgtttttacaagatttaattgaccggacttatgaaattactctactaagtggagcaaagacactgaattccttccacctgaagcaatgtgtgaagaggt

SEQ ID NO: 60145 - DNA, 274 bp, Zea mays
ttgtcggccttctctagtgatgggctctggcctccaccggtgcgctccggcttcgctcttcgttgaccttcggcgatgtctgcccggcgcggcgtgcgttccgcggcctcgtctcagggccgctaccgtcgtcgcccccaagtatacaacacttaagcccttggctgatagagtgcttgtaaagagtaactcttccgagaagaagacaactggtggaatcttgctccctacgactgctcagtccagacctcaaggtttcgaggtagttgctgtt

SEQ ID NO: 60146 - DNA, 274 bp, Zea mays
cacgccgcatttgccaccaggagcaatcaaagacactagcattttgcagtttcaagtacaaccagagtgtggaggaaagtgagactcacttaatacgtctgctagatcatcaacttttgagtccctgtgtgtgtatcctctagaccagtatgaatgttgctgctccatcattagctgttcgtttgttgatgacaattatgtctattactgtgtgggaactgcatatgttatacctgaagaaaatgaaccaaccaagggccgaatccttgtattt

SEQ ID NO: 60147 - DNA, 273 bp, Zea mays
tgtgcagcgcatgtgccggcgttttcctacgttttgcgaggagctggtgagcaggtgggcggcggagtcccttggctccgacagctcgtgcgagctggacgtctggccggagtgcagaacctgacgggagacgtcatttctcgcaccgcgttcagcagcagctacagcgaagggagaaggatcttccagctacaggccgagcaagcttcgcttgtcatgaccaacattcggaagatcatgatcctcggctacatgtacttgcctaccgcgaac

SEQ ID NO: 60148 - DNA, 265 bp, Zea mays
gaacactcatcagaagccattaaagacttcctttcagatgcctcgttagtgcgatttcttcgagcaaggaactggaatgtgcagaaagctagtaaaatgatgaaagagctgtgaagtggcggcttgcattcaaacctgaaaacatctgttgggatgatattgcagaggaagcagagactggatatatatatagggcggattataaggacaaacatggcagaactgttcttgtattgaggcctggcttagagaacactacctcagc

SEQ ID NO: 60149 - DNA, 271 bp, Zea mays
cacaagatcaccaagctagtggaatactattttagtgacatcaaccttgctactacagaacatctgatgagattcattaccaaggattctgagggatttgtgccaatatcgtaattgctggctttaagaaagtaaaaacttctgtgcgcaataatgtgatgcttgctgcggctctccgaacctcatcaaaacttgttgtaagcgatgacggtaagagagtcaaaaggcagcagccatttacagaatctgatttgcaggagctccagtcccg

SEQ ID NO: 60150 - DNA, 273 bp, Zea mays
cctggaggttgagagctccgacaccatcgacaacgtgaaggcgaagatccaggacaaagagggcatccccccagaccagcagcgtctgatcttcgctggcaagcagctggaggatggccgcaccctagcagactacaacatcgagaaggagagcactctccacctggtgctccgcctccgcggtggtcagtaagccatgggtcatttaagctgctgctgtacctgggtatctgcgtcgtctggtgccctctggtgtacctctatatggatgtc

SEQ ID NO: 60151 - DNA, 272 bp, Zea mays
gccatttatgtgccgccatctcagcagggcacaattgatctgcagagtgggatccttcatgctgaagagaaggattacaagactgcttacagctacttcttcgaagcattgaagctttcagttcactggaagatcccaaggctatcttcagcttgaagtacatgcttctgtgcaagataatggtcaaccaagctgatgatgttgcaggaatcatctcatcgaaggctggcctcaagtatctgggtcctgatgttgatgctatgaaagctgtg

SEQ ID NO: 60152 - DNA, 275 bp, Zea mays
cagatccaatatgaatgctgttgacatcacctctcaatatggatctggtactaatatacaagacaattcccttgtacatgtttcaaaagctaacattagcgggaaggtcctcccaaccataattggaagcaacgtgacagtgggtcacagtgctgtattacatgcatgtaccattgaggatgaagcttttgttggtatgggtgccactctgcttgatggagtggtggttgaaaagcacagcatggttggtgcaggatctcttgttaagcagaata

SEQ ID NO: 60153 - DNA, 277 bp, Zea mays
gactagttctagatctcgatctcagccatggcggaggtggagcagcaacaggacacgccgaagctgttcaaccgctggaccttcgatgatgtccaggtgaacgacatctcgctgaacgactacctcgctgtgaacgcgacgaagcacgcgatgtacctgccgcacaccgcggggcgttactccaagaagcggttccgcaaggcgcagtgcccgatcgtcgagcgcctcacaaactccctcatgatgcacgggcgcaacaacggcaagaaggtcatgg

SEQ ID NO: 60154 - DNA, 275 bp, Zea mays
atcagcactagaaaggctccatatgaggattcatctggtatattctgggataatgagagtttagctggtcttttggctattgaacttaaagcagatctccttgttctactaagtgatgtagatggtctatacagcggtccaccaagcgaaccgggatcaaagatcattcatacctacatcatagataaacattacagtggaataacttttggggataagtcacgtgtaggtagaggtggaatgacagctaaagtgtaggctgcttttgtggcttc

SEQ ID NO: 60155 - DNA, 270 bp, Zea mays
  unsure (1)..(270): unsure at all n locations
tgtgctcgtgangaacgagttggtggtctttgttggcgaatactcagtcacacgtgtgtaggtgcatgctctaatcagatcccaaatgatcaactttgtgcttctcattagtcgcgaagggaatgtgagattgacaaaatggtactcatcttattctcagaaagaaaggagtaaggtaatcggtgagctcagtggaatgattctttcccgtgcggcctagcattgtaattttgttgaatggcgtggagataaagttgtttataaaaggta

SEQ ID NO: 60156 - DNA, 267 bp, Zea mays
ctcacaaaaccctcgctcgctccccaccaccccgccgcgccgccgcctgtaccagctgcgtcaagatgagtcggcaccctgaggtgaagtgggctcagaggatcgacaagtttacatcactgtacagttacctgacgcaaaggatgctaaggtcaatttggatccagatggtgtacacacattctctggcagtgctggtacaaacttgtatgaattgaaactagatctgaatgacaaagtaaacgttgaggctagcaaaataagtgt

SEQ ID NO: 60157 - DNA, 262 bp, Zea mays
agatgactacatcggctttaaggttaagacgacgagcccgaagaagtactgtgtccggcccaacagcggcatcgtgccacctcggtccaccagcgatgtcattgtgcaatgcaagcacaaaaggaggcgccaccagacatgcagtgcaaggacaagtttcttgtgcaaagtgtcgttgtggcggaagggaccttagtcaaggacatcactggcgatatgtttaccaaagaatcagctaatgtggtggatgaagttaagctga

SEQ ID NO: 60158 - DNA, 280 bp, Zea mays
ctattcgtttggaattgtcatgtgggagttgcttactggggaagagccatactctggcatgcgtgctgctgaaattattgggggcattgtaaacgattccctacgtcctcaaattccttcatggtgtgatcctgagtggaagggattgatggaaagctgttggtccagtgatccagctgagagaccgtccttcacggatatatctcaaaggttgaggaaaatggccgccgcaatgaatgtgaagtaaaggtccggaagccatatttgtcttgtatgtgtg

SEQ ID NO: 60159 - DNA, 268 bp, Zea mays
ctcgagccgatctaaggagatgaatgagctgaacctaataaggtgccaacacattccgaaaccgccgggttgtgattggcatgacctaccggacgagaaggttaagctgtcaaatgggcagatggctgacctgataccttggtgcctgcccaacacagccaagaggcacaatcagtggaaaggactgtacgggaggctggactgggaaggctacttccccacatccgtcactgatccccagccaatgggcaaggtcggcatgtgcttc

SEQ ID NO: 60160 - DNA, 213 bp, Zea mays
gaaaaaatgtttttcatatttctcccttttcccagatgattataaatgtgataagtctgagattattcgtttatgggattcaataggaatcataggttctagtatacagcaaagaaaatagaggacataggatcggattattttgatgaactattagatagtggttttcttataaaagggagcaatgatttctatgtaatgcatgatttaatc

SEQ ID NO: 60161 - DNA, 278 bp, Zea mays
gaggagcaattattccccagtgtgctagtccaagccatgagtcttgagaagctggttatagccccagaccttgcaattattagaaaacatatcaatgatggagtaaacggacttctgtttccaagaaagaatattggcatgttagctcaagttcttcttcgagcagtgtcaaatagtaaagtgtctctttcagggcaaaaaattgcttcagctgggaaggctcatgccaagaatcttatggcttctgagaccattgaaggctatgctagctattgaaa

SEQ ID NO: 60162 - DNA, 275 bp, Zea mays
agcgtactatgcttgaacttctaaaccagctcgatggttttgaagcatcaaacaaaattaaggttttgatggcaacgaacagaatagacattttggatcaagcccttctgaggcctggccgcatagacaggaagattgaatttccaaatcctaacgaggattcacgtttcgatatcttgaagatccattcaagaaaaatgaacttgatgcgtggcattgatctgaaaaagatcgcggaaaagatgaatggggcctcaggagctagctcaaggccg

SEQ ID NO: 60163 - DNA, 274 bp, Zea mays
gtacacagcaaacactatggcatctgctatcgaaactttgggcatgagtcttccatacagttcttcgacacctgctgaggacccactaaaactagaagagtgccgtcttgctgggaagtatcttttagagttgctaaagatggatttgaagcctaaggacattatcactgagaagtcattgcgaaatgcaatggttattgttatggcacttggtggttcgactaatgctgttctgcatttgattgccattgctcggtccgttgtttgcatttga

SEQ ID NO: 60164 - DNA, 275 bp, Zea mays
agaaaatacagtgtctggattggtggctcgatccttgcgtcgctcagtacgttccagcagatgtggatatccaaggatgagtacgatgagtctggccctgctatcgtccaccgaaaatgcttctgagcttagctatctgccgcgcctttcatagcgtgtcaagctgttgagatctgcgttgttgagttgagtgtctctatggagtatcacatactttctgcatgaggggggaagagtatacccaactaagcgcatgcctttcggatgccctgctt

SEQ ID NO: 60165 - DNA, 250 bp, Zea mays
gacaaggtgtaccccgaaggaactcacctgatgatcccgtggatcgaaaggccgatcatctacgacgtccgcgcccgaacccaactcgtcgagagcacctccggaaagcggggactccagatggtgagaattgtcttcgtgtctttatcgaccaatgcagatcactacctaaatctacaggacttgcgggagacttcatgagagagtctgcttcatcatcatgaacactcaagtgtggtgctcataatgc

SEQ ID NO: 60166 - DNA, 273 bp, Zea mays
gagacgccctgaagtctgggttctatgacctccaattggctagagatgagtacaggctctcttgtggtgcagcaggcatgaaccgtgatctgttgtggcgatttatggatgtccagaccaggcttatcacccccatttgcccacactatgccgagcacgtgtggcagaagatcatgaagaaagaaggctttgcaataaaagctggctggccagtcgcggacaccccggatcctacactgagaattgcaaataaatacctgcagattccatagt

SEQ ID NO: 60167 - DNA, 272 bp, Zea mays
gatgattcatatctggacagctacatcagcacaattggagttgactttaaaattaggacagtagagcaagacgggaagaccataaagcttcaaatttgggatactgctggacaagagcgcttcaggacaatcactagcagctactaccgcggagctcacggaatcattattgtatatgacgtgacagaccaagaaagcttcaataatgtgaagcaatggttaaacgagattgaccgttatgcaagtgacaatgttaacaagtccttgttggg

SEQ ID NO: 60168 - DNA, 270 bp, Zea mays
tccaaacatagttaaatttaaggaggttgtgctaactcccacacatttggccatagttatggaatatgctgctggtggtgagctatttgaaaggatctgtaatgctggaagatttagtgaggatgaggcgagatttttcttccaacaactgatttcaggagttagttattgccactcaatgcaaatatgccatagagatttgaaactagaaaacactctcctggatgatagtatagcacctcggctaaagatatgtgatttggttactcc

SEQ ID NO: 60169 - DNA, 277 bp, Zea mays
cttcaccaacgccggcgcaaactctcgcccgagtccgacagctcttcaattccccattccgcacaccgatcgacctctcacgccagtctcggtctcttccgaaggcgtcgcgcgcggttgtttgagaggagacgaggaagatgagggagtgcatctccgtccacatcgggcaggccggcatccaagtcggaccagcgtgctgggaactttactgcctcgagcacggcatccagcctgatggccaagtgcctggagataagaccgcggacatcacgat

SEQ ID NO: 60170 - DNA, 265 bp, Zea mays
atctcctcgcattttccttgcaaccgattgcctatccccctcccaaccaaagaccgatggcgcccaaggccgagaagaagcccgcggcgaagaagccggcggaggaggagcccgcggccgagaagacgaccgccgggaagaagcccaaggcggagaagcgggtccccgcgggcaagtccgccggcaaggagggcggtcctcgcaagcgtggcaacgaagaaggcaagaagagcgtggagacgtacaagatctacatcttcaagtg

SEQ ID NO: 60171 - DNA, 274 bp, Zea mays
cccgagccgcagttcagttccgaggactacatgatgctctacacgacgatatacatcatgtgcacgcagaagccgccgcaggactactcacagcagctctacgacaagtattgggagtcgttcgaggagtacatcgcctccatggtactaccttcattaagggagaaacatgacgagtttatgctgagggagctagtgcaaaggtggtcaaaccataaagtcatggttcgctggctgtcacgcttcttttattaccttgacgatacttcatatc

SEQ ID NO: 60172 - DNA, 269 bp, Zea mays
cctgatgattctggcagctttgtccaggatctgcagatatcaactatgttcacgcaccaccagaagatagtagtagtcgaccatgagatgccgaaccagggatcccagcaaaggaggatagtcagcttcattggtggcattgacctttgtgatggaagatatgatacccagtacgactccttgatcaggacgcttgacactgtccatcacgatgacttccaccagccgaactttgagggtggatcaatcaagaaaggtggtcaagggag

SEQ ID NO: 60173 - DNA, 269 bp, Zea mays
cggtgatgtcgtggaacgtgacgaggtgcgcaacggcgctggaggaggctggctccgactacgagatcgtgcccatcaacttcgccaccgccgagcacaagagccccgagcacctcgtccgcaacccgtttggtcaggttccagctctgcaggatggtgacttgtacctcttcgaatcacgcgcaatctgcaagtacgctgctcgcaaaaacaagccagagctgttgagggaaggaaacctcgaggaggcagcaatggtgatgtttgga

SEQ ID NO: 60174 - DNA, 273 bp, Zea mays
cccaaatacagatttgttgtgcgatttaccaacaaggacatcacagcacaaatcatatctgctagtatagcaggtgatatggttcttgcttctgcttactcgcatgagttgccacgatatggtctcgaagttggtctgaccaactatgcagctgcctactgcactgtccttctgttggctcgccgtgtgctcaagacccgtggtttagataaggaatatgagggcaatgttgaggccactggtgaggacttctctgttgaccagctgatgaga

SEQ ID NO: 60175 - DNA, 272 bp, Zea mays
caaagaggttgtgaagaacaagaagtaccttgcagttgctgtgccagatgagggtgcccagacccttctggttcaggccattgaggcttttggtggtaagtgcaaccctgaggcgctgaaggaggttcccgttgtcctcaaagccctctacgatggagatatcctggacgaggaaaccattgtggactggtacaatgatgctgtcgcagctgggaaggactcccaggttgtcaagaatgccaagccgttcgtcgagtggtccagagtgccga

SEQ ID NO: 60176 - DNA, 263 bp, Zea mays
tttgaagagatacctggttcttcctgtgcaagcttaccaatttttgcatgcaattgatcatttgttttcttatgcagttatatcctttcttttccttaaaatagcctgtagttttgctgccaacttagtctctttgtctccattgtagatcagggccaaggtagccacatttggatttggaggaccaactgaggttacttctggtggcaacgccttgaagttttatgcatctgttcgcttgaacatcaggcgtattggttggt

SEQ ID NO: 60177 - DNA, 272 bp, Zea mays
atatgggtttagaatttcctgtaagacaaactgatgtctgtggcattcttcaccgccgggagatggaattgaaaaggctggctgtggatagttcttttggaagaaaagcatatatggcttttatcccagaaggattcggaaatatgctggactgggatcaagttatgaagtttcagaggaagactcgatcattgttcagcactccttccacaactgctgttgcattaatccacaaatataacgaccaagcccttcaatacctaatttgcttg

SEQ ID NO: 60178 - DNA, 267 bp, Zea mays
tcctccgcaacttcacagcgtatcatcgttttccatcgctcctactcctatcatccagaaaatctgagcggtattgatggcgcccaaggcggagaagaagccggcggcgaagaaggtggcggaggaggagccctcggagaaggcggctccggcggagaaggcccccgcggggaagaaccatcaaggcggagaagcggctacctgcgggcaagtccgccggcaaggagggcggcgacaagaagggtaggaagaaggcgaagagagcgt

SEQ ID NO: 60179 - DNA, 269 bp, Zea mays
agcgcaagagtcaatatcttgatgacattgctactctcactggaggcactgtcatcagagaagaagttggattatccttagacaaggcagacaatgcggtcctaggaactgctgctaagcttgtagttactaaggattcaacaacaatagtgggagatggcactacacaggaggaagtgaacaaaagggtgacacaaatcaagaaccagattgaggctactgaacaagaatatgagagagagacactaaacgagaggtagctaaactct

SEQ ID NO: 60180 - DNA, 267 bp, Zea mays
aatgccagtgcacaattctgtggtgttgctgagatgattggaccagtggactttgagaaaagtgtggattactggcagcaagataagtggactggtcaattccctgtgaagtggcacatagtgaaggatgttcccaataatcttttccgacatataattcttgaaaacaacgacaataaacctgtaacaaacagcagagatacacaggaggtgaaactagagcaaggaatggagatgctgaagatctttaagaacctgatgatgatg

SEQ ID NO: 60181 - DNA, 270 bp, Zea mays
tcctccgcaacttcacagcgtatcatcgttttccatcgctcctactcctatcatccagaaaatctgagcggtattgatggcgcccaaggcggagaagaagccggcggcgaagaaggtggcggaggaggagccctcggagaaggcggctccggcggagaaggcccccgacgggaagaagcccaaggcggagaagcggctacctgcgggcaagtccgccggcaaggagggcggcgacaagaagggtaggaagaaggcgaaaagagcgtggag

SEQ ID NO: 60182 - DNA, 260 bp, Zea mays
  unsure (1)..(260): unsure at all n locations
gaaaaggtctacgagccagtaggggaaggttcttacatcaaaatgattgacatggtaaaggggcaagatggtcagttacaggtaaataatatcagcggttatctccctgggaggattgtcttcttcttggtgaactctcatcttacaccacgacctattttgcttaccaggcatggtgagagtttacataatgttagaggaagagtcggtggtgatacagttctaagtganactggcgaactttatgcaaagaaactagc

SEQ ID NO: 60183 - DNA, 263 bp, Zea mays
agcatcctgatgggaatcgcgcgctgattgcggcccactcgccgccggttcacgggctggtcgtcccctccgaggatgcccaccagagcgagtacgtgtcggagcaggataaacggcgggagttcatctccgggttcacagggagcgctggcttggctcttatcaccatgaaagaggcattgttgttcgacggatggccgctacttcttgcaagcaacacagcaactgagcgatcgttggaaacttatgcgcatgggaaagat

SEQ ID NO: 60184 - DNA, 265 bp, Zea mays
gggaggttgcctcaggtgcggacagtcgccggcggcaccatcggtgtctgagatgaaggagagaggcggctctagggcggcagtggacgagcgctacgccagtggaagtcggtcatccccgttctctacgactggtttgccaaccacaacctcgtttggccatgcctctcctgccggtgggggccacagtttgagaaagctacctacaagaatcgtcaacgcctttacctatctgaacagaccgatgggagtgtgctaatactct

SEQ ID NO: 60185 - DNA, 266 bp, Zea mays
actgaaacctcctcacagttttgatgcttgtttcatggacatacagatgcctgaaatggatggatttgaagccacaaaaaggattagagtgatggaaagagatctaaatgagcaaatagaacgtggagaagccccaccggaatgcgcagggctccggcagtggcgaactccaatattagccatgacagcagatgttatccaggcgacgcacgaacagtgcttaaaatctgaaatggacggttatgtatccaagccatcgagggcga

SEQ ID NO: 60186 - DNA, 268 bp, Zea mays
ggtcccttgtatgctggatttgataccattctgggcttccatattccatcatacaagggaccttggaaacgcaagagaattaaaaatcctaactacaagggtaaatggaagaccccatggatcgataatccagagtttgaggatgatccagatctttatgtgctgaagcctttgaagtatattggaattgaagtttggcaggtaaaagctggttcagttttcgacaacattctgatttgtgatgaccctgagtatcaagaaaggttgt

SEQ ID NO: 60187 - DNA, 267 bp, Zea mays
aggagaagcctccccaagcttcgaatcgctatgcagcccgtcaaggtgtacgccgaccggcggtcgcaaccctcccgagctgtcatcatcttctgcagggtgaaccagatcgatttcgaggaggtcacggtggatctgttcaagtctcagcacctcacacccgaattcaaaaaaataaacccaatgggacaggtacctgcaattgttgatggaagattcaaactatttgaaagtcatgcgattttgaggtatcttgcacggttttcc

SEQ ID NO: 60188 - DNA, 241 bp, Zea mays
  unsure (1)..(241): unsure at all n locations
ccgcaagaagctcattcagatcgatgtgagctcggatacagtgtgcccttggtgctttgtcggtaaaaagaaccttgagaaangaatggagncaagcaagggcaagtttgatttcgaagtccgttggcatccattctttctggaccccgacgcgcctaaggagggcgtcaagaaatctgacttcttcaagatgaagttcggtcctgtccaatatgaaggtgcgatgtctcgcatgactgag

SEQ ID NO: 60189 - DNA, 293 bp, Zea mays
cttcaccgtgacggtgcggtggagcgggccgccggccgccggcggcgtcgagggcaacctgaagtgggtgtcgagggatcacgttgtccgcagcccgatcgtgataccgccggcgaaggccgccgcgtaggcgtagctcccagcccaattgatgagtgccccggcattggtcggcaaacggcatgtatccctccctccaacaaggtcagtagcggtagccggtaggtggtaatcttgagtcagtgtgaccggtgtacgtatggcgaaggaagtaggcaggcgactgtgtatag

SEQ ID NO: 60190 - DNA, 297 bp, Zea mays
gctctaggtgcattcttgagtgcaacagctcaagatatccgcacaatgattattggccgattgcttgctggaattggtatcggggtctcatctgctcttgtacccctttacatatctgagatctcaccaactgaaattcgtggaacacttggtaccgttaatcaactttttatttgcattggaattcttgcagctttgttagctggattgcctctggcaggaaatcctgcctggtggaggacaatgtttggaattgctgtagttccatccattctgctggcttaggaatggcctttt

SEQ ID NO: 60191 - DNA, 298 bp, Zea mays
cttagaatatacaggcctgctgaatcgacaacaagtcggcatcttccttgcagccatgagctatgccaatcggttccaggctgcacaaacccaaagcagccttgcccatacaacattgactacttttcagaaaatactaccagctctggtttgctaattgaggatacactacacttgaactacagggaggaccatgtacccgtgaatgcttcagttattattggctgtggtcaaaagcaaagtggtgattatctggatggtattgcaccggatggactccttggcttggaatggcaga

SEQ ID NO: 60192 - DNA, 294 bp, Zea mays
aagcaatgcagtacttggagagaagagagtgtgagtacgaccagaagatatccattgatttctacaaggaaggagatcccttgaaaccagctgtgacaggcgtcttagtgttcgtttccactccagatccaattggcaacaagtactatcttggccctgctcctttgcaggatatggcaaggcaaattgctacagccaatggccctactggctataatagggattacctgttctcaatggagaaggcattagccagcattagccacgaagatgattcgatcaagagcttgcaaa

SEQ ID NO: 60193 - DNA, 293 bp, Zea mays
tggaaggtcttctgtgacaattacctagatggtggatatcatgttccatatgcacatggggctcttgcatcgggtctgcagcttcaatcctatgaaacacttacatatgaaagagttagtgttcaaagatgtgaaagtgcaccagcagaaccagatgacttcgatcgcttagggacaaaagctctctatgcctttgtttatccaaactttatgatcaacagatatggtccatggatggacactaatctagctgtcccattagattcaaccagatgcaaggtgtatttgattat

SEQ ID NO: 60194 - DNA, 298 bp, Zea mays
gagcggccaacccaacccaacccaacccaccactgcctccctccccgttccccagtccccaccccgaccggctgctcctcctcctttccccgcgccatcctcgaggcatcaccggcgccgcaacttcgttgaggaggaagcccgcacccgcccccgatccgatggccaacagcaacctcccgcggcggatcatcaaggagaggcagcgactgctcagcgagccagcgccggggatcagcgcgtcgccctcggaggagaacatgcgctacttcaacgttatgtccttgggccggcgcag

SEQ ID NO: 60195 - DNA, 296 bp, Zea mays
tgattacaaaatcaatgtatgacaaacagcttgatagtgggaaaggaactcttcttcacttatgcgatgacgtgatacagcaagaagttaaagaggtcataatttgttactacattttaatggagcagggaaaagccactatacaagatcttgatttacggtgtgaagagctaatcaaagaagagtttggcgcagattgcaattttgatgttcatgatgctataaagaagttagagaagcttagcattgttcatcgggattcgattggaaggatcttatgcgtccgttgaagcgtg

SEQ ID NO: 60196 - DNA, 298 bp, Zea mays
catgtgctcttatctggggtattgcacatgttccaattgccattatctggggtattgcaattggaacatgtgctctttgctacaataacactcatgtctttagaggagttgtgaagatgagacgtggtctcacggcacgaataattgacgagacaaactcaatgacagatgtctatactgctttctatgagttttcttcattgatagagtcaaagattgatgacagtgatccaaatgctgctctaacacagagacgtgtggattcaataaagcaaacttgcaatcatctggtttggta

SEQ ID NO: 60197 - DNA, 274 bp, Zea mays
tcggctcgaggaagatggcactgtgcgagtgtggaaccttgcaacccaaaaatgtgttgctgttcttaaagagcatttttcagcagtcacttcattggcattgtctgatgatggacaaacattgctcagcgctgggagggataagattgttaccgcatgggatattcgtaagtacagctcaaagaagacaataccgacatatgaaatgatagaagctgtttccttcattggatcaggaagtgagctcttggcttgtttgggcatagaactggca

SEQ ID NO: 60198 - DNA, 286 bp, Zea mays
ggctctgttaagttgccccatatccctcgtcccaagatgaaggtgtgcatgcttggtgatgcccagcatgttgaggaggccgagaagatgggacttgactacatggatgttgaggctctcaagaaaatgaacaagaacaagaagcttgttaagaggcttgccaagaagtaccatgctttcttggcatcagaggccatcatcaagcagattccccgtctccttggtcctggtctcaacaaggcaggcaagttcccgaccctggttactcaccaggaatcctcgagtc

SEQ ID NO: 60199 - DNA, 291 bp, Zea mays
gaagccgccgccgctgcagtgtccatagccaccgcaggagactgagatggggggttttgtcaagacccacaagaccaatgcgtacttcaagcgtttccaggtgaagttcaagagaaggcgcgctggcaagacagactacagggccaggataaggctgattaaccaagacaaaaacaagtacaatacacccaaatacagatttgttgtgcgatttaccaacaaggacatcacagcacaaatcatctctgctagtatagcaggtgatatggttcttgctctgcttactcgcat

SEQ ID NO: 60200 - DNA, 291 bp, Zea mays
aggttgagttgaccaaggattttgagatgggtgtctccaacaagacccctgagtttcttaagatgaacccccttgggaaggttcctgttctggagactcctgatggccctgtttttgagagtaatgctatcgcacgctatgttgctcgcttgaaggatgacaaccctctttttgggtcttctcgtattgaacaagcccacgttgagcaatggatggattttgccgcaacagaagttgatcctggtgttgcatggtacttgtatccaaggcttgggtactcccttatgttag

SEQ ID NO: 60201 - DNA, 287 bp, Zea mays
gctcttctaacttctgttgtacagccttgatgatcccaacactttcggtaacaggattcacaggatgctgaagcttggactgagcattgatgaagatgctggtgaagcagatgctgacatgcctcctctcgaggacgccgatgctgatgccgatgctgagggtagcaagatggaagaagttgattaaatctaacttaattattgatttgcctttgtgtttttagaaacaatgattggggaacagtcttttactatgtttatgttttgaattttcgaattttggaatg

SEQ ID NO: 60202 - DNA, 287 bp, Zea mays
ggtgtggaatggcgctttcgccacatattcagaggtcaaccacgaaggcatcttttgcagagtggctggagtgtttttgttagtgccaaacgtcttgttgctggcgatgccttcatctttctaagaggtgatagtggggagcttcgtgtaggagtcaggcgtgccatgaggcagcaagcaaatgttccgtcttcagtaatatcaagccacagcatgcatcttggtgttcttgctacagcatggcatgctgttaacactgggaccatgtttacttctactacaagcct

SEQ ID NO: 60203 - DNA, 286 bp, Zea mays
actgtagctaatcatgaccggagtagcagtccttgtggtcgacagacttggcaggagaccattgcttattggaggtgtcagtggaattactgttgccttatttttgctgtcctcctactacactttactgaaagatgcctcctatgtggctgtaatagcgcttctactatatgttggttgttatcagctctcatttggtcctattggctggcttatgatctcagaggttttcccgctgaggctgcgagggcgtggactgggcgttgctgttctgtcaattttgcgt

SEQ ID NO: 60204 - DNA, 293 bp, Zea mays
gattgcacggaaatatgatatagttgttgatgcaactgacaaccttcctactaggtatatgatcagcgattgctgtgttttgctgaacaagccacttgtatctggtgcggcattaggcttagaagggcagttgactgtttatcatcataatggaagcccatgctatcggtgcctctttccaactccaccacctgtggcagcctgccagagatgctcagacagtggtgtccttggggttgttccgggagtgattggttgcttacaagctctggaggcataaaggttgcaactgg

SEQ ID NO: 60205 - DNA, 291 bp, Zea mays
tgtaagatggcatcagcagagctttcccgtgaggaaaatgtgtacatggcgaagtcgctgagcaggcggagaggtacgaggagatggttgagttcatggagaaggtagccaagactgttgactcggaggagctcactgtggaggagcgaaacctcttgtctgttgcatacaagaacgtcattggagcccgccgcgcctcatggcgcatcatctcctccatcgagcagaaggaggagggccgaggcaatgaggaccgagtaacactcatcaaggattatgtggcaagattga

SEQ ID NO: 60206 - DNA, 288 bp, Zea mays
aacacaaggtggtctagaagaccagtggaagaggcgcacagtgctccaaacagagggttcctttcccgctttggtgaaccgtctgccagttatcaaatctgaatctctggagttctctcctgtcgagaatgcgattggaatgatcgaaacaaggacagctgcattgagaaatgagctagaagaaccacggagttctgaaggtgatcaactcccaaggcttcagagcttgcaaaggatactccaaggaagtgtggctgtgcaggtcaacagtgggtattaagtgtgtgc

SEQ ID NO: 60207 - DNA, 290 bp, Zea mays
acgttatgaagagattgtgaaggaagtctcatcctacctcaagaaagttgggtacaaccctgataagattgcctttgttcccatttctggttttgagggcgacaacatgattgagaggtccaccaaccttgactggtacaaaggcccaaccctgcttgaggctcttgaccagatcaccgagcccaagaggccttcagacaagcccctgcgtctgcccctccaggatgtgtacaagattggtggtattggaactgtaccggttggtcgtgtggagactggtgtcatcaagc

SEQ ID NO: 60208 - DNA, 286 bp, Zea mays
cgcactggctcctagcagcatgaagatcaaggtggttgctcctccagaaaggaagtacagtgtctggattggaggatccatcctggcatcgctcagcaccttccagcagatgtggattgccaaggctgagtacgacgagtctggcccgtccatcgtgcacaggaaatgcttctaattctttgggcccaagagatgcaagccgagaggagccattatcgccagcctcccgccccgtttctttctccttttgttgctgtttcttcattagcatgaacaaagttttctg

SEQ ID NO: 60209 - DNA, 286 bp, Zea mays
atttcattgctccagaggttctatgacccagatgtaggccacatactactagatggcgtggacatacgcaagttccagcttcggtggttaaggcagcaaatgggcctggtcagtcaagaaccggccttgtttaacgacacgataagggcaaacattgcctatggaaaagatggacaggcaacagaatctgagatcgtatctgccgcacaactggcaaacgctcacaagttcatcagctcggcgctccagggatatgacacaatggttggaagcgtggagctcagct

SEQ ID NO: 60210 - DNA, 288 bp, Zea mays
aaagcccatggagtaaagttcagtgtgagatgattctagcattcctctcattcgctgagtatttccgtcccagattctttctgttagaaaatgttcggaactttgtttccttcaacaaagggcagaccttccgtttggcagttgcatctcttctggagatgggataccaggtccggtttggaattctagaagcaggggcttttggtgttgcccagtccaggaaaagggcgtttatttgggctgctgcacctggagagatgcttcctgattgccagagccgatgcatgt

SEQ ID NO: 60211 - DNA, 286 bp, Zea mays
attcaggtttacaagtcaggatcagtggggagatccttggacatcacccggttctctaattatgctgaacttcgagaggaactgggtcagatgttcggcattaagggtcagttggacgaccctgatagatcaggctggcagcttgtatttgtcgacagggagaacgatgtgcttctccttggagacgacccgtgggagtcatttgtgaatagtgtatggtacatcaagatactttcacctgaggatgtgcataagatgggaaagccaggaacgatccacgctacct

SEQ ID NO: 60212 - DNA, 289 bp, Zea mays
gactagttctagagcgcgcgtcgcggtcgcacgcgtaccaccgccgtgggctctgggccatcaaggccaagaacggcggcgtcttccccaaggccgagaagcccgccgccgccgcggaacccaagttctaccccgccgacgacgtcaagcctcgcgttcccagcacccgcaagcctgaacccaccaagctcaggtcgagcatcacgcctgggacggtgctgatcctcctcgcggggcgcttcatggggaagagagtggtgttcctcaagcagctcaactccggcctgct

SEQ ID NO: 60213 - DNA, 291 bp, Zea mays
ctatttcaataccttgccgctgtatttgcaactgatttacactctagagcttttctgcgccttccaaaaactcttggagtggacttccgtgcttcgtgtttctgccataagaagactattgacatgggatatgtctgttcaatttgtttgtcaatattctgcaagaatcagaagaagtgttcaacctgcgggtcagaattcagtcgtgccatgcctgatttgaactccgtgccggatcaaagcaagtagtgtccagtgcgaagttaacccatcacagacaatgcttttctc

SEQ ID NO: 60214 - DNA, 280 bp, Zea mays
gaggaggaggaggcggcggtctgtaccgggagattctcagggacgagaccgtgcagaggctcaaggagctgggcaagatatctgatggggatggctaccttgaaaggacgtttctgagtccggcctctatcagagccactggtgtcatcgtcagctggatgaaagacgctgggcttacgacgtgggtcgatcagatggggaatattcatggtcgatatgagccggcaaattctaccagagatgccttgttgattggatctcatatgacactgtcgttgat

SEQ ID NO: 60215 - DNA, 283 bp, Zea mays
ccaggaataccacactgccaacctcaaaatcggaggtattctcaacagctgcagatggacagacgagcgttgagattaatgttctccagggagaaagagagtttgttagggacaacaagtcccttggaagcttccggttggacggaatccctcctgcacctcgtggtgtcccacaaattgaagtgaagtttgatattgatgcaaatggtatcctctcagttgctgccattgataagggcactggaaagaaacaggacatcaccatcacggtgctagtacgcta

SEQ ID NO: 60216 - DNA, 285 bp, Zea mays
gtcgaagaggaggactacgagagactccgtgaatcagttgacatgcatgacaactttgaccagattggtcttgcccagaagcttgagaagcatgaattgctggagatgaggaggatcgccgcctacatttacaagaaggctggcaggtggaagcagtcgattgctctatcgaagaaagacaacatgtacaaggactgcatggagacatgctcacaatctggcgaccgtgaactgtcagaggacttgctcgtgtatttcattgagcagggaagaaagaatgttttg

SEQ ID NO: 60217 - DNA, 282 bp, Zea mays
aagcttctttcaggcgcgtttctttttccagcaactcatatcaggggtcagctactgccattccatgcaagtatgccatcgcgacttgaagctagagaacaccctgttggacgggagcaccgcgcctcgcctcaagatatgtgattttggctactcaaagtcatcagttctacactcgcagccgaaatctacagtgggaactcctgcatacattgctcctgaggttcttctgaagaaggaatacgatggaaaggtcgctgatgtgtggcatgtggagtaacg

SEQ ID NO: 60218 - DNA, 288 bp, Zea mays
cgcagacaagtagagtactgagaagaaaagacatgggtcaagcactcggcttgattcaagtggatcaatcgacagtagccatcaaggaaacttttgggaagtttgacgaggtcctagagcctggatgccacttcttgccatggtgcatagggaagcaaattgctgggtatctgtcactgcgtgtgcagcagcttgatgtccgctgcgaaacaaagacaaaggataatgtcttcgtcaatgttgtggcatctgtgcaatatcgtgcccttgccataaggcatctgatgc

SEQ ID NO: 60219 - DNA, 283 bp, Zea mays
gacatcgtagtcgagttcatcaagaacgaggattacaagtatgttcgtgttctcggggccttctacctgcgtctcactggcacaattgctgacgtctaccagtatcttgagccgctactacaacgactaccgcaagatcaggcacaagctcagcgatggacagttcacacttacccatgttgatgagttcattgatgagttgctgaccaaggattactcctgtgatacagccatgcctcgcatccagaaaagatgggttcttgaagcgtctggaactctggaa

SEQ ID NO: 60220 - DNA, 281 bp, Zea mays
gggctgcccggtgtaggcaagtcaaccatcatgagcgagctttattaatatgatgcaagctacctggtttggtggtaatgcttatgtgattggtgattctgcaaagcataagcagaagtggcacgtctactatgccaccactgagcacccctgaggagcttgttgttactcttgagatgtgcatgactaggctggacaagaagagagcttatgtcttcttcaagacctctattgatggttacacatcttgtgctaaggatatgaccaagccttcagtgatt

SEQ ID NO: 60221 - DNA, 277 bp, Zea mays
cagcaatcacagcagcccggagaacggccaggtccgacaagatgcagatcttcgtgaagacgctgacagggaagaccatcaccctcgaggtcgagagcagcgacaccatcgacaatgtcaaggccaagatccaggacaaggaagggatcccgccggaccagcagcggctgatctttgccgggaagcagctggaggatggccgcacccttgcggactataacatccaaaaggagtctacgctccacctcgtgctcaggctccgcggtggcatcattga

SEQ ID NO: 60222 - DNA, 276 bp, Zea mays
gagatgtcggtggccggggacaggctgctgtacaaggtccccggcgagcgccggggagccgacggcgtgtggtgcctaacgttcgggaacgcggacatggtgcccctgacggcatacgtgatcgggcaccaccaccagatgaacctagctgggtcgagtacgacctggagcgcggtcgcgttgggatcgcgcctgtcaagtgcgacgtcgccagcgagcggctcggcctgatgttgtgacgtggcctggcgaaccgtaaccgctctggctcggggg

SEQ ID NO: 60223 - DNA, 277 bp, Zea mays
cacatcactaaatctgagctatgctactgtacgaggccctgaactgattaaattcattagcagatgcaaaaatttgcaactcttatgggtgatggacttgattgaagaccatggtcttgctgttgtggcatcgtcttgtaacaaactgcaggagttgcgggttttcccttctgctcctttcgaagcagctgagcaggtctctttgactgaaagaggtcttgttgatgtatctgccagttgcccaatgctggagtcagtcctctacttttgcagacgg

SEQ ID NO: 60224 - DNA, 230 bp, Zea mays
acgctttactggagatctggcaaaagaagctgggcacgttctggctctagacttcattgaaagtgtgattaagaagaaccaaagcataaatgggcatcacaagaacataaccttcaggtgtgctgatgtgacatctaacgacttgaagattgaagataactctgttgatctgatattttcaaactggctattaatgtacctttcagatgaggaggtccaaaagcttgtgg

SEQ ID NO: 60225 - DNA, 278 bp, Zea mays
aagcaatgcagtacttggagagaagagagtgtgagtacgaccagaagatatccattgatttctacaaggaaggagatcccttgaaaccagctgtgacaggcgtcttagtgttcgtttccactccagatccaattggcaacaagtactatcttggcctgctcctttgcaggatatggcaaggcaaattgctacagccaatggccctactggctataatagggattacctgttctcaatggagaaggcattagccagcattagccacgaagatgattcga

SEQ ID NO: 60226 - DNA, 276 bp, Zea mays
ggccggcgggccgcggaagaagtcggtgacgaggtccgtcaaggccgggctgcagtttcccgtcggccgcatcgggcggtacctgaagaagggtcggtacgcgcagcgcgtcagcacgggcgcccccgtctacctggccgccgtcctcgagtactggccgccgaggtgctggagctggccggcaacgctgccaaggacaacaagaagacccgcatcatcccgcgccacgtgctccttgccatccgcaacgacgaggagctcggcaagctgctgtcc

SEQ ID NO: 60227 - DNA, 264 bp, Zea mays
ttccatttggaataaaatttttattgcacatgattgattttcggatatttagtagcatttcttcttaaataaaaatcctagtaaataatatatataataatattagtctaaaaataaatattttatttataaataattttggtttaattattataatttttagggttatttaaaaattatttcgactttagaacggaaaaaaaaaaaaaaaaaaaaaaaaagggggccccccaattaaaaacctcttcaccccggaatttattt

SEQ ID NO: 60228 - DNA, 277 bp, Zea mays
actgaaacctcctcacagttttgatgcttgtttcatggacatacagatgcctgaaatggatggatttgaagccacaaaaaggattagagtgatggaaagagatctaaatgagcaaatagaacgtggagaagccccaccggaatgcgcagggctcggcagtggcgaactccaatattagccatgacagcagatgttatccaggcgacgcacgaacagtgcttaaaatctgaaatggacggttatgtatccaagccattcgagggcgagcaattgtaca

SEQ ID NO: 60229 - DNA, 273 bp, Zea mays
cagcgtatcatcgttttccatcgctcctactcctatcatccagaaaatctgagcggtattgatggcgcccaaggcggagaagaagccggcggcgaagaaggtggcggaggaggagccctcagagaaggcggctccggcggagaaggccccgcggggaagaagcccaaggcggagaagcggctacctgcgggcaagtccgccggcaaggagggcggcgacaagaagggtaggaagacggcgaagaagagcgtggagacctagaagatctacatc

SEQ ID NO: 60230 - DNA, 272 bp, Zea mays
gcaaggaggagggagatgcagggcgccagcacatgctcctggaggagcccttccgcctcgcctccgtcctctcccccgccaagcctaaagtattcccatcactcaccaagatagttgggacgctcgggcccaattcacactcggttgagatattcaggaatgcctcactgctggaatgtcagttgcacggtttgatttctcatggatggatgctgcgtatcaccaggagacccttgataatttgaggacagcggcacagaatgtgaagaagt

SEQ ID NO: 60231 - DNA, 274 bp, Zea mays
actcatgaagatgcttttcaatgtggagacatatagagctgctatgatggaatttgaaattaatatgtcagaaatgcctcttgggaagctaagcaaggaaaatattgagaaaggatttgaagcattaactgagatacagaatttattgaaggacaccgctgatcaagcactggctgttagagaaagcttaattgttgctgcgagcaatcgctttttcactcttatcccttctattcatcctcatattatacgggatgaggatgatttgatgatc

SEQ ID NO: 60232 - DNA, 271 bp, Zea mays
aaaagaagcagcaaatgagtggattgagaagctcaaacttgctggtgccaacttctatgccagggctgtcaaagatattgattgtttaattgcatgtggtgagctcgacaatgaaaatgctgaagtcaggaaagcaaggaggctgaagataccaattgtaagggagggttacattggagaatgtgttaaaaagaacaaaatgctgccatttgatttgtataaactagagaatgccttagagtcctcaaaaggcagtactgtcactgttaaa

SEQ ID NO: 60233 - DNA, 276 bp, Zea mays
aacacatctcctcgcatttcttcccatccgatccccccttcgcaaccaaaaccccaactcgccccgcatcgatggcagccacagccgagaacaaccccgcagcgaagaaaccggcgcaggaggagcccgcagccgagaaggcgcccgctgggaagaagccgaagggcaagaagcgggcccccgctggcaagtacgctgccaaggaaggcgacgagggcaagaggggcaagaagaagggcatgaagagcgtggagacctacaagatactacatcttc

SEQ ID NO: 60234 - DNA, 269 bp, Zea mays
agcgcaagagtcaatatcttgatgacattgctactctcactggaggcactgtcatcagagaagaagttggattatccttagacaaggcagacaatgcggtcctaggaactgctgctaagcttgtagttactaaggattcaacaacaatagtgggagatggcactacacaggaggaagtgaacaaaagggtgacacaaatcaagaaccagattgaggctactgaacaagaatatgagagagagaaactaaacgagaggatagctaaactc

SEQ ID NO: 60235 - DNA, 274 bp, Zea mays
atggcatgtgagcgaccaactcaaagggagggcagcattttagaggtagttaacaggaacaactatggtaatgatcattgtgccaaagaatttggtattaaggtgacaaatgaacttgccttggttgatgcacgtgtgctgccagctccgacgcttaagtaccatgactctggacgagaaaaggtgtgtagtccttccgttggtcagtggaacatgaacaacaagagattgatcgatggagtatccattcagtattgggcttgtgtgacttttg

SEQ ID NO: 60236 - DNA, 101 bp, Zea mays
cttgtaactgagaccgatacaagtccagctagaggatatgcattgcttgagtatgtgcacacacgagacatgaaaaatgcctacaagcaagcagatgggag

SEQ ID NO: 60237 - DNA, 268 bp, Zea mays
aagaaggatgaggagggtaaggttgaggatgttgatgatgaaaaggaagaaaaggaaaagaagaagaagaagatcaaggaggtttctcatgagtggcaattggtaaacaagcagaagccaatctggatgaggaagcctgaggagattaccaaagaagagtatgctgctttctacaagagcttgaccaacgactgggaggagcatcttgccgtgaagcacttctctgttgagggccagcttgagttcaagctgtactcttgtgccaaac

SEQ ID NO: 60238 - DNA, 272 bp, Zea mays
aggacaccgtggggcagtacgagtcccacatcgcgttcactcttcctgggctctaccgtgtcgtccatggcatcgatgttttcgatcccaagttcaacattgtctcccctggagcagacatgagtgtttactacccgtatacggaaacgacaagagactcactgccttccatcctgaaatcgaggagctcatctacagcgacgtcgagaactccgagcacaagttcgtgctgaaggacaagaagaagccgatcatcttctcgatggcgcgtc

SEQ ID NO: 60239 - DNA, 267 bp, Zea mays
caatgaacctacagcagccgctctgtcttatggaatgaacaacaaggaaggcttgatagcggtatttgatcttgcaggagacagctgaatcttaccttggcaagtctatctcaaaggcagtgattactgttccagcttatttcaagacgctcagcgtcaggccacaaaggatgcaggccgcattgctggccttgatgttgaaaggatcatcaatgaacctacagcagccgctctgtcttatggaatgaacaacaaggaaggcttgat

SEQ ID NO: 60240 - DNA, 269 bp, Zea mays
catggatctttgcttggacacaaacaaggttccatctgcctgtctggcttggatttggtgcagcgataaagcacatcatgcagaaggacatcaggaacatccatatactgagagaaatgtacaatgagtggccattcttcagggtccccttgatttgcttgagatggttttcgcgaagggagacccgggaatcgcagctgtgtacgacaaattgctagtggctgatgatttgcaatccttcggcgagcaactgaggaagaactatgagg

SEQ ID NO: 60241 - DNA, 268 bp, Zea mays
tgtaaacaagaacaatgtgaatgttacgaaatcttgtttgcctgatgagtataagcctgagaagtggatgttagctgatctggagtcaagggcgttgagccaactgaaccttgcaatagtcggtcatgttgattccggcaagtcgaactatctgggagattactgcatctcttaggaaggatatcaaaaaaatatatgcacaagaatgaaaaggagtcgaaagaaaaggggaaggggtcatttgcttttgcatgggccatggatgaga

SEQ ID NO: 60242 - DNA, 257 bp, Zea mays
gactagttctagatcgggcgctacttgaagaagggccgctacgcgcagcgtgtcggcaccggcgcccccgtctacctcgccgctgtcctcgaatacctcgccgctgaggttctggagctcgccggtaatgctgccagggacaacaagaaaatcgcattattccgcgccacgtgcttctggcgatccggaacgacgaggagcttgggaagctgttgggcggcgtgactatcgctcacggcggtgtgctccccaatatc

SEQ ID NO: 60243 - DNA, 245 bp, Zea mays
actgaaacctcctcacagttttgatgcttgtttcatggacatacagatgcctgaaatggatggatttgaagccacaaaaaggattagagtgatggaaagagatctaaatgagcaaatagaacgtggagaagccccaccggaatgcgcaggctccggcagtggcgaactccaatattagccatgacagcagatgttatccaggcgacgcacgaacagtgcttaaaatctgaaatggacggttatgt

SEQ ID NO: 60244 - DNA, 264 bp, Zea mays
gagagagagagagaggagtgggagacccgcgagaggctgccgtgtagggaccgtagactcagcgactgcgaaggagggataaggggatggccgggatcggaccgatcaggcaggactaggagccggtcgttgtgcggaagaaggcacccaccgccgccgccaagaaggatgagaaggccgtcaacgccgcgcgccgcgccggtgcggagatcgataccatgaagaagtacaacgctggtacgaacaaggcggcatccagcggta

SEQ ID NO: 60245 - DNA, 266 bp, Zea mays
ccaagatcaccttgtggcctggttgaacggaccctttcacccaccttccacatacgtgtttgttgcattaatgatggctcagattgaggtccttaggaagaagggccactcttactcagagataattaacgagagcctgatcgatccgtggactcgttgaacccgttcatgcatgctcgcggtgtggccttcatggtcgataactgctccacaactgctcgtttgggatctaggaaatgggcaccacgcttcgattacatcttgac

SEQ ID NO: 60246 - DNA, 264 bp, Zea mays
gaatctgatatcaagaaatcatataggagactttctattcagtaccatcctgataaaaatcctgatccagaggctcataaatacttcattgaatatatatccaaggcatatcaagcattaactgatcctatatctcgtgagaatatgagaaatatggtcaccctgatgggcggcaggggctgcaaatgggcattgctttgcccaagtttttactaaatattgatggtgcatctggtgggataatgcttcttggaatagtcggat

SEQ ID NO: 60247 - DNA, 277 bp, Zea mays
ctattcgtttggaattgtcatgtgggagttgcttactggggaagagccacactctggcatgcgtgctgctgaaattattgggggcattgtaaacgattccctacgtcctgaaattccttcatggtgtgatcctgagtggaagggattgatggaaactgttggtccagtgatccagctgagagaccgtccttcacggatatatctcaaaggttgaggaaaatggccgccgcaatgaatgtgaagtaaaggtccggaagccatatttgtcttgtatgtg

SEQ ID NO: 60248 - DNA, 267 bp, Zea mays
attattgctttggcttacatgttagaagctgagatccatgggagtagccatttgcgggagcaccctcctcctctgcttgaggtgaatgtcagaaagctgtcagaagctccactgcctggttggggctctaatgtgcctaacctgaagagtgggaagaattggatcagatgtcagaagctggtggagatatcaattctagaatacttcctctgaaggacattgagaatcaagatctcccgatgagcgagaccaacagtgtgtgtgagg

SEQ ID NO: 60249 - DNA, 281 bp, Zea mays
aaattatttaggctagtgagcacttgcgggaggctcctcaatgactaccaaagtttagagagggaaggcaaccaggggaagctgaatagtgtttctctacttgtgctccacagtggtggttctatgtccatagaagccgctaaaaaggcaatgcagaagtccatagacgtgtctaggagagacttgctaagattggttctcaggaaagaaagtgctgttcctaggccatgcaaggagctcttctggaagatgtgtaagatacttcactgttttactctcag

SEQ ID NO: 60250 - DNA, 278 bp, Zea mays
acgacgagcctctccaccaccatgttgcattgccctggagtcattggctcgacgtagacaactataatcaaggacaatgcaacatggtggtggagaggctcggcgattacctgatcgagcagggcttctaaaagttcgtcatgttctgttttggtcatttgggcaccaaagtttgcgcctcatttggttctgtaatccgtgagctcgtgcatgtacttggcgtattgcatgtagtgaataatttagcttgggtttgtttgttggggcagtgttgggga

SEQ ID NO: 60251 - DNA, 283 bp, Zea mays
agcgagagcttctgcataagaacaacaaatcaaaagcgtgatcagctcggtgccaacaaaacctcaacaaccaagtttcatgtctgatctcgacgtccagcttccatctgcctttgatccgtttgctgaggcaaatgctgaggactctggtgctggtcctggaacgaaggattatgtgcatgtgcgcatccagcagcgcaacggcagaaagagtctgactacagtccagggtctgaagaaggagttcagctataacaagatcctcaagatctgaagaaggaat

SEQ ID NO: 60252 - DNA, 284 bp, Zea mays
cagctgcattgcagggtattgatatcaaggaaatgctagctggtgcagctttaatggatgaggaaacccggaacactgtggttaaagaaaatccagcagcattgcttgcattatgttggtattgggcatcagaagggataggcaataaggatatggttgtacttccttacaaggatagtttgttgcttttgagtagatatttgcaacaacttgtcatggaatctcttgggaaagaatttgatctggatggcaaccgggtaaatcaaggctatctgtatatggaa

SEQ ID NO: 60253 - DNA, 282 bp, Zea mays
ggccggaacccacctgctgcgcacctgcaagcctcgagtggagctcttccacggccgcggtggagatggcggcgaatctggaggacgtgccgtcactggatctgatgcacgagctgctccgccgcatgaagtgcagctccaagcccgacaagcgcctcatcctcatcggtccacctggctctggaaagggaactcagtctcctattatcaaggatgaatattgcttgtgccatttagccactggtgacatgctgagggctgctgtggggccaagacacctct

SEQ ID NO: 60254 - DNA, 288 bp, Zea mays
catcaggaaggaatatgctgctcgtgctgcatcgtatgaggaggcagaaaatactaaacatacagcaagattcaaaaaagaagaggtgaagattgaagcttgggagggtcgtcaaagagcaaaaattgaatatgaaatgagaagaatagaggaatttgctgagagaatgagaagtgaggccatggaaaagatggccgaaaagctagagatgacgcgccgcatagccgaagagaaacgagcttcggccaacgccaaaatgaaccagcaagcactatagcggttcagaag

SEQ ID NO: 60255 - DNA, 280 bp, Zea mays
acacaggaattacaattgctgagtatttccgtgatatgggctacaacgtcagtatgatggctgactccacctcccggtgggctgaggcattgcgtgagatctcagggcgtttggctgaaatgcctgctgatagtggttacccagcttacttggctgcacgtttggcatccttttatgaacgtgctggtaaggtaaaatgtctgggaagtccagacaggaatggcagtgtcacaattgttggagccgtctctcctcctggtggtgatttttcagaccctgt

SEQ ID NO: 60256 - DNA, 279 bp, Zea mays
gcccccaactacccccagcctcggaaggaaccttccagaagcgcaagactctaaggccgtcgccttcccattcttcctcgccgcgggggtcgcctgagatcacataaacaatggtgaaggctgttgctgtgcttggtagcagcgatggtgtcaagggcaccatctttttcacccaagagggagatggccctaccgctgtcaccggaagtgtctctggcctcaagcctggcctccatgggttccatgtacatgcacttggtgacccaccaatggatgcat

SEQ ID NO: 60257 - DNA, 282 bp, Zea mays
gagaactccatttcgatcccatttgaaatcaacccatcctcgtttcctccgtctagcagcctctcaccctcatggccaagatcaagatcgggatcaatgggtttggcaggatcggaaggctggtggccagggtggccctgcagagcgacgacgtcgagctcgtcgccgtgaacgaccccttcatcagcaccgattacatgacctacatgttcaagtatgacactgtgcacggacagtggaagcaccatgaggtcaaggtgaaggctccaagacccttctctt

SEQ ID NO: 60258 - DNA, 281 bp, Zea mays
gcaatgagaaggtgcaggacctgcttctgctggacgtcacccctctgtccctgggtctggagactgctggaggagttatgacagtgctgatcccgaggaacaccaccatccccaccaagaaggagcaggtattctccacctactcggacaatcagcccggtgtcctgatccaggtctacgagggtgagaggacccggacacgcgacaacaacctgctgggcaagttcgagctctccggcatcccccctgcaccccgtggtgtgcacagatcaccgtgtgct

SEQ ID NO: 60259 - DNA, 279 bp, Zea mays
caagagaactctgtcttccactgcccagaccaccattgagattgactcgctgtacgagggcattgacttctactccaccatcacccgtgccaggtttgaggagctcaacatggacctgttcaggaagtgcatggagcctgttgagaagtgcctgagggatgccaagatggacaagagcagcgtccatgatgttgtccttgttggtggctccactaggatccccagggtgcagcagctgctccaggacttcttcaacggcaaggactgtgcaagaacatc

SEQ ID NO: 60260 - DNA, 279 bp, Zea mays
agttctcctcaaccaaattcaaagtcacagcggcgaaactctcggcgatgtctggccgcggcaagggcgggaagggtctgggcaagggcggcgccaagcgccaccgcaaggtgctgcgtgacaacatccagggcatcaccaagccggcgatccgcaggttggcgaggaggggcggcgtcaagcgcatctccgggctcatctacgaggagacccgcggcgtgctcaagatcttcctcgagaacgtcatccgcgacgccgtcactacaccgagcacgcccg

SEQ ID NO: 60261 - DNA, 278 bp, Zea mays
ctctaaaatttcccccactcgccagtcgcagcagcacctgtagcagccatggacgccagcggagccggtagcaaggggaagaagggggcggccgggcgcaaggcaggcggccccaggaagaagtcggtgacgcggtccgtcaaggccgggctgcagttccccgtcggccggatcgggcgctacctcaagaagggccggtacgcgcagcacgtgggcactggcgcccccgtctacctcgccgccgtcctggagtacctcgccccgaggttctggagttg

SEQ ID NO: 60262 - DNA, 277 bp, Zea mays
ggcaggggcattgacattgagcgtgtcaacattgtgataaactatgacatgccagactcagctgatacttatttgcacagggttggaagggctggacgttttggcacgaagggacttgcaatcacctttgtttcctctgcttcggattctgatgttcttaaccaggtgcaagaaaggtttgaggtagacataaaggaactgcctgagcaaattgacacctcgacctacatgccatcataaatgggaaggacaactgagaaagaggaggataggggat

SEQ ID NO: 60263 - DNA, 278 bp, Zea mays
accggttgcgatccgccgccatcgcttcaagcagcgaaccctagccgccctcagcgacggattgcagatctcccagccatgacgttcaagcggaggaacggcggacgcaacaagcacgggcgcggccacgtcaagtacatacgctgctccaactgcgccaagtgctgtccaaaggataaggctatcaagcggttcttggtgaggaacattgttgagcaggctgctgtgagggacgtgcaggaggcttgtgtgcatgatggattgttcttcccaaattg

SEQ ID NO: 60264 - DNA, 277 bp, Zea mays
ccaagaaatgtgcagaaggcagttctagaaggattgttttctcttggtagggcacaagtctcagactatatcctgaatgagaaaaatcccattgggtcgttgagactagcaagattgagaagtattctcgatgaaggcaaaagtcttcagctgcagttccctgcagaggatcttggcttccactatgcagaaggtgctctagttgttgaagctagttgtgagaagactcatgaaggagaaaaactacagcattctaagagggatcaagagagtacat

SEQ ID NO: 60265 - DNA, 277 bp, Zea mays
gccgtcgtggcctccgatgggccaggggagtatcctgtggtcacggagtcgagggcgggcgacgacgccctcggcgtggtcgtcgtccccggcacggtcgcctacgtcaccaccggagggccggttcccgatggcgccgatgccgtcgtgcaggtggaggacaccgagcagctacctggcggagcggatgggtccaagagggttaggattcttgcgcgggcctctcaaggacaggacatccgcagtgtgggatgtgacataggaaggattcgattgt

SEQ ID NO: 60266 - DNA, 274 bp, Zea mays
aagaagatctcccatttctttgccaatcaaaccattatgaatgctgtggagaaggcgaagaaagtccacatcgtggactatggtatatactacggctttcagtggccgtgcctcattcaacggctctctaccaggcctggtgcccctccgaggctccggatcacggcaatcgacacaccgcaccctggttttcgcccagcagagcgcatagaggagacgggaaggtatctaaaagattatgctgagaccttcaatgtgccttcgagttccgagc

SEQ ID NO: 60267 - DNA, 273 bp, Zea mays
gatacaggctgtggaattggtccacaggatctacctcatgtatttacaaagtttgctcatcctcaaagcggaggaaaccgagggtttaatggtagtggtcttggccttgccatatgcaagaggtttgttagtctcatgggagggcacatctggattgacagcgaaggaaccggaagaggttgcaccgcaacattcgtcgtcaagctcggcgtgtgtgacaacacaaacacctaccagcagcagctgatccctctagtatgccaagcagcgcag

SEQ ID NO: 60268 - DNA, 277 bp, Zea mays
ggagtcttcggataccattgacaatgtcaaggccaagatccaggacaaggagggcatcccaccggaccagcagcgcctcatcttcgccggcaagcagctggaggatggccgcaccctggcggattacaacatccagaaggagagcactctccacctggtgctccgcctcaggggtggcatgcagatttttgtgaagacattgactggcaagactatcaccttgtgctccgtctccgtggtggtcagtaagtcatgggtcgttaagctgccgatgtgc

SEQ ID NO: 60269 - DNA, 276 bp, Zea mays
gtgcaacaagaagggcggcatacgtttcaccatcaacggccactcctacttcaaccttgtgctggtgaccaacgtgggaggcgccggcgacgtgcacgctgttgccgtgaaggccgagcgctcccccgggtggcaggccctgtcgcgcaactggggccagaactggcagagcaacacgctccttgacgggcaggccctgtccttccgcgtcaccaccagcgacggccgctccgtgctctccaacaacgccgccccccccggtggtctttcggccag

SEQ ID NO: 60270 - DNA, 278 bp, Zea mays
actagttctagatccgcatccgctgcctccgcctctcgagtctcgtccacccgtcatcctcctagctcctctactcgccagtcgccatgggcaagattaagatcggaatcaacggcttcggaaggatcggcaggctcgtggccagggtcgccctccagagcgaggatgtcgagctcgtcgccgtcaacgaccccttcatcaccacggactacatgacctacatgttcaagtacgacaccgtccacggccactggaagcacagcgacatcacactcaag

SEQ ID NO: 60271 - DNA, 280 bp, Zea mays
gtggcaagtcgaagcaaagcaggagtgagaagaagagccgcaaggccatgctgaagcttggcatgaagcccatcactggtgtcagccgggtcactgtgaagaaaagcaagaatatgctttttgtcatctcgaagccagatgtgttcaagagcccaaactcggacacctatgtcatattcggcgaggcgaagatcgaggacctcagctcccagctgcagacccaagctgcagagcagttcaaggctcctgacctgagccaaatgatccgaagcctgagaca

SEQ ID NO: 60272 - DNA, 272 bp, Zea mays
gccaaactaatggattacaaggatacccatgtaactactgctgttagatgaagacttcgaagctgtggtgggggatttcggtttggccaaactaatggattacaaggatacccatgtaactactgctgttcgaggaacaattgggcacattgcacctgaatacctttcaacaggaaaatcctctgagaaaactgatgtatttggctatggaattactcttttagagcttattacaggacaacgtgccttcgatctgctcgtcttgctaatga

SEQ ID NO: 60273 - DNA, 273 bp, Zea mays
gtccgcgtgcagaaggtcagaaagagatgcaaactggctgcagttttcgccgaggtcgaccgtgtactgaggccacagggcaagctgatcgtgagggacaccgcggacacgataaatgagctggagagcatggccaagtccctgcagtgggaggtgcggatgacctacaccaagggcagcgaggggctgctctgcgtcgagaagtcgatgtggcggcccaaggaactcgacgctagcacgtgaaatgtgtcgaggaaactgctaccacgtagg

SEQ ID NO: 60274 - DNA, 273 bp, Zea mays
caaggtgtacgccgagaagaccggtaaccacacctttgacccgctcatggacctcctggtcggcaacgtaggcctcatcttcaccaagggagacctcaaggaggtgcgcgaggaggtcgccaagtacaaggtgggggctcctgctcgtgttggtctggttgctccagttgatgttgttgtgccccctggcaacactgggctggatccgtcccagacctctttcttccaggtgcttaacatccccaccaagattaacagggtaccgtagaaatt

SEQ ID NO: 60275 - DNA, 271 bp, Zea mays
ccaggaataccacactgccaacctcaaaatcggaggtattctcaacagctgcagatggacagacgagcgttgagattaatgttctccagggagaaagagagtttgttagggacaacaagtcccttggaagcttccggttggacggaatccctcctgcacctcgtggtgtcccacaaattgaagtgaagtttgatattgatgcaaatggtatcctctcagttgctgccattgataagggcactggaaagaaacagacatcaccatcactggt

SEQ ID NO: 60276 - DNA, 268 bp, Zea mays
cggaatccatgagacaacatacaattcaatcatgaagtgcgacgtggatatcaggaaggacctctacggcaacattgtgctcagtggaggttcaactatgttccctggaatcgctgatcgtatgagcaaggagatcacttcccttgcaccaagcagcatgaagatcaaggtcgttgcaccgcctgagaggaagtatagtgtctggataggagggtccatcctagcctcgctgagcactttccaacagatgtggaatctaaggaggagt

SEQ ID NO: 60277 - DNA, 281 bp, Zea mays
tactgctagggctggaaaggaccttgcagtaactatagagttatgcgcaccagatacacagggaccatggtccgcacaaagtctgatgctcataactctatagttactgctagggctggaaaggaccttgtttccagcttggtgtctggattattgacaattggcccccgttttggcggagcaattcatgatgcagcccgatacttcaaagatgcatgtgataggggcctcacaccatacgagtttgttgaaggcatgaaaaagaaggaatccgtgtgcct

SEQ ID NO: 60278 - DNA, 271 bp, Zea mays
atccagaacaaggattgacaatgtatggtgtcacaaagactgctctctttggtctcacgaaggctcttgctggtgagatgggacccgatactcgtgttaactgtatagcccctggttttgttcctacacggtttgctagtttcctcacagaaaatgagaccattaggaaagagcttaacgagaggaccaagcttaagagattgggtactgtggaagacatggctgcggctgcggctttcctggcatctgacgaccatcatacattacggct

SEQ ID NO: 60279 - DNA, 273 bp, Zea mays
cagccaagccgaggctgctggaaccagtttacctggtggagatccaggccccagaaaatgcacttggtggcatatacagacgttctgaaccagaagagaggacatgtattcgaggagatgcaaaggcctggtaccccgctctacaacatcaaggctttcctccctgtcatcgagtcctttgggttctcaagccagctgagggctgcaacctctggtcaggcgttcccccagtgtgtgtttgaccactgggacatgagggctcggatcctttgg

SEQ ID NO: 60280 - DNA, 273 bp, Zea mays
cgattctaagtggaaacatggcgctactggggtcatttccgttaccagcaaccttgttcccgggctcatgcacagcctcatgtacaaaggcgagaacgccacgctgaacgagaagctgtcgcccctgatgaaatggctgttctgccagccaaatcctattgccctcaacactgctctggctcagctcggcgtggcaaggcctgtcttcagactgccgtacgttccgctccctcttgaaaagagggccgagttcgtcggattgttgagtcaatt

SEQ ID NO: 60281 - DNA, 271 bp, Zea mays
ggctcaatgcccccaagcattggatgctggacaagcttggcggagcttttgctcccaagccatcttctggacctcacaagtctagggagtgcctgccactgatcctcatcatcaggaacaggctcaagtatgctcttacataccgtgaggtcatttccatcctgatgcaacgccatgtacttgttgatggcaaggtcaggacagacaagacctaccctgctgggttcatggatgtcatttccatccccaagaccatgagaactacaggctg

SEQ ID NO: 60282 - DNA, 301 bp, Zea mays
aatgcctacggtattgcatgcatgactgttatgcttgttactacattcttgatggcattaatagtcatctttgtttggcaaaggaacataatattttccctagttttcctggttttctttggatccattgaagctgtatatctttcgtcatctctcatgaggttcctcagggaggatgggtgcctcttgtgcttgcattcatattcatgtcagtcatgtacatctggcactatgggtcaaggaggaagtaccagtttgacctacagaacaaagtatcaatgagatccatcctatctctcgg

SEQ ID NO: 60283 - DNA, 300 bp, Zea mays
atgagattctgaactccccagacaaagcttgcaaccttgcaaagcaggcgtttgatgaagctatctcccagttagacacccttggggaggagtcatacaaagatagcactctgatcatgcagctccttagggacaacttgaccctttggacctctgacacacggaggatggtgctgatgagggcaaagaagccccgaaaggtgaggctggtgacggacagtaatcttgggagagcgcatattgttcgagcccattgttttagatgctctatgctgtcgaagctgaagctgtgccgtgcta

SEQ ID NO: 60284 - DNA, 296 bp, Zea mays
gcggtgtggatgaaaatgcagctggtgcatgtgcacagcttgtgtttgcacccatcgatgaatcttttgccgacgatgcgccactgctaccctcaggcttccgtgtcattccactggatgcaaagacggatccaccatcaggcacacgcacacttgacttgcatctaccctcgaggttggatctggtgggacaacgcgtgcttcgagtgacgcctccagcacctgcaacacaagatcagtgctgaccattgctttccagttctcatatgaaaatcacctacgagagagcgtcgcag

SEQ ID NO: 60285 - DNA, 306 bp, Zea mays
gatgaaactgctgaggaaaagggatgttcctgatgagaagtacaccaatgccttccttggctttgggccagagaacaccaactttgcagttgaattgacatacaactatggcgttgacaagtatgacattggaacgggctttgggcatttcgcaattgctaatatgatgtgtacaagttagctgagaatatcaaatccaagggtggtaagatcaccctcgaacctggtcctgtcaagggaggatccactgttattgccttcgcacaggatcctgatggctacatgtttgagcttatccagagggct

SEQ ID NO: 60286 - DNA, 300 bp, Zea mays
cgcagttggtagggttctagccatggcgtggagcgccgccgccgtctccaggttcgcagccgcctccccacccgcggcacccatctccgtcaggcttggagccgccgcttctcgctcgtccctgtccttctccagtgggcgccgacgccccgtggccggtccctctcgacctctgccaccgctgtaaaggaggctgttcagacagagaaggcaccaccagcactaggcccttattctcaggccatcaaagcaaataatcttgtgtttgtttctggagttcttggcttgaatcccgagacc

SEQ ID NO: 60287 - DNA, 298 bp, Zea mays
gtggcaagtcgaagcaaagcaggagtgagaagaagagccgcaaggccatagctgaagcttggcatgaagcccatcactggtgtcagccgggtcactgtgaagaaaagcaagaatatgctttttgtcatctcgaagccagatgtgttcaagagcccaaatcggacacctatgtcatattcggcgaggcgaagatcgaggacctcagctcccagctgcagacccaagctgcagagcagttcaaggctcctgacctgagccaaatgatcccgaagcctgagacatctggcctgggcctgga

SEQ ID NO: 60288 - DNA, 297 bp, Zea mays
gaaagatcccgcggcgcacagccacccttctctcctctccgctcccaatctttgtcgtcgcctccctcgaagtcgccgctgccttcattccaccatggcgcttcacgccccggtcctcgtgatgaaggactcgctgaagcgggagtctggcgcgaagttcacaaagccaacatccaggcggccaaagctgttgctgacatcattcgcactacattgggtcccagatccatgctgaaaatgcttctggacgctggacgctggtggccttttatttaataaatttgtagattatatcca

SEQ ID NO: 60289 - DNA, 291 bp, Zea mays
actggcttcaagtgcggaatcaactaccagcctcccagcgtcgtccccggcggtgacctggccaaggtgcagcgtgccgtgtgcatgatctccaactccaccagtgttgtggaggtcttctcccgcattgaccacaagttcgacctcatgtacgcaagcgcgccttcgtgcactggtacgtcggtgagggtatggaggagggcgagttctccgaggctcgtgaggatctggctgcgctcgagaaggactacgaggaggtcggtgctgagtttgacgagggtgaggacggcg

SEQ ID NO: 60290 - DNA, 294 bp, Zea mays
gaaaagaccaatggagaagtagaacgtcgtattgtttcacagctactgactcttatggatggactcaaatctcgttcccatgttattgttatgggtgctacaaaccggccaaacagcatcgatcctgctcttagaagatttggaaggtttgaccggaaattgacattggagttcctgatgaagttggccggcttgaggttctccgtattcacactaagaacatgaagctagctgaagatgttaatttggaactcatttcaaaggatacccatggatacgttggtgctgatcttg

SEQ ID NO: 60291 - DNA, 303 bp, Zea mays
cttcaatgagagagttttgccttcaatcatccatgaaacactgaacagctgttgttgctcaatataatgctagtcagctgatcacacagagagagactgtgagtagggagattaggaagatactgactgagagggctagattcttcaacattgctcttgatgcgtctccatcacaagcctgagctttgggaaggagtttactcatgccattgaagcgaacaggttgctgcacaggaagctgagcgtgctaagttcattgtcgagaaagctgaacaagataagagaagtgcaattatcagggct

SEQ ID NO: 60292 - DNA, 309 bp, Zea mays
tgtagaacctccgacacaaaacgatgcacaggcaggtgaaggccggtgatgaaaaatgcctcaaaaacaaccaattcgccctcgggctcggggacctcctctgcccccgggacccaaccaaccccgccgccaaaataccctaaccgttgcatatcttgcacgcaaccaacaacatccgcgaaacaccgaattccactgtatcacccggtcgcaattccgccgccgccacagtgcccgagagatcatcagaagacgcctcggccatcggcgtggtcgcagcagacgaggaggaagacggcatggctacgt

SEQ ID NO: 60293 - DNA, 174 bp, Zea mays
cccagcgccggcagtcgccgtcatcgatcgatcgccggaaaactaacccctaacgatgtctggagccggcgaggaggacaagaagcccgcggagggcggcgcccacatcaaccttaaggtcaagggacaggatggcaatgaggtgttctttcgcataaaaggtccacccagctg

SEQ ID NO: 60294 - DNA, 169 bp, Zea mays
cccagcgccggcagtcgccgtcatcgatcgatcgccggaaaactacaccctaacgatgtctggagccggcgaggaggacaagaagcccgcggagggcggcgccctcatcaaccttaaggtcaagggacaggatggcaatgaggtgttctttcgcataagaggtccaccc

SEQ ID NO: 60295 - DNA, 294 bp, Zea mays
ctctgcgcctaattactgtgaccagatgggcaacaagggtgcatttattcgcttcacagctccagaaatgaaaccagatattgttactttctcagctgtgccacatcctgatgtgaagccgatggcatatgcaaataacttcctcaggatgtttaatgacagaatataacaacattgtttagcaattttaatcagatgagtctgttgtttgtcagctcccaattcacatttcttgctaggtttaagtatatgctcccttgtacaacaaatcaaatgatgcaagggattcaactg

SEQ ID NO: 60296 - DNA, 289 bp, Zea mays
cttcaatgagagagttttgccttcaatcatccatgaaacactgaaagctgttgttgctcaatataatgctagtcagctgatcacacagagagagactgtgagtagggagattaggaagatactgactgagagggctagattcttcaacattgtcttgatgacgtctccatcacaagcctgagctttgggaaggagtttactcatgccattgaagcgaagaggttgctgcacaggaagctgagcgtgctaagttcattgtcgagaaagctgaacaagataagagaagtgc

SEQ ID NO: 60297 - DNA, 194 bp, Zea mays
cccagcgccggcagtcgccgtcatcgatcgatcgccggaaaactaacccctaacgatgtctggagccggcgaggaggacaagaagcccgcggagggcggcgcccacatcaaccttaaggtcaagggacaggatggcaatgaggtgttctttcgctaaagaggtccacccagctgaagaagctgatgaacgctta

SEQ ID NO: 60298 - DNA, 296 bp, Zea mays
aagtactctctccgtcccaaaatattagttgtttaaactttttaacttttatgtctatgttcaaatagatgatgatgaatatagagacatatataaaataaatacattagttattgtatgaataactaaaaaggtaaaataaattttattttgggcggaggaagtatatatagagatagttcggtgagatctttctctgatatgcaatgtggactttctgttaatcatagatgtgattttgcataaaaatgatcttgtatgtatctgaataatcacatgggatcatcttttttgta

SEQ ID NO: 60299 - DNA, 290 bp, Zea mays
cattgtgaagcctgggtgctctcaggatgtccttaaggcggcgctgagcgccatgtcttctgtgacggagacactgaacatcatgacctcatcgtccaccggccagactgcactgtgactcgtttggtgccgttttgtggtgcggatcagatccccactttttccatggtgtcgattgacaaagttaggagcagtaatcctgtggtgcggatcagaatccccactttttccatggtgccacacgggtcattcttttgtagcttctcgggagagttctatcagttttgaat

SEQ ID NO: 60300 - DNA, 288 bp, Zea mays
ggtgggctcgtccgagtctgccctgctcgccaagctgggtatccgccccttctcgtacggcctccaggtcaccagtgtctacgaggatgggtccgtgttcagccctgaggtgcttgacctttccgaggaggacctgattgagaagtttgcactggtgtctccatggttgcctccctgtcactggcgatctcgtacccgacccttgctgctgtgccccacatgttcatcaatgcgtacaagaatgtgcttgctgttgctgtcgagacagactactcgtacccacatgct

SEQ ID NO: 60301 - DNA, 295 bp, Zea mays
  unsure (1)..(295): unsure at all n locations
ctgcatctctcgcccacctccgctccgcctactgctgctggtggtagggaggcggagaaggaggcccttgcgcccgcccgccggccggatcagagccgtagcaaccaccacccatggcggacgtgcacgaacctttggtgcgccgtaagaggagaaggttttggtggactacttggtgaagttccgatggatcctcgtgatcttcgttcgtcnctcctatttcaactctgatctacttcaacatcttcctgggcgacatgtggtccgccatgaagtcggagaagaagcgccagaa

SEQ ID NO: 60302 - DNA, 294 bp, Zea mays
gtaagacgaacctattacacctaattagtccatgattcgctcgtgtgatgctacagtaaacatttgttaattatagattaattaggcttaataaatttatcttatcgtttagtcttcaattgtttaattaattttataattagattatatttaattatttaatggacattcaaacatttagtgtgacaaactttagtctctggaaccaaacactcccagtcataacctatggtctacaatcttagtccaaacagtgtgattctctgaatctggaggcaagtattgcgaacggta

SEQ ID NO: 60303 - DNA, 295 bp, Zea mays
gtaagacgaacctattacacctaattagtccatgattcgctcgtgtgatgctacagtaaacatttgttaattatagattaattaggcttaataaatttatcttatcgtttagtcttcaattgtttaattaattttataattagattatatttatatatttaatggacattcaaacatttagtgtgacaaactttagtctctggaaccaaacactcccagtcataacctatggtctacaatcttagtccaaacagtgtgattctctgaatctggaggcaagtattgcgaacggtaa

SEQ ID NO: 60304 - DNA, 283 bp, Zea mays
aagttgaaactttcggagcttacctgccgggaaggcattgttgaagttgcaaagataatttatggagtgcatgacgaagcgaaggacaaagcttttgagttggagttgagctggatctgtgatgaatcgaaccgtcagcatcagaaggttcaaatgaactgttggagcaggccaaagctgctgctcaggcagctcttgaggagatggatgctgactaagaaacaggacgatttgcccagacttggtgtttttggtgctgttgaaatctccgatccctttgggg

SEQ ID NO: 60305 - DNA, 278 bp, Zea mays
aagacagggatcgccatgtcggactcggaggagcaccacttcgaatcgaaggccgacgctggggcgtccaagacctacccgcagcaggctggcaccgtccgtaagaacggcttcatcgtcatcaagaaccgtccctgcaaggttgtgaggtttctacctccaagactggtaagcatggccacgccaaatgccactttgtcgccatagacatattcaatgggaaaaacttgaagatattgttccttcatcacacaatgtgacatccgctgtgaacgtac

SEQ ID NO: 60306 - DNA, 283 bp, Zea mays
agacaaggtcaccgtgcacgaccaggttgctcagaacctcaggaagtttgtgtcggagcaggattgcccgcacctgttgttctatgggccgtcggggtccgggaagaaaaccctaatcctagcgctcatcaagcagatgttcggcgcggcgcggagaaggttaagctggagaacaagacatggaaaatcgatactggaacaaggacatttgagatagaattggcgatgttgtcaagtgctcaccatgtggagatgacccccagtgatgctggctttcaggaca

SEQ ID NO: 60307 - DNA, 286 bp, Zea mays
tctcatccgccgtgaccctgcccgaattgctgcccaaggtggcgtcatacatcctatcactcggtatgttatgaactatctccgagctgcgtgtgggtcgcggcagacattggaagaggtgatggaaggtgactttggggctaatggggtgcgcctgttgctgttgatcctgaccgtcccacatcatcccttgctgtgcacattgcttggatcatggatgttcttcaaaagaatctggatatgaagtctaagatctaccgtgatccatctcttgcttctatcttct

SEQ ID NO: 60308 - DNA, 268 bp, Zea mays
gcaagatggtccttgatgactggaagaggctatactcaaacacaaagactaacttccgggaggttgccatcaaaggtttctgggacatgtacgacccagagggctactctttgtggttctgtgactacaagtacaatgatgagaacaccgtctccttttgaccctgaacaaggttggtggattcctgcagcggatgggacctgtgccgcaagtacgccttttggaagatgctcgtgataagctctgagccaccttcaagctggagggc

SEQ ID NO: 60309 - DNA, 284 bp, Zea mays
cgttttccatcgctcctactcctatcatccagaaaatctgagcggtattgatggcgcccaaggcggagaagaagccggcggcgaagaaggtggcggaggaggagccctcggagaaggcggctccggcggagaaggcccccgcgggaagaagcccaaggcggagaagcggctacctgcgggcaagtccgacggcaaggagggcggcgacaagaagggtaggaagaaggcgaagaagagcgtggagacctacaagatctacatctatcaagtcctgaagcaggtgc

SEQ ID NO: 60310 - DNA, 284 bp, Zea mays
gatgcttgggagacagttggaagaaagaacaaatctgcaatagttagaacacatagttttgttccctctgagctaagtgctatttttggagggcagctacagagcgttgtgaaagctgcaggtaacaaagcatcagctactgttcaccctttctactgcttcatcttgatatattcccagatgctgttcagacacttaatgatgcacttcgtctgttctctacccctgaatctttggaaggatacagaaccactgctggaaaggctggtttggtgacagctaga

SEQ ID NO: 60311 - DNA, 286 bp, Zea mays
tctttggagatggttcacgactggtgttccgcctctctggaaccggttctgttggtgccaccatccgtgtctacatcgagcagtacgagagggactcctctaagaccggcagggattcacaggacgcccttgctccgctggttgatttgcgctcaagctctccaagatgcaagagtacactggacgctctgcccccaccgtcatcacataaattttgaagagtgttttagaatgagttgaggcgcttacacaaatttcattccggcctcttgttccatagtttttc

SEQ ID NO: 60312 - DNA, 290 bp, Zea mays
gttgataatgtattggtccgtgttgcagatccaacattcctaggatacttcattgacagaggtgtatctgctgctgctaaggttgtcaggaaggcatatccacaagagaaagttggagtatttgttcagcgtggaaagggtggaccccttctgtagttgaatacagtgaaatggatgcagctatgacaactgaaatcaatcaaactactggccgccttcgttattgctggagcaatatctgcttgcatatgtttactttggattttctgaaccaagtgacaaacagtctt

SEQ ID NO: 60313 - DNA, 301 bp, Zea mays
caacgaagtattcaaaccgaaaacaatggagccggtgcggaagagcgtgtgcgtgaccggcgctggcggcttcgtcgcgtcggagctggtgaagctcctcctctcccggggccaatacgcggtccgcggcaccgtgcgcgaccctggtgctagcaagaatgcccatctcaaggtgctggaaggagctgaggaaaggttgcagcttctcaaggctgatctgatggactacaacagcattgcatcagcagttgccggctgtgagggtgtcttccatgtagccagtcctgtcctttcccatcga

SEQ ID NO: 60314 - DNA, 302 bp, Zea mays
gttccagctagctaggagagagctttatttaggcggcggcaacaagatgaacaggaagccaggagactgggactgcagggcgtgccagcacctcaacttcagccgtcgggacgcatgccagcgctgcagtgaaccacgtggagttggtgatcgtagcggcggtggtggcgacttgggtgggcgtggtggttcctccttcggcggtggctttggtgctggctctgatgtccgccctggtgactggtactgctcctgcggcgcacacaacttcgccagccgctccaactgcttcaggtgctctg

SEQ ID NO: 60315 - DNA, 299 bp, Zea mays
  unsure (1)..(299): unsure at all n locations
aggagaaggagctacgtgcccaaataattgctgaagcagaagaattcaagaaagctttttttgagaagaggatacagaactgtgcgtcgaatatggtcaacaacagagaaagggagaagatttttgtagccagccaggagaaattccacgccaacgcagacaagcagtactggaaatcgatctcggatctcatcccgcatgaaatagccaccattgagaagcggggaaagaaagacaaggacaagaagccatccgtcacagnttattcagggcccaagcctggcaagcccaccgacctc

SEQ ID NO: 60316 - DNA, 283 bp, Zea mays
  unsure (1)..(283): unsure at all n locations
tgatattagagagctgatttcattggatgatgttatggaggagattgggttggggccanatggcggtctcatctactgcatggagcaccttgaagacagcttggatgaatgggttgatgaacagctagagaactaactagatgatgataacctggggttgaatgccctgggcaaaatggactcctcaaacatggtccaggtccgcggaactttgtcgagcaactggaacggaaaaatttcaacggttgcgctgtttaccttcttgattcacagtttgtcagcg

SEQ ID NO: 60317 - DNA, 299 bp, Zea mays
gtcgaagaaaccaattgttgtgaagtatggccttaaccatgtgacttacctcattgagcagaacaaggctcagcttgttgtcatcgctcacgacgtggatccgatcgaacttgttgtgtggcttccagccctgtgcaggaagatggaggtcccttactgcattgttaaaggaaaggctcgccttggatcgattgttcacaagaagaatgcatcagtcttgtgtcttaccactgtcaagaacgaggataagcttgagttcagcaagattttggaggctattaaggcaaacttcaacgaca

SEQ ID NO: 60318 - DNA, 303 bp, Zea mays
tgtatgacaaaactttctcaatgaaccaggcacgttccatcaggatgaacgtgagcactggtgctgctcgtccaaatcctcaaggatcatttcactatgggtctatcaatgtgagccaagtttacaagctgaggaatgaaccacctgttatcatcaatgggaagaaacggactacactgagtggtatttcttattccccacccgacactcctctgaggttggcagatctgtacgacaagaaggatgtctacacactcgacttccctacaatgccaattgatggaccgccagtgatcagaacat

SEQ ID NO: 60319 - DNA, 300 bp, Zea mays
aaacttccttaccatggatcggaatgggggttaccgaggttcacaaactcttctaagatctgtattatcagagaaacaagagctgtgcttctctgttgtctcattgctctggcagaagctcatagcttctcctgaaatgcagatgtctgcagaaagtacatcagctcaccaaggatggaggaaggttgttgatgcactttgtgatgtcgtttcagcctcaccaaccaaggcatcagctgctatcgttctccaggccgagaaggacttgcagccttggattgctagagatgacgaacaagg

SEQ ID NO: 60320 - DNA, 297 bp, Zea mays
ggtaattggtgatggtggagatccagatggccatgacgatgaagatgatggacatcactaaggatgccttgtggttctgaaaataagaatctgatgaggcagatgagtccatcacacttcttttttcttgaaccagactgcacggcatccttgtttatgaacagacatttggccatcaagcgggtggtagttaatcacctagggattttgtccagacaaaagcttattgagatttgacccatgcatttctttaagagcatcatcgaataagagatgactgcatcagattgctttctt

SEQ ID NO: 60321 - DNA, 215 bp, Zea mays
atctgctataggaattttgatgaatcttggattaattgaggagtccaaggtttcaaggccattaccttggaggccagcgactaatgttttccgtgttaaagaggatgttcgacctatattctgggccaacagaccaaagagctatcttaaaaggacattaggttgggatcagtatccccatggacggtggggtgatttccggaacccatcatatg

SEQ ID NO: 60322 - DNA, 292 bp, Zea mays
cccaattcctccttcggatctcgcattcagcgcacgcaggtgtgaaggaagggggacgcggaggaagatggggctcgcgttcgggaagctcttcagccggctcttcgccaagaaggagatgcggatcctcatggtcggcctcgacgccgccggtaaaaccaccatcctctacaagctcaagctcggcgagatcgtcaccaccatccccaccatcggtttcaatgttgaaactgttgagtacaagaacattagcttcactgtctgggatgtcgggggtcaggacaagatcaga

SEQ ID NO: 60323 - DNA, 229 bp, Zea mays
ctcaaacacaaagactaacttccgggaggttgccatcaaaggtttctgggacatgtacgacccagagggctactctttgtggttctgtgactacaagtacaatgatgagaacaccgtctcctttgtgaccctgaacaaggttggtggattcctgcagcggatggacctgtgccgcaagtacgcctttgggaagatgctcgtgataggctctgagccacccttcaagctg

SEQ ID NO: 60324 - DNA, 280 bp, Zea mays
cgccaagcacgccgtctccgagggaaccaaggccgtcaccaagttcaccagcaactgagcgcgctgcgggatccgcggatctgttagaagggttctttgctgtgtcctttccccagtcccccaccctacccgcctagtagctagcttgcctgctctataaatccggcgcgccggattgtaatggtcctcttagatttgatgtccctgttgtggaatatagttgtatctctccgcttgctattaaaaaaaaaaaaaaaaaaaaaaaaaaggggggcccccc

SEQ ID NO: 60325 - DNA, 247 bp, Zea mays
atgccaagaagaaatgatctatctggctggtgctgtgcttgcttgttggttacctcgtggaagcttaaaatatctcgtcttgttgacatccttgcagttgtcgcgtgaacaagtaatctatgatggcaatgtttgcctggtcatgaagtattattactttcgttgaaaccgtgatgctattaagacttaatttttttatggaacatcgaatgtaaggcatacatggttatgagttttgtactaccct

SEQ ID NO: 60326 - DNA, 295 bp, Zea mays
cagaagaacagtgtggctaggcacaacagacatgtctcaggaagaattccgctcgtttattgaaaaacttgcaggtgattatcatggcgacacatatcatttaattaacaagaactgcaatcacttcacagatgatgtctgccagaacttaactgggaaacccatcccttcctgggtgaataggcttgcaagagtagggtcagttttcgattgccttcttccagaaagcgtacaagtttctcctgtaggtcgtgtcccaacgagtcggcgaatatctgatgatgatttgtattca

SEQ ID NO: 60327 - DNA, 294 bp, Zea mays
agaaaactagaaaaggctcctcccgaccgcaacgcccctcatctccctcgaccccgacatccccgacccgatggcgcccaaggcggagaagaagccagcggagaagaagccggcggccgaggagaaggcggagaagacgaccgcagggaagaagcccaaggccgagaagcggttgccggcgtccaagtcttccggcaaggagggcggcgagaagaaggggaagaagaaggccaagaagagcgtgaagacttacaagttctacatcttcaaggtgctgaaccaggtgcaccccga

SEQ ID NO: 60328 - DNA, 286 bp, Zea mays
gcacaaattgcatctggtggtggaaggatgtatgttacgatggaccgttatgagaatgactgggatgtggttaaacgtggttgggatgcccaagtgcttggagaagcaccctacaaattcaaaagtgcacttgaggctgtgaaaacactgagagcacagcccaaagccaatgatcagtacttgcccccatttgtgatagttgatgacagtggcaatgctgttgggcctgtattagatggtgatgcagttgtcactatcaacttccgagctgatcgcatggttatgc

SEQ ID NO: 60329 - DNA, 288 bp, Zea mays
acttgacgaaggacatacacctagaaatcgggagactaatgtactcgaatcactaaatagagtggaaacaccacgcaaagtggttctttcgggtacacttttccagaatcatgttgaagaagtgtttaatatcttgaatctcgttcgcccaaagtttctcaggatggaatcatcccgtcctactgccagacgtataatgagtcaagttgaaatagttggtagaagttcgaaagggcttgctgatggcgcattcactaaggcagttgaagaaaccttattgaatgatga

SEQ ID NO: 60330 - DNA, 291 bp, Zea mays
gtctgctataggaattttgatgaatcttggattaattgaggagtccaaggtttcaaggccattaccttggaggccagcgactaatgttttccgtgttaaagaggatgttcgacctatattctgggccaacagaccaaagagctatcttaaaaggacattaggttgggatcagtatccccatggacggtggggtgattctcggaacccatcatatggagcacttactgaccaccagttcacaagaccacgaggccgtggtaagaagctccaagaggaatgggctgttccact

SEQ ID NO: 60331 - DNA, 287 bp, Zea mays
caaaatctggtggatctattgtgttcttgactcagattattggtgctgagagaggattgtatccaggcgctgcagcatatggcacaagcttgggagccatccaccagttggtccgtctgtgtgcgatggagcttgggaaacacaagataagggttaacgccgcctgccgcggcctgcatctgcaagacaagttccccgtgtccgtgggcaaggagaaggcggagaaggcaacggcggaggtgatgcccctgcggagatggctggatccggagaaggacctggcgtcg

SEQ ID NO: 60332 - DNA, 288 bp, Zea mays
ctcaagagcttgtagccaatgacctgcatggtgtggaatcgcgctttcgctacatattcagaggtcaaccacgaaggcatcttttgcagagtggctggagtgtaattgttagtgccatacgtcttgttgctggcgatgccttcatctttctaagaggtgatagtggggagcttcgtgtacgagtcaggcgtgtcattatgcagcaaggaaatgttccgtcttcagtaatatcaagccacagcatgcatcttggtgttcttgctacagctatggcatgctgttaacact

SEQ ID NO: 60333 - DNA, 282 bp, Zea mays
agtcgtcgtaggcagcgagcgtctctcctctcccacgcatcgcgccaaggaagagagagagatcgccgctccccttctcggcgtcagtggtgcgggtgccctccctcctcgagcgagatctgtctggtcacagatctatctgacaaaatggtgaagatctgctgcatcggtgctggttatgtcggtggcccaaccatggcgtcattgccctcaagtgcccagacatttaaggcctcctcgttgacatctccaagccccgcattgaggccttgaacagtgaca

SEQ ID NO: 60334 - DNA, 288 bp, Zea mays
tgttaggtttggagatgataatgacaaaactcttgcaatgactgaaatgaatggtgtatactgttctacaaggccaattcgtgtaggactagcgactcctagaagatctcaaggtgattctggctcttctccgccaaggcaatctgatgttgactctactaacaggacggtatatgttggtgggcttgaccccaatgttagtgaagatgaactgaggaaagcatttgcaaaatatggtgatcttgcctctgtcaaaattccttttgggaagcaatgtgggtttgttca

SEQ ID NO: 60335 - DNA, 287 bp, Zea mays
caagctctccctggagatgaagacgccgctcgtcgccgcagccatcccccgcaccgcctgatccgtcctgccgccgacgcgtcacgtcacgcgttgtttgcatggatgatggtatctttgtctgtctgtgtggtcttcgctaaagtttgcttcttctcgatcgtcggttcgttcgtgcctccaccttagcctagggtttggtttcttgcaaggtagtgagtgtgtcttagtctcaccatcaccggggctccaattttggaaagctgcgtgttaggagttaaccctag

SEQ ID NO: 60336 - DNA, 284 bp, Zea mays
ctcttgtcctcgaccttgattctgacaaattggctgcattctctgctgcatacgcagaacttgaatctgtactttctggattgaatgtgcttgttgagacttactttgctgatgttcctgctgagtcctacaagaccctaacatctctgagcagtgtgactgcttatggttttgatcttgtccgtggaacccaaactcttgggcttgtcacgagtgctggtttccctgctggaaagtacctctttgctggtgttgtggatggacgcaacatctgggctgatgat

SEQ ID NO: 60337 - DNA, 284 bp, Zea mays
gttataataaggagggcaagatgcggcagacttaagccccgtttggtttgaggtgactaaactttagtcacttttagtctctaaaaaagcaaacatgttgactaaattagagtaactaaactttaattgtttagtcactaaggggtaactaaaagggactaaattaatgctcttctcctctttcttcgtgtagctaacaaccactaattaataggggtaatacattcattattcacactaattaatgttctttagtcaggtttaatcaatgtaaccatacatgg

SEQ ID NO: 60338 - DNA, 282 bp, Zea mays
tgggtcgaggctcgtagataccagaaagacaatgtggcgtatgtgtcagatggacctcaaagtgacaagtgggcttgggttctctttgaggccacattagacgtaccagcgaatcctgagatcgtagttaaggcggtggactcagctgcaaatgttcagcccgagaaggtagaagacatatggaatctgagaggaatcctcaacacgtcttggcatcggatcaaaattcagagatctttgtgcgttgaaagatctaagctgtgaaattaagtacgcagctga

SEQ ID NO: 60339 - DNA, 285 bp, Zea mays
tgatgactctgagaggccaccacggagaaactatgagcgccacagcgggactggccatggctatgagatgaagcgtgatggcgcagggcgagggaactggggcactgccactgatgaacttattgcccaggatgcagaggactctccgaagatggaggaggctgctcctgttgctgagaaacaaggtgagcagaatgatgccccagcagcagatgagaacaaagataacaaggatgctactgcaaatgaggaggaagaaaaggaagaggacaaggagatgactct

SEQ ID NO: 60340 - DNA, 308 bp, Zea mays
tggaggcagaggacgattgcactgaagctctgaatctggatgatcgctatattaaagcatactcacgccgaattactgcacgaaaagaacttgggaagcttaaggaggcaatggatgatgctgaattttctatcagtcttgatccaaacaattcagagctaaggaagcagtattctgagataaaagctttgcacatggagaaaatggctaaaaaggttccagtgccagctaaacgtgcagtttctggaattgataaaactgcagatgtcaattctcacccaccgactatctcccagaaggacaatatt

SEQ ID NO: 60341 - DNA, 303 bp, Zea mays
agtggagagaggaaggaaaagctgatattgtccctggtgttctgttcatcgatgaagttcacatgctagacattgagtgcttctccttcctcaaccgagcattggaaaatgacatggctccgatcctagtaatcgcaacaaacagagggatcacatccattcgtgggacaaactaccgctcaccacacgggatcccgccagacttccttgaccggttactgatcatcacgacgcagccctacacggaggacgagatcaggaagatcctggacatccggtgcgatgaggaggatgtggagatgt

SEQ ID NO: 60342 - DNA, 193 bp, Zea mays
ctttaacaaacaaatggtttagctcaaagtcatcaaagaagatacctctgacagccgtcacttctgttatcgatggcttgaaaaaactttacatcgaaaagttgaagcctttggaagttacatagaagttcaatgattttgtttcccctttgctgacaagtagtgattttgatgcaaagccaatggttatgct

SEQ ID NO: 60343 - DNA, 272 bp, Zea mays
atttttctcttgagcctgtgctgcctccggtgactgcaaggccagaacatgttgaaagagcgttgaaggcacgttatcaagatgcaatgaacatactgaggccacaggggagggaacttgatctgctgattgtaatactgcctgacattaatggttccttatatggggatctcaaaaggatctgtgagactgatctcggattggtctcccagtgttgtctgactaaacatgtttttaagatgagcaagcagtatcttgcaaatgttgcactc

SEQ ID NO: 60344 - DNA, 301 bp, Zea mays
ggcatattatctatattgaggatgaacctgtcgaggctgagacactgaaccaagtgaagcatctgacaacattgtctttcactgaagtagaggagttaggcaagacatctagtgttgatgcaaggttaccttcaagctctgatactgcagttatcatgtatacaagcggaagtactggtcttcccaagggtgtaatgatcacacatggcaacatggtggccacaactgcagcagtcatgacaatagtcccaaaacttggcatgaatgatgtttatctggcttaccttccattggctcatgt

SEQ ID NO: 60345 - DNA, 301 bp, Zea mays
gaggtagtcaagagcattcgccgcgggaacaaagggttgtgtgtgattgctggaaatatttctcctattgatgtgattacacacgttccaatactatgtgaggaatctaatgttccttacatatatgttccatcaaaagaggatcttgcgaccgcgggaaccactaagaggccaacttgttgcgtcctggttctgaccaaaccaaacaagggggagctcagtgacgaggtgaaggataaactgaagtcagactatgaccaagttgtaacggaagttgctgaggctacatctgcaatgttct

SEQ ID NO: 60346 - DNA, 301 bp, Zea mays
ccatcctcctctccgccgcccgccgcccgccgcagcagcacccaccgggcaagatgaagacgatcctggcgtcggagacgatggacatcccggagggcgtcacggtcacggtggccgccaagctggtcacggtggagggcccccgcggcaagctcacccgcaacttcaagcacctcaacctcgacttccagctgcaggaggccggccgcaagctcaaggtggacgcctggttcggcacccgccgcaccatggccgccatccgcaccgccatctcccacgtccagaacctcatcaagggggt

SEQ ID NO: 60347 - DNA, 297 bp, Zea mays
gatacacgggtgcttgcattcgaagctgggcgaaaaggcaaaatcagagttaacaccatatcagcaggccctcttgggagccgagctgctaaggcaattggatttattgagaagatgatagagtactcatatgttaatgcaccattgcagaaggagctgttggctgatgaggtggggaacacagctgcattcctggtttcttcattggcttctgccatcaccggctcgactgtttatgttgacaatgggctcaatacaatggggcttgcaattgacagccctaccataacgtcatag

SEQ ID NO: 60348 - DNA, 298 bp, Zea mays
tagatgctatgttacacattcgtagacaatgccaagaggcattcttagacatgtcattttgtttgtttctgcccccagatcaacccagactctgcaaaaggctataaaactcgtggaatggcatatgccatgcttggcaaatgggaggaagctgctcatgatctgcacacagcatctaacatggattacgacgaggagatcaatgctgtgctcaagaaggtggagcctaatgctcacaagatagtggaacatcgcaggaagtatgagaggttgagaaaagagagggaggaaaagagag

SEQ ID NO: 60349 - DNA, 293 bp, Zea mays
caaaaagatggacttgaggcttactgctgttcaccttattgatgcccatttatgctgtgatcctggaaagtatgtcagtgctttgcttctttcactatcaacgatgctacacttggaattgccacatatcaatgtcttgtcaaagattgacctcattgagaactatggaaatttagcattcaaccttgacttctacactgatgtccaagatctttcttatttgcaatatcatcttgagcaggatccccgctcagccaagtacaggaaactgactaaggagctctgtgatgtga

SEQ ID NO: 60350 - DNA, 290 bp, Zea mays
gaagcagttccaaggtgctgtggatgctgctcgcaaggctaacagtgccaaaacatggaaggaggtctgttttgcttgtgttgacgccgaggagttccgtcttgcacaaatttgtggtctcaatattattattcaggttgatgacttggaagaagtcagtgagtactaccagaatagaggatgcttcagtgaacttattgctctcatggagagtggtcttggacttgaacgtgcacacatgggcatcttcacagaattgggagttctgtatgctagataccgctctgaga

SEQ ID NO: 60351 - DNA, 296 bp, Zea mays
agaagtttgatactgatttaattacacttcatccaattttaaccgaatgtcgtgtgattaaatctgatctggagcttgctctcatccggtatgctaatgatgtcagttctgaagctcacattgaggttatgagacgagcaaggccaggcatgaaggaatatcaattagaaagtatcttccttcaccatgtttatatgtatggaggttgccgacattgctcttatacatgtatatgtgctactggagataatagtgctgttctacattatggacatgcggcagctccaaatgaccgg

SEQ ID NO: 60352 - DNA, 296 bp, Zea mays
ggccgtcatggtggagacgcagggggagaagctcgacgacatcgagagccacgtcgccaacgcctcccactacgtgcagggcggcaacaaggagctgggcaaggccaaggagtaccagagcagcagccgcaagtgtctctgcatcggcatcataatcctgctgctcctcgtcctgcttgtcatcgtgccaatcgccaccagcctcaggaggtgatcgagttgtgatgggaggaacaacgccggggttgtgaattgtgaaatgaaatgaggggttccaattcgatccgatgggtggg

SEQ ID NO: 60353 - DNA, 288 bp, Zea mays
aatctgtcttggtcgatttccttgttggtgctggaataaagcccacctcaatcgtgagctacaaccacttgggaaacaacgatggcatgaacctgtctgcccctcaaacattcaggtccaaggagatctccaagagcaacgtggtggatgacatggtctcgagcaatgccatcctctatgagcccggcgagcatcccgatcatgtcgttgtcatcaagtatgtgccgtacgtgggagacagcaagagggctatggacgagtacacctcagagatcttcatgggcggca

SEQ ID NO: 60354 - DNA, 281 bp, Zea mays
acaaggttgcacgtgttgacatatctaatcgtctcaggtcatcgccatgtgttcttgttgcagcgaagtttggttggtcagccaatatggaaaggctgatgagagcacagtctatgggtgatacagcctctttggatttcatgcgttcgaggaaagtttttgaaataaacccagagcatgagataatcaaggccttgaatgtggcatgcaggaataaccctgatgatcctgaagccctaaaggctctggatgttctctttgaaactgctatgatttcaagt

SEQ ID NO: 60355 - DNA, 290 bp, Zea mays
gtggcacaaccatgttccctggcatcgctgaccgtatgagcaaggagatcaccgcccttgccccgagcagcatgaaaatcaaggtggtggctccacccgagaggaaatacagtgtctggataggagggtccatccttgcctccctgagcaccttccaacagatgtggatctcaaaggctgagtacgatgagtcaggaccagcgattgttcaccggaagtgcttctaagctcaagggcccccttcgtccccattctatgtattcctttccttgagtgcttttcttataagc

SEQ ID NO: 60356 - DNA, 292 bp, Zea mays
gaaagaaagaaaaggggcaggaagaaatcgagcctcactcgatccatcgcctcgccgcagcacacacgaggccggcggcgccatggccatgaagctggacatgtccgcgctcgagaccaacttcgccaacctgaccgcctccgccggcgacgacacgtacttctccgccgaggcccccgacgtgccgtccatggtgctccccatctgcgacgacttcgacggcttccaggcggccaccaaggatatggtgaagaataagaaggggacgaccacgcttggcttcatcttcgac

SEQ ID NO: 60357 - DNA, 294 bp, Zea mays
cagccatatgaggattcatctggtatattctgggataatgacagtctagcagctctgttggcagcagaacttaatgctgatcttcttatcatgcttagtgatgtggaaggactctatagtggtccaccaagcgatcctcagtcaaagattatccacacatatgtcaatgaaaagcatgggaagctaattagttttggagagaagtctagtgttggaagaggtggcatgcaagctaaagtgtctgctgctgctaatgctgcatcaaaaggtgtacctgttgtcattgcaagtgga

SEQ ID NO: 60358 - DNA, 291 bp, Zea mays
cgaactagtctcctcttcgcacgagcggaacaccatccacccaccagttcgaagcggaggcgaccggcaacctgcggcggagatgtcaggcaggggcaagggcggcaaggggctcgggaagggcggcgcgaacgtcaccggaaggtgctgcgcgacaacatccaggggatcacgaagccggcgatccggaggctggcgaggaggggtggcgtgaaggcatctccgggctgatctacgaggagacccgcggcgtgctcaagatccttctcgagaatgtcatccgcgacgctg

SEQ ID NO: 60359 - DNA, 289 bp, Zea mays
gcagcttgatgctgtaaatttcgcttatgaggctgggcttcaggagaagttcccaccagttcctcttttgaagtcctacctggaagactctaagaagacatcaaccgctgcttcagataattcaagcactagcagcggccaatcagggagcaatgtgaacaagaaagaacagtctgcactgcgagctgtcatcaagtgtgttgaggatcgtaaactagaagctgagtttccactggagggtcttcggaagcaacttgaagaactagagaaagccaagaccgagaagaag

SEQ ID NO: 60360 - DNA, 285 bp, Zea mays
ggctttcagtacagcaaaagcttgctcaaggaagaggttgagagatacaagaagtttgctgatcgcttggagcccttcattgctgataccgtgcatgtgctaaatgaatctatcaagcagaagaagaaaatcctggtcgaaggcggccaagcaactatgctggatattgattttggcacttatccatttgtgacttcttctagcccttcagctggcgggatatgcacaggcctagggattgctccaagggcaattggcgacctgattggagtggtcaaagcttac

SEQ ID NO: 60361 - DNA, 281 bp, Zea mays
atacaaacaacaatagatgccagacattttgctatctcagccaagttcccggaattcagtaacaagaaccggacgcttgtggtccagtactccattaagtttgagcaggatattgaatgtggcggtggctatattaagcttatgtccgattatgtcaaccagaaaaaatttagtggggacactccgtacagcttgatgtttggaccagatatatgtggtactcaaacaaagaagctccatcttatactctcttaccaggggcagaactatcccatcaaaaa

SEQ ID NO: 60362 - DNA, 282 bp, Zea mays
gaagaacacataacttatggaagttcaggaagggttgcaggcttcattgcagaaacattccaaggtgtgggaggtgctgttgaactagctcctggatacctaaagttagcttatgacattgtgcgcaaggctggtggcgtttgtattgctgatgaagtccagagtggttttggccgtactggcagtcattactggggattccagacacaaggtgtcattcctgacatagtcaccatggcaaagggaattggcaatggcctaccattgggggcagttgtgaca

SEQ ID NO: 60363 - DNA, 287 bp, Zea mays
agttactgctgctcatcgtcctattagggagattcttgaaaaggagaagaaggagagagcttcagcagaaacagaaaataggccattgcctctgtcgcacactagcaatgatgtccgtgcattaagaataagtgatttcatacatgcgcatgaacaggtgtgtgcaagtgtttcctcagattccagtaacatgaacgagcttgtgcaatggaatgatctctatggagaaggcgggtcaaggaaaaagacaacgctaagctacttcatgtagctgatgttgcaagtat

SEQ ID NO: 60364 - DNA, 283 bp, Zea mays
ggtcttgtagggtgccaagaacggaatatcagcaatcttgtacaggaccaagattattgatgttatcgagaagggagagaaacagcccaacatcactattggcattttggtctccgttgtcatcgtgttcgttaccgttctcttcaagctcctgtttggtggcaagaaaccagtggcacctgtgaaacctgcagctgaggcgaagaagcccaaggccgcggagacggacggtgctggaagcagtggtgacaaggatgagatagaggatgtaaaggaggagtca

SEQ ID NO: 60365 - DNA, 174 bp, Zea mays
aggtttcagtacagcaaaagcttgctcaaggaagaggttgagagatacaagaagtttgctgatcgcttggagcccttcattgctgataccgtgcatgtgctaaatgaatctatcaagcagaagaagaaaatctgggtcgaaggcggcaaagcaacaatgctggatatgattttg

SEQ ID NO: 60366 - DNA, 274 bp, Zea mays
caaaggaactgcacaagacagtttctactttggaatatggtgctaaggcaaagtgtattgtccgtgctgctcatgccacaacacctagggacaaaatgagctccgaggagtcatctgtgatgctcaattcaagaatcgttgcaatgaaccagttcatccacaagcttcaaaaagagaacaaattgagggagaaagagcgcaatgaggcccagaatgtgctaaggctgaaggaagaggagctagcacaactgagagcaaagctcaagctgataga

SEQ ID NO: 60367 - DNA, 288 bp, Zea mays
aagacagacggttgctgttggagtcatcaagagtgtggagaagaaggacccgaccggtgccaaggtgaccaaggctgctgccaagaagagatgatgcgacctgtcgttgatgcagcgtctgcttttccaatacgtagctgagatgttccattttgacataagttttgtatgctgtggttgctgtttaccttgtgaactgttgagctctactattgggtgtctgtttatctgtttatgtagcatcttgttatttcacctattgcgatacaagaatgctatatgacatat

SEQ ID NO: 60368 - DNA, 289 bp, Zea mays
aattgcacgacgacatcaaagcacacaaagatattgcacattttgaaacggcatatgttgtgaaactacaccgcatagcgacacttgcacctccacaacaggtttttactttcacccatccaaatttctcaccaaatgccagcaaccaaaggtacaccaagttgcaatttgaaatgctgccagacatgggttcatgccttgtgcacggatttgctggctattttgactctgttctttataaggatgttcatcttgggatcgagccagacaccgctacaccaaacatgtt

SEQ ID NO: 60369 - DNA, 281 bp, Zea mays
acccccaccaagacccgtgggcttggagctggcaaggctgccgacctcacctactgggagagcgctgctcgtatgatcgccgatgtctccaagtctgacaagatcgttgtcgagaagtccaccgtccctgtcaagaccgctgaggctattgagaagatcttgacccacaacagcaagggcatcaactaccagatcctttccaacccggagttccttgcagagggcactgctattgagagactgttcaagcctgacagagtgctcatcggtggccgggagac

SEQ ID NO: 60370 - DNA, 278 bp, Zea mays
aagaagcatcctgggagcagagtcttctgaagatgaagaaggatcagatgctgcttctgatgatgatgatgatgatgatgatgaagaagaatctgatgaagaggatgaggaacaaatggagataagggatagaacagagacaaatcttgtgaatcttagaagaacaatatatttgactattatgtctagtgttgattttgaagaagctggacacaagcttatgaaaattaagcttgagcctggtcaagagatggagctgtgcattatgcttcttgagt

SEQ ID NO: 60371 - DNA, 98 bp, Zea mays
tgcagcagtatggcttgaatccttatgaagtttgatgtgtcctctgtgttgtacccaaaactcttctgcagcagtatggcttgaatccttatgaagtt

SEQ ID NO: 60372 - DNA, 289 bp, Zea mays
ggaagatgtgggggaaaggaaagaagcgtttcggcggtggcggcagcggtgagcccgcggccaagcgccaggccgcgagggacgatggcccctccgaatccgctgaagacggtaccgtcgtagccgagatatcgaagaacaagaaggtgtccgttaggagctggaaaggcagggtcttcgtcgacttacgcgagttctacttcaaggacggcaagactctccccacccgcaaaggtatatcactccaattagatcagtggaagatattgaaggacaacatcaaagccat

SEQ ID NO: 60373 - DNA, 283 bp, Zea mays
acgggatgcagccaatcagtgtcctcttcccatacctcccaatccctgcacataagcgccgcgacagggcacgtgcacgtctggcagaaatctttgccaccatcatcaagtcccgcaaggcctctggacagtctgaagaagacatgctgcagtgcttcattgattccaagtacaagaatgggcgttccaccagtgagggcgaggtaaccgggctacttatcgcagcactctttgctgggcagcacaccagctctatcacctcaacctggactggagcatacat

SEQ ID NO: 60374 - DNA, 282 bp, Zea mays
ttcctcgctggggccaactccatctttgccggcgagaaacttctcacaaccgcagacaacgactttgatgcggaccaggcgatgttcaagaatccttagcctgatccccaaagctccaagctttggcgaggaagaggtgtctgcggcggctcccgcagaatccgagaggtctgagcaagctgcttcgatgtagaatatatacatatcattaccgattatccgtatcacggttggggcgaaactagaactaccgttgtagctagagcattggattgtagaaac

SEQ ID NO: 60375 - DNA, 278 bp, Zea mays
caaaagagtaggagcctttgccatggctcttcagacaataaacaagtgcttgtctgatgcagtctgtgccatggcacggagtatgttagatggcgagagtcgtgctgctgccctaattcattctggcaatgaaattttggagacagctagatactcttctgaagccagcattcaagagaaggacctcatttctgagcaacaaactgtgctgagacagcttgaagctattctccatatttataggctagctcgagctgggcaaactgtagatgctttga

SEQ ID NO: 60376 - DNA, 278 bp, Zea mays
agagaagcaaccctatgtggatcaagctgggcagaagaagcaggactatgagaagaccaaggcaaatcattgagaaggagagcacaagctcaaagaaggctaagactgatgacgacgatggctcgaagtccgaggtcgatgatgaggatggcggtagtgacgaggaaaacgacgacgacgagtaaatagtatctccgctgtcgtgaggtagcaaatcgattgttaggtccccaattagctcactggtttgctatctttaatgttaagttgtttggaac

SEQ ID NO: 60377 - DNA, 277 bp, Zea mays
ggtcagtgacgattgagaaacccgtagtcggagcagaggaggggtagaggatggtgttcggtcaggtggtgatcggcccgccgggctccggcaagaccacctactgcaacggcatgtcgcagttcctctccctcctcggcaggaaagttgcggttgtcaatttggaccctgcaaatgacgcattgccatatgagtgtgccataaacatcgaggacctcataaaactcagtgatgtcatgtctgagcattcgcttggccctaatggagggcttgtgta

SEQ ID NO: 60378 - DNA, 277 bp, Zea mays
ggcaatgatgttccttgatcgacaaaaacaatcaaagaatcctaaatatattctggttcactgtacccatggtcataatcgtacaggtttcatgattattcattaccttatgcgcacacacgtctcttgtgttgctgaggcgattagtatatttgctcaaaggcggccacctggcatatacaagagggactatattgaagcattgtattcattttaccatgaggttcctgacaatatgatgatagcatgccctccaacaccagaatggaagagacca

SEQ ID NO: 60379 - DNA, 189 bp, Zea mays
aagttaatcttcatttgattttatcttgttagcagcgcaggaaccgttgctgattcagtggttggtagtttctttcacttcctgagttgttggtttagggcatgttcgttttgctcttaatccatgtggattgagtgggattggataggtttaatctcacataagttaaaatctttcataatttttttt

SEQ ID NO: 60380 - DNA, 277 bp, Zea mays
ggaattggtgaccatagatgtcatttcgtagcatagtccgtgatgttagggatggcttcggcagcttgtcaaggagaagctttgaggtgaccctcgcaagcatttatggccttactgggcatcacaaagggaagacccagagctcatcacatgtgctcgacgactcaccttccataattcgtgaaagtcgatgggcgaatctacctcctgaactcatccgtgatatcatacggagactggaggctgatgagagcacctggccagcgcggaagcacgt

SEQ ID NO: 60381 - DNA, 290 bp, Zea mays
cactgctgaacatgatgcatctgtactcacagcccttgctgcccaagatgcactatgtgcacccgctgtctgtgatacaggtggacaacctgaggcgccaagccacaagcattgtctccacaaggctgggccgtgcagagccaccgctgcggaaggaaatcgtggaatacatgcttgacgtggactcacacatgtggagcatgagaaagagcaaggcaaatttcttccgtatcacgggtgtcctgagccccctgtttgctgtggcgaggtggttcgatcagatctgtcac

SEQ ID NO: 60382 - DNA, 273 bp, Zea mays
gaacgactacctggctgtgactgcggcgaacacgcgacattcctgccgcactccgcggggcgctactccaagaagcggttccgcaaggcgcagtgcgcatcgtcgagcgcctcaccaactcgctcatgatgcacgggcgcaacaacggcaagaaggtcatggccgtccgcatcatgaagcacaccctggagatcatccacctgctcactgacgccaatcccatccaggtggtcgtggacgccattatcaacagtggaccacgtgaggatgcca

SEQ ID NO: 60383 - DNA, 276 bp, Zea mays
cgcgccatgcattgctgtgtgccgtgatccgaggtggggccggtgctacgagagctacagcgaggaccgccgtctcgtgcagaacatgactgagctcatcccgggactgcagggcgacgtcccgcagaatttcaccagcggcatgcccctcgccgccggaaagaacaaggtggcggcgtgcgccaagcacttcgtcggcgacggtggcacgcacgacggcatcaacgagaacaacaccgtcatcgaccgcagggacctgatgaccatccacatgcc

SEQ ID NO: 60384 - DNA, 273 bp, Zea mays
catgaacaagcagtgcaggttggtggagcagataaggtatcttttgaaagacgacgaggaagcaaggatccagctgggctcaaatggctttgccgaggcactggttgagttcttgaggaatgctgtgaatgatggaaatgagaaggcacaagaagttggtgcaatggctcttttcaatcttgcagtcaacaacaacagaaacaaggggctcctgttatctgctggagtcaccgatctacttgagcagatgatatcgaatccacggctatctgg

SEQ ID NO: 60385 - DNA, 274 bp, Zea mays
cgccaagcacgccgtctccgagggaaccaaggccgtcaccaagttcaccagcaactgagcgcgctgcgggatccgcggatctgttagaagggttctttgctgtgtcctttccccagtcccccaccctacccgcctagtagctagcttgcctgctctataaatccggcgcgccggattgtaatggtcctcttagatttgatgtccctgttgtggaatatagttgtatctctccgcttgctattaaaaaaaaaaaaaaaaaaaaaaaaaagggggg

SEQ ID NO: 60386 - DNA, 274 bp, Zea mays
gactcggagctgcagcagctgctccacatcttcaagttgcttggcaccccaaacgaacaggtgtggccaggcgtcggcaagctgcccaactggcacgagtacccccagtggaagccgacgaagctgtctgctcttgtgcccggcctcgacgctgatggctacgaacttcttgagaaattgctggaatacgagccggcgaacggatccccgcgaagaaggccctggagcacccctacttcaaagatgtgaggaagggagatgcgcactgactgaa

SEQ ID NO: 60387 - DNA, 275 bp, Zea mays
acgaattacacgagggaagaacgctgatgaacaaatggcgtaaatctctatcgacgaagctgtggaggaaaacgaaggatctccccgtgcttgtgcatgccagatcgcctgctctacgtccgcatcccgtccctcgcgaaactcggcactcccagggtgtgcaaaattcatggcttcagacacccgcaagtaagctcattcagatcgatgtgagctcggatacagtgtgcccttggtgctttgtcggtaaaaagaaccttgagaaagcaatggag

SEQ ID NO: 60388 - DNA, 269 bp, Zea mays
gctggttcagtctcttttgagccggctactagaatttggaaaagttgggccccccaaggtgtaaattcttcatttggttggcttctctaaatcgttgctggacagcggatagattaagcagacgaggtctcgtgcatcctgtaaggtgccccctttgtgaccagcaggaggaaacagttcagcatatcttggtggcttgtgtgtttgccagagacacttggtggcagactttgcacaaggtagggctgcatcgcctgactccaggattg

SEQ ID NO: 60389 - DNA, 271 bp, Zea mays
agcttttggtggatgttataccacctaatgacattggagttacctttgatgatattggagccttggagaatgtaaaggacacattaaaggagctggtgatgctccctttacaaagacctgaattgttctgcaaagggcagctaacaaagccttgcaagggaatattgcttttcggacctcctggcactgggaaaactatgcttgccaaagcagtagcaactgaagcaggtgctaatttcatcaatatatcaatgtcgagcattacgtcgaa

SEQ ID NO: 60390 - DNA, 272 bp, Zea mays
cacagcatcgcagaaaccaatcattcatggcaatctgaaaacaaataacattatgcttgacgctgatttccagcccaggatatcagacttcggcctctaccttctgctgaaccctgctgctgcgcaggagatgcttgagacatctgcaatgcagggttataaggctccagagctgatcaagattagggatggcaccagggagagtgatatctacagtttgggagtgattatgctcgagatgcttgctcagaaggaggccgcaaatgatgaat

SEQ ID NO: 60391 - DNA, 270 bp, Zea mays
aaacaacatcaagctctatgtgcgcagggtgttcatcatggacaactgcgaagagctgatccctgagtggctgagcttcgttaagggtattgttgactctgaggaccttcccctcaatatctctcgtgagactcttcagcagaacaagatcctgaaggtgatcaggaagaaccttgtgaagaagtgtgttgagctcttctttgagatttctgagaacaaggaggactacaacaagttttacgaggctttctccaagaacctcaagcttgg

SEQ ID NO: 60392 - DNA, 254 bp, Zea mays
ggctcgagcagagaacactaaggtggtggtacgagagtggtgctgtgaccatctttgtcaagctactcaactccctcagcgaggatgtccgtgaacaggctgtatgggctttaggtaatgttgctggtgactccccaaagtgtcgtgatctggtacttggtcatggtgggctataccctttgctgcagcagcttaatgagcatgctaagctttcgatgcttaggaatgccacatggactctctccaacttctgt

SEQ ID NO: 60393 - DNA, 264 bp, Zea mays
acaaggttgcacgtgttgacatatctaatcgtctcaggtcatcgccatgtgttcttgttgcagcgaagtttggttggtcagccaatatggaaaggctgatgagagcacagtctatgggtgatacagcctctttggatttcatgcgttcgaggaaagtttttgaaataaacccagagcatgagataatcaaggccttgaatgtggcatgcaggaataaccctgatgatcctgaagccctaaaggctctggatgttctctttgaaa

SEQ ID NO: 60394 - DNA, 263 bp, Zea mays
gactagttcttagatcgcggagcccagcggatcgatcattcgatccccaccactgcccgaggccccctcctcgctgacttggctcctccgccgtggccggagggaagcaagtggggaccacagaagcattagctgggtgaactctttcaaaaggggcaggtgcgctagtttgaatggctgctacaaagcttcaggccttttggacctaccctgctggccccaaaaccattcatttctaggcgccaacattcaaatggggtatc

SEQ ID NO: 60395 - DNA, 269 bp, Zea mays
ccatcctgatgcaacgccatgtacttgttgatggcaaggtcaggacagacaagacctaccctgctgggttcatggatgtcatttccatccccaagaccaatgagaactacaggctgctgtacgataccaagggccgcttccgccttcacccaatcagggatgaggatgctaagttcaagctttgcaaggttaggtctgttcagtttgggcagaagggcatcccttatctgaacacgtatgacggccgcaccatccgctaccctgacccc

SEQ ID NO: 60396 - DNA, 269 bp, Zea mays
gcactcttgcagggaaggaatgatatagctgagcactctatgaaagatgttccaacataactacctgaaggcacaatattgccctgtaacctcccacgagaagatgtaagagatgcattcatatgcttgactgcaaattcgctcgcggagcttcctgctggcagtgttgttggaagtgcttccttgcggagacaatctcagattctctacagatatccatcactgaaagtagttaacttcagaggaaatgttcagacacggttaaggaa

SEQ ID NO: 60397 - DNA, 268 bp, Zea mays
gtattacacaagcaatgcatacagtcctgtacaggatgttgctgattcctgcagaactggagctgctacgaatgtcatctttggccttgctctgggatataaatccgtcattatccctatttttgctattgcttttagtatttttctcagcttcagccttgctgccatgtacggtgttgctgtggctgctcttggaatgctcagcacaatcgctactggccttgccattgatgcctatggtcctatcagtgacaatgctggaggaatt

SEQ ID NO: 60398 - DNA, 266 bp, Zea mays
attgctggagctggtgagcttcatcttgagatttgcctgaaggatctgcaggaggacttcatgggtggtgctgaaattattgtttccccacccgtcgtctccttccgtgaaacggttcttgagaagtcctgccgtactgtcatgagcaagtctcccaacaagcacaaccgtctgtacatggaagcgcgccccttggaggagggtctcgctgaggccatcgatgacggccgtattggcccacgtgatgatccgaaggtgcgctccca

SEQ ID NO: 60399 - DNA, 112 bp, Zea mays
tgcagcagtatggcttgaatccttatgaagtttgatgtgtcctctgtgttgtacccaaaactcttctgcagcagtatggcttgaatccttatgaagtttgatgtttgaactt

SEQ ID NO: 60400 - DNA, 263 bp, Zea mays
aaccactgctccgccgcctccggcgaccgccggagcccgtggtggaggaggacgtggagagagtagatctcgccagatccaaggaggtggggacgagatggtgagctcatcgtcgtcggtggttaacgtgtacccgctcgccaactacacgttcggcaccaaggagcccaagatggagaaggacacctccgtcgccgaccgcctcgcccgcatgaaggtcaactacatgaaagaaggaatgcgtacaagtgttgaagcatcct

SEQ ID NO: 60401 - DNA, 265 bp, Zea mays
gaggcagcaagccgctgggggaaagcgtattcgcggtccacgcggtcgccggtgcggcggcgatcagcgcctccgccgtcgccgtgtaccccctcgatacggtcaagacactcctccagctgggagcgacggggcagaagcagaagatggggctccggcaggtggtggaccggctcatggccaattccggccctgcaggtttttacaatggcattggatggtccatattgggtaaacttcctggattgggagcacgttttgggac

SEQ ID NO: 60402 - DNA, 285 bp, Zea mays
ggaaggtaaatacaagcaagctttactacagtataagaagatcgtgtcttggctggaatatgagtctagtttttccaatgaggaagcacagaaagcacaggcccttcgactggcctctcacctcaacctggccatgtgtcatctgaaactacaggccttctctctgccattgaaagctgtaacaaggccctagaactggacagcaacaacgagaagggcctcttccgccggggagaggcccacctggccgtgaatgactttgaactggcacgggctgatttccag

SEQ ID NO: 60403 - DNA, 285 bp, Zea mays
cctgccgacaagaccaacgtcaaggccgcctggggtaaggtcggcgcgcacgctggcgagtatggtgcggaggccctggagaggatgttcctgtccttccccaccaccaagacctacttcccgcacttcgacctgagccacggctctgcccaggttaagggcacggcaagaaggtggccgacgcgctgaccaacgccgtggcgcacgtggacgacatgcccaacgcgctgtccgccctgagcgacctgcacgcgcacaagcttcgggtggacccggtcaacttca

SEQ ID NO: 60404 - DNA, 286 bp, Zea mays
cttgcaagatggcgggtgaaaaagttgagaagccagatactaaagagaagaaacccgaagccaagaaggttgatgctggtggcaaggtgaaaaagggtaacctcaaagctaaaaagcccaagaaggggaagccccattgcagccgcaaccctgtccttgtcagggaattgccaggtattcccgatctgccatgtattccagaaaggccatgtacaagaggaagtactcagccgctaaatccaaggttgaaaagaaaaagaaggagaaggttctcgcaactgttaca

SEQ ID NO: 60405 - DNA, 283 bp, Zea mays
cagcattcgggccgagatgtctcgctccgtggccttagctgtgctcgcgctactctctctttctggcctggaggctatccagcgtactccaaagattcaggtttactcacgtcatccagcagagaatggaaagtcaaatttcctgaattgctatgtgtctgggttcatccatccgacattgaagttgacttactgaagaatggagagagaattgaaaaagtggagcattcagacttgtctttcagcaaggactggtctttctatctcttgtactacactgaat

SEQ ID NO: 60406 - DNA, 285 bp, Zea mays
ctggcatcgaagatggtgtgttctttctggaaactgtatatcttattggacttatccagatgatgagacacgcaagagtcccataggaaggataaatctggctaattgtaccagtcgtcagatagaaccagccaacagagaattttgtgcaagacgcaacactttgaattaattactgtccgaccacaaagagaagatgaccgagagactcttgtcagccaatgcagggacacactctgtgttaccaagaactggctgtctgcagatactaaagaagagcgggat

SEQ ID NO: 60407 - DNA, 166 bp, Zea mays
tcgcatgtgatgacaaaccttggagagaagttaacagatgaagaagttgatgaaatgatcagggaagcagatattgatggtgatggtcaagtaaactatgaagagtttgtacaaatgatgacagcaaagtgaagaccttgtacagaatgtgttaaatttctgtaca

SEQ ID NO: 60408 - DNA, 284 bp, Zea mays
ttcgagagtgactcccgttgtcacaaggcttcccagagcgaacctgtgcggctgcaggcaccggcgcgtcgagtttccggcgtccggaaggaccgagctcttctcgcggatccagtgttccgtttccagcccccaatctcatagcggagccgacagatagcaggatccggcatggccaaatccgcggcgatcggcatcgacctgggcaccacctactcctgcgtgggggtgttccaacacggcaaggtggagatcatcgccaacgaccagggcaactgcaccac

SEQ ID NO: 60409 - DNA, 279 bp, Zea mays
cgccgcagtcttcgccaccatgccgccctacaccgtggtctatttcccagttcgaggccgctgcgcggcctgcgcatgctgctggcagatcagggccagagctggaaggaggaggtggtgaccgtggagacgtggcaggagggctcactcaaagcctccgcctatacgggcagctccccaagttccaggacggagacctcaccctgtaccagtccaataccatcctgcgtcacctgggccgcacccttgggctctatgggaaggaccagcaggaggcag

SEQ ID NO: 60410 - DNA, 212 bp, Zea mays
aagaagacagtgcagccacctccgagagcctggatgtgatggcgtcacagaagagaccctcccagaggcacggatccaagtacctggccacagcaagtaccatggaccatgccaggcatggcttcctcccaaggcacagagacacgggcatccttgactcatcgggcgcttctttggcggtgacaggggtgcgcccaagcggggctctggcc

SEQ ID NO: 60411 - DNA, 281 bp, Zea mays
gagcggacggattcgattcaacggggttccggaccgcgctgcgctatggagcaggtcaatgagctgaaggagaaaggcaacaaggccctgatcgtgggtaacatcgatgatgccttacagtgctactccgaagctattaagctggatccccacaaccagtgctctacagcaaccgttctgctgcctatgccaagaaaggagactaccagaaggcttatgaggatggctgcaagactgtcgacctaaagcctgactgggcgcaagggctattcacgataagc

SEQ ID NO: 60412 - DNA, 278 bp, Zea mays
tggcgcttcacgttcccaaggctccgggctttgccagatgctcaaggagggagcgaaacacttttcaggattagaagaggctgtgtatagaaacatacaagcttgcaaggagcttgcccaaaccactcgtacagcatatggaccaaatggaatgaaaaaatggttatcaaccacttggagaagttgtttgtgacaaacgatgcagcaactattttaagagaactagaagtacagcatcctgctgcaaaaatgattgtactggcttctcatatgcaaga

SEQ ID NO: 60413 - DNA, 276 bp, Zea mays
ggtcaggggagacctccaggcgcagggaaggacggccagggtgacacggaagcatgcgacggctgctgatccctctggccctgtggctgagtgcggtgggcgtgggcgtcgccgagctcatggaagcccagcgccggggcctgcatgtggctctgaggaatttcacgagcacccgcccgtgcagtgggccttccaggagaccagtgtggagagcgccgtggacacgcccttcccagctggaatatttgtgaggctggaatttaagctgcagcagac

SEQ ID NO: 60414 - DNA, 276 bp, Zea mays
cttataagtgtttagcagcagctttgatagttctgacggagtctggcaggtctgctcaccaggtggccagataccgcccacgtgcccccatcattgctgtgacccggaatccccagacagctcgtcaggcccacctgtaccgtggcatcttcccttgctgtgcaaggacccagtccaggaggcctgggctgaggacgtggacctccgggtgaactttgccatgaatgttggcaaggcccgaggcttcttcaagaagggagatgtggtcattgtgct

SEQ ID NO: 60415 - DNA, 275 bp, Zea mays
cagggcaaccgcaccacccccagctacgtggccttcacggacaccgagcggctcatcggggatgcggccaagaaccaggtggcgctgaacccgcagaacaccgtgtttgacgcgaagcgctagatcggccgcaagttcggcgacccggtggtgcagcggacatgaagcactggcctttccaggtgatcaacgacggagacaagcccaaggtgcaggttggctacaagggggagaccaaggcattctaccccgaggagatctcgtccatggtgctg

SEQ ID NO: 60416 - DNA, 272 bp, Zea mays
gatccctgaaaagttccagcatattttgcgagtcctcaacaccaacatcgatgggcggcggaaaatagcctttgccatcactgccattaagggtgtgggccgaagatatgctcatgtggtgttgaggaaagcagacattgacctcaccaagaggcgggagaactcactgaggatgaggtggaacgtgtgatcaccattatgcagaatccacgccagtacaagatcccagactggttcttgaacagacagacggatgtaaaggatggacaata

SEQ ID NO: 60417 - DNA, 276 bp, Zea mays
caccgctgagctgggagaaagatggcggcaccgtgcgacaggatttggcccagctcatgaattcgagcggctctcataaagatctggctggcaagtatcgtcagatcctggaaaaagccattcagttatctggagcagaacaactagaagctttaaagcttttgtggaagcaatggtaaatgagaatgtcagtctcgtgatctcgcggcagttgctgactgatttttgcacacatcttcctaacttgcctgatagcacagccaaagaaatctatca

SEQ ID NO: 60418 - DNA, 263 bp, Zea mays
actttttgaataacagatggggagatctatagggtaaatacagcaaaacgaagcgagcatgtaggccacagcagtcagctctgttgtgcggaaagatgtgtatatatgtattagcaacatgtttgttctgatgacctttttaatgcttttcgatggtaggtctgttccatcaagtatttaactaatcatcatttgttgcagttggtataggtcttctgttcttttttttttttttggccgtcgtttccattgaggatgttcca

SEQ ID NO: 60419 - DNA, 262 bp, Zea mays
cccaagccgccccttcccccatctctttcgcgacccatttgatcgattcctgatggcgcccaaggccgagaagaagcccgcggagaagaagccggcggaggagaaggccgagaagaagccaagggcggagaagcgcgtgccgagtaaggagggcggcgagaagaagggaaagaagaaggcgaagaagagcgttgagacgtacaagatctacatcttcaaggtgctcaagcaggtgcacccggacatggcatctcgtccaagg

SEQ ID NO: 60420 - DNA, 262 bp, Zea mays
actagttctagatcgcgggcggccgcccccacaccgtctcctccacaacacgctcctcacctcgcggcgactcttgccaagcattcctccgcgaaaaacgcatccgctccaaggggagttgatcgagaagcgttggtggacatgggtcagatccagtactccgagaagtacttcgacgacacctacgagtacaggcacgtcgtcctcccgccagaggtcgccaagctcctccccaagaaccgctcctctccgagaacgagtg

SEQ ID NO: 60421 - DNA, 268 bp, Zea mays
agaaaaaagagttgctgacaagattgtgtacggcggcaaggctgatgagaagcaactaaaaatttctcctacactattgttagatgttcctgaagattcagaaattatgacaggcgaaatatttgggcccttgcttcctattgtgacggtcgaaaagattgaggaaagcttcgacttgatcaatgccaagcctaagccactagccgcctaccttttcaccaagaataggaagctgcaagaggagtttgtggcaagcgtccctgcagga

SEQ ID NO: 60422 - DNA, 272 bp, Zea mays
tgctatcgatgcttcagatgggctggacacgcttgcaaaccttgcgattcttggtgaaggtgaagctctcccttcacagccaacaacaaaacatccccgccatcgtccgggctgctcatgcatcgtctgcatccaaccaccaagcgggaagggtccaaagcacaagcaaacttgcacctgtaacgtttgtatgacggttcgccgccgtttcaggacactcatgcttcgacgcgagaagaaggcgacaaaggatcttctcgcaagaaagagac

SEQ ID NO: 60423 - DNA, 245 bp, Zea mays
ggctcgaggcaaggcatcggtgtgggtagctttcagaagatctacggtggccgccagaggaatagctcccgcccaccacacttctgcaagagcagtggtgctgttgcacgcaacatcctgcagcagctgcagattatgggcatcatcgatgtcgatcccaagggtggacgcctcatcaccaaccagggaaggcgtgatctggaccaagtggctggaagggtcgctgttgaagcgtgacagtgtca

SEQ ID NO: 60424 - DNA, 260 bp, Zea mays
aatttgttgatgatgtgcagtcagctatcgatcacataaatcgttatggaagtgcacacacagactgcatacatcacaactgatagaagtgctgcagaggcctttctgcagcaagttgatagtgccgctgtgtttcataatgcaagcacaaggttttgtgatgggacgcgttttgggctaggtgctgaggttggcataagtacagagcgcatacatgcccgcggacctgttggagttgatggacactaactactcgctgc

SEQ ID NO: 60425 - DNA, 265 bp, Zea mays
acgaattacacgagggaagaacgctgatgaacaaatggcgtaaatctctatcgacgaagctgtggaggaaaacgaaggatctccccgtgcttgtgcatgccagatcgcctgctctacgtccgcatcccgtccctcgcgaaactcggcactcccagggtgtgcaaaattcatggcttcagacacccgcaagaagctcattcagatcgatgtgagctcggatacagtgtgcccttggtgctttgtcggtaaaaagaacttgagaaac

SEQ ID NO: 60426 - DNA, 260 bp, Zea mays
acacagtttcctgaaatgcttgatggaagagtaaaaacattgcaccccagtatacatggtggtattcttgcgcgaagagaccaggagcaccatctgaaagcactgaaagagcatggcattgggacatttgatgtggttgtagtgaatttgtatccattctatgataaggtcacctcaggtgcaatatcttttgaggatggcattgaaaatattgatattggtgggcctacattgatccgagtgctgccaagaatcataag

SEQ ID NO: 60427 - DNA, 259 bp, Zea mays
cttggaacatctggtcagaacatagatgacctgtgcaagtactctgatgctaaagacaagctggaattcatggaaagaacactgagatggcgccatcttgctcctactgctccaaatagcctaggctgttatccatacacagacaaggatcctttccttgttgaaagttgcccgcacgtctactttgttgggaatcaagataaatatgaaactcgactgttggaagggcaagaaaaacagaagtgaggctaatctccat

SEQ ID NO: 60428 - DNA, 257 bp, Zea mays
gcggcggcgcgggcggacaaggagcaggcggaggaggagctgtgccaagccacaatgggtatctcacgcgactcgatgcacaagcgccgtgccaccggtggaaagcagaaggcctggaggaagaagcgaaagtatgagcttggtcgccagccggccaacaccaagttgtcaagcaataagacagtgaggagggtccgtgttcgtggaggtaacgtgaagtggagggctcttcgccttgaactggtaactactcatgg

SEQ ID NO: 60429 - DNA, 259 bp, Zea mays
atcgaaagagacgagtatttgtttaaggcattccagtacttcgataaagataacagcggtttcatcacaagagatgagctggagtctgctttgatcgagcatgagatgggtgacacgagtacaataaaggagatcatatcagaagtggacacagacaatgatgggaggattaactatgaggagttctgcgcaatgatgagaggagggatgcagcagccaatgaggctcaagtagcctgtcccttagtagaaatggtgta

SEQ ID NO: 60430 - DNA, 263 bp, Zea mays
gttaagggtattgttgactctgaggaccttcccctcaatatctctcgtgagactcttcagcagaacaagatcctgaaggtgatcaggaagaaccttgtgaagaagtgtgttgagctcttctttgagattgcagtgaacaaggaggactacaacaagttttacgaggctttctccaagaacctcaagcttggcatccatgaggactcgcagaacaggaccaagatcgccgagcttctgagatacactccaccaagagtggtgat

SEQ ID NO: 60431 - DNA, 260 bp, Zea mays
gaaagtttgaaggaagcttgtgaactgctctgcaggagcatcactttctaactggtacacttgaggaagactccaacaggtcagacaacgagtattcagagcaaattaaactactatcagaggtcttcagccaagcgacagtcgccgatacaccaacagatgtgcccgattacctttgctgtcagataacattcgagatcttccgagatccagtgatcacaccgagtggtgtaacttatgagaggctgtacttgttgaac

SEQ ID NO: 60432 - DNA, 264 bp, Zea mays
gtggagtaccgttgcttcgtcggcgggcttgcctgggccaccagcaacgagtcgctggagaatgccttcgcctcctacggcgagatcctcgactccaaggtcatcaccgaccgggagacggggaggtctcgcggcttcggcttcgttaccttctcctccgagaactccatgctcgacgctatcgagaacatgaacggcaaggagctcgacggccgtaacatcaccgttaaccaggcccagtccctggcggtggcggtggcggcg

SEQ ID NO: 60433 - DNA, 269 bp, Zea mays
gaccacctgaggcaagtctttggcaacagatgggtttgagtgatcaggacattgttgccctctctggtggccacaccttgggaaggtgccacaaagagcggtctggttttgagggggcctggactacgaaccctttggtctttgacaactcttacttcaaggaacttctgagtggcgacaaggagggccttcttcagctcccaagtgacaaagccctgctgagcgaccctgtcttccgccctcttgtggagaaatatgctgcagatgag

SEQ ID NO: 60434 - DNA, 257 bp, Zea mays
gctatcgatgcttcagatgggctggacacgcttgcaaaccttgcgattcttggtgaaggtgaagctctcccttcacagccaacaacaaaacatccccgccatcgtccgggctgctcatgcatcgtctgcatccaaccaccaagcgggaagggtccaaagcacaagcaaacttgcacctgtaacgtttgtatgacggttcgccgccgtttcaggacactcatgcttcgacgcgagaagaagcgacaaaggatctgtct

SEQ ID NO: 60435 - DNA, 257 bp, Zea mays
gtatgtaaaccaagtccttacaaggtgtcttttcgctggactgtgtttccatgcataccaacaggtgtcttacatgattttggcgatggtgtctcctgtcactcattctgtgggcaactgtgttaaacgtgttgtggtcattgtaacatcagtgctgttcttcaggacacctgtttctcctatcaactctctcggtactgcgattgcacttgccggagttttcctgtactcacagctcagcgacttaagcccaagcc

SEQ ID NO: 60436 - DNA, 265 bp, Zea mays
ggcgccgtactgcaagagcagctcaaccatgcccaggtccgcggcgcggcatgctagatggagcaaagataatccttcaacagattcaagagggcggacgccgcttcatcacagcatcatgaaagggcgacatgtgtacgccaagctactgctttccaggggcgccgattctcaagccgcggatcgagatggtaggacagcgttacagtatgcaatcgacagcggaaccatagaggacgaagagatccttgttttgctagaggac

SEQ ID NO: 60437 - DNA, 243 bp, Zea mays
tggatggtcacgctttttcggaaatgatgtcctggagttcttgactcgcacgaatggtgggctgtgccaactatatggctgcctgttgtctgctgcctgctcgtgaaatctattctgatgggtcatactgttcaggacgtagctatgatggctctgtttgggatatttatttggacgctgatcggatacactttgcaccgcttcctggtccacatcgagaccaagactactggtgaacacgca

SEQ ID NO: 60438 - DNA, 260 bp, Zea mays
gaggaagcaatgcagtcagcttcaaagggcaaggttcagaccattcgccaaggctatctatctaagagatcttcaaacttgagaggtgattggaaaaggaggttctttgtcctcgacagtcgaggaatgttgtactattatcgcaagcagaacagtagaccatctagtggatattctaaccaaagaactagcattccctcagaacatggttctgggttgctcagcagatggttctcttctcattatcatggaggcgtgca

SEQ ID NO: 60439 - DNA, 258 bp, Zea mays
caaaatactccaaggcacgttatgatgagattgtgaaggaagtctcatcctacctcaagaaagttgggtacaaccctgataagattgccttcgttcccatttctggttttgagggcgacaacatgattgagaggtccaccaaccttgactggtacaaaggcccaaccctgcttgaggctcttgaccagatcaccgagcccaagaggccttcggacaagcccctgcgtctgcccctccaggtgtgtacaagattggtgg

SEQ ID NO: 60440 - DNA, 252 bp, Zea mays
gggaaagtctttccaacaatcattggtaataatgtcacaataggtcacagtgctgtgttacaaggatgcacggttgaggatgaggcttttgttggcatgggggcaaccctattagatggtgtcgttgttgaaaagcatgggatggtagctgcaggatcccttgtaagacagaatactaggatcccttgtggagaggtatggggagggaacctgccaaatttctgaggaagctcacgatgacgagatccattt

SEQ ID NO: 60441 - DNA, 140 bp, Zea mays
gggttggcttctcctcccctccggttcgggttcgggttcgtgaggttctccggggttcggtttcgtgggtgggcggatcgagatggcggcgtcggatgttgagtaccgctgcttcgtcggcggcctcgcctgggccacgg

SEQ ID NO: 60442 - DNA, 278 bp, Zea mays
agactagttcttagatcgcggacgccagcggatcgatcattcgatccccaccactgcccgaggccccctcctcgctgacttggctcctccgccgtggccggagcgaacaagtggggaccacagaagcattagctgggtgaactctttcaaaaggggcaggtgcgctagtttgaatggctgctacaaagcttcaggccttttggaaccaccctgctggccccaaaaccattcatttctgggcgccaacattcaaatggggtatcagcattgccaacata

SEQ ID NO: 60443 - DNA, 273 bp, Zea mays
cgtcgaaggcggcggcggcgatggggagcgaccaggagacggagaagaagaagaccccggtggcactaatgcccatcgcgaacccctcgcaggaaagaagctctgcaagcggaccctcaagctcgtgcgacgagcctctgaggccaagtgcctcaagcgcggagtcaaagaggtagtcaagagcattcgccgcgggaacaaagggttgtgtgtgattgctggaaatatttctcctattgatgtgattacacacgttccaatactatgtgagga

SEQ ID NO: 60444 - DNA, 273 bp, Zea mays
agcaaaacttctggtggaagaggatgaaggttgatgtttctaagtatgtggccgcctgtgaggtatgtcagcgcgtgaagggcgaacataataggcctgcaggtttattgaagccattggaaattccggagtggaagtgggagcatatcaccatggattttgtggttggcttacctcgttctcctcagggcagggatgctatatgggtggtagtggatcacttaactaagtctgcgcactttattctcatgaagaccacaaatttagcttcaa

SEQ ID NO: 60445 - DNA, 275 bp, Zea mays
aggaaggagtcggagggaaccgaaaactcagggtctcgaatttcctaggagcggaggcgatggctgggaagggaggaaaaggattgctcgccgcgaagacgacggcggccaagtcggcggagaaggacaaggggaagaaggcccccatctcacggtcctcccgcgcgggcctccagtttcctgttggacgaatccaccgtcagctgaagcaaaggactcaggcaaatggccgcgttggtgccactgcagccgtctactctgccgccatcctggag

SEQ ID NO: 60446 - DNA, 273 bp, Zea mays
aggctgttgccttcctctcggacttcaaacttggccactatatgaagatccctcccaagtccatgttccttgtccagtttgtcggtaccattgtggccggcacggtgaacatcgggacggcatggtggctgctgggctccatcgacggcatctgctccgactcactcccaccagacagcccctggacatgtcctaacgaccgcgtcttcttcgacgcgtcagtcatctggggcctcgtgggtccacggcgcatcttcgggccagacgggaact

SEQ ID NO: 60447 - DNA, 272 bp, Zea mays
agcacaacggctagaatctcctcctccgtccgcgtactctcggtttcggcgatgtcggggcgcggcaagggcggcaaggggctgggcaagggcggcgccaagcgccaccgcaaggtgctgcgcgacaacatccagggcatcacgaagccggcgatccgtaggctggccaggaggggcggcgtcaagcgcatttctgggctcatctacgaggagacccgcggcgtgctcaagatcttcctcgagaacgtcatccgcgacgccgtcacctacac

SEQ ID NO: 60448 - DNA, 269 bp, Zea mays
aaaatacaggaggtgttgttcaagagagagtaccaaattctcaaggagctcagtctgagaatgatcctaacaataccactatatttgttggtgggcttgaccccaatgtcactgaagataccctaaaacaagttttttctccttacggtgaatgtcgtccatgttaagatccctgttgggaagagatgtggttttgttcagttcgttaccagaccttctgctgaacaagcgctgctaatgctgcaaggggccttgattggtgcacagaa

SEQ ID NO: 60449 - DNA, 269 bp, Zea mays
ggcagacagttgctgttggagtcatcaagagtgtggagaatgtctccaccccttggtaggtttgctgtccgcgacatgaggcagacagttgctgttggagtcatcaagagtgtggagaagaaggacccgaccggcgccaaggttaccaaggcagctgccaaaaagaaatgatgcaacctgtcgttaatcctgtatctgcttttgcaatacctgacttgtcactccatcccgaagttttgtatgcggttgttactgttattgtgtactgt

SEQ ID NO: 60450 - DNA, 272 bp, Zea mays
agaaaatgaggaagtcaatctcgatgatgtcaatgcagcttttgatgatcctgaggacgataatgaggatgctttcgaagatgaaacaggtcctctaacacttaatgcattcgacctaatcattctttcgcaaggattgaatcttgcagcgctctttgaccgcagacaggactgtgacaagcttcaaaatagattcttatcacgcaatccagcaaaggttatcttgtcaagcatggaggttgttgcgcaatcaatgggatttaagacacaca

SEQ ID NO: 60451 - DNA, 276 bp, Zea mays
aacatcccccgaatcatgaattggtggccaaggacctgcatggggccgagtggcggttccgtcacatccttcgaggtcagccacggagacatctcctgcaaagtggttggagtgtttttgtgagcgccaagcgtcttgtcgcgggggatgccttcatatttctcagacgtgacaatggggagctccgtgttggagttcggcgtgcactgaggcaccaaaccactatcccatcttcagtcatatcaagccacaatatgcatcttggtcttcttgcaa

SEQ ID NO: 60452 - DNA, 270 bp, Zea mays
gactagttctagatcacccgcgtccgccaccgccgccgcctttcgtaccgcggcccctaaacccctttcctcgttcccctccgtctctcagttaggcacaatgatgctagctaataagcttggtggtttgctcaagaatgctacgagttcaaagcgttcaaatatgtctgtctaccaagcaatcagatgcatgtcatcatccaagctttttgttggagggctttcttatggaaccgatgatcacagtctcagagacgagtttgccaaata

SEQ ID NO: 60453 - DNA, 268 bp, Zea mays
ctcgagcgaattcggctcgaggttctgttttttagatggaagcaaccactcccaaatactccaaggcacgttatgacgagattgtgaaggaagtctcatcctacctcaagaaagttgggtacaaccctgataagattgcctttgttcccatttctggttttgagggcgacaacatgattgagaggtccaccaaccttgactggtacaaaggcccaaccctgcttgaggctcttgaccagatcaccgagcccaagaggccttcagacaa

SEQ ID NO: 60454 - DNA, 270 bp, Zea mays
aggagctggtggggaaggaggtgacagtggagctcaagaatgacttggcgatccgcgggacgctccactcggttgaccagtacctcaacatcaagctcgagaacacccgcgtagtcgaccaggacaagtatccccacatgctttcagtgcggaactgcttcatcaggggctcggtggtgcggtacgtgctgctcccgcacgacggcgtggacatcgacatcctccacgacgccaccaggagggaggcgcgcggaggctgatcctgatgcg

SEQ ID NO: 60455 - DNA, 270 bp, Zea mays
tggcagacagttgctgttggagtcatcaagagtgtggagaatgtctccaccccttggtaggtttgctgtccgcgacatgaggcagacagttgctgttggagtcatcaagagtgtggagaagaaggacccgaccgacgccaaggttaccaaggcagctgccaaaaagaaatgatgcaacctgtcgttaatcctgtaattcattttgcaatacctgacttgtcactccatcccgaagttttgtatgcggttgttactgttattgtgtactgt

SEQ ID NO: 60456 - DNA, 152 bp, Zea mays
gctcctatcaacctttcggatcgtttgaatcaagtgcttcggtgggctcttggttccattgcaattcttttcagcaggcattgtcccatatggtatggctatggaggtcggcttaaattcctggagagatttgcatatatcaacacaacaaa

SEQ ID NO: 60457 - DNA, 271 bp, Zea mays
gaatgtaaaccaagtccttacaaggtgtcttttcgctggactgtgtttccatgcataccaacaggtgtcttacatgattttggcgatggtgtctcctgtcactcattctgtgggcaactgtgttaaacgtgttgtggtcattgtaacatcagtgctgttcttcaggacacctgtttctcctatcaactctctcggtactgcgattgcacttgccggagttttcctgtactcacagctcaagcgacttaagcccaagccgaagacggcttaa

SEQ ID NO: 60458 - DNA, 265 bp, Zea mays
ctcgtttagaacctctaaaatttcccccactcgccagtcgcagcagcacctgtagcagccatggacgccagcggagccggtagcaaggggaagaaggcggcggccgggcgcaaggcaggcggccccaggaagaagtcggtgacgcggtccgtcaaggccgggctgcagttccccgtcggccggatcgggcgctacctcaagaagggccggtacgcgcagccgtgtggcactggcgcccccgtctacctcgccgccgttctggagt

SEQ ID NO: 60459 - DNA, 266 bp, Zea mays
cagctctatggcattaatcatgtagccgttctgttgcataatgactgtctttatctctcccaggagatatttgggtttgcatttgagtatcgaacagactttccaaattccatgaaggaacatgctgtgtttgttgatttggctccaaggtttcagctgttggcagaagaaatattgcagagacaagttcaccttgatgaatataatttgaaggaggctatagatggtgctgatggatttcagaatactcatcagatgaaacaatt

SEQ ID NO: 60460 - DNA, 270 bp, Zea mays
gggcgatgtgaaattaacaatggaggatgctggaaagataccaagaatggtcggacatactctgcctgtaatgatgatggctgcaaatgcccagatggattcaagggtgacggtaggcacaaatgtgaagatattgatgagtgtaaggaaaggactgcgtgtcaatgcaaagaatgcaaatgcaaaaacacatgcggaagctatgagtgtggctgcagtggaggcttgctttacatgaaggagcatgatacatgcataagcaaaagtgga

SEQ ID NO: 60461 - DNA, 272 bp, Zea mays
gttgttgtcaatggcaatgggatggaggttggtcatactattgtgacgactgttggtggaagaaattcacagcagaggcagactattagttatgtggcccagcgtatcgtggggcaaggttcatttggagttgtcttccaggccaggtgtctggaaactggtgagagagtagctataaagaaagttcttcaagatgtgagatacaagaaccgtgagctgcaaacaatgcaagttcttgatcacccaaatgttgtatgcttgaagcattactt

SEQ ID NO: 60462 - DNA, 271 bp, Zea mays
gactagttctagatcacccgcgtccgccaccgccgccgcctttcgtaccgcggcccctaaacccctttcctcgttcccctccgtctctcagttaggcacaatgatgctagctaataagcttggtggtttgctcaagaatgctacgagttcaaagagttcaaatatgtctgtctaccaagcaatcagatgcatgtcatcatccaagctttttgttggagggctttcttatggaaccgatgatcacagtctcagagacgagtttgccaaatat

SEQ ID NO: 60463 - DNA, 269 bp, Zea mays
ctatgtgtcgcacattcaagttaatcaggctcagaagcagcgacgcaggacataccgtgctcatggacgcatcaacccttacatgtcctccccatgccacatagagctcatcttgtcggagaaggaagaaccagtgaagaaagaggccgagtctcagatcgcaaccaggaaggcttagagaaggggctctatcttctgtgattggcttagtacaagttttggctgattatttgttgtctcatactgtttacctgagtattgtttgcaag

SEQ ID NO: 60464 - DNA, 267 bp, Zea mays
ctcgagccgattcggctcgggccgagaagaagcccgcggcgacgaagccggcggaggactagcccgctgccgagaaaccgccggccgggaagaagcccaaggcggagaagcgtgtcccagcaggcaagtccgccggcaaggagggcggcgagggaaagaggggccggaagaagggcaagaagagcgtggagacctacaagatctacatcttcaaggtgctgaagcaggtgcacccggacatcggcatctcctctaaggccatgtcca

SEQ ID NO: 60465 - DNA, 264 bp, Zea mays
agcataacataacatcatcacatcattttgcataacataagcatcatacagcataatgcatctggaacaagaaggggatacagtgttgaccttcggaacatattttggaaaagagaaaatcatgctaaggcacaagacaaatcgagatcaagtgtagcctcatcggaaacgcaaaacttttttacagcttcgaacaatatttcacgctgctaggacatttttcatcagagaagtaagcaaattcttatggtatagaaaggattt

SEQ ID NO: 60466 - DNA, 269 bp, Zea mays
ggacaaactgttctgtcatatgttaatatggtgtgttcgaccttgaggaactccatcccaaaatctattgtttattgccaagtgcgagaggccaagcgctcgctgctcgatcacttcttcactgaactgggagcaagagagatgaagcaactttccaagcttctcgacgaagatccagcagtcatggaacgcagaactaaccttgcaaagaggctggagctgtaccggagtgcccaatcggaaatcgatgcagtcgcatggtccaaata

SEQ ID NO: 60467 - DNA, 264 bp, Zea mays
tcccgtccgacgtcctccaccaaacactcgatacatccgaggccgcggctctcatagcagcagcagccgccgattacgccgcatcagatccttccccgtcaatgcacaagtctcttgacgagggaatcgccaaagctgcggacctgctccggtgtgcggagcggcctctggttgtgattgggaagggtgcggcgtatgcgcgcgcggaggaagcgattcggaagctggtggacaccacgggcatccccttcctcgcgacgccga

SEQ ID NO: 60468 - DNA, 277 bp, Zea mays
agagttcaaatatgtctgtctaccaagcaatcagatgcatgtcatcatccaagctttttgttggagggctttcttatggaaccgatgatcacagtctcagagacgagtttgccaaatatggacaagactaagaagctaagattatccttgatcgtgagtctgggaggtccagaggttttggctttataacttacacgtcttctgaggaggcttcggctgccatcactgccatggatggaaagactctggatggacggaacatacgggttaatcatgc

SEQ ID NO: 60469 - DNA, 275 bp, Zea mays
tgagtttatggttattgatactggtggggtaattactttgtcaaagtctcaagcaggtgtaatggaagaacttgccgtcaccactactgttggtatggatgggattcctctcgccactagagaagctgctattgcaaggatgccatcaatgattgaaaaacaagcagttgcagctgttgatgaagcatccgtcatactattcgttgtggatggtcaggctggtcttgtggcagctgatatagagatttctgattggttacgacgcaactactctg

SEQ ID NO: 60470 - DNA, 273 bp, Zea mays
cgccgtcacagtcgagatcatgcacgcgatgtggaagcccgccaagttcaagtacatctacctgctggcgacgctgtacgtgttcacgctgacgctgccgtcgtcggcggccatgtactgggcgttcggcgacgagctgctgacccactcgaacgccttctcgctgctgcccaagacccggtggcgcgacgcggcggtgatcctgatgctgatccaccagttcatcaccttcggcttcgcgtgcacgccgctctacttcgtgtgggagaaggt

SEQ ID NO: 60471 - DNA, 272 bp, Zea mays
cccgttccccaacctctcgtctgctgcctgcctgcctgcctgcctgcaaaaaggagtttgtcatggcgtctaagcgcatcctcaaggagctgaaggacctgcagaaagacccccccacatcatgcagtgcaggtcctgctggtgaggacatgtttcattggcaagcaacaattatgggaccacctgacagtccctatgctggtggtgttttcttagtgaacattcatttcccgccagattaccccttcaaacctccaaaggtttctttcaag

SEQ ID NO: 60472 - DNA, 273 bp, Zea mays
tggtcatggccaccgtcaagaagggaaagcccgacctcaggaagaaagtgatgcctgccgtcatcgtccgccagcgcaagccgtggcgtcgcaaggacggtgtctacatgtacttcgaagataatgctggagtgattgtgaatcccaagggtgagatgaaaggttctgcaatcactggacctatcggcaaggagtgtgctgacctttggcctaggatcgctagtgcagcaaatgccatcgtttgagagcttgttggaatgtgtttagacttga

SEQ ID NO: 60473 - DNA, 264 bp, Zea mays
ccttgagattacccgcaagttcatgaacaaaccagtgagaattcttgtgaagagagacgagctgaccattgagggtatcaagcagttctatgtgaatgtggacaaggaagactggaagctggacacactgtgtgacctgtatgagaccctggccattacccagagtgtcatctttgtcaacactcgccgcaaggtggactggctcactgacaagatgaggagcagggaccacaccgtttctgccactcatggtgacatggacca

SEQ ID NO: 60474 - DNA, 273 bp, Zea mays
agaagcttcaatcaaccaatttctgttataatgaggtgcagaatgcgatatgaaagtgacgatgcttctgaaagaaggtgcactggtataataattggaagcagagaagctgatcctatatggtatggttcgaaatggaaatgcttggtggttagatgggatgatggtatagagtgccgttggcccaatagggtatctccttgggagattgagctcacaggatctgtttcaggatctcaaatgtgcgctcccagttcaaaacgtctgaaacca

SEQ ID NO: 60475 - DNA, 274 bp, Zea mays
gcgcagtgtgcttggacggcagcccaccggtgtaccatttctctcccggctccggttctggcgccaataactgggtcgtccacatggagggaggagggtggtgcaggaatcctgatgagtgtgcggtccgcaagggcaacttcaggggctcctccaaattcatgaagccactctcgttttcagggatattaggcggcaaccaaaaatccaatcctgatttctacaactggaatagagtaaagatcagatactgtgatggttcatcatttactgg

SEQ ID NO: 60476 - DNA, 273 bp, Zea mays
cattatggcttagagactatagtagcacagcggaggtaagatgtcggaaagttctggatatacaaaactttatgcagaaccctcagctgcaggagtttgaattccagaactttccgacttcttacctccgctgtgctgctcatcgtgttgcacaacattatggcttagagactatagtagcagatagtttagtagaaggctcagttagcaggattgttgcaagatgtacagcagaaagcaggtatcctgcaatttttttatcagaagttccta

SEQ ID NO: 60477 - DNA, 269 bp, Zea mays
gttctgcaataccagttccagcctccccagcaccaaggaataaataagtgtgctctgccaaggtcccaccaaccaccttgagtgccgctaacaaacctgcaaggaccactgatgctgtgccctggatgtcatcattgaaaacaagatggctcttgctatattttgcaagcaaattaaaagcattatgattcgcgaagtcctcaaactgaatgaggactttctcgccatagatttgcttaacagcagccatgaactcttccataagctca

SEQ ID NO: 60478 - DNA, 268 bp, Zea mays
tagatatcctgcagaatcagtggagtccgatatatgatgtagctgcgatactcacgtcaatccagtcattgttgtgcgatccaaacccgaattcgcccgctaactctgaagccgcccgcatgttcagcgagaacaagcgagagtacaaccgcaaagttcgggaggtcgtggagcagagctggacggcggactgatgatgcctgctgttgcgtcgcgctgtgctgcgcactgctcactgcgccccgcgtccgtccattccataccaaaa

SEQ ID NO: 60479 - DNA, 272 bp, Zea mays
attagatcttaaagttgtaccaatatttaatgaaaatgatgccatcagcaccagaaaggctccgtatgaggattcatcgggtatattttgggataatgacagtttagccggtcttttggctatagaacttaaagcagatcttcttgttctactcagtgacgtggatggcctctacagcggtccacctagtgaacctcaatcaaagatgatacatacatacatcaaagataaatatcataacgaaattacttttggggataagtcacgtgtag

SEQ ID NO: 60480 - DNA, 269 bp, Zea mays
gaggaaaatgtcgaacctatgaatgaggaatatggtgagcatatttcaggctatccaagagacaattccgactccagacccgtacagatgatgggtgatgggagcgacgataatgatgaggatgctgaaggagatgagggtgaggaagatggagaggactatgaagctgaagatcctggtgatgaggatgatgacgttgagatggatggggatgatgatgtcgaggtggatgaggatgatgacattgagatggatgaggatgatgacat

SEQ ID NO: 60481 - DNA, 275 bp, Zea mays
ggcactggcctcagttgaggacaagatactcagaaaaataagggacaaagaggcggaagtggagaccataaacaaaaggaactctgaactagaggaccagattaagcatttgggagtggaagttggtgcttggcagcatagggccaagtacaatgaaagcatgatcaatgcactcaagtacaacttggaacaggtttgtgctcaccagagcaaggatttcaaggaaggctgcggcgatagcgaggtagatgacacggcgtcctgtcgcgatggtg

SEQ ID NO: 60482 - DNA, 276 bp, Zea mays
gatgccctcagattctgttacctctggtgaacaatcagaccaaaatggtccgaaagcttgtttggtgcaatgtggtttatgccatggaacatctggtgcttttagaaagactgtgaagggtcaatgggttcatgctttctgtgctgagtggctgttggagacaacattcagaagagggcaacataatccagtcgacggaatggagaggcttcatcacaaggataaagatacatgctctatatgccaccgctgtgttggtgcatgcttgaagtgctg

SEQ ID NO: 60483 - DNA, 273 bp, Zea mays
agaaaactagaaaaggctcctcccgaccgcaacgcccctcatctccctcgaccccgacatccccgacccgatggcgcccaaggcggagaagaagccagcggagaagaagccggcggccgaggagaaggcggagaagacgaccgcagggaagaagcccaaggccgagaagcggctgcccgcgtccaagtcctccggcaaggagggcggcgagaagaaggggaagaagaaggccaagaagagcgtggagacctacaagatctacatcttcaaggt

SEQ ID NO: 60484 - DNA, 271 bp, Zea mays
aacgaatctgtactagtatgcgaacgcaagtaggatggatgctatctggacagagcaaagaaaaatggaagctcttaagctatattatagggtcctcgaatctatgtgtagggcagagtcacagatcttgagtgggaacaatcttacatcacttttgtctaatgaacgtttccatcggtgtatgattgcatgttctgcggagttagttcttgcaactcacaagactgtcactatgatgttcccagctgtgttggagaagactggcattaca

SEQ ID NO: 60485 - DNA, 272 bp, Zea mays
gactacggaggtgacaagtacgtgaacggcgagataatcccctgcacgtacccgacgtaccagccgaaggagcggaggacgtccaagtacgagagcaggcggtacgagaggcggagagacgggccaccggcggccagcaggaaaccgaggcagcaggcaccagctcagactcagaccgagtcggcgtcttcgtgacgagctctgcaggcattttgtccacgtacctacctacctagaagtagaacaagagaggaggaacgcctaaattctgt

SEQ ID NO: 60486 - DNA, 269 bp, Zea mays
gagacctcaaggaggtgcgcgaggaggtcgccaagtacaaggtgggggctcctgctcgtgttggtctggttgctccagttgatgttgttgtgccccctggcaacactgggctggatccgtcccagacctctttcttccaggtgcttaacatccccaccaagattaacaagggtaccgtggaaattatcacccctgtggagctgatcaagaagggtgaaaaggtgggctcgtccgagtctgccctgctcgccaagctgggtatccgcccc

SEQ ID NO: 60487 - DNA, 272 bp, Zea mays
ggtaggcaggaagaaagaataaggcgagccgagagccattcgcatggaggcggcgatggatctgatgcggcggatgccgcacggagcgcggagacggcgctcaacgcgctgctctccctcctccccgaccactccctcgacctcctctcccaggtcgacctcccgctccaggtttgcatggataaggagagcctgaaggaatacattctatgcgaatataaccgtgatgctgactcctaccgatctccttggtcaaacaaatatgacccccc

SEQ ID NO: 60488 - DNA, 268 bp, Zea mays
ggtaggcaggaagaaagaataaggcgagccgagagccattcgcatggaggcggcgatggatctgatgcggcggatgccccacggagcgcggagacggcgctcaacgcgctgctctccctcctccccgaccactccctcgacctcctctcccaggtcgacctcccgctccaggtttgcatggataaggagagcctgaaggaatacattctatgcgaatataaccgtgatgctgactcctaccgatctccttggtcaaacaaatatgacc

SEQ ID NO: 60489 - DNA, 269 bp, Zea mays
gcgaccacccgattcgaagcgtgcggagagaccgaagaagcgggagagatggctcgtaccaagcagactgctcgcaagtccacgggagggaaggctcccaggaagcagcttgccaccaaggctgcccgtaagtctgcccccaccactggtggagtgaagaagcctcaccgctaccgccctggaactgttgcactccgtgagatccgcaagtaccagaagagcactgagctgctgatcaggaagctgcccttccagaggctcgttaggga

SEQ ID NO: 60490 - DNA, 311 bp, Zea mays
cgataggtcggagcaggaagtcacgcggaattctggtcgagggctctcagcttactggactggctttaagtcaccagagcaaatatcacgtgttcgcaacactggagtgaagcctaaaatactgaaacgtgtaggtcaggcaattactacactgcctgaaaacttcaaaacacatagagcagtgaagaagatttttgagctgcgtgcagctatgatagagagtgctcaaggaattgattgggctgttgccgaagccctggcctttgcaacacttatagtggaaggcaatcatgttaggctaagtggacagg

SEQ ID NO: 60491 - DNA, 261 bp, Zea mays
atatggactggacttggacgggacgaacatcactgttgatacagctcagccacaaggacctggtagagaccgtaatggtgaccgtgattatgaccgcgagcgtggatctcgttatgaacgtggtcgtgactatggtggtgggcgtgcaccgcgaggtggtggtggtggtggtggtggtgactgcttcaagtgtgggaaacctggtcattttgctagagagtgcccatctggggatggtgggagaggggacagatatggtgg

SEQ ID NO: 60492 - DNA, 266 bp, Zea mays
acgctccgtcgtgcccaagatcagcaagatggaccggacgtcgatcctgggcgacacgatcgactacatgaaggagctgctggagaggatcaagctgctgcaggaagagatcgggcagcagcaggaggaggcgccaggcatgctcagcgtcttccgggagctcaaccccaacgagatggtggccaggaacacccccaagttcgacgtggagcggaaggagggcggcgacacccgggtggagatctactgcgccgccaagccggggc

SEQ ID NO: 60493 - DNA, 266 bp, Zea mays
gagacaccccaatgcagtgatgatatggaacagtgccatatctgcctaaccgaatatgaggacggagaccagataagaacccttccgtgcaagcacgagttccacctgcaatgcgttgacaagtggctgaaagaaatacacagggtgtgccctctgtgccgtggagacgtctgcgaagtcgcctcgtgaagaccttggcgctgccatccttccgttgcggcaccggtggatagggcacaccgccaggcgccagctgttccgtggtt

SEQ ID NO: 60494 - DNA, 280 bp, Zea mays
tcatcagatactctttctttggaacgaaggaggcatttggctttgcgccttcctggttattatggcttaggtacagcacctttatgttgttgtatcctactggcatctctagtgaagttggtctgatctacattgccttgccttacatgaaggcatcggagaaatactgtattaggatgcccaacaaatggaacttctcatacgattacttctattcatctgtccttgccctcctgatctatgttccaggaagcccacacatgtaccgttacatgctctc

SEQ ID NO: 60495 - DNA, 265 bp, Zea mays
agaacaaggctcaatgaggtaagtcacatggttaaggccatacttcattgagcagaacaaggctcagcttgttgtcatcgctcacgacgtggatccgatcgaacttgttgtgtggcttccagcactgtgcaggaagatggaggtcccttactgcattgttaaaggaaaggctcgccttggatcgattgttcacaagaagaatgcatcagtcttgtgtcttaccactgtcaagaacgaggataagcttgagttcagcaagattttg

SEQ ID NO: 60496 - DNA, 271 bp, Zea mays
gaaaagtgtacaaaggaaggcttgctgatggctcattggtagcagtgaaaagactaaaagaggagcgtacacctggtggtgagcttcagttccaaacagaggttgagatgattagcatggcggtgcacaagaaccttctccgacttcgtggtttctgcatgacacctactgaaaggttgttagtctacccatacatggctaacgggagtgtggcatcacgtttacgagagcggcagccatctgagccacctcttagctgggaaccaagaag

SEQ ID NO: 60497 - DNA, 264 bp, Zea mays
acagaatatgacatgatccagaactacaaggttcttcaggatgtgttcaacaagctgcggataggcaagaatattgaggtcaacaagcttgttaaaggacggccattggacaacttggagttccttcagtggttgaaaagatattgtgattctgtgaatggtggaattatgaacgaaaattacaaccctgtagaaaggaggtcaaagggatgcaaagaacgtgtctcaaagggttccaataagccatctaaatcattgcaagcc

SEQ ID NO: 60498 - DNA, 264 bp, Zea mays
ggccttgagccctctgagttcgaggactctgtcgcccaggctttcttcgacctggagaacggtaaccaggagctcaagagcgacctcaaggacctttacatcaacggtgctatccagctggatgttgccgggagcaggaaggctgttgtgatccacgtcccataccgcttgcgcaaggccttcaggaagatccatgtcaggatcgtcagggagctggagaagaaattcagcggcaaggatgtggtaattgttgccacaaggagg

SEQ ID NO: 60499 - DNA, 268 bp, Zea mays
tcccgtccgacgtcctccaccaaaccctccctgaatccgaggccgcggctctcatagcagcagcagccgccgattcggccgcatccgatccttccccgtcaatgcacaagtctcttgacgagggaatcgccaaagctgcggacctgctccggtgtgcggacggcctctggttgtgattgggaagggtgcggcgtatgcgcgcgcggaggaagcgattcggaagctggtggacaccacgggcatccccttcctcccgacgccgatgggg

SEQ ID NO: 60500 - DNA, 268 bp, Zea mays
ggctctcagcttactggactggctttaagtcaccagagcaaatatcacgtgttcgcaacactggagtgaagcctaaaatactgaaacgtgtaggtcaggcaattactacactgcctgaaaacttcaaaccacatagagcagtgaagaagatttttgagctgcgtgcagctatgatagagagtgctcaaggaattgattgggctgttgccgaagccctggcctttgcaacacttatagtggaaggcaatcatgttaggctaagtggaca

SEQ ID NO: 60501 - DNA, 274 bp, Zea mays
cttttccttcagccatgggtaaggagaagactcacatcaacattgtggtcattggccatgtcgactctggcaagtcgaccaccactggccacctgatctacaagcttggaggtattgacaagcgagtgattgagaggttcgagaaagaggctgccgagatgaacaagcggtcattcaagtatgcgtgggtgcttgacaagctcaaggctgagcgtgagagaggtattacaattgatattgccctgtggaagttcgagaccaccaagtactactg

SEQ ID NO: 60502 - DNA, 283 bp, Zea mays
gtatggacattcccacagggcaccggaacttcagggggaagctgtgtatggtttgaccgaacttaaacgagatgacataagaaatgcacgcctggtagcaaatccagggtgttatcccacatctattcaacttccgctcgttcctttggtaaaggcaaaactgatcaagctaaccaacattattattgatgcaaaactggagtcagtggtgcaggacgtggggcttttcgtcgcaaatctttacactgaaatcgctgagggtatccatgcttatgggataaca

SEQ ID NO: 60503 - DNA, 281 bp, Zea mays
cctagcaatctctagcagcagatcctcgtgcgaagaaagcgctagccccttcgtactgtcccgatggcccgcacgaagcagacggcgaggaagtccactggcggcaaggcgccaaggaagcagctggccacgaaggcggcgcgcaagtctgccccggcgaccggcggagtgaagaagccccaccgtttccgcccggcaccgtcgcgctccgggagctccgcaagtatcagaagagcacggagctgctgatccgcaagctgccgttccagcgcctggttcgt

SEQ ID NO: 60504 - DNA, 277 bp, Zea mays
aatgcgcccaagcattggatgctcgacaagcttggcggagttttgctcccaagccatcttctggacctcacaagtccagggagtgccttcctctgatcctcatcatcaggaacaggctcaagtatgctctgaactaccgtgaggtcatttctatcctgatgcaacgccatgtacttgttgatggcaaggtcagactgacaagacctaccctgctgggttcatggatgtcatttccatccctaagacaatggagaactacaggctgctttatgacacc

SEQ ID NO: 60505 - DNA, 274 bp, Zea mays
caagaatgtgttccatgcgctctactgcataatggagaaggaaggggttggcggcctctacaaggggctcggaccgagctgtctcaagttgatgcctgcagcaggcatctcgttcatgtgctacgaggcctgtaagaagatcctggtcgaagacaatgaggatagtgagtgaagctgaagcatgtatgcccctaggaggggtatgactgatgtgccaggctagaagaggtttgggttgggttggggagtataccctagtattatcaactgatga

SEQ ID NO: 60506 - DNA, 279 bp, Zea mays
cttatcatccccatccgcacctctctccatctccctgctcctccgcctccttcttgatccacccaagccagggctcgccatgttggattcggaggagcaccacttcgaatcgaaggccgacgccggagcgtccaagacctacccgcagcaggctggcaccgtccgtaagaacggactcatcagtctttagaacccccctgcacagttgtggaggtttctacctcaaagactggtaagcatggccatgccaaatgccactttgttgccatagacatattc

SEQ ID NO: 60507 - DNA, 280 bp, Zea mays
aataccaaggtgtatggaagcatgccaagagtgatgggcatgaggactatggcctccttgttagtgacaaggcaaggaaatacgccataatcaaggagcttgatgagccagttaccttaaatgatgggacagtggtcctgcagtttgaagtgagacttcagaatggccttgaatgtggaggtgcctacattaagacatccgccctcaggatgctggatgggatgccaaggagtttgataatgagactccatacactattatgtttggtccagataaatgt

SEQ ID NO: 60508 - DNA, 283 bp, Zea mays
gtcatctgctccaagtgcaagggcaagggctcgaagtctggtgcttcaatgaggtgccctgggtgccagggctcaggtatgaaagtcaccattcgtcagctggggccttccatgatacagcagatgcagcagccttgcaacgagtgcaaggggactggggagagcatcaacgagaaggaccgctgcccagggtgaagggtgagaaggtcgttcaggagaagaaggttcttgaggttcatgttgagaagggaatgcaacacagccagaagatcaccttccctgg

SEQ ID NO: 60509 - DNA, 281 bp, Zea mays
ccagccaccgccgctagaagaagagctcggcgattcccaggtcccgcgagaatatgccgaagcagatccatgagattaaggacttcctcctcaccgcgaggaggaaggatgcccgctcagtgaagatcaagaggagtaaggatgttgtcaagttcaaggtgcgctgctccaagtacttgtacacgctctgcgtcttcgatgctgagaaggcaaacaagttgaagcaatctcttcccccaggtttgaccgtcgaggaggtctgattggatacatggcaacgc

SEQ ID NO: 60510 - DNA, 273 bp, Zea mays
gaaatggtcagtgccatgcgtgatgataggagcttgggttgttctgaacttagcagatggctaacaatggcacaaataatggcctccagctttggcgagaagagtctttctttggagcactggcagatggtgaaggagcttgagaggcttagaaagcagaggatgcaatgagaatgactcatcattagctgtgtttttgcactctaattgtttatgttggtatgctgttatgtgtatagtactagacgtttgaatcaagacatggatctaagg

SEQ ID NO: 60511 - DNA, 276 bp, Zea mays
gttggagcaggtctgggtctggccgtgtgagttatttcccagccaggcatctgagagctttggtcttgacctcgacagagatcgccatggacgcatcggcggaggtggaccacctcgccgccgagaggtcggccgcgcgcttcgatgtcgaggcgatgaaggttgcatgggctggctcgcgacacgccgtgaagtcggcgaccgcatggcccgactcgtcgcgtccgaccctgtcttccgcaaggataacaggaccatgctctccaggaaggactt

SEQ ID NO: 60512 - DNA, 277 bp, Zea mays
agctgatcctcaccggcgtcgccatcgtaatcgccttggacagcggcaccagaacctctgcctccgcaggtgcttgctggtatcattacaatctggtagttttagtggttgggcttgacttcctactattcagaaacacagtaccgagaagtctttaggtggggtcaaagatggtgtcgctgaagttgcaaagcgccttgccgcgagctacctcaagtgtgggaaaggcaaggtgtggcttgacccaaatgaagttagtgagatctccatggcaaac

SEQ ID NO: 60513 - DNA, 271 bp, Zea mays
ggatttttggaaacatgcaaaatctctatgaaactgttaagaaggcccaaatggttgtccaagttgaggctgtccgggtgcagaaggagcttgcagcgttacactttctggaaaccagcaacctattagagttgaaatcacagaagctgcaatggagttgggtgctgaaaaactttcggagctggtcaatgatgcttacaaggatgcgcatcaacggagcgtccaggccatgaaagagaggatgtctgacttggcacagagcttaggaatg

SEQ ID NO: 60514 - DNA, 276 bp, Zea mays
agttcgagaccaccaagtactactgcactgtcattgatgcccctggacaccgtgacttcatcaagaatatgattactggcacttcccaagctgactgcgctgttcttatcattgactccactactggtggttttgaggctggtatctccaaggatggacagacccgcgagcatgctctccttgctttcaccttggagtgaagcagatgatttgctgttgcaacaagatggatgccaccacacccaagtactccaaggcccgttatgatgagattgt

SEQ ID NO: 60515 - DNA, 267 bp, Zea mays
cccccaaatccacccgtcggcacctccgcttcaagatgcagatctttgtgaaaaccctgactggcaagactatcaccctcgaggtggagtcgtctgacaccattgacaacgttaaggccaagatccaggacaaggagggcatccccccagaccagcagcggctcatctttgctggcaaacagcttgaggcgggcgcacgcttgctgactacaacatccagaaggagagcaccctaccaccttgtgctccgtctcaggggaggcatgc

SEQ ID NO: 60516 - DNA, 272 bp, Zea mays
agcacatcaaaccctagctccgcccagcccccaaccatgtcggcgatgatgcaaccgcagatcatcctgctcaaggagggcacggacacgtcgcaggggcgcgctcaggtggtgagcaatatcaacgcgtgcacggcggtgggcgacaccgtgcggaccacgctggggcctcgggggatggacaagctcaccacgacgacaagggcggagtcaccatctccaacgacggcgccaccatcatgcgcctcctcgacatcgtgcaccccgccgcc

SEQ ID NO: 60517 - DNA, 276 bp, Zea mays
ctcgagcggtctttttcaagactaatgctgatgggaacacaacatgtgccaaggaaatgacaaagctctctggcatctctgaaatacttccccgagatggagatctgcgattttgacttcgaaccctgtggctactccatgaatgcgatccatggctctgcattctccacaatccatgtgacgcccgaggacggtttcagctacgccagttacgaggttatgggcttacatgccatgctctgtcttatggtgaccttgtcaagagggtactccggt

SEQ ID NO: 60518 - DNA, 279 bp, Zea mays
ggagtcggagggaaccgaaaactcagggtctcgaatttcctaggagcggaggcgatggctgggaagggaggaaaaggattgctcgccgcgaagacgacggcggccaagtcggcggagaaggacaaggggaagaaggcccccatctcacggtcctcccgcgcgggcctccagtttcctgttggacgaatccacgtcagctgaagcaaaggactcaggcaaatggccgcgttggtgccactgcagccgtctactctgccgccatcctggagtacttgactg

SEQ ID NO: 60519 - DNA, 270 bp, Zea mays
ctcgagcgaattcggctcgaggagttctcttttcaggaaacagggttggaccagtatgctgttgcgaaatttgctgcaagcattgaaatggttccaagaaccctggcagaaaatgccggacttagcgcaatggatgtaatatcctctctttatgctgagcatgctagtggcaatgtgaaagttggcatgacctggaggaaggtgcctgcaaggacatcacgaccttgaaaatatgggacctttatgtcacaaagttctttgccctaaaat

SEQ ID NO: 60520 - DNA, 273 bp, Zea mays
caaagggtcagcagttactaactgaatgggcacgcccattcttggaggagtatgcaattgacgagctcatagacccacgactcggagagcgctactctgaaaatgaggtgtactgcatgctgcacgcggcaaacttgtgcataagacgcgacccacattcaaggcctcgcatgtcccatgttcttcgattcttgagggtgacatggtcgtggaatctggtggttctgttactggcagtagtgattctgggagcagaagctggaggatgctgaa

SEQ ID NO: 60521 - DNA, 269 bp, Zea mays
aagccccagactgaccgctgggtgttccccgagaccaacactggcatcattgtccttgctgagggtcgcctgatgaaccttgggtgtgctactggccatcctagctttgtcatgtcctgctcattcactaaccaggtcattgcccaacttgaactgtggaaggagaagagctctggcaagtatgaaagaaggtgtatgtgctccccaagcaccttgatgagaaggttgctgctctccacttgggcaagcttggtgccaagctgaccaag

SEQ ID NO: 60522 - DNA, 270 bp, Zea mays
agcgcctcgagatcacgttctctgacgcgcctgtctttgaggacccttgtggtcgtggcctgcgcgccctctcccgtgagcagatcgactcgtttctggatctcgcacggtgcaccatagtgtcacagctctccaacgagagcttcgactcatatgttctgtccgagtccagcctctttgtgtatcccacaaggttgttctgaagacctgtgggacgacgaagctgctgctcgccattcctcgcatccttgagcttgctgcagggctgtc

SEQ ID NO: 60523 - DNA, 271 bp, Zea mays
tgtgtcctcacaactgtggttgatgacttcttcgatgttggtggatcaaaagaagaattagaaaacctgatagcactagttgagaagtatgtctactcttttatgaagtaacactgatcacttatgcatggctaattaatctcctgtttctggctgatggttttcatagatggcatgcgcaccatgcattgagttctattcggaacaggtgaaaatagtattttctgctatttatacaacagtgaaccatctggagcatggcttctgcagc

SEQ ID NO: 60524 - DNA, 270 bp, Zea mays
gccggcaagcagctggaggatggccgcaccctggcggattacaacatccagaaggagagcactctccacctggtgctccgcctcaggggtggcatgcagatttttgtgaagacattgactggcaagaccatcaccttggaggtggagagctctgacaccattgacaatgtgaaggccaagatccagacaaggagggcattcccccagaccagcagcgtctgatctttgcgggcaagcagctggaggatggccgcactctcgcggactaca

SEQ ID NO: 60525 - DNA, 271 bp, Zea mays
aattccaggaatcagatgagaactcaggatacagggcacctgaggtgatcttggctggtcagtactccctgaagagcgacgtgtacagcttcggagtcgtcatgctagagcttctgactggccggaaaccgtttgacaggacccgaccgcggcctgagcagtcactggtccgatgggctactccgagctgcacgacatcgaccccgcgctgcaagggctgtacccgtccaaatccctctcccgcttcgccgatgccatcgccctttgtgtt

SEQ ID NO: 60526 - DNA, 272 bp, Zea mays
gctctgggcgaagtatgcctcgcgagatgccttcccggggcgggcagcgggtgcgaagtcccgccttcgcgttggatttgcatggtcaggatcctgccgcattcgtgcgcgaacaatagacggtgcagcgaggatcgtggggcgctatgtgccgaagacagagggtctgaggagctgggatatccgggggccaacgatagattgaatcgggtcttcgaattgaactgcttgccatacagtggttatcccggggaagacgccgccgacagcca

SEQ ID NO: 60527 - DNA, 273 bp, Zea mays
tgctgatctggccccaacccaccccatcaggctcgggcttgctctcaacttctcagtgttctactacgagatcctcaactcccctgaccgtgcttgcaaccttgcaaagcaggcctttgatgaggcaatctccgaactagacagcctgggagaggagtcctacaaggacagcactctgatcatgcagtcctgcgtgacaacttgaccctatggacttccgacaccaacgaggacgccggagatgagatcaaggaagcagctgctgcccccaaa

SEQ ID NO: 60528 - DNA, 268 bp, Zea mays
caaggggcacaccccagatcgaggtgaccttcgaggtggacgccaacggtatcttgaacgtgaaggcggaggacaagggcacgggcaagtcggagaagatcacgatcacgaacgagaaggggcggctgagccaggaggagatcgaccgcatggtgcgggaggcggaggagttcgcggaggaggacagaaggtgaaggagcggatcgacgcccgcaaccagctggagacgtacgtgtacaacatgaagaacacggtgggcgacaaggac

SEQ ID NO: 60529 - DNA, 270 bp, Zea mays
ttcgttacaaggatcttcttgatgatgtttactctgatatatcaaatttgctgaaatcaagcgggaatgtttgctcaattatatattgccttgaacgggcagcttgtgatgatctaagcatgcatttgtcacagcagggtgtctcttgtgctgcttatcatgctggcctaaatagtaaagtgcgaattctgttctcgatgactggctttcatcgagaactcaagttgttgttgcaactgtagcatttgggatgggtattgatagacaaga

SEQ ID NO: 60530 - DNA, 271 bp, Zea mays
cgaggaaaagcaagtaggcaatgaaagattcaacatatttagtggctgcccttctggccagacagcgactattgttctccgtggtggtgcagaccagttcattgaggaagctgaacgaagtctccatgatgccatcatgattgtgaggagagcacttaagaactcgacagttgtgccgggtggtgggctattgatatggaaataagcaagtatctcaggcagcatgcacgaacaattgctgggaagtctcagttctttgtaaattcatttg

SEQ ID NO: 60531 - DNA, 266 bp, Zea mays
cagagacttatgcttggtgagaacctgtatcctcttgttgaacagctggaacgtgagcaggctgccaaggtcactggcatgcttttggagatggatcagacggaggttcttcacctgctggagtcgccagatgctctgaaagccaaggttgctgaagccatggaggtcctccgctctgcccagatctccagcagagcaatgtttctactgagcagcagctggctaatctatcattgaatgatggcgtcgtctccagctgaacgtta

SEQ ID NO: 60532 - DNA, 251 bp, Zea mays
cgattcgttttgcttccttgtttgaccaggttctggagctcgccggtaatgctgccagggacaacaagaagactcgcattattccgcgccacgtgcttctggcgatccggaacgacgaggagcttgggaagctgttgggcggcgtgactatcgctcacggcggtgtgctccccaatatcaacccgttctgctgcccaagaagacggcggagaaggcgtccagtggcgggagcaaggaggcaaagtcgccca

SEQ ID NO: 60533 - DNA, 190 bp, Zea mays
agtctgttattgctcatgtggaccatggcaagtctacacttacagattcccttgtggcagctgctgggattattgcccaggaagttgctggtgatgttcgcatgactgatactcgacagatgaagccgagcgtggcatcacaatcacatctactggtatctctctttattatgagatgactgatgagtca

SEQ ID NO: 60534 - DNA, 267 bp, Zea mays
caaccctgacaagatccactttgttcccatctctggttacgaaggtgacaacatgattgacaggtccaccaaccttgactggtacaagggcccaaccctacttgtcgctttggcttgatcaatgagccgaagaggccttcagacaagcccctgcgtctccccctacaggatgtgtacaagattggtggtattggaactgttcctgttgggcgtgttgagactggtcatcatcaagcctggtatggttgttacctttggtcctagtgg

SEQ ID NO: 60535 - DNA, 272 bp, Zea mays
cggctcgaggactagttctagatcgcgtgccctcgccgcagccatcttccatggcggaccagctcacggacgagcagatcgcggagttcaaggaggccttcagcctcttcgatcggatggcgacggctgcatcactaccaaggagcttggaactgtgatgcgctcccttggccagaaccccactgaagcagagctgcaggacatgatcaacgaggttgatgctgatggcaatgggaccattgacttcccagagttcctgaacctgatggcaa

SEQ ID NO: 60536 - DNA, 141 bp, Zea mays
caagaatgtgttccatgcgctctactgcattatggagcaggaaggggttggcggcctgtacaacgggctcggaccgagctgactcaagttgatgcctgcagcaggcatctcgtcatgtgctacgaggcctgtaagaagatc

SEQ ID NO: 60537 - DNA, 265 bp, Zea mays
tggctcgagcgcaaccatgtcgaggaggaagaccagggagcccaaggaggagaacgtcacacttggacccactgtccgtgaaggagagtatgtctttggtgtcgctcacatcttgcatccttcaatgacaccttcattcatatcactgatttgtctgggagggaaactctggttcggatcaccggtggcatgaaggtgaaggctgaccgtgacgagtcgtcaccttacgctgctatgcttgctgctcaagacgtcgcacaggctg

SEQ ID NO: 60538 - DNA, 269 bp, Zea mays
ttcaaaaaagaagaaaaagacaaagggcaaaaaggggaagaagtataagaaaggaagccacagaagttctgtgcttggtactgcatggaacaaggaagttaggaatgttctagcagtgcaagtgcagacacaactgttaaaatctgggatatagctgttggtaaatgtgcagtcactctagaacaccatgatgacaaggttcaagcagttgcttggagcccacagtcacctgaagttctgcttagcggatcctttgataaaacagttgc

SEQ ID NO: 60539 - DNA, 190 bp, Zea mays
gaatcctcttgtgtcctggccgtcggcgtcgctgcgtcgttccagatttggggaaggaaatccggcaccgagattcgagtcgaaaaggacatcatttgctagatggcgcgtacaagcagaccgctcgcaagtccactggaggaaaagctcctaggaagcaactcgctacaaaggcagcccgtaagtctgc

SEQ ID NO: 60540 - DNA, 268 bp, Zea mays
atccggcaatgatggatgtgagcccatttaataaaggcagagaaagcactatttggggtgtttcactcatgtttggttatcttggttttgatgggttcacaagcacgttccagataaactcttcaaagggtatgacatggaaatacacaaccaaatattctacacgacagtgtgctcttgtcttcttagtttaagtgggctgattctccagaatcatctgattccagctgtggattttatgtttcatcacccagattgcttctctgat

SEQ ID NO: 60541 - DNA, 239 bp, Zea mays
cgtttagaacctctaaaatttcccccactcgccagtcgcagcagcacctgtagcagccatggacgccagcggagcggtagcaaggggaagaagggggcggccaagcgcaagcaggcggccccaggaagaagtcggtgacgcggtccgtcaaggccgggctgcagttccccgtcggccggatcgggcgctacctcaagaagggccggtacgcgcagccgtgaggcactggcgcccccgtc

SEQ ID NO: 60542 - DNA, 248 bp, Zea mays
caaagacttagaacagttgatgaacagcaggaacacttatctagccaagcaagaagagtgcacgaagaagatccgagatttgggcttgttgcctgctgatgcttttgaagcgacaagaggaaaaacaagaaacagctacataagatactctatgactgtaatgagcagttgaagcagtttagtcatgtgaaccaaaaggctcttgaccaatatgtgaacttcacagaacaacgcgaacaactgcagag

SEQ ID NO: 60543 - DNA, 266 bp, Zea mays
gtggtactaccggtggcgtctgaggcagccgccacacatggacacccgcctctcccacgcggagactgcccaccccgacgagctggacgaggagtttgacaccttccccactcccgcccgccagacgtcgtgcggatgcggtacgacaggctgcgcacgtcgcggggaggatccagaccgtggtcggcgaccttgcgacgcagggcgagcggttgcagtcgctgctgagctggagggacccgagggccaccgcctgttcgttgtct

SEQ ID NO: 60544 - DNA, 272 bp, Zea mays
aattcggctcgagccggaggaagtgagggacttcttcggggacgacgagttccgtgtgtccaacaagtgggacgacatgcttgtttaccataagacgctggaggagtgccagacaccgggacgatgaaagtgcattgggtccggaagttccccttcttctgcagtgacagagagtacataattgctcgccggatatggaaactggggggcgcctattattgtgtcacaaagggtataccatgctcgtccattccacggcgcaacaaacctcg

SEQ ID NO: 60545 - DNA, 270 bp, Zea mays
  unsure (1)..(270): unsure at all n locations
tcgagttctnctcaaccaaattcaaggtcacagcggcgaacctctcggctatcatgtctggcagcggcaagggcgggaaaggtctgggcaagggcggcgccaagcgccacccaaggtgctgcgcgacaacatccagggcatcaccaagccggcgattcgcaggttggcgaggaggggcggcgtcaagcgcatctccgggctcatctacgaggagacccgcggcgtgctcaagatcttcctcgagaacgtcatccgcgacgccgtcaccta

SEQ ID NO: 60546 - DNA, 269 bp, Zea mays
ttcagccgccgccgcgcgtacaagcaggagcagcaaggatgccggctggccacgggctgcgctcgcggacgcgcgacctgttcgcgcgccccttccgcaagaagggctactcccgctcaccacctacctccgcacctacaagatcggcgactacgtcgacgtcaaggtgaacggcgccgtccacaaggggatgccgcacaagttttaccacggccgcaccggtcgcgtctggaccgtcaccaagcgcgccatcggcgtcgagataaaca

SEQ ID NO: 60547 - DNA, 248 bp, Zea mays
attctaggtgttttggatttgtcaattttgaaaatgcagatgctgctgctcaggctgttcaagagttgaatggcaagatattcaatgataaggtactgtatgttggaaggcacaaaagaagtctgaaagagagatggagttgaaggagaaatttgaacagaatattcaagaggtagctgagcaagttccaaaacactaacttgtatctgaagaacttagatgataacattgatgatgacagttgcgtg

SEQ ID NO: 60548 - DNA, 194 bp, Zea mays
  unsure (1)..(194): unsure at all n locations
ggctcgaggtccatctcctccgtcaccaagatcggactatggggacgacagggagggtcggcacagganctcacggcagagcagccaccacggcgttgcacagcatcaccgtccgcgctggcgttgccgtcgactccatcgagttcacctacaccgacgacgctgggcagaggcgcactgctgggcggtggggt

SEQ ID NO: 60549 - DNA, 265 bp, Zea mays
caccggtgggcctgagatccccttccaccccggcagggtggacaagcctcagccgccacctgagggccgtcttcctgatgccaccaagggttctgaccacctgaggcaagctttggcaagcagatgggttagagtgatcaggacattgttgccctctctggtggccacaccttgggaaggtgccacaaagagcggtctggttttgagggggcctggactacgaaccctttggtctttgacaactcttacttcaaggacttctgag

SEQ ID NO: 60550 - DNA, 255 bp, Zea mays
gttcctcaaccgacacttgtcctcaatcatgttccgcaacagggattgcttggacgccctgctggatttcctccgtggccaccggcacaaggggcatgttatgatgcttatgatagaatacaaagcttggggaggcttcagtctgtgctgaccaaagctgaggagcacttgtcaaagctccctgctgacacaccatactcacaatttgcttataaatttcaagagtggggcctggagaaaggtggggtgatacag

SEQ ID NO: 60551 - DNA, 214 bp, Zea mays
cattgatatttcatgaaggcaaggcccctaagggcgacagaactgattgggtgatgtatgagtacagaatggaagatgaggatttggtttctgctggtttctcaaaggatgttatgtactctgcaaaattttcaagaaaagtggccttggtccaagaatcggagagcaatatggggctccatttaatgaagacgaatgggataatgcagagtcg

SEQ ID NO: 60552 - DNA, 270 bp, Zea mays
ctcgagccgctcgcccgcatctgcgacggcatcctcgcgctcctcgactcccacctcgtcccatccgccggcgggccgagtccaaggtcttctacctcaagatgaagggtactaccacaggtaccttgctgagttcaagtcaggtgcagagaggaaggatgctgcggagagcaccatgaatgcctacaaagctgctcaggatattggtcttgctgatctggctccaacccaccccatcaggctcgggcttgctctcaacttctcagtgtt

SEQ ID NO: 60553 - DNA, 266 bp, Zea mays
gaggaatgtgattggagatagaggattaggagttgttgcggatacgtgcaagaagctccaaaggctcagaatagagcgaggagatgatgaaggaggtgtgcaagaagacagggaggggtctctcaagtgggcttgacggctatagccgtaggttgccgtgagctggaatatatagctgcctatgtgtctgatataaccaatggggccttggaatctatcgggacattctgcaaaaaactatacgacttccggcttgttctacttga

SEQ ID NO: 60554 - DNA, 266 bp, Zea mays
agtccctaacagccgttttttcccagtttgggaaaattcttgatgtgcttgctttcaagactttgaagcataaaggtcaagcttgggttgtcttcgaagatgtcgcatagctactgaggctctgaagaggatgcagggctttcccttctatgacaaaactatgagaattcaatatgccaagaccaaatcagatattatagcaaaggctgatggcacctttgtacctcgagaaagaagaaagaggactgatgaaaaatctgaaaaga

SEQ ID NO: 60555 - DNA, 160 bp, Zea mays
gaaatggtcagtgccatgcgtgatgataggagcttgggttgttctgaacttagcagatggctaacaatggcacaaataatggcctccagctttggcgagaagagtcttctttggagcactggcagatggtgaaggagcttgagaggcttagaaagcagag

SEQ ID NO: 60556 - DNA, 264 bp, Zea mays
agaagttctaaggaactggccacataggaacattcaagttatctgtgttactgatggtgagcgaatcttgggacttggagatttgggttctcagggaatgggaattcgtaggcaaacttgctctatacactgctcttggaggagttcgtccatcagcttgtttgcctatcacaatcgatgttggcacaaataatgagaaactgcttaatgatgagttttacattggactccggcaaaaacgtgcaactggcgaggagtatcatg

SEQ ID NO: 60557 - DNA, 137 bp, Zea mays
gaggcaaacggtggctgtcggagtcatcaacagtgtggagaataaggatccaactggagctcaacgtgaccaaagctgccgcaaagaagagatgatgtgtctggctcgtctgtgtctgcttgagggatacctagtgg

SEQ ID NO: 60558 - DNA, 259 bp, Zea mays
catatgtacttccaactggcgatgcaaagaaacacttgaagagtatctgactaagaggaacatcatgggaatatatgacgtggatacacgtgctataacacgaagataagagaagacggcagtcttattggtgtcttgagtactgatcagtctcagacagacaatgagttgttggaaatggccaaaaagtggaaaattgttggagttgatttgattagtggtgtcacatgtgatgctccatatgaatggttggacaaga

SEQ ID NO: 60559 - DNA, 237 bp, Zea mays
tccgaggcttctagccagggcctacttgtggaatcatacaaggagatctacgacgacgtgctgcaagacgctctgcgttgcagaagctgggagtgcagcatgttcacggtggggatctacggagcgaactgtcctcagtggatagtggcaatgcaggcttgcaatggttatagtctagtctgtgtcccactgtacgatactttaggtgcgggactgtcgactacatcatcgatcatg

SEQ ID NO: 60560 - DNA, 265 bp, Zea mays
cccgactgggtgaaggatcttgatgctgttggcgagaatggagaggagattgagaatccacttactctgttgaatgatccatcctctgttgagccactggggaactggggaagaaggtcctactgtggtggcttcgtgttgaagcacgggcggatagcaagtttcctcaagggtgggtaattgagccacctttggaagtcgtcgtccccgcaaagcgcactccatggcctgaaaccaccaccgagcttccatccgagttgttgga

SEQ ID NO: 60561 - DNA, 264 bp, Zea mays
tcttcctcgagttctcctcaaccaaattcaaggtcacagcggcgaacctctcggctatcatgtctggccgcggcaagggcgggaagggtctgggcaagggcggcgaagcgccaccgcaaggtgctgcgcgacaacatccagggcatcaccaagccggcgattcgcaggttggcgaggaggggcggcgtcaagcgcatctccgggctcatctacgaggagacccgcggcgtgctcaagatcttcctcgagaacgtcatccgcgac

SEQ ID NO: 60562 - DNA, 262 bp, Zea mays
caggtccttctagtgctttttcccccacgttggaccacatgagaggggtctggcattttcgtccatacagtgcttcgaatggcgacatcttgatgctggcctgaagctattgttgtatgagaactctgcgtagggtagactggactcccaacttctatcaaaagctaacacacatgctcttaacagatcttcaaagactttgttgactctctctgtctgcccatctgtctgagggtggtaagcggtactgaaatctagcttg

SEQ ID NO: 60563 - DNA, 247 bp, Zea mays
ggtgacgacagtgccgagcctgctaatcctgttgccagtgaaattattgtaacccagcttgcaagcatgggcttcaactaccttcattgtcagaaagctgctattacacatcaaacacaggagttgaggaagcgatgaattggctcctctcgcacatggatgatccagatataaatgacccaatatcaaaagattcacgtgcttatgagccatctgttgacgaagcaagtgttcaaactctcatctc

SEQ ID NO: 60564 - DNA, 104 bp, Zea mays
aggtggtccaggatagcacgccgcttgccagggcgcactgacaatgagatcaagaactactggaggacacacatgagaaagaaggcacaagagaggaagaggaa

SEQ ID NO: 60565 - DNA, 274 bp, Zea mays
aattccaggaatcagatgagaactcaggatacagggcacctgaggtgatcttggctggtcagtactccctgaagagcgacgtgtacagcttcggagtcgtcatgctagagcttctgactggccggaaaccgtttgacaggacccgaccgcggcctgagcagtcactggtccgatgggctactccgcagctgcacgacatcgaccccgcgctgcaagggctgtacccgtccaaatccctctcccgcttcgccgatgccatcgccctttgtgttca

SEQ ID NO: 60566 - DNA, 289 bp, Zea mays
cttggattggtctcccaatgctgtctgactaaacatgttttcaaggtgaacaagcagcagtatcttgcaaatcgttgccctgaaaataaatgtgaaggttgggggaaggaatactgtgcttgttgatgctttggcaaggagaatcccccttgtcagtgacatagcgactattatctttggtgctgatgtgacccatccccatcctggggaagattctagtccttccattgcagctgtggttgcttctcaagactggcctgaggttacaaagtatgcaggattggtgagt

SEQ ID NO: 60567 - DNA, 265 bp, Zea mays
catgatggccttgttaagggtcttcgtgaggctgccaaagcaattgagaagcatgctgctcagctttgcgtgcttgcggaggactgtgaccagcctgattatgtcaagctggtgaaggctctttgctctgagcacaacgttcacctggttactgtgcctagcgctaaaactcttggcgaatggtctgggctttgcaagattgattctgagggcaaggcgaggaaggttgtgggttgctcctgtgttgtcgtcaaggactatggcg

SEQ ID NO: 60568 - DNA, 284 bp, Zea mays
caacctgatggcacgcaagatgaaggacacagactctgaggaggagctcaaggaggccttccgcgtgttcgacaaggaccagaacggcttcatctctgctgctgaacttcgacatgtcatgaccaacctaggtgagaaactgacggacgaggaggtggatgagatgatccgtgaagccgacgtggacggtgatggccagatcaactacgaggagttcgtgaaggtgatgatggccaagtgagatgatgtgcctgttttgaagctagttcctctcttgatggtag

SEQ ID NO: 60569 - DNA, 278 bp, Zea mays
aatttcgaacaagtacttaaaggatccagttataattgaccttgttggtgactcagatcagaaattacctgaaggaatctctctctattccattgcatctgataacttcgggaagccttcaattattggtcctttgattaaagagcatgccaatggtggaaaatgcattgtgtttactcaaactaaacgggaagcagatagattggcatatgtcatgggaaggagttatcagtgtcaggcactgcatggggatatttcacagaatcaaagagagagga

SEQ ID NO: 60570 - DNA, 286 bp, Zea mays
catgatggccttgttaagggtcttcgtgaggctgccaaagcaattgagaagcatgctgctcagctttgcgtgcttgcggaggactgtgaccagcctgattatgtcaagctggtgaaggctctttgctctgagcacaacgttcacctggttactgtgcctagcgctaaaactcttggcgaatggtctgggctttgcaagattgattctgagggcaaggcgaggaaggttgtgggttgctcctgtgttgtcgtcaaggactatggcgaagaatctgagggccttaaca

SEQ ID NO: 60571 - DNA, 286 bp, Zea mays
gagcgcaacaccatccacccaccagttcgaagcggaggcgaccggcaacctgcggcggagatgtcaggcaggggcaagggcggcaaggggctcgggaagggcggcgcgaagctcaccggaaggtgctgcgcgacaacatccaggggatcacgaagccggcgatccggaggctggcgaggaggggtggcgtgaagcgcatctccgggctgatctacgaggagacccgcggcgtgctcaagatctttctcgagaatgtcatccgcgacgctgtgacctacacggagca

SEQ ID NO: 60572 - DNA, 275 bp, Zea mays
gaatggtgtacagatggaaaactggatgggagccttggagttgctgacgtggtgcccattgtgctgtgccccaaagataactgttttcctgggctatactgctttggcttgcttagggatccatggcttactgatggacaaactatgattatatcttctgtctggggaagtagggaagtaatactttctgtaaatgttgtgagctgtgaactttcaagagtgagtccccaggactcagattattcatggaatgttcttgcagttgataagaacaa

SEQ ID NO: 60573 - DNA, 284 bp, Zea mays
aatgaattgacaccacatttgttgaacaagttggctcctactgattctcgtttgagaccagaccaaaggcatctggaaaatggtgaatatgagatggcaaattcagagaaacttaggcttgaacaactgcaacggcaggcacgacaactgcaagaaaaaggatggagaccaaggtggtttaagaaggatgatggcgacagttaccgctatatgggtggatatgggaagcgagggagacggggaactgggacggtattccggacatctttcgccagaatagtttg

SEQ ID NO: 60574 - DNA, 279 bp, Zea mays
gcttgaagcatgccgtttggccagtccagatgaggcaaaggctgtaattgcccgtggtgtgatgtcaattccaaattctgtgaagctatggttgcaggcagcaaaattggagagcagtgatctgaataagagcagggttttgaggaaagggctggagcacattcctgattcagtccggctatggaaagctgtacttgagcttgcaaatgaagaggatgcaaggttgttgcttcacagggctgtggagtgttgcccgttgcatgtggaactttggcttgc

SEQ ID NO: 60575 - DNA, 281 bp, Zea mays
ggataatggaagcctgtggttttgggactggaagagtggtcataactttcaacaagatcagactatagtccagcctggatcactggagagtgaggcatgcatatatgccctctcatatgacgtgagcggatcaaggcttgtgagctgtgaggcggataagactataaagatgtggaaagaggacttgacagcgacgccagagactcatcccatcaatttcaagcccccaaaggacatccgaagatattgatgctcaaatcccacaagtagcaagctagtgg

SEQ ID NO: 60576 - DNA, 275 bp, Zea mays
agcaatctgtggctcttggcaatatgacaaatccaagggttaggtactgtaggaagtgcaaccagttgaagccacctcggtgccaccattgctctgtttgtggaagatgtgttcttaagatggatcatcattgtgtgtgggttgttaattgtgttggggcgctgaactacaaatactttcttctcttcctgttttacaccttcctcgagacaactcttgtcactctctctctattgcctcacttcattgccttcttcagtgatgccgagatccca

SEQ ID NO: 60577 - DNA, 278 bp, Zea mays
tatgattctctaggcatatgttatgtactaattgaattttaatttcagtatacactgtgtaatggtaaaaggagaaaacttgatgaatggagaatgtacaaagatcaaagtatggctaaatgaccttgctggaagtgaatgggcagcaaagacagatgcacagggagaaaggttgaaacaagcacagaacgtaaacaaatcactttctacacttggtgatgtcatatgcactcttgtaacgaagacttcacatataccctttagtacaggtggagatt

SEQ ID NO: 60578 - DNA, 280 bp, Zea mays
agaagagcggcggcgcgggcggactcggagcaggcggaggaggagctgtgccaagccacaatgggtatctcacgcgactcgatgcacaagcgccgtgccaccggtggaaagcagaaggcctggaggaagaagcgaaagtatgagcttggtcgccagccggccaacaccaagttgtcaagcaataagacagtgaggagggtccgtgttcgtggaggtaacgtgaagtggagggctcttcgccttgatactggtaactactcatggggaagtgaagctgtta

SEQ ID NO: 60579 - DNA, 168 bp, Zea mays
cggtgacagcggtagggccatctccctcttgggtgaaaaagatggtgcccttgacaccggatgtgcctcttgcctcaagcctggcctacatggcacccatggcggcaggcttgacgtagagaccttccgtgacagccgtagcggccatctccctcatgcctggcctcc

SEQ ID NO: 60580 - DNA, 280 bp, Zea mays
ggagatggccacttgttgatgctgaaattgaaagagtggccccgacccagtgtcttggaggcgtttctgttgtgccaaaggccagaatttattgtcaactttcctcttgttgattttattcatcctagatggggtctcctaaaccttgctgccaagttacccccagatgccttacaacctgaattagggatgaaactgctaattgcacatggaagtcaccgagaacttggtaaaggtgattcaatgacaatctaatgattaacatgagcgatgtgggtca

SEQ ID NO: 60581 - DNA, 283 bp, Zea mays
acggcttcggaaggatcggcaggctcgtggccagggtcgccctccagagcgaggatgtcgagctcgtcgccgtcaacgaccccttcatcaccacggactacatgacctacatgttcaagtacgacaccgtccacggccactggaagcacagcgacatcacactcaaggactccaagacccttctcttcggtgacaagccggtcaccgtctttggcatcaggaaccctgaggaaatcccgtggggtgaggctggcgctgagtatgtcgtggagtccaccggcgt

SEQ ID NO: 60582 - DNA, 282 bp, Zea mays
aaaggaatcaggcggagtggcgcgatgggagagcaggtcgtgacggagcagatccagcggaagctggaggaggtcaacgctaccgtccaacagcacctcgcgggtgtccaggaccacatcaacttcaccatgcagcaagcatacttcaagtgtgcatatggttgctttgatcggcgccatactcaggaagcgatcagcaactgtgtggagaattgtagtgtgcctgtccttgctgccaacaatgtttttgagagtgagatggccaagtttcagccactctaa

SEQ ID NO: 60583 - DNA, 277 bp, Zea mays
ggagcatcccgtcccgaggaggaagacaaccggcgacgcggggggaacatggggaagacgccggtgcggatgaaggcggtcgtgtacgcgctgtcgcccttccagcagaaggtaatgccggggctgtggaaggacatcaccaccaagatccaccacaaggtcaccgagaactggatctccgccacgctcctcctcacccccgtcgtcggcacctaccaatacgccatgtggtacaaggagcaggagaagctttcccacagatattaaatgcgctgcc

SEQ ID NO: 60584 - DNA, 276 bp, Zea mays
gccagtactgaatgtggaggaactgcagatagatgcatacgattttataataagaccacaaatgcacacttgagctgtgtggacactggcagccaggtctgcaatcttgcgtggtcaaagaatgtaaatgagcttgttagcacccacggctactctcagaaccaaataattgtttggagatatccaacaatgtcgaaacttgccactttgacagggcatacatacagagtattgtacttagctatttcccctgatggtcagaccatagttactggt

SEQ ID NO: 60585 - DNA, 250 bp, Zea mays
tttgacaaactagctaaaatctctgttttcaaacaacttttggtatataatactacagtttttgagaatactgcattactcttccaaaactgtagtattatataccaaaagttgtttgacaaactagctaaaatctctgttttcaaaactaaaatattacaaatactgcagctcttttgaagtaacataaaaaaaaaaacaaatagaaaaaaaaagctaaaataaaaagaaaaaaaaaaaaaaacaaggg

SEQ ID NO: 60586 - DNA, 278 bp, Zea mays
aaaaaaaatcggtttgttagcgtgacgtgcgtgaggagtctggagtcggacggaatcgaaaaggcgaaaactcagtgtctcgagtttcctcggagcggaggcgatggctgggaagggagggaaaggcttgctcgccgcgaagactacggcggccaagtccgccgagaaggacaaggggaagaaggccccaatctcacgctcctcccgcgccggcctccagttccctgttggacgtatccaccgtcagctgaagcagaggactcaggcaaatggtcgtg

SEQ ID NO: 60587 - DNA, 281 bp, Zea mays
attcaaccaaccaggactgtgtaaagatgcttgttggaaataaagtagacaaggaaagtgagagggctgtcacgaaaaaggagggaattgaatttgccagggaatacggttgtttgtttctagaatgcagtgcgaaaacaaaagtaaacgtagaacagtgttttgaggaactggttctaaagatcttagacacgccaagcctcctggcggatgcttcctcagcaggggtcagcaagaagaacatcttcaagcagaaggctccagaagctgacgccgccaca

SEQ ID NO: 60588 - DNA, 273 bp, Zea mays
ctcgagcgagcaaatcggactgatgcttgtttcatccgtgtaattggaagtgagttagttcagaagtatgtcggcgaaggtgctcggatggtcagggaacttttccagatggcccgctcaaagaaagcgtgcattgtattcttcgatgaagttgatgctattggtggtgctcgttttgatgatggggtgggtggcggtcatgaggtgcagcgtacaatgttggaaatagtaaaccagcttgatgggtttgatgcaagagggaacatcaaagtt

SEQ ID NO: 60589 - DNA, 273 bp, Zea mays
aattctggtccatcaaatggatcgactgtaaatccaccgcgaccaccgccgccgccgccgcctccaaagttttcctcaaaaagtactggggtcatgaagagggcacctcaggttgcagagctctaccattcacttatgagaagggactccaaaaaggatacttccggtggcggaatctgtgaagcagctaattctgcgaatgtgcggagtagcatgattggtgaaatcgagaaccggtcttcccatttgcaagctatcaaggcagatgttgag

SEQ ID NO: 60590 - DNA, 272 bp, Zea mays
  unsure (1)..(272): unsure at all n locations
atgatggtgaacggtcgggatggagagcgaaggttttgcaatctatgatgcaatgatgcgtatgaaaactgagatccacacactttgtataggagctgcagcaggccatgcatgtcttgtgcttgcagctggaaaaaaaggcaaacgttatatgttccctcatgccagagctatgattcagcaaccacgtattncctcttatgggatgatgcaagcatcagatgttgttattcgtgcaaaggaggttgtgcacaacaggaacacattggtca

SEQ ID NO: 60591 - DNA, 282 bp, Zea mays
cgcactcttgcggattacaacatccagaaggagagcaccctccacctggtgctccgcctcaggggtggcatgcagatctttgtgaagacattgactggcaagaccatcaccttggaggtggagtcgtctgacacaatcgataatgtcaaagccaagatccaggacaaggagggcattccaccggaccagcagcgcctgatctttgctggcaagcagctggaggatggccgtaccctcgccgactacaacatccagaaggagagcaccctccacctggtgctc

SEQ ID NO: 60592 - DNA, 280 bp, Zea mays
acttcagcaaaggtccgcgacaaaggttacctttcctttagtttggaccaatacctgctgcagtcaccctctgtaccgtgagtctgagcttatccaggagaactaccttggtgtgagaaatgcagcacagaggaagctactggatgagctgggcatcccagcagaagatgccccagttgaccaattcacccctctgggccgaatgctttacaaggcaccatctgatgggaaatggggggagcatgagctcgactacctgctgttcatcgtccgggacgtg

SEQ ID NO: 60593 - DNA, 274 bp, Zea mays
tgtcacgagagtacgagaccacgccttccgtgggatcaatcggctagggtttcggagatgttcggccgcgcgccgaagaagagcgacaacacccggtactacgagatcctgggggtttccaaggacgcgtcacaggatgacctcaagaaggcctaccgcaaggccgccatcaagaaccaccccgacaagggcggcgaccccgagaagttcaaggagctagctcaggcttatgaggtcctcagcgaccctgaaaagagagagtctatgaccagta

SEQ ID NO: 60594 - DNA, 276 bp, Zea mays
cggagtcttcgaagcagaatctcttaggctgcgctgccggattgctccttccgcttacattccaccttcaatactagcctgtgctggacgggtctacccgttggtagtcgctgcacaccccatggagcctaaccagatcgcgatcggcatgagcgacggcaaggtccatgtggtggagccattagacggggacccgaagtggggatcggcacctccacaggacaatggagcgcacccgcacccgcatccagcgatatcagcggcaccgtcgaccgc

SEQ ID NO: 60595 - DNA, 273 bp, Zea mays
tgagcatgttggtttgtggtctccaacactcattagaggtgttgatcgagaagcgatatacattcctaaccataagtttacagtttctatattaaggaataacactcagaggacccattggcgtattaagacctatcttgctattagccacatggatgctggaaaaattgggactatagttgctgacatgaggaaagttttggcaaaaaatccgcatatagaacaacaaaagctgcacaggagagtattctttgagaaaattgatccaaaaat

SEQ ID NO: 60596 - DNA, 269 bp, Zea mays
catggaagctctgtacaagaaggtccatgcggccatccgtgctgatcctagcatggccaagtcaacaaaggcgcaaccaaaggagcacaagaggtacaaccccaagaagttgacctatgagcagagaaaggccagactcgtggaaaggctcaacgccctcaattcctcgggtggtgtcgatgatgatgaggatgacgagtgaagtgctatcctatttggcgatcagaacttgcgcaatggcatttgttgttccctttactcctgtaaca

SEQ ID NO: 60597 - DNA, 269 bp, Zea mays
gtcgcttccagccgccgccgccgcgtccgcctcgcccagcgcagagccgccgcagcacatcgctatctcgatctcagccatggcggaggtggagcagcaacaggacacgccgaagctgttcaaccgctggaccttcgatgatgtccaggtgaacgacatctcgctgaacgactacctcgctgtgaacgcgacgaagcacgcgatgtacctgccgcacaccgcggggcgttactccaagaagcggttccgcaaggcgcagtgctcgatcg

SEQ ID NO: 60598 - DNA, 271 bp, Zea mays
taggaagaccgattcagagttcttggatgctgaaaggaattcccatagagatgatgggtcaacagcatcaacagcagtgctagttggtgaccatctttacgtggcaaatgttggagactcaagggctgttatatcaaaggctggcaaagctattgcgctctctgaagatcacaagccgaacagaagtgatgagaggaaacgaatcgagagtgctggtggaataattatgtgggctggaacttggagggtaagtggtgtacttgcaatgtct

SEQ ID NO: 60599 - DNA, 272 bp, Zea mays
gcggatggacctgtgccgcaagtacgcctttgggaagatgctcgtgataggctctgagccaccagccaagctgaagggcctttggctcttccgtggccaggatgttcccaagtttgtaatggacgaggtctatgacatggagctctacgagtggatcacggtggacatctctgacgaggcccagaatcagcgtgtgcatgcgatgattgaggaccaggagccctttgagggcgaggccttgcttgacgcgaaatgcttcaagtgagtgtgct

SEQ ID NO: 60600 - DNA, 273 bp, Zea mays
gcggatggtactgtgccgcaagtacgcctttgggaagatgctcgtgataggctctgagccacccttcaagctgaagggcctttggctcttccgtggccaggatgttcccaagtttgtaatggacgaggtctatgacatggagctctacgagtggaccaaggtggacatctctgatgaggcccagtatgagcgtgtcaatgcgatgattgaggaccaggagccctttgagggcgaggccttgcttgacgcgaaatgcttcaagtgagtgtgctt

SEQ ID NO: 60601 - DNA, 279 bp, Zea mays
aaggaaggcccagaccggtgcgcggcctgcaggaagcgtgttgggctgacgggatttagctgccgatgcgggaacatgtactgttcggtgcaccgctactccgacaaacatgactgtcagttcgactatcggactgcagcaagggacgcgattgccaaggccaatcctgtggtgagggcggagaagctcgacaagatctgaggcgggcattgggggagcgaaatggttgcaatctgcaagaattcaacatgctgtctttgctgcgttatcattgaaact

SEQ ID NO: 60602 - DNA, 292 bp, Zea mays
ctcgtcgatctacacacatacatagtttcttctactacacgacgacaaacatggggaagcctgcgaagatcggagagtggggtggatacgccggcgatcgtcgggatctgagggctactccggaccggctgaccgaggtgaaggtcacggcggacaacagcagctgcatccgctccatctccttcatctacatcggagccgatggcaagccgtacgaggaggggccatggggtttcggccatgctggcacggagtacaagattgatctgtgcaggttcgacgagagcttgac

SEQ ID NO: 60603 - DNA, 294 bp, Zea mays
acaatttctcgcgctcctaccgccgccgcttcgttctctaaccttggctcccgctccctccgcagggcatctcaacaccgccttgaggaccccccaactcgccggctgcagccatggtgaaatattcgacggagccaaccaaccccaccaagtcaaccaaggccatgggccgtgacctacgtgttcacttcaagaacacccgtgagacagcttttgcccttaggaagttgtcactcaccaaggccaaaaggtaccttgaggatgtgattgcccacaagcaggccatcccgttcc

SEQ ID NO: 60604 - DNA, 246 bp, Zea mays
  unsure (1)..(246): unsure at all n locations
gtacccaaccttcccctacaccagaaaaatccccagttctttggtccgcgtcagagaggcggcggcgatgtctgggcgcggcaagggcggcaagggtctgggcaagggcggcgcgaagcannccggaaggtgctccgctccaacatccagggcatcaccaagccggcgatccggaggctggctaggaggggtggcgtgaagcgcatctcggggctcatctacgaggagcccgcggcgtgctcaaga

SEQ ID NO: 60605 - DNA, 274 bp, Zea mays
caatccgtagacttaggaaaactgacaacaacaggattgctaaagcttgtggagcagttatagtgaacaggcctgaggagctccaagaatctgatgttggaacaagagctggcctgttcgaggttaagaagataggtgatgagttcttttcctttattgttgactgtaaagatcccaaggcatgtactgttctgttgaggggagcaagcaaggatgtattgaatgaagttgagagaaacctgcaggatgccatgtccgttgcaaggaacttttg

SEQ ID NO: 60606 - DNA, 285 bp, Zea mays
ggcaaaaccaggttgccgcaccagatgggctactccatctacgggctatgggcgcccaactcgctgcctacgctgtactacgctgtcgtcccttcgctgtgcctgctcaagggcacccctctgttccctgagctcacgagtccgtggatcgcgcctttcgtctacgtcgcggtcgccaagaacgtctacagcgcgtgggaggcgctgtggtgcggagacacgctgagagggtggtggaacgcgcagaggatgtggctggtccggagacgacctcgtacctctacg

SEQ ID NO: 60607 - DNA, 291 bp, Zea mays
acccgttgctggtggcttccctgccgaattggtgggagagggtcgcgtttgtgcttttcagcttcaccatctgcgggattcagcacgtccaattctgcctgaaccacttctcgtccgacgtgtatgtcgggccacccaagggcaatgactggtttgagaagcagacggcaggcacgctcgacatcctgtgctctccttggatggattggttccacggtggcctgcagttccagattgagcaccatctgtttccccgcctacctaggtgccacctccgtaaggttgcgcctg

SEQ ID NO: 60608 - DNA, 289 bp, Zea mays
atccggcaatgatggatgtgagcccatttaataaaggcagagaaagcactatttggggtgtttcactcatgtttggttatcttggttttgatgggttcacaagcacgttccaagataaactcttcaaagggtatgacatggaaatacacaaccaaatattctacacgacagtgtgctcttgtcttcttagtttaagtgggctgattctccagaatcatctgattccagctgtggattttatgtttcatcacccagattgcttctctgatgttctaatcctgtccagcgt

SEQ ID NO: 60609 - DNA, 288 bp, Zea mays
gccagagatgagctccacaggatgctgaacgaggatgagctacgtgatgctgtgctgcttgtttttgccaacaagcaagatcttcccaatgccatgaatgctgctgagattactgacaagcttggattacactccctgcgccagcgacactggtacatccagagcacttgtgccacaactggcgagggtctgtatgaaggcctggactggctgtccagcaacattgcgagcaaggcttgaggcctaccttgaatgtcaaccgcgaactgactaggagctccggatgta

SEQ ID NO: 60610 - DNA, 287 bp, Zea mays
gaatcagggaacttccacagaacagtaagattctagccactcacactgacagtccagatgtacttatttgggatgttgaagcacaaccaaatagacatgctgtcctaggagcaagcgagtctcgccctgatctgatattaacaggacataaggaaaatgcggaatttgcgcttgccatgtgtccagcagaaccatatgtcctatcaggaggaaaggacaaatctgttgtcttgtggagcatccaagaccatatatctgcccttggggattcctcgtcttctcctgga

SEQ ID NO: 60611 - DNA, 296 bp, Zea mays
cttgcaatcacaacgaacagaagctctctatctcaccgacaccgaggaagaagagatcaatggcgtccgagtagggagtcgtgatcgcgtgccacagcaaggctgagttcgacgcccacatgaccaaggcccaggaagccggcaagctggtggtcatcgacttcactgccgcctggtgcggtccatgccgcgccatcgccccactgttacgtcgaacacgccaagaagttcactcaggtcgtcttcctgaaggtggacgtggacgaagtgaaggaagtcaccgcggcctacgacgt

SEQ ID NO: 60612 - DNA, 287 bp, Zea mays
ggaacttgtcaagaaaatgacaggaaaggaccccaatgtgacagtcaaccctgatgaggttgttgcacttggagcagctgtgcaggctggggttttgtctggtgatgttagcgacattgtccttcttgatgtgaccccattgtcccttggtttggagacactgggtggtgttatgaccaagattatcccacggaatacaaccttgcctacctcaaagtcggaagttttctcaacagctgctgatggccagactagtgtggagatcaatgttctccaaggagaaaggg

SEQ ID NO: 60613 - DNA, 283 bp, Zea mays
ctcggagggcgggctggactacctgggcaaccccaacctggtgcacgcgcagagcatcctggccgtgctcggcttccaggttctcctcatgggcctcgtcgagggcttccgcatcaacggcctcgacggacgtcgcgagggcaacaacctctaccacggcggccagtacttcgacccgctgggcctcgccgacgaccccgtcaccttcgccgagctcaaggtcaacgcgtcaagatcggccgcctcgccatgatctccatgtcccgcttcttcgtccaggcca

SEQ ID NO: 60614 - DNA, 286 bp, Zea mays
gagcgcaacaccatccacccaccagttcgaagcggaggcgaccggcaacctgcggcggagatgtcaggcaggggcaagggcggcaaggggctcgggaagggcggcgcgaacgtcaccggaaggtgctgcgcgacaacatccaggggatcacgaagccggcgatccgagagctggcgaggaggggtggcgtgaagcgcatctccgggctgatctacgacgagacccgcggcgtgctcgagatctttctcgagaatgtcatccgcgacgctgtgacctacacggagca

SEQ ID NO: 60615 - DNA, 288 bp, Zea mays
ccaagttctccggtgggctcttggttctgtcgagatcttcttcagtcggcactgaccgctgtggtacggttacggtggcggccgtctgaaatggctccagaggctctcctacatcaacaccatcgtgtacccgttcacttctcttcctctcgttgcctactgttgcctgcctgccatttgcctgctcaccggaaagttcattatacctacgctgtccaacgctgcaacgatatggtttcttggtctcttcatgtccatcatcgtgacgagcgtgttggagctgcggtg

SEQ ID NO: 60616 - DNA, 291 bp, Zea mays
acattgctgtcaccgcctctccaacctgctttcactagtgagctgcaactgcaatgtcttggacgagaaccaatattgattgataaaaggagagcagaccaagcaccttacgctttgctgtcctacacacagtggtatactgggtactcaacgagttcaaaaatgatcttacggagttcaagtaagccatgcgttttaagagcatgtttgttttagtttatagattatataacctagattatatatgagattaaataatctgaattatataataagattaataatttggac

SEQ ID NO: 60617 - DNA, 284 bp, Zea mays
catcaagttgatgaatcgataagtggctagagacaaccaaagataggacagtctgcacagtagtaggcttcacgatggggctaaaagtcccatcaaaatcaatgccagggcgttgcgtaaatctacagtgaacctagcgagccttgtacctttcaagggagccatcaacattaaatttgtgcttgaaaatccacttgtcggccacaatgtttgcaccaggggggcgaggcaccaaatcctaggtgtgattctgcaacagtgctgcatactcatcttccatggca

SEQ ID NO: 60618 - DNA, 282 bp, Zea mays
acaaagaccaaaaggagagaggctgagatccctgatggtagacaccactatattgggccttgatcctgaaagggccaaagaactgccttatattgctagtatgggaatctatgtttttagcagagatgtgatgcttcggcttctcagagaaaattttcctgcagcaaatgactttggaagtgaggttattcctggcgcaacagaaattggattaagggtgccagcttacttatatgatggttactgggaagatattggtactattgaagcatttataatgca

SEQ ID NO: 60619 - DNA, 272 bp, Zea mays
cctcaagcaggtcggcgcctacgccgagccgagaaggccaaggactccgacggcatccgccccggcaagggtaagatgcgcaaccgccggtgcatcaaccgcaagggcccgctcgtcgtctacggcacagagggctccaaggtcgtcaaggccttccgcaacctccccggcgtggacgtcgccaacgtcgagcgcctcaacctgctcgaccttgcccacggtggccacctcgggcgcttcgtgatctggaccgagagcgcgttcacgaagct

SEQ ID NO: 60620 - DNA, 284 bp, Zea mays
atagttctgaagggtgtggtccgggtgacaaatttggcggatgctgctgagcacattggtgaagttcttaggcgtgttaaaaaggagcatctccaaagagcgtacaaaattcaagattggtctgatgataacgattttcttgtccagctgtgcaggaccactggaaaacttctcaagggcggggagcctgatctgacaacagcagccaagatggtacttcatgactggcagaggggtaaaatccccttctatgtaccccctccgcagcaaagcgacggcggtgc

SEQ ID NO: 60621 - DNA, 281 bp, Zea mays
ccgcaacttcacagcgtatcatcgttttccatcgctcctactcctatcatccagaaaatctgagcggtattgatggcgcccaaggcggagaagaagccggcggcgaagaaggtggcggaggaggagccctcggagaaggcggctccggcggagaaggcccccgcggggaagaagcccaaggcggagaagcggctacctgcgggcaagtccgccggcaaggagggcggcgacaagaagggtaggaagaaggcgaagaagagcgtggagacctacaagatcta

SEQ ID NO: 60622 - DNA, 279 bp, Zea mays
aatcaagtacttggtgtctgagggctgcatcaagccattgtgtgaccttcttgtctgccctgatccgagaattgtaacagtttgtctggagggtcttgagaatattcttaaagtagggcagcatgacaagaccatgggtgcaacaggtgacactaacgtcttagctcagatgatcgatgaagcggaaggcctggaaaagatcgagaacctacagagccacgataacaatgaaatctatgaaaaggctgtgaagcttcttgagacatactggatggagga

SEQ ID NO: 60623 - DNA, 299 bp, Zea mays
cagctcgagcgtctccttggtcctggtctcaacaaggcaggcaagttcccgaccctggttactcaccaggaatccctcgagtccaaggtgaacgagactaaggcaaccgtcaagttccagctcaagaaggtcctttgcatgggtgtcgccgtcggcaacttggcgatggaggagaagcagatccagcagaacatccagatgagcgtcaacttccttgtttcccttctgaagaagaactggcagaatgtgagatgcctgtacgtcaagagcaccaggggaagccatacagggtgttctaa

SEQ ID NO: 60624 - DNA, 256 bp, Zea mays
catgcacttctgagggtcaccgcagatgatatccagaaagccacggagaatttcagtaaggtgcacattattggggatggtgggtttggcactgtctacagggcagcacttcctggaggtcggagagtagtgatcaaaaggcttcatggtggccatcagttccaaggtgatcgtgaattcctggccgaaatggagacaattggaaaggtgaaacatcctaaccttgttcctctacttggctactgtgtatgtggtg

SEQ ID NO: 60625 - DNA, 287 bp, Zea mays
cgaggaaaagcaagtaggcaatgaaagattcaacatatttagtggctgcccttctggccagacagcgactattgttctccgtggtggtgcagaccagttcattgaggaagctgaacgaagtctccatgatgccatcatgattgtgaggagagcacttaagaactcgacagttgtgccgggtggtggtgctattgatatggaaataagcaagtatctcaggcagcatgcacgaacaattgctgggaagtctcagttctttgtaaattcatttgctaaagcccttgagg

SEQ ID NO: 60626 - DNA, 265 bp, Zea mays
gtcagttaccaggctcttcgcttcccaacattggtggcatgtttccaaacatgctccctttcggtgttgctgggcagttcaatccccttgtcatccagccacaagcaatgactcaacaggctactcgtcatgctcggcgtgtttatgtcggtggccttcctccatctgctaacgaacagacagtggcaatttactttaatcaagtcatggctgctattgggggaaacactgctggtccaggtgatgctgttctcaatgtatacat

SEQ ID NO: 60627 - DNA, 247 bp, Zea mays
acgacggcgatggcaacgactggggcgacagtcgctgccgccctacttgccggttgctcggatcttcttcggcccgttagccgtcgacgagcaccaccagggcaaccagatacttcagtggcttcgcaaggatgtcctggtgcactattgagtctgatcctggtgtgttcactgagctgattcagcaaatgcaagtgaaaggtgtacaggtggaagagctttactctctcgatgtgggctctctgag

SEQ ID NO: 60628 - DNA, 257 bp, Zea mays
cacatacatagtttcttctactacacgacgacaaacatggggaagcctgcgaagatgggagagtggggtggatacgccggcgatcgtcgggatctgagggctactccggaccggctgaccgaggtgaaggtcacggcggacaacagcagctgcatccgctccatctccttcatctacatcggagccgatggcaagccgtacgaggaggggccatggggtttcggccatgctggcacggagtacaagattgatctgtg

SEQ ID NO: 60629 - DNA, 258 bp, Zea mays
aagaaagtgcggtttgataatttggaaccagagagcgtgaaatttatggcaagggaaattctcattttgcgtcgccttgatcatccaaatgttatcaagctagagggtctagtaacatcaaggatgtcctgcagcttatatctggtttttgagtatctggaacatgatctagctggactagcatctttccctggagtaaagtttaccgagtctcaggtaaagtgttacatgcaacagctcctccgtggtcttgagcat

SEQ ID NO: 60630 - DNA, 263 bp, Zea mays
cactgggttaagtctattcccgtggaaacaacttctaaaaaaggaagcagaaccagctgatattgatagttttgttcatcatttatccgataatcacgtatttccaaacaaagttttggtggactgcacagcagatacaagtgttgcatcccactattataattggttaaagaagggtattcatgtcatcacaccaaataagaaagcaaattctgggccacttgatcagtacctgaaattgcggactctgcaacgtgcctcgt

SEQ ID NO: 60631 - DNA, 266 bp, Zea mays
gcgcgagaagatgctgcatcacatccaccaagaaatcccctatgtaattgagcatcgtctgatgggctggaaggagctaaaagatggttctcttagggtggagcagcacttcattgcacctaagcaaagccagcgtcagattcttgttggtaaaaatggttctaagatagggagaatcggtattgaagctaatgaagagctaaggtccatattcaagagagatgtccatctaattctccaagttagagttgcgaaaaagagaagtg

SEQ ID NO: 60632 - DNA, 275 bp, Zea mays
ctgatcagtcagaggatatattgtgctggaaagatcccgaacacccaaagtattcctttggtgcctcagtcactgaagatggaaagtacatcatattgggcatctatgaaggttgtgaccctgtcaacaaattatactattgtgaaatttcttctcttcctcaaggaatagagggctttagagggacacaggatttgcttccgtttgtcaagcttattgacaattttgatgctcaatatcaagttgtggccaatgatggtgatgaatttacattt

SEQ ID NO: 60633 - DNA, 259 bp, Zea mays
agcatcttcgacgccaaggctgtcggtagaaaccagatcctcttccgagggtccactcaagggtatcatgggttatgcggaggacgatctggtttctaccgacttccttggtgacagcaggtcgagcatcttcgacgccaaggccgggatcgctctgaacgaccacttcgtcaagctcgtctcgtggtacgacaacgagtggggctacagcaaccgcgtcgtcgacctgatccgccacatgttcaagacccagtagagg

SEQ ID NO: 60634 - DNA, 260 bp, Zea mays
agccacaaccacacgttcacggtagcgagagcttatcgtcgtcggcggtgaagatggtgtcgctgaagctgcagaagcggctcgccgctagcgtcctcaagtgtgggaaaggcaaagtctggcttgaccccaatgaagtcagcgagatctccatggctaactcccgccagaacatccggaagttggttaaggatgggtttatcatcaggaagcctcagaaggttcactctaggtcccgtgcaagaagggcacatgaggcc

SEQ ID NO: 60635 - DNA, 166 bp, Zea mays
gcaccgtcaaaggcaccaggctgaggaactcctccctctctccctcttatccccaaggcgaggagctgaggaagaggaggccccttctgcttgtttctccgctttgcaagatgtcgtccccgagcaagcgccgcgagatggaccttatgaagctgatgatgagcga

SEQ ID NO: 60636 - DNA, 261 bp, Zea mays
aaaatgcgacagttgtgagcatttcgagtattgaggaactgagggctataatttcaagaggctctgagaggaggcacactgccggaactaatatgaatgatgagagttcaaggtctcatttaattctttcagtcattattgaaagtacaaatcttcaaacccaatcatatgcaagaggcaagctaagttttgtggaccttgctggttctgagagggtgaaaaaatctggttccgcaggaaagcaactgaaagaagcacaaa

SEQ ID NO: 60637 - DNA, 268 bp, Zea mays
cacacatacatagtttcttctactacacgacgacaaacatggggaagcctgcgaagatcggagagtggggtggatacgccggcgatcgtcgggatctgagggctactccggaccggctgatcgaggtgaaggtcacggcggacaacagcagctgcatccgctccatctccttcatctacatcggagccgatggcaaaccgtacgaggaggggccatggggtttcggccatgctggcacggagtacaagattgatctgtgcaggttcga

SEQ ID NO: 60638 - DNA, 266 bp, Zea mays
agtgacatgaggcaaacggtggctgtcggagtcatcaagagtgtggagaagaaggatccaactggagccaaggtgaccaaggctgccgcaaagaagaaatgatgtgtctggctggttctgtgtttgcttgagggatacctagtggaaacgtaaaatatctcgtcttgttcacgtcattgtctgaactatgctcgcaacgtttgcctggtcgatttagaactgttattttcgttaaaaccagagtgttatttaagacttatccgaac

SEQ ID NO: 60639 - DNA, 261 bp, Zea mays
gaactttcttacaaactgaaagaaattcccaaggtccgctgggttcttcctgattcatacttggatgtcaaaaacaaggactatggaggcgaacccttcataaatgggcaagctgttccttatgatcctaaatatcatgaggagtgggtgagaaacaatgcccgtgccaatgacagaaaccggcgcaatgataggccccgcaactttgacaggtcaaggaactttgacaggagaagggagaacatgcaaaactaccagaac

SEQ ID NO: 60640 - DNA, 261 bp, Zea mays
acaaaggggagagagagagagagaagagagagagaagagagagagagagagaggagtgggagacccgcgagaggctgccgtgtagggaccgtagactcagcgactgcgaaggagggataaggggatggccgggatcggaccgatcaggcaggactgggagccggtcgttgtgcggaagaaggcacccaccgccgccgccaagaaggatgagaaggccgtcaacgccgcgcgccgcgccggtgcggagatcgataccatgaa

SEQ ID NO: 60641 - DNA, 257 bp, Zea mays
ccttgaagatgtagatcttgtaggtgctgaagcaggtgcaccccgacatcggcatctcgtccaaggccatgtccatcatgaactccttcatcaacgacatcttcgagaagctcgcggccgagtccgccaagctggcgcgctacaacaagaagcccaccatcacctcccgcgagatccagacctcggattgcctcgtcctccccggcgagctcgccaagcacgccgtctccgagggcactaaggccgttacgaagttc

SEQ ID NO: 60642 - DNA, 254 bp, Zea mays
acggaggtcaagcccgccctgaccaacatggtctccgctgctaagctcattcgcacccagctcgccagcgccaagtgagcacctttttttgcctttttcgtttccgaggagggcgtcgtcgatgccaatttgtttccaataaacagggctccccccctgtgcccgccgttctgttgtgctccgtctgtggttaggttactagttttcttgatctcgcccccacgcggtacctgttttactatctgtttggtggt

SEQ ID NO: 60643 - DNA, 259 bp, Zea mays
atctatcagtggataccccaggacacattgtcagcttccatatcgcatgcatcatactcatgtaacagccagctagtttttgctgccttcactgatggtaacttaggtgtttttgatgcggagaacttgagattaagatgtcgaattgcaccatcggtgataaacagcaatccacctgttcaccctcttgtcgtcgccgcacatccccacgagccaaaccaatttgcggtcgggctgtcagatgggtccgtcaaagtgc

SEQ ID NO: 60644 - DNA, 257 bp, Zea mays
aattgttgcacagttacgagtccgagttctggaggaaacccaattcacatgctctgctgggattgctcacaataagatgttagctaaacttgtcagtggaatgcacaagcctgctcagcaaacagttgtcccttcttcatcagttcaagacttactagcatcactacctgtgaagaagatgaaacatgttggtggtaagcttggaagttccttgcaggatgatcttggggttgagaccattggtgatctcctaagtt

SEQ ID NO: 60645 - DNA, 255 bp, Zea mays
aggaaccgcttttggtggcttcaagagccggacccaggtcccatggcttgttgacaagtacatgaagaaggaaattaaggtggacgagtacattacgcacaacatgaacctggctgacatcaacgacgccttccacctgctgcacgaaggtggctgtctgcgttgtgtgctggcgatgcagatctgaaattcctaagctaagcagtttttggatgtgtcggcatagactgtcttttgttttggaactagaattcc

SEQ ID NO: 60646 - DNA, 253 bp, Zea mays
ctcgacgaatcggctcagattttaaggtccagtggacaggatacggccctagacgaggatacatgggaaccgattgataacttgagtgactgcccgcagaaaattagagattttgtacaagaagggcacaaaagaaagattctcccactgcctggtgatgttgatgtcatttgtggaggcccaccatgccaaggtatcagtgggtttaatcggtacagaaaccgtgatgagccactcaaagatgagaaaaaca

SEQ ID NO: 60647 - DNA, 254 bp, Zea mays
atctggtccaaacataatgctgtaagatgtgtctccaccaaatatctgtgggtacagcaccaagaaggttcacactatcctgaccaaggatggcaagaaccacttgatcaagaaggatgtgccttgtgagactgatcagttgactcatgtttacactttgatcatccgtcctgatgcaacatacagcattctcattgataatgaagataagcaaactggcagcatctacgagcactgggatattcttcccccta

SEQ ID NO: 60648 - DNA, 252 bp, Zea mays
gtatggaggagggcgagttctccgaggctcgtgaggatctggctgcgctcgagaaggactacgaggaggtcggtgctgagtttgacgagggtgaggacggcgacgagggtgacgagtactagacgctctactggcgcggcgtcgtcgggcttgtgtgccactgctatcctgtgatctgccctgagtggctcctatcgtgttatgtttctgtcggttcttatctatctgtcgttgtgtggtttacaacttacg

SEQ ID NO: 60649 - DNA, 267 bp, Zea mays
cgccgtggccaaacgagcagtgtgtttggatggtagtgcgccggcgtaccatctcgcccgcggctccggctccggtgagaacagctggctggtccatttcgaggggggaggatggtgcaacaatgtcaccacctgcctgcaacggaagcgcactcggttgggttcgtccaaggagatggcgacgcagattgccttctccggaatcctgagtgacacgccggatgacaacccagatttttacaattggaacaaggtcaaggttcggta

SEQ ID NO: 60650 - DNA, 257 bp, Zea mays
acgacggcgatggcaacgactggggcgacagtcgctgccgccctacttgccggttgctcggatcttcttcggcccgttagccgtcgacgagcaccaccagcgcaaccagatacttcagtggcttcgcaaggatgtcctggtgcactattgagtctgatcctggtgtgttcactgagctgattcagcaaatgcaagtgaaaggtgtacaggtggaagagctttactctctcgatgtgggctctcttagtcaactgcgg

SEQ ID NO: 60651 - DNA, 260 bp, Zea mays
ggtctgcagcccccaactacccccagcctcggaaggaaccttccagaagcgcaagactctaaaggccgtcgccttcccattcttcctcgccgcgggggtcgcctgagatcacataaacaatggtgaaggctgttgctgtgcttggtagcagcgatggtgtcaagggcaccatctttttcacccaagagggagatggccctaccgctgtcaccggaagtgtctctggcctcaagcctggcctccatgggttccatgtacat

SEQ ID NO: 60652 - DNA, 259 bp, Zea mays
ctaagggcggcggagcagtggaccagcatagcttgatggacctccaagacggtactctgggctcattgctttcagcgctgatgcaacactgcagcccgcagcagcgaagctatccattggataagggtgtcccgcccccttggtggccaacagggaacgagtcgtggtggcctgcgttgggcctcccaaagggagaagcgcctccgtacaggaaaccgcatgacctgaagaaggtttggaaagttggtgtcctgacggg

SEQ ID NO: 60653 - DNA, 256 bp, Zea mays
tcacacacaagacacaaccccactcacccggcagggaggccctcttcgtcggcggaggccatggtttccctcaagccgcagaagaggctcgccgcgggagtcctaaaatgtggcaaggggaaggtgtggcttgaccccaacgaggtctacgagatctcgatggctaactcgcgtcagaacattcctaagctggtgaaggatggattcataattaagaagccacagaaaatccactcaaggtcccgggcaaggaggg

SEQ ID NO: 60654 - DNA, 257 bp, Zea mays
cagaccgcggaggagctcgccacccagatcgagcagcagaagctcgaggagcagaagaccgaggcagaggaagttgtggtggaggatgaggaggaggaagatgaggacgatgacgatgatgacaaggatgatgatgaactcgatgaaggggatgccagtggcaagtcaaagcaaagcaggagtgagaagaagagccgcaaggccatgctgaagcttggcatgaagcccatcactggtgtcagccgcgtcactgtaaa

SEQ ID NO: 60655 - DNA, 262 bp, Zea mays
ggagaaaattacatttgtcccttctgtagcagcaagaagaagaattacagtaaaagtagcctggttcaacatgcctcaggagtcagtgcagcacctaatcgggaggcaaaagaaaaagcagtccatcgcgccctcttcaaatatttgaagaatggtcttgctaaatcacctgaaccagggtcacatgcaactcctgtggagccacaacctcttcagaaccgagacgagaagtttgtgtggccctggatgggtgtcctagtta

SEQ ID NO: 60656 - DNA, 295 bp, Zea mays
cagaagatacttgttgtgtgtatcaactgtttgacaaagcttgttgggcgcctttcccaagaggaattgattgataaattgcctacatttctgccagcattatttgatgcttttaacaaccaaagtccagatgtccgaaagactgttgtgttctgcttggtggatatgtacatcatgcttgggaaagcattcgctccatacttggaagggcttagcagcacgcagctccgcctagtaaccatatacgctaaccggatttcgcaggcgaggtctggcaagccaatcgattctaacc

SEQ ID NO: 60657 - DNA, 289 bp, Zea mays
cgaaaagaaatttggtcagtcttctgtctttgcaacatccacacttctcgaaaatggtggaaccttgaagagtgcaagtcctgcttctcttctgaaagaagctatacatgtcattagttgtggttatgaagacaagactgattggggaaaagagattggctggatctatggatcagttacagaggatattctaactggtttcaagatgcattgtcatggttggcggtcaatttactgcatacctagacggcctgcattcataggttctgcacctctgaatctttcagat

SEQ ID NO: 60658 - DNA, 282 bp, Zea mays
agctgtggagctcttgcagcgtgaatgccatgtgaaaaaaccactgagagtcgttcctttgttcgaaaaactggcagatcttgagtcagcaccagcagcgttactcggctgttctccgttgaatggtacagaaacaggatcagcggcaagcaggaagtgatgatcgggtattcagattctggcaaggatgccggtcgtttctctgctgcttggcaactgtacaaggctcaagaggagctcattaatgtcgctaagctgtatggggttaagctaaccatgttc

SEQ ID NO: 60659 - DNA, 276 bp, Zea mays
agcgcaactgcctcctcctcgtcgtccggtcgtgagaagggatggcgggccgtggcaaggctatcggcgctggcgcgcgaagaaggcaacgtcgaggagctccaaggccggactccagttccccgtcggcaggattgccaggttcctcaaggcgggcaagtacgcggagcgcgtcggcgccggcgcccccgtgtacctcgccgccgtcctcgagtacctcgcggctgaggttctcgaacttgccgggaacgccgcgagggacaacaagaagacccg

SEQ ID NO: 60660 - DNA, 277 bp, Zea mays
tctcagcagaggaacttggtgcaaagattaaggaatacggcattgttgcccctgatacaaagaatccactttctgatccctacccattcaatcttatgttccagacatctattggccccactggtcttagcgtggggtatatgcgaccagagaccgcacagggtatttttgtaaacttcaaggatctgtactattacaatggccaaaagctcccttttgcagctgctcaaattggcgcaagcttttagaaatgagatctcgccacgacttggacttc

SEQ ID NO: 60661 - DNA, 283 bp, Zea mays
cttccttagggagctcatttcaaactcctccgatgccttggataagatcaggttcgagagtttgacggacaagagcaagctggatgcccagccggagctgttcatccacatcgtccctgacaaggccaacaatactctgacaatcattgacagtggcattggtatgaccaagtcggaccttgtgaacaaccttggtaccattgcacgatctggcacaaaagagttcatagaggcactggctgctggtgccgatgtgtccatgattggtcagtttggtgtcggt

SEQ ID NO: 60662 - DNA, 277 bp, Zea mays
aaggaggtgctgggcgacaaggtggagaaggttgtggtctctgaccgcgtggtggactccccctgctgcctggtgacgggcgagtacggctggacggccaacatggagaggatcatgaaggcacaggcgctcagggactcgagcatgtctgggtacatgtcctccaagaagaccatggagatcaacccggagaacgccatcatggaggagctgcgcaacgcgcggaggccgacaagaacgacaagtctgtcaaggaccttgtcatgcttctgttcga

SEQ ID NO: 60663 - DNA, 257 bp, Zea mays
gttctagatcgcgagcggccggagacgggcgtgagagaggtggaaatcccgcggccttcgtgttcgtcccgcgcccaggtcgggtgcgcttgcagtagggggttacaagcgtccacgcgggagaaggagcgagcggcctcacgcgagcgcctgtcccgtcctcgtccccgcgcggctaaccttctgtaagagggccctggtccttccttttataagcgtaaggagaggatccaggtgtacaatgggggtgtagcaga

SEQ ID NO: 60664 - DNA, 277 bp, Zea mays
ccaggaatgaaggttttagatgtgggctgtggaataggtggaccactgagagaaattgcaagatttagctcaacttcagttaccggattgaataacaacgaataccagataaccaggggaaaggagctcaaccgtttagcaggaattagtggaacatgtgattttgtcaaggcggacttcatgaagatgccgttcgatgacaacacttttgatgctgtttacgccattgaggcaacatgtcatgcacctgatccagttggttgctacaaggagatat

SEQ ID NO: 60665 - DNA, 291 bp, Zea mays
atgggactctaaaagtagcagatatatctgtgaaggaagaatgcaaaacccgtccatctggccttaatacagttaatatgcttaaggttgcatcaagtgcacttggtattgggcctcagacagccatgcacttggctgagcggctttacactcaaggattcatcagttatcctcgtacagagagcactgcatatccgtcatcatttgattttcgaggtgcacttgctgcactattaaataatcctctatggtccaatgatgtccggaaattactggatgctggttttgtta

SEQ ID NO: 60666 - DNA, 284 bp, Zea mays
cggaacttgagaagattcgtcagagagaatctgacataacaaaggagcgaattgagaaaattctcaaggctggagctaatgttgtgttgaccaccaagggaattgacgatatgtccttgaagtactttgttgaggctggtgcgattgcagtaaggcgtgtgcgcaaggaagatttgcgacatgttgccaaagccactggtgcaactatggtgtctacttttgcggacatggaaggtgaagaaacattcgattcatcattccttggccatgctgatgaagttgtg

SEQ ID NO: 60667 - DNA, 270 bp, Zea mays
taagcgggcgaggagggtgaggcttaaggtcctcggcctgcaggtgagctcgttcgtgctccgcgtgtgcttggcgctgaacatgatatgagtgagttacgagtacgtcgaggaggacgtatccaacaagagtgagctcctgctcaagtccaacccggtgcacaagaatgtgcccgtgctcatccacaagcgtaagcccatctgcgagtcacccgtcatcatgcagtacgtcgacgagctgttcgccggccgtgcgatcctcccaaccga

SEQ ID NO: 60668 - DNA, 283 bp, Zea mays
cccaaccccgcgcgcgcgggagcgataaaccctagtcttcgccgtcgtcgcaggaggacccgcgatgtcgcacttcgggaggtcaggcccgccggacatccgcgacaccttctcgctcctcgtcctcaacatcagcttccgcaccacggccgacgacctcttcccgctcttcgagcgctacggcaaggtcgtcgacgtcttcatcccgagggacaggaggaccggggactcgaggggtttcgcgttcgtgcggtacaagtacgccgacgagcgcagaaggcta

SEQ ID NO: 60669 - DNA, 277 bp, Zea mays
gtaggaattgaggattgcttacatattgagtttgaatacagcaaaagcaagtaccatctcaatgatgtgattattgggaagatatatttccttcttgtcagaataaagataaaaaatatggaactggaaattaggcgtagggaatcaacaggatcaggctctaacacatatgttgaaactgagactcttgcaaagtttgagttgatggatggtgctcctgtgagaggtgaatctattccagtgaggctgttcctgacaccctatgagttgacccgac

SEQ ID NO: 60670 - DNA, 281 bp, Zea mays
agcagttcaagacagtcaaaaatgactatgagttgtcactaaacgagaatgctattgttgaagaagcagagggggagactttccttccaccagtgcaatacaaccttgtcaagattgatcagctaggaccatacgtcggtggcagggagcttgtagatattgttggtgtggttcagagcgtatctcccacactcagtgttaggagaaagattgacaacgagacaataccgaagcgtgacattgttgtagcagatgactctggcaaaactgttactatttct

SEQ ID NO: 60671 - DNA, 283 bp, Zea mays
ctcgtctgctcgcatttcctcccaatccatcccgcctccaaacccgaactccaagtcgccccgcatcgatggcgcccaaggccgagaagaagcccgcggcgaagaagccggcggaggaggagcccgctgccgagaaggcgccggccgggaagaagcccaaggcggagaagcgtgtcccagcaggcaagtccgccggcaaggagggcggcgagggaaagaggggccggaagaagggcaagaagagcgtggagacctacaagatctacatcttcaaggtgctgaa

SEQ ID NO: 60672 - DNA, 274 bp, Zea mays
tcaagactttgaagatcatgatcactgagtcagggtggccaaacaaaggggcggtcaaggagactggagccactccagacaatgctcagacttacaataccaatttgatacgccatgttgttaatgacagcggcacaccggcgaaaccaggggaagagattgatgtctacatattttcattgttcaatgagaacaggaaacctggcatcgagtcggagaggaactggggactgttttttcctgataagagctctatctacagccttgattggac

SEQ ID NO: 60673 - DNA, 270 bp, Zea mays
ctctatggcaagacaccattcaggggaccggacaatgacgaaacactctcagatgtgatctcacagggcttgaagttccctgacagtccagcattaagcttccacgctcgagatctgatcaaggggctgcttgtgaaagaaccggagtacgggcttggctcgtcgagaggagctgttgaaataaagcgcatccttcctcgaaagtctgacctgggctttgatccggtggacttcaccaccagagaccccgaaaatattgatactgcagca

SEQ ID NO: 60674 - DNA, 286 bp, Zea mays
actagttctagaccgcgaaccacaggtcgaaggcggcggcggcgatggggagcgacacggagacggagaagaaggcctcggtggcgctgatgtccatcgcgaaacccctcgctggaaagaagctctgcaagcggaccctcaagctcgtgcgacgagcctccgaggcgaagtgcctcaagcgcggagtcaaagaggtagtcaagagcattcgccgcgggaacaaaggattgtgtgtgatcgctggaaatatttctcctattgatgtgattacacatgttccgatact

SEQ ID NO: 60675 - DNA, 255 bp, Zea mays
agtttatgttgagagattcaatcgacctgaggagaaataaatggcagcaaaggcgtaaagtcgaaggtcccaagaagattgaggaggttcacagagatgcagcacaagaaagacatgcccagtcgagtaggttgggacgtggtccagctgttagttctgttccaagaagagcacatcctatggattatggccctcgtggaccatctgcatcagcatcctcaagttcccaacaagggagcattcgaggaatgcctc

SEQ ID NO: 60676 - DNA, 279 bp, Zea mays
gccatgggctacctcgcgcccgagtacgccgccacggggctgttcacggacaagagcgacgtcttcgcgttcggggtcgtgctcctccaggtcctcacgggaaggatggacgtctcccagctgaaggtcggcgccgcgccgtcagcgacctcggcggcctggtcgacgcgaatctcgacggcgcgttctcgagaacggaggcggcgaggctggcggctgttgctgcgtattgcacgagcgagacgccaggtcagcggccgaccatggaggccgtggttc

SEQ ID NO: 60677 - DNA, 269 bp, Zea mays
aatcctcatcgttctcctttccccaaaggccaaaaccgaccccgctccacgcctccactcccagccccagcggatcttctcgagcggcggccggcgatggcagcgagcaacatcgggatgatggacggagcctacttcgtcgggcgcaacgagatcctcgcgtggatcaacactacgctgcacctcggcctctccaaggtggaggaggcggcgtcaggcgcggttgcgtgccaactgatggacgcggcgcatcccggcgccgtgccgat

SEQ ID NO: 60678 - DNA, 280 bp, Zea mays
ctctatggcaagacaccattcaggggaccggacaatgacgaaacactctcaaatgtgatctcacagggcttgaagttccctgacagtccagcattaagcttccacgctcgagatctgatcagagggctgcttgtgaaagaaccggagtaccggcttggctcgtcgagaggagctgctgagattaagcggcatcccttcttcgaaggtctgaactgggccttgatccggtggacttcaccaccagagaccccgaaaaatattgatactgcagcaacactcg

SEQ ID NO: 60679 - DNA, 261 bp, Zea mays
gattttagccgccgccgctgctcatctcacatccctcgagaagacgcctgctcctcgccgatcgatacgatggccgtcttctccgacctccacaccgccgacggcctcaagtccctcgaggctcacctcgccggcaaaacctatgtgtctggtgactccattactaaggatgacattaaggtcttcgccgcggtgccgtcgaagcctggcgctgagtttcctaatgccgcccgctggtacgagaccgtctctgcggctgta

SEQ ID NO: 60680 - DNA, 284 bp, Zea mays
aagaggtttgctggtttcaagaaggatgacaagcagctggatgctgatatccatcgcaagtacatctatggtggccatgttgctgactacatgaggaacctcgctgaagaggagccagagaagtaccagtctcacttcagtgagtacattaagaagggaattgaggctgatgacatggatactctgtacaagaaggtccatgctgccatccgtgctgatccttctgtggtcaagtcaaccaagcagccaccagaggagcacaagaggtacaaccccaagaaact

SEQ ID NO: 60681 - DNA, 282 bp, Zea mays
caacggcaaggagctgtgcaagaacatcaatcctgatgaggccgttgcctatggtgctgccgtccaggccgctatcctcagtggtgagggcaacgagaaggtgcaggacctgcttctgcttgacgtcactcctctctctctgggtctggagactgccggaggagtgatgaccgtccttatcccgaggaacaccaccatccccaccaagaaggagcaggtgttctccacctactcggacaaccagcctggtgtgttgatccaggtgtacgagggtgagaggac

SEQ ID NO: 60682 - DNA, 282 bp, Zea mays
catcagccatcaggtggcgctggcgggaaagtcacagagatgggactacagataagagagatgatgtacgaaaagattaagatcaataaaataatgtcgagaattactggaaaatctgaggagcagattgatgaagacacgaagtttgattatttcatgagtccttcggaagccaaggattatgggatagttgacaatatcatagatgaggggaaaccagggttggtagctcccttggcaggatctgttccgcctcccaaatcgcgtgtgtggtacttgtgg

SEQ ID NO: 60683 - DNA, 278 bp, Zea mays
gatctcagccatggcggagatcgagagagcgatgtgctgtttcgatctcagccatggcggaggtggagcagccccaggacgcggtgaagctcttcaaccgctggaccttcgacgatgtccaggtgaacgatatctcgctgaacgactacctggctgtgactgcggcgaacacgcgacattcctgccgcactccgcggggcgctactccaagaagcggttccgcaaggcgcagtgcgccatcgtcgagcgcctcaccaactcgctcatgatgcacgggc

SEQ ID NO: 60684 - DNA, 275 bp, Zea mays
gacaggcggtctggcaaggagcttgagaaggagccaaagttcctgaagaacggtgatgctggtatggtgaagatgataccgaccaagcccatggtggtggagacattctcagcgtatcctccccttggtaggtttgctgtccgtgacatgagacagacggttgctgttggagttatcaagagtgtggagaagaaggacccgaccggcgccaaggtgaccaaggcggctgccaagaagaaatgatgcgatcctgcgcctgctttagcaatacctag

SEQ ID NO: 60685 - DNA, 281 bp, Zea mays
caagattgacaagcacatgtatcatgacatgtacatgaaggtcaaaggtaacgccttcaagaactagagggtgcttatggagagtatccacaagtccaaggctgagaaggccagagagaagacactttctgaccagtttgaggccaagcgcgccaagagcaaggcgagccgtgagaggaagatcgctagcagggaggagaggttggcccagggtccacgagaaataacaccacctgtctcatccacagctccagctactggggcaccgaagaaagcaaaga

SEQ ID NO: 60686 - DNA, 278 bp, Zea mays
tcgacattgagaggcccaactactccaacttgaatcgccttgtgtctcaggtgatctcatcgctgactgcttctctgaggttcgatggtgccctcaatgtggatgtgaacgagttccagaccaacctggttccttacccgaggatccacttcatgctctcctcctacgcaccggtgatctcttctgcgaaggccttccacgagcagctgtctgtggcggagatcaccagcagcgcgttcgagccggcttccatgatggtcaagtgcgacccacggcac

SEQ ID NO: 60687 - DNA, 281 bp, Zea mays
cacaacccagtcgctcaaaaccctagagctctcgcctgctcgcctccgccgccggagcgagctccccatcttcatccgtcaaccatggcgacccagatcagcaagaagaagaagttcgtcagcgacggtgttttctacgccgagctcaatgagatgctgacgcgggagctggcggaggatggctactctggcgtggaggtgcgcgtcacgccgatgcgcacggagatcatcatccgcgccacgcgcacgcagaacgtgctcggcgagaagggccgcagatc

SEQ ID NO: 60688 - DNA, 286 bp, Zea mays
agccacaaccacacgttcacggtagcgagagcctatcgtcgtcggcggtgaagatggtgtcgctgaagctgaagaagcggatcgccgctagcgtcctcaagtgtgggaaaggcaaagtctggcttgaccccaatgaagtcagcgagatctccatggctaactcccgccagaacatccggaagttggttaaggatgggtttatcatcaggaagcctcagaaggttcactctaggtcccgtgcaagaagggcacatgaggccaagcagcaagggaaggcactctggat

SEQ ID NO: 60689 - DNA, 278 bp, Zea mays
ctttgttgtctgatggaaactacaatacagacaagatcaatggttcaaaccctgatgactatgagaaatttgagaaagggataatgcactatgggtgtccacattatagaaggagatgccgcataagagctccttgctgcaatgaaatttttgattgccgacactgccacaatgaaactaagaattccattaaaattgataaaatgaagaggcatgaacttccacgccatgaagtgcagcaggttgtatgctcattgtgtggcactgaacaggaggtg

SEQ ID NO: 60690 - DNA, 281 bp, Zea mays
cagcactggaatgtatgtagccaaccgtgcttcagacaagattactcaactgacagacaatgtgtatgtctgtcgctctggatctgctgctgatacacaagtcatttcggattatgtacgctatttcctccaccaacacacaatccagcttggacaaccagctaccgttaaagttgcagccaacttgattaggttgctagcttatcagaacaagaacatgttgcaagctggcatgattgttggaggatgggacaagtacgagggaggccaaattttctcag

SEQ ID NO: 60691 - DNA, 278 bp, Zea mays
accactcgaaagggctgttcttgatggtcgtcaacttgcactgaaaataagtgcaaactcagtttatggtttcactggagcaactgttggtcagttaccttgcttagagatttcttcaagtgtgaccagctatggacgacagacgattgaacatacaaaaaagcttgttgaagataaattcacaacagtaggaggttatgagcatactgcagaggtaatttatggggacactgattctgtgatggtacagtttggtgtttctacagttgaagatgcaa

SEQ ID NO: 60692 - DNA, 285 bp, Zea mays
cattgatatttcatgaaggcaaggcccctaagggcgacagaactgattgggtgatgtatgagtacagaatggaagatgaggatttggtttctgctggtttctcaaaggatgcttatgtactctgcaaaattttcaagaaaagtggccttggtccaagaatcggagagcaatatggggctccatttaatgaagacgaatgggataatgcagaagtcgaaacttctctgtttcctttgacttgttcagaagtgaatccaacagagggacaacgtgctcagcctactg

SEQ ID NO: 60693 - DNA, 274 bp, Zea mays
tgatgctgccccattcaagcagtggtacctcactcactatggagttgacattggtaggaagaagaaaacccctgctgcaaagaaggataatgctgagggacaagaggttgaggcagcagctgaggaaacgaaaaagagcaaccatgtcacgaggaagcttgagaagcgcaaggagggacgtacccttgacccacacattgaggagcaatttggcagtggacggttgctggcatgcatttcttcccgccctggacagtgtggccgagctgatggg

SEQ ID NO: 60694 - DNA, 277 bp, Zea mays
agtggtttggcgttgagggtgattacaatgttttggttatggacttactgggccgagtcttgaagatctttttagcttttgcaacaggaagttgtccctcaaaactgttttgatgcttgctgatcaaatgatcaatcgagttgagttttttcattccaagtcattcttgcatagagatatcaagcctgacaattttctcatgggtctcgggaaaagagcaaaccaggtttatgttatcgattttggacttgcaaagaagtacagagatacatcaaca

SEQ ID NO: 60695 - DNA, 278 bp, Zea mays
agcggtgcttaccacgtgagtcgtgcaagagatatacaacagcaaatcttcagctggctgagttgacgtggctcgccgtggcggtttcagcactggtggtgtcgtcaagaattttttcagtgcatctagggcttcctgtgcttctgaagtccactgaaacttatccaccttcttgagtagcttataaaatggtaagcctttttctcccagcctggatatgaatctgctcagggctgccatgcatccggtaagtctctgaactttcttttgtgatcgtg

SEQ ID NO: 60696 - DNA, 276 bp, Zea mays
gagcgatgcaatggtgaggcgcatcaacgacgcgttcgggcagccaggttaccagccggtgatactgatcgatcagcctctgcagttctatgagaggatggcttactatgtcgtcgcggagtgctgtttggtcactgcagtgagggacgggatgaacctgatcccatacgagtacgtaattgctcgacaagggaatgagaagatagatagtattctaggccttggtccggcttcaaggaagaagagcatgcttgtcgtgtcagagttcatcggctg

SEQ ID NO: 60697 - DNA, 280 bp, Zea mays
agcggaagaaagggaagctaccgaagatgctcggacggtgttactagagtggtggaacacgcactaccgctggccttatcctacggaggaagacaaggtgaggctcgcagcaatgaccggtctcgacccgaagcagatcaacaactggttcatcaaccagaggaagaggcattggaagccatcggaggacatgcggttcgcgctcatggagggtgttgccggtgggtcttctgggacgacactctacttcgatacaggcacaattggaccctgaatcata

SEQ ID NO: 60698 - DNA, 275 bp, Zea mays
gaagagcggcggcgcgggcggacaaggagcaggcggaggaggagttgtgccaagccacaatgggtatctcgcgtgactcgatgcacaagcgccgagccaccggtggaaagcagaaggcctggaggaagaagcgaaagtatgagcttggtcgccagccagccaacaccaagttgtcaagcaataagacggtgaggagggtccgtgttcggggaggtaatgtgaaatggagggctcttcgccttgatactggtaactactcatggggaagtgaagct

SEQ ID NO: 60699 - DNA, 273 bp, Zea mays
acatactctttgtcatctccaaaccagatgtgttcaagagcccgaattccgacacgtatgtcatattcggcgaggctaagatcgaggacctcagctcccagctgcagacccaggcagcagagcagttcaaggctcctgacttgagccagatgatctcgaatccagagacgtctggcccgggacaggaggacaatgatgaggaggtcgacgaaactggtgttgaggccaaggacattgagctggtgatgacccaggcatctgtttcaaggccca

SEQ ID NO: 60700 - DNA, 276 bp, Zea mays
tgtggaaatatggtcatttcaatccaagttctccgcaatgtgaccaacaacttcagcgaggacaacatccttggtcgaggagggtttggcactgtttacaagggtgaacttcatgatggcacgaaaattgctgtaaagcggatggaggctggtgtgatgggtaacaaggggctaaatgagtttaaatcagggattgctgttttgaccaaggttcgtcaccggaaccttgtttcgctgctgggctactgccttgatggcaatgagaggattcttgtg

SEQ ID NO: 60701 - DNA, 275 bp, Zea mays
cctaatactcgccttccaaatggccgctttttgccaccacttttcaatttcaagcctcacgaacttaaaggagtcccatcagacattgtcgcgaaattgattccagaacatgcaaagaagcaatgctcctatgttggattgtgaaatgaccgcgccttgagactggaacctgtggttgcaattgtgcatttcccctgggatgtttgacgatctgaggcatgcgagcctgttgttgaagatgcaaggttacgtacttgtacgacaatgtgacctgt

SEQ ID NO: 60702 - DNA, 282 bp, Zea mays
atagggcgtctgagactctgagacacaggaacagaaccctctctgcgccgccgccgccgttgcagtcgcggccacatcgtcgcctatccatccccaccgctcccactgccacgattcacaagaggtgtcgagatgtctcagaacaacccctcccagctcctcccctcagagctgatcgatcggtgcatcgggtccaagatctgggtgatcatgaagggggacaaggagctcgttggcaccctctgcggctttgatgtctacgtcaatatggtgctggaggac

SEQ ID NO: 60703 - DNA, 270 bp, Zea mays
atcaaccggaaccttctctcattctccacctgcggcctctgaggaagacatgcttcgtgcttctcaagctgtgcttccgtttgcaaactccatgatatcgacggcgcaagtgattttctctggtgaaccttcaatgactctcaaagtattgcctttacttctgttcggtgctaaatatgggggccttgttacagtgtggaggcttttagctgcaggatttttcatcagttttacagtcccaaagctatatagctgttattcaagtcgtat

SEQ ID NO: 60704 - DNA, 269 bp, Zea mays
gactgcgctaccgctgaggcggtcgtcgctctcgggcgccgagcagcagtggaggaagacaaggctcatctccctcatggatgacgtctgcaggcgatacaagcagtactaccagcagctgcaatccgtgatctcctcgttcgagactgttgcagggctgagcaacgcggcccccttcgctttcatggctcttcggacgatgtcgaagcacttcaagtgtctgaaggggatggtgatgagccagctacggaacacgagcaaggtcatcg

SEQ ID NO: 60705 - DNA, 274 bp, Zea mays
agtggaatgaatgatttctttaggaacattttcggggatagggactttggaggacgagatgttaaggttgcactcgaactatcatttgtggaagcagttcaagggtgcagcaaaacggtcaccttccaaacgtctgtaacatgtgaaatctgtggtggagccggtgtgcctcctggaaccacacctgaaacatgtctatcttgcaggggttcaggatttatattcatgcaaaccgggccattcaggatgcaatcaacctgcacaaaatgtggtg

SEQ ID NO: 60706 - DNA, 272 bp, Zea mays
atggtccagagattatgtcaaagctggcaggggagagtgaaagcaatctcagaaaggcatttgaagaagcagagaagaatgctccatctatcattttcattgatgaaattgattccattgcacccaagagagagaagaccaatggagaagtagagcgtcgtattgtttcacagctactgactcttatggatggactgaaatctcgttcccatgttattgttatgggtgctacaaaccgaccaaacagcattgatcctgctcttcgaagattt

SEQ ID NO: 60707 - DNA, 276 bp, Zea mays
agaagagagcaaaagatctcttgtacaaggactacaactttgatcaaaagttttttttgtcgacatgttctaactctggtttgaatctcacagccactggtgtgaagatcaatgaagacttcattggtgatatacggacacggcataaaagcagcagaaccactgttgatgtcataatcgatagtgattctaaagtgtcaaccacagtcactgttgatgaagcactaactggtttgaagacttcatttgccttcaaggttccagatcacaagtctg

SEQ ID NO: 60708 - DNA, 277 bp, Zea mays
tccaaacacttgcgccgccactgcctcacaggtaaggccgccatggtctccggttcgggcgtgtgcgcgaagcattcggtggtggacgcgcgccaccacatgctgggccgtctctcctcgatcatagccaaggagctgctcaatgggcagaaggtggtcgtcgtccgctgcgaggagatctgcatgtcgggcggcctcgtccgtcagaagatgaagtacctccgcttcctccgcaagcggatgaacaccaagccgtcccacgggcccatccacttcc

SEQ ID NO: 60709 - DNA, 271 bp, Zea mays
agtgaacagcggaggagctccaataatctgatgtgggaacatgagctggcatgtttgaggataagaagataggtgatgagttcttttcctttattgttgactataaagatctgaaggcatgtactattctattgaggggagcaagttgctaattggtgcccactaatagtctggtgatctagccgaatgaaattgtcgacaaggccattagcatcatgcaggttacctccaagcatctcatgtatatctgcaaggagaatctgcacccacg

SEQ ID NO: 60710 - DNA, 276 bp, Zea mays
ctaaccaccaacacatcggtcacgcctctactgtccgccgagacgctccccctggccagaaggttggtctcattgccgctaggaggactggaaggctcaggggtcaagctgctgccacagcctccaaggctgacaaggccacctagagttattgtcgttgtttatctgtctactgtgctttagattgttaaaggacatgtgtttcagaacggatgtgttgttgcctcgtactatggtgaaacattgtctcagtttttgtggtcgctgtcaggattt

SEQ ID NO: 60711 - DNA, 282 bp, Zea mays
caagttcaggtgatggccgtgatgcgaacttctgatcctgcttatcgaattttgactacggattactactttttaagactacatatccagtcttgatggctgaatgacgaccctagttatcgagacgcaaaaccttttgttgtatgtgttccttttacagacttccttggcttgtcatgaatttctaatgtgaacttgtgctgtgaacttgttgcaaaacctcttgaacctgaagcattcaacatgctgtgaacttgtgcagctgctcttcttctgcatgag

SEQ ID NO: 60712 - DNA, 286 bp, Zea mays
agtggctatgaagtgcaaattgaaacgctttgctccttctgtttttcagataaggtatggcggttacaaaggtgttgtcgctgtagatacaagatcaaatcataagctttctttgagaaaaagcatgtcaaagttccagtcagaaaatatcactcttgatgtccttgcatacagcaagtaccaaccatgcttcctgaatcggcagttgattactcttctctcaacacttggggttagcgataatgtctttgagctaaagcagaaggaagccttaaggcagttgaac

SEQ ID NO: 60713 - DNA, 286 bp, Zea mays
aatggagctggatggaaaggcttgcgctgctgttggtcagagtggcctcatggctctttatgatatgctatttacccaacttgatgtgtcctcctcgcaacttcttgtgacagatagtgattttgagaatccaaactttcgggagaggctctgtgaaactgttgagtcactattagaccttaaagttgtaccaatatttaatgaaaatgatgccatcagcactagaaaggctccatatgaggattcatctggtatattctgggataatgacagtttagctggtctt

SEQ ID NO: 60714 - DNA, 286 bp, Zea mays
cttgccctcttccgttccgtctcattctcatccccgacccccgcaccgcagcgtaaaccctagtccccggcggcgaccttgcggcctccgctgcgctctgactggtgcgcgtttagacgaggagctgcggcggccaagaccaatcgaccatggctacccgtatccagtttgagaacaactgtgaaattggtgttttctccaagctgacaaatgcttactgtctggtagcgattggagggtcagagaacttctacagtgcctttgaggctgagcttgcagatgccat

SEQ ID NO: 60715 - DNA, 101 bp, Zea mays
tctgacatgaggcaaacggtggctgtcggagtcatcaagagtgtagagcacaaggatccaactggagccaacgtgagcaaggctgccgcaaagaagaaatg

SEQ ID NO: 60716 - DNA, 286 bp, Zea mays
agatacacctagattacaagccgccaagcggaaattagcagcaacattacaggagaactacaagccatgcatagacgctacatcgaccgacccaccccttggcaatcagcaacaaaaattccacaacaatgtccttgcaccgcaacactgcaatatactcccacggtccgacgattggataggaccccacagtcgtccatggaagtgtgtaatccatgaaccgaggcgatacatgccgtcagccatgaacggcccgtccatgtacagagcagcggcgttctgcggg

SEQ ID NO: 60717 - DNA, 294 bp, Zea mays
ctttggccagttgaatccacgtagtcaaggagttgagacattaggaacaatatacagttcctcactctttccaaatcgtgctcctgacggtagggtgttacttctaaactacataggaggtgctacaaacacaggaattgtttccaagactgaaagtgagctggtcgaagcagttgaccgtgacctccgaaaaatgcttataaattctacagcagtggaccctttagtccttggtgtccgagtttggccacaagccatacctcagttcctggtaggacatcttgatcttctgga

SEQ ID NO: 60718 - DNA, 287 bp, Zea mays
cttcttcccaaaaggacgacgacaacgactacaggaagacggtcaattcgaacttttcgtttgattattctcgtattccacatagttcgaattcgcatttgctttccattcctcttggtaaacctccacactttgatggggaggactacggattttggagtcacaaaatgcgtagtcatttattctctctccatccaagcatatgggagattgtagagaatggaatgaaatttgatagctcggatagccctatgtttatcaatgaacaaattcataaaaatgcacaa

SEQ ID NO: 60719 - DNA, 285 bp, Zea mays
ggttgtggtctctgaccgcgtggtggactccccctgctgcctggtgacgggcgagtacggctggacggccaacatggagaggatcatgaaggcacaggcgctcagggactcgagcatgtctgggtacatgtcctccaagaagaccatggagatcaacccggagaacgccatcatggaggagcacggcaacgcgcggaggccgacaagaacgacaagtctgtcaaggaccttgtcatgcttctgttcgagacggcgctgctcacctcgggcttcagccttgacgac

SEQ ID NO: 60720 - DNA, 283 bp, Zea mays
atttcaagctgcccgtagtatcatgaactggcttggtgactgtgccaaggtaattgcttgtgaaaatgaaccagtgagatggacgactcctcttgggctcccagttgtacaaccatatcgcaaacttgggaggcatcttattaaaacgtcattgcaggttttgacccttcagcgggagacggataaggttatggtgaagcggcagaggacagctttccctccaaactttgtgcattctcttgatggttctcatatgatgatgactgctgttgcttgcaaaagg

SEQ ID NO: 60721 - DNA, 280 bp, Zea mays
agaaactagctgaagatgttaatttggaactcatttcaaaagatacccatggatatgttggtgctgatcttgctgccctttgcactgaggctgctcttcagtgcattcgtgagaagatggacatcatagatcttgaggatgagacaatcgatgcagagatattgaactcaatggctgttacaaatgaccatttcaagactgcgcttggaacaagcaacccatctgctcttcgtgaaactgttgtcgaagtcccaaatgtctcttgggaggatattggtgg

SEQ ID NO: 60722 - DNA, 196 bp, Zea mays
acactactgcgcagtcacccactacaggtaaggacgcggacgagggcacgatgtcgcaccgtaagttcgagcacccgaggcacggctcactcggcttccttcccaggaagcgctcctcccggcagcgcggcaaggtgaagtcatttcccagggatgaccccaagaagccttgccatctcactgccttccttggcta

SEQ ID NO: 60723 - DNA, 281 bp, Zea mays
aattcaatggcaagctttctgattttggattggccaagctcttgggtgcagggaagagtcatatcacaactcgagttatgggaactttcgggtatgtggcccctgaatatgccaacactggtctgttaaatgagaggagtgatgtctacagttttggagtgctactactggaatcagttactgggagggacccagttgactatggtcggccagctaatgaggtacatctggtcgagtggctcaaaatgatggttggcacgagaagagctgaggaggtggtg

SEQ ID NO: 60724 - DNA, 288 bp, Zea mays
acattttagatattgaatcatctcatggtgatatgttcactgaggaacaaaatgagctcgtagaatcagctgcagagatgctttatgggctgatccatgcacgatacattctgaccagtaaagggctggctgcaatgctggagaagtataggaactatgacttcgggcggtgcccgcgtgtttactgctgtggtcaaccatgcctgccggttggacaatcagatattcatcgatctagtaccgtgaaaatatactgccccaagtgtgaagacatctactacccacggt

SEQ ID NO: 60725 - DNA, 282 bp, Zea mays
agcagaggtgaatgccatcaagcaagtcttcaaggacccatctgggattaaaataaatgcaaccaagtccatgataggacattgccttggcgcagaggcggtttggaagccattgctactattaaagcgataactactggatgggtgcatccaagcataaaccaatttaacccagaggaagcagttgaatttgacactgtacctaatgtaaaagagcagcatgaagtgaatgttggtatctcaaattcctttggatttggaggtcacaattctgtcgtagta

SEQ ID NO: 60726 - DNA, 279 bp, Zea mays
agaaaattgattcctctgaattgattaccatgaagacactaaaggaaacaggtcgccattgggaagcacatataagatggaattcgtttaatcgggccgtggagcagaagaaatcaaatggcctattcaccttgaggtgtcaagggcaactgcaagggccaaagctgccgtggaagctgctggtgggacagtaaggctggtgtactacaacaaacttggattccgggcactcctgaaacctgagtggtttgagaagaagggccgcctgttaccaaaagc

SEQ ID NO: 60727 - DNA, 277 bp, Zea mays
agaagttttacccctagctatatctcaaaagctattgggacgacaatgtactctgtaaactgggaaatatatcatcaataaaaagacttctaaggcattcgaattgttcactgtcaacctacatgcttacttaactcaaggtgaccactataccctactaacggagcaatcggcttaagttggcaatgacttaaggcggtgtgacatgctcacgcttacttaactcggggtgaccactatagcctactaacggagcaatcggcttaagtcggcaatg

SEQ ID NO: 60728 - DNA, 276 bp, Zea mays
aggctcgaggaaagattgtctgtgaaaacacactggatgctagattgcaggtagttttcagaaagaagctgccagagattcgtcagagccttttcgggcaggtagctgcgtaccaattcttgaaaggagaacgtggcccagtactctttggggtaccctgacgatgtccaggagaagctttggcagctctcaattgtgatttatcacacttttggatctcgattattattatttgtgtatacttttttcctggacatggatacctttgaatcctgc

SEQ ID NO: 60729 - DNA, 283 bp, Zea mays
atgcatttcaaagaagacgtaagtgggacaagaggatgctggaatttgttcaacacgtggataaacccttaatctggtgtggggacttgaatgtcagtcatgaagaaatcgacgtcagccatcctgatttctttagcagcgctaagctgaatggatacaccccacccaataaagaggactgtggacagccaggattcaccccagcagagagacggcgttttggcaacatattattccaaggaaagctggtagatgcttacaggcacctgcacaaagaaaaggg

SEQ ID NO: 60730 - DNA, 280 bp, Zea mays
atgacgcccgaggacggtttcagctatgccagttacgaggttatgggcttggatgccactgctctatcttatggtgaccttgtcaagagggtcctccggtgctttggcccctcggagttttccgttgccgtgaccatcttcggcgggcgtggccatgccgggacatggggaaaggcactaggtgcagaggtctatgactgcaacaacatggtggagcaggagctgcctggaggcgggctcctcgtataccagagcttctgcgctgctgaagacgctgttg

SEQ ID NO: 60731 - DNA, 291 bp, Zea mays
ctttcagcacttaagtgctaagacattgaagttggatgttttacaaagaatgaaagttgaaatcccaatcattttgtgcaagcttgagaaaatatttcctccttctttctttgatgtgatgctgcatttggctattcatttacctgacgaggcaatcctaagaggaccagtgcaatatggcgaatgagtatccggtggaaagaaggttgtatacattgaaacgttttgtaagaaatatggctagacctgaaggatccattgcagaagcatatgttgctaatgagtgcttga

SEQ ID NO: 60732 - DNA, 276 bp, Zea mays
cgagaagagcggcggcgcgggcggacaaggagcacgcggaggaggagctgtgccaagccacaatgggtatctcacgcgactcgatgcacaagcgccgtgccaccggtggaaagcagaaggcctggaggaagaagcgaaagtatgagcttggtcgccagccggccaacaccaagttgtcaagcaataagacagtgaggagggtccgtgttcgtggaggtaacgtgaagtggagggctcttcgccttgatactggtaactactcatggggaagtgaag

SEQ ID NO: 60733 - DNA, 278 bp, Zea mays
acagcagagaacattgcagcactccttacaccacagtccggggcttattatgacctgtgggtggatggcgagaagataatgtcagctgaagagcctcctgaggtgacaaaagcccgcaatgacaactcgcatggaacgaacttccctgactctccggaaccaatctatggcacccagtatctaccaaggaagttcaaggttgcagttaccgcggctggtgataactctgttgatattctggccaatgacatcggtgttgttgttgtctcagatgatgc

SEQ ID NO: 60734 - DNA, 260 bp, Zea mays
ctaccatgccccctgaggcccttgagattacccgcaagttcatgaacaagccagtgagaatactcgtgaagagagatgagctgactcttgagggtatcaagcagttctatgactatgtagataaggaagactggaagctggacacactgtgtgacctgtacgagacccttgccatcacccagagtgtcatctttgtcaacacccgccgcaaggtggactggctcactgacaagatgaggagcagggaccacactgtttct

SEQ ID NO: 60735 - DNA, 280 bp, Zea mays
tcgagcgaattcggctcgagacatgccaaagggttcactttttgataatttacaccagcaaaacagtgacaaaaaggcattggaatggccattgaggctaaaaattgccattgggagtgctagaggtttggcgtggcttcatcacagttgcaaccctcgcattcttcataggaacattagttccaagtgcatattgcttgatgatgactatgagcctaagatttccgattttggcttggcaaggcttatgaatcccatcgacacccacctgagcacattt

SEQ ID NO: 60736 - DNA, 280 bp, Zea mays
  unsure (1)..(280): unsure at all n locations
atccaatgcaactcaacctatatctaccagggtaatgggcactttcgngttagttgctccagaatatgcaatgacgggtcatcttcttgtgaagagcgacgtctacagttacggggttgtcttgctggaacttctatcaggaaggaagcccgtaagcatctccgagtcgaaggatcccgagaaccttgtgacctgggcccgtcctctgctaagccacaaggagggcctggagaagttgatcgacccttctctggaagggaacttcaacttcgacaacgtg

SEQ ID NO: 60737 - DNA, 283 bp, Zea mays
tcagaaaggtcttcttgcgaacctgcacaggaaataagtttggaggagcttgcagaactcattcctataaaacctggaaaaaaacccagattgaagatagaatctgatgctattgatgcttcagatgggctggacacgcttgcaaaccttgcaattcttggcgaaggtgaagcgctcccttcgcagccaacaacaaaacatccccgccaccgtcccggctgctcatgcatcgtctgcatccaaccaccaagtgggaagggtccaaagcacaagcagacatgca

SEQ ID NO: 60738 - DNA, 276 bp, Zea mays
cactgggttaagtctattcccgtggaaacaacttctaaaaaaggaagcagaaccagctgatattgatagttttgttcatcatttatccgataatcacgtatttccaaacaaagttttggtggactgcacagcagatacaagtgttgcatcccactattataattggttaaagaagggtattcatgtcatcacaccaaataagaaagcaaattctgggccacttgatcagtacctgaaattgcggactctgcaacgtgcctcgtacactcattactt

SEQ ID NO: 60739 - DNA, 275 bp, Zea mays
gcctgcgccacagctgccgattcgaaagccctcgtcctgacccctcgcaaaaccctagctccaaccaccatgaagggcaaggccaacgcctccaagaaggccgccgcgagcggcaagcccaagcgccctccctccgccttcttcgtcttcatgtctgaattcaggcaggagtaccaggcgcacaccctggcaacaagagcgttgcggccgtgagcaaggcagcaggggaaaagtggcgctctatgtcagagcaagagaagcaaccctatgtggac

SEQ ID NO: 60740 - DNA, 281 bp, Zea mays
cgcaaaggcaaagccaccacagcgtcgtcgtcttcgtctccagtccaagcaagcgaagagcacccctcgagatctctccctccccgcgccgccatggacgcagttgactcggtagtcgacccgctccgggagttcgccaaggacagcatccgcctcgtcaagcgctgccacaagccggaccgcaaggagttcaccaaggtcgccgcgcgtactgcgatcggcttcgtcgtcatgggattcgtcggcttctttgtcaagctcatcttcatccctatcaacaa

SEQ ID NO: 60741 - DNA, 280 bp, Zea mays
agatcatcaaaagcaagcgaaggcacatctgcttgaagttgaaccttttgagcatgcttttgggccaaagggcaagaggaaacgtccgaaactaactgctcttgactacgaatctttgctgaagagagctgatgattcccaagatgtgtttgagcaaaagtatgcttcatcaaagttgccaagggaggaagaagaagatggcttacgtgatctagtgaggcatacaatgtttgagaagggacagagcaaaagaatctggggtgaactatacaagttattg

SEQ ID NO: 60742 - DNA, 255 bp, Zea mays
ctaagaagctgacatatgagcagaggaaggccagcctcattgaaaggctcaaccaactcaactcctccggtggtgctgatgacgacgatgaggacgacgagtaaagttaattgccatcgaagtagtgctatctcaatccagcgatcagcaattgtgtactgtcttatgcggggacctgtagtactgcaataggcatttttgtttaagtctctcgttcgtgaacaaaactgtttctgttagtttcgagcttgagct

SEQ ID NO: 60743 - DNA, 272 bp, Zea mays
gtcagagcgtgtacctgttgttgggaagtttttaaatttgttgaagtttacagttaaagaggttgacacaactacgggggaagctgatgaggatggtgtggaggatgaataccagttagaggactttgaaattgtttcagctgattatatgctgagggttgttgtctccaacttcaggaacgcctgggaaaatatggacccagatagtgagcgtgtcgatgagtatggactcggggttagagaaagtttggactgaggctgtcaatgctgtc

SEQ ID NO: 60744 - DNA, 277 bp, Zea mays
ccaccacaggacaccttatctacaagcttggaggcattgacaagcgtgtgatcgagaggtttgagaaggaggctgctgaaatgaataagcggtccttcaagtacgcgtgggtgctcgacaagctcaaggctgagcgtgagagaggtatcaccattgatattgctctgtggaagtttgagaccaccaagtactactgcacggtcattgatgcccctggacaccgtgacttcatcaagaacatgatcactggtacctcccaggctgactgtgctgtctt

SEQ ID NO: 60745 - DNA, 277 bp, Zea mays
atccttcaagcgcaagctgcctcctcctcgtcgtccggtcgtgagaagggatggcgggccgtggcaaggctatcggcgctggcgccgcgaagaaggcaacgtcgaggagctccaaggccggactccagttccccgtcggcaggattgctaggttcctcaaggcgggcaagtacgctgagcgcgtcggcgccggcgcccccgtgtacctcgccgccgtcctcgagtacctcgcggctgaggttctcgaacttgccgggaacgccgcgagggacaacaa

SEQ ID NO: 60746 - DNA, 274 bp, Zea mays
cggctcgagatcctgttggcagggatgatgcttcacaactctctgctctgcaaatcttggttgagattggattcatcgacaatcctgagtcctgcgtcgaatggatatcacttttagagagatttcttcctagacaagtggcgattaccagagcaaagcgagattgggagcttgacatcatttcacgctttcagttaatggaacatttatcaaaagacgatgcacggcaacaatttctcagaatcttaaggactcttccatatgggaactctgt

SEQ ID NO: 60747 - DNA, 274 bp, Zea mays
gttctagatcgcgagcggccggagacgggcgtgagagaggtggaaatcccgcggccttcgtgttcgtcccgcgcccaggtcgggtgcgcttgcagtagggggttacaagcgtccacgcgggagaaggagcgagcggcctcacgcgagcgcctgtcccgtcctcgtccccgcgcggctaaccttctgtaagagggccctggtccttccttttataagcgtaaggagaggatccaggtgtacaatgggggtgtagcagagtgctaacgtgtctagc

SEQ ID NO: 60748 - DNA, 271 bp, Zea mays
atggtggtggcaaaagaaagggagcatttgctgtatatttggagccttggcatgctgatatttttgagttccttgatctgagaaagaaccatgggacggaggaaaatcgtgcaagggatcttttctatgcgctatgggttcctgatttattcatgcaaagagtccagaataatggagaatgttcattattttgccctaatgaagctccagggttggctgattcctggggtgaggagtttgataatttgtacaagaaatatgagagccaggc

SEQ ID NO: 60749 - DNA, 266 bp, Zea mays
agcgccgggccaccggtggaaagcagaagacgtgcgcaagaagcgaaagtatgagcttggccgccagcctgctaacaccaaactgtctagcaataagacagtgaggagggtccgtgtccgtggaggcaacgtgaagtggagggctctccgattggatacaggtaactactcgtggggaagtgaggctcttacccgcaagacccgcatcctggatgtggtctataatgcatcaaacaatgagcttgtgaggactcagactcttgtga

SEQ ID NO: 60750 - DNA, 271 bp, Zea mays
gcggaaggcgaaagagtagcagcagcaggcggcgccgagtagcggctccccacctcgagcttgccaccatggctagaggattgaagaagcatttgaagaggctcaatgcgcccaagcattggatgctggacaagcttggcggagcttttgctcccaagccatcttctggacctcacaagtctagggagtgcctgccactgatcctcatcatcaggaacaggctcaagtatgctcttacataccgtgaggtcatttccatcctgatgcaacg

SEQ ID NO: 60751 - DNA, 274 bp, Zea mays
gttcccttcaaggtcaaccaccagtgttcatctgggctacaggaagtagccgatgtcgcagctgctataaaggctggttactatgacatagggattggtgctggtttggaatccatgtccataaattccattgctagggaaggacaagttaacccaaaaataagcgcattccagaaagcacaggattgtcttctgcccatgggaattacttctgaaaatgttgcccatcgatatggtgtaactagacaagagcaagatcaggccgcctctgagt

SEQ ID NO: 60752 - DNA, 263 bp, Zea mays
gtagtgacgatattcaggatcatcagcacagactgctagagatcaagcggttctttgaagattataagaagaatgagaataaagaggttgctgtcgatgcattcttgcctgcgaccacagctcgagaggccattcagtactccatggatctgtatgcgcagtatattttgcaaagcttgaggcagtagattggaagcaactatttatctgggcgtcttggaatgagtgtgattttaataagtcaaaacactgatattgtgtgc

SEQ ID NO: 60753 - DNA, 270 bp, Zea mays
aattcggctcgagaacttcgatttctagatgtgtgcgcatgctggaatgatcgggactacgaggccaactcactatcacatcctgcatgatgagataggcttcagtcctgatgatctgcaggagctggtgcattcgctctcttatgtgtaccaaaggaggacaacatccatatcagtcgttgctcgcatctgctacgcacatctggcagctgctcaggttggccagttcataaagttcgatgagatgtcggagacgtcctccagtcatgg

SEQ ID NO: 60754 - DNA, 266 bp, Zea mays
cgtgagaagcagcgcaaatttgttgaaaccattgagctacaaattggactgaagaactatgaccctcaaaaggacaagcgcttcagcggttctgttaagctgcctcacatccctcgccctaagatgaaggtttgcatgcttggtgatgctcagcatgttgaggaggcagagagaatgggtatagacaatatggatgtggaagccctcaagaagatgaacaaaaacaagaagctagtgaagaagctggcaaagaagtaccatgcttt

SEQ ID NO: 60755 - DNA, 266 bp, Zea mays
gattttagccgccgccgctgctcatctcacatccctcgagaagacgcctgctcctcgccgatcgatacgatggccgtcttctccgacctccacaccgccgacggcctcaagtccctcgaggctcacctcgccggcaaaacctatgtgtctggtgactccattactaaggatgacattaaggtcttcgccgcggtgccgtcgaagcctggcgctgagtttcctaatgccgcccgctggtacgagaccgtctctgcggctgtagctca

SEQ ID NO: 60756 - DNA, 274 bp, Zea mays
acagcttgcccaagtatgaggcatcacatgaattccagactaagaaaaagcgtcagcaacagaggcaggcagaggaagctgcaaagcgtcaaaaacttaatcatcctccaccacattctcgcttgcctccaatccagcagccagggcaagcacatcctcaaatcaggcctggccagggtatgcacaatgtgcctcctgtggcagctgggccaggccatcactatacaaagccccgaggaccaggaggccctaaccggtatcctccgggtgggaa

SEQ ID NO: 60757 - DNA, 269 bp, Zea mays
aaccggaggaacgaggatggaggatgactcgccgctgacgaagacgatgaagggtgcggtgacaggactcgccgcggggaccatctggggcaccgtcgtcgccacctggtacgacgtgccccgtgtggagcgccacgtcgcgctccctggccttatccggacgctcaagatgtgcggcacctacggggccaccttcgccaccatcgggggcctctacatcggcgtcgagcagctcgtgcagagccagcgcaagatgcgcgacttcgtca

SEQ ID NO: 60758 - DNA, 275 bp, Zea mays
gtgagctttatagattggttctagtcgatacaccactggccccttacttctcagagtgcattacatctgaggatttggatgacatgaatattgagattatgaggaacactctctacaaagcatatcttgaggacttctacaaattttgccagaaactaggtggtgcaacagctgacatcatgtgtgatctcctttcatttgaagctgacagaagagctgttaacattacaataaatagtattggtactgagttgacaagagatgaccgcaggaag

SEQ ID NO: 60759 - DNA, 228 bp, Zea mays
gaaagattctttccccatctggtcgtttcacttcaattctctctataggaatcggagggtcagctttgggccctcaatttgttgccgaggcacttgcacctgataaccctccactgaagataagatttattgacaacacagatcctgctgggattgatcatcaaattgctcaactaggacctgaactggcaactactcgtgaaagtgacatttctaagagcggcggca

SEQ ID NO: 60760 - DNA, 266 bp, Zea mays
gggtttgaagcagaagaaggctcacctgatggagattcaggtcaatggtggtaccattgctgacaaggtggactatggctacaaattctttgagaaagaggtccctgttgatgctgtacttccagaaggatgagatgattgacatcattggtgtgaccaaggggaaaggttatgagggtgtggtcactcgttggggtgtcacccagcttccccgcaagacccacaggggtctccgcaaagttgcttgtatcggtgcatggcatccg

SEQ ID NO: 60761 - DNA, 264 bp, Zea mays
cgcaaatcaagtacttggtgtctgagggctgcatcgtgccgctgtgcgaccttcttgtttgccctgatccgagaattgtaacagtttgtctggagggtcttgagaatattcttaaagtaggggagcacgacaagaccatgggcgcaacaggtgacattaatgttttcgctcagatgattgacgacgcggaaggcctggaaaaaatcgagaacctacagagccatgataataatgaaatctatgaaaaggctgtgaagcttcttg

SEQ ID NO: 60762 - DNA, 178 bp, Zea mays
gtcaagacaatattattgctgatgctttgtctcgtcgctataccatgctgtcacagttagattttaaaatctttggtttggacactgtgaaggatcaatatgttgacgatgctgattttaaagatgctttcggccattgtattaatgggaaaccatggggcaaatttcacatacagga

SEQ ID NO: 60763 - DNA, 232 bp, Zea mays
gggcaagggctcgaagtctggtgcctcaatgaggtgccctggttgccaggggtcaggcatgaaagtcactattcgtcagctgggcccttccatgatacagcagatgcagcagccttgcaatgagtgcaaggggactggtgagagcatcaatgagaaggaccgctgcccagggtgcaagggtgagaaggtcgttcaagagaagaaggttcttgaggttcaggttaagaagggg

SEQ ID NO: 60764 - DNA, 266 bp, Zea mays
tggtgtcactgattgggtactgcgaggagaagaatgaaatgatcctggtctacgattacatggcccatggtactctccgtgagcacctgtacaagacccagaagccacctcttacctggaggcagcgtttggatatctgtattggtgcagctcgtgggcttcactaccttcacactggtgcaaagcacaccatcatccaccgtgatgtgaagacaacaaacatcctgctggatgagacatgggttgccaaggtttcagattttggt

SEQ ID NO: 60765 - DNA, 264 bp, Zea mays
tgatggttcataccatataattaccgacacgggaagctaccctactgcttggcaaaagccaaactgaacgtaagatacaaattccaactacctctagctcgcttgtgtggtatctgtatcagtattcatgtgtttgtttgcttatgtgtttgtttgcttgtatttgctggtgcttgtatcgcgggatgcaatgagttgttgtttggttgttgtcaaaaaaaaaaaaaaaaaaaaaaaaaaaaaaaaaaaaagggggggcccccc

SEQ ID NO: 60766 - DNA, 260 bp, Zea mays
cattaacattttatttttatatttgtaggaagagttcgatgcaacccggtggcttgatagatctctcatacgtctttgttcaagatttggggattaccggaaggatgatccctcttcatttagcctgcattcaaatttctcattgttccctcagtttatgtttaatcttcggcgttcacaatttgttcaggttttcaataacagtccagatgagacagcttatttcaggatgttactcaatcgtgagagtatcactaact

SEQ ID NO: 60767 - DNA, 260 bp, Zea mays
gagcgctacgtgtacaagcgccgcactgatggtatctacattattaaccttggaaagacctgggacaagcttcagttggccgccagggtcatcgttgccattgagaatccgcaggacattatcgtgcagtctgctaggccctatggccagagggctgtcctcaagtttgcgcagtacactggtgcccatgccattgctggcaggcacactcctggtacattcaccaaccagttgcaaacctccttcagtgagccacgcct

SEQ ID NO: 60768 - DNA, 246 bp, Zea mays
gtagaatgaatttatggtaaattgggatgggttgcgcactaaagataaggagcgtgtgcttgttcttggtgctacaaatagaccttttgacctcgacgaggctgtgattaggaggttcccccgcaggttaatggtgaacttgcccgatgcatcaaacagagagaaaatcctaaaagtaattttggcaaaagaagagctgggatctgatgttgatatggactcgcttagcaatatgactgatggtta

SEQ ID NO: 60769 - DNA, 263 bp, Zea mays
tctctcacccgactcgtcagacgtcagccagcagttcgaaaccaaggattgatccaggagcttccggaaggcgaggcgcgcgcgcaggtcgaggtgctggtgccggtgccgcccatggatcgggctcgcggatccgcgttcctgctcggcgtcctgctcgcaggatccttgttcgcgttttcagttgccaaagaggagaccaagaagctcgggaccgtgatcggtatcgatctcggtaccacctactcctgtgtcggtgtgta

SEQ ID NO: 60770 - DNA, 125 bp, Zea mays
agatcctatagggttcctcccttctttgacgaatacatccgggctgacaatgactttcgtcaaagaagggaggaagcctataggttctctgagatgaccaggggcttcggaggaagaatccaccc

SEQ ID NO: 60771 - DNA, 91 bp, Zea mays
tgctgtcggtctggttcgcccagttagcgttgccttcgaggtgatcactggtttcaggctgtacaagagcggagtttacactagcgaccat

SEQ ID NO: 60772 - DNA, 263 bp, Zea mays
gattaacattttatttttatatttgtaggaagagttcgatgcaacccggtggcttgatagatctctcatacgtctttgttcaagatttggggattaccggaaggatgatccctcttcatttagcctgcattcaaatttctcattgttccctcagtttatgtttaatcttcggcgttcacaatttgttcaggttttcaataacagtccagatgagacagcttatttcaggatgttactcaatcgtgagagtatcactaactcgg

SEQ ID NO: 60773 - DNA, 261 bp, Zea mays
tataagaaggatgacaaagaccagcaacatgaagccatctgcgtcactattgtgggtacttatttcttgctgaacgccgagaactaccattggcaatggacgtcgttttcttctgcagcgtcaaccgctctgtacgtgtatctgtactccatctactactaccatgtgaagacaaagatgtcaggcttcttccagacaagtttctatttcggctacacgctgatgttctgccttggcctaggcatactttgtggagctatt

SEQ ID NO: 60774 - DNA, 261 bp, Zea mays
actcgagcgaattcggctcgagatgtcattctcagttgttgaggtatgatatacagcagttctaaaatatggtgtgtagtataacgtttgaaggagagagttcatataacaggtagcaccttgattcttaagacctacaaaacctgtttcttttttcgagtcataagtccaataatcaaccattctgcggacagcaacctcagcttcgataacaacagtgtcattcacaagataacccctgtttgggtcatataggtcact

SEQ ID NO: 60775 - DNA, 258 bp, Zea mays
tggtctcatcagcgaccctgttttctctttctggtttaaccgacatgctgatgaaggagaaggtggtgaaattgtgtttggtggaatggattctagccactacaagggcgatcacacgtttgtcccagtcactcggaagggatactggcagttcaacatgggtgatgtcctggttgatggaaagtccactgggttttgtgccggtggctgtgcagccatcgcagattctggaacttccttgcttgctggccccacagc

SEQ ID NO: 60776 - DNA, 212 bp, Zea mays
gtcggcgatggtggaactggtaaaactacatttgtgaagaggcatctcactggagagtttgagaagaaatatgaaccaaccattggtgtggaagttcatccgttggatttcaccactaactgtggtaagatcaggttctactgctgggataccgcagggcaagagaagtttggtggcctcagggatggatactatatccatggccagtgtgc

SEQ ID NO: 60777 - DNA, 257 bp, Zea mays
accacaccattttgctgtggtgtgtagggagcggagaactcgtgcttgattccttcctcctcaagatactccaccacttgaaggttcttgaacttggacccgttgtcgctccttatctttttcaccttgagctcaaactcattttgagctctccttagaaagcgcttaagggtcccttgggtttcagatttatcctgcaaaaagaatacccaagtgaagcaggaaaaatcttcactataacaagaccatacttactt

SEQ ID NO: 60778 - DNA, 259 bp, Zea mays
cctctgcaaccctcagtattgttcaggtcttctggggtgtagctaataagctcgctcaaagggagcatttcccatctgtgaattggctcatttcctattcgaaatactccaaggaccttgagtccttttatgagaagtttgatccagattgcattgatattaggacaaaagcacgtgcggtgttgcatagggacgccgatctagatgtacttgtgcagcttgttggtcaagatgtgctggtcagaatctgactagatta

SEQ ID NO: 60779 - DNA, 259 bp, Zea mays
gtaatgataaaattgatgaggataagctcttcaatctgttttccttgtacggaaacatagttcgtatcaaggtactgcgtaataaaccagatcatgcccttgttgagatggctgacgggttgcaggctgagctagctgtgcattatttgaagggggctatactatttgggaagaagctggaagttaactactcaaagtaccctaacattacacctgccccagacgcccacgactacttgaactcgagcctaaaccgatt

SEQ ID NO: 60780 - DNA, 121 bp, Zea mays
gcagcactgtctggccaccgaagtcggagctgcggcccgggatccgggcggtacgctcttcgaccgcaaagggatgaagtacaaccatgtgaagcttctcatgcgtttcgagtttgcctag

SEQ ID NO: 60781 - DNA, 257 bp, Zea mays
ttggtgctggtatcaatgctagctttgctgttcaccaggatgttgatggaagggcaacagatgtagctctagggtggtcagtagctttaggttctcctttcacatttgctactactctagagcaggagtaccggagtgacatttttggcgagcgaggtattttgcttggtgctgtccatggcatggtggaggctcttttcaggagatacacagaacaaggaatggacgaggactcagcatataagaatactgtagag

SEQ ID NO: 60782 - DNA, 259 bp, Zea mays
ctagattcttatgagattgaaggcggtgagacaaaagcagagatattgcaaaacctagctgagttccagtgttcttgtgtcatgtacaatggtgccctagagaatgcatgcagtgagcttggagcccgtatgtctgccatggacagctctagcagaaatgctggcgatatgcttgatcgtctcacgcttacttacaacaggacacgccaagcatccatcaccacagagcttactgagattatatctggtgcatcagccc

SEQ ID NO: 60783 - DNA, 258 bp, Zea mays
  unsure (1)..(258): unsure at all n locations
cattctcacaggctgttaatcggcgcgacgctgaccttgtctacttctggcagaagtaccggaactcggcagacagctcacatgagacccctgaagctcggagcgcgttgcttgaagtgatggcccacaggtctcatgttgacagcagtgttgagctcattggaagccttctctttggctctgaggacggtccaagggttctgaaagccgtccgtgcagctggtgagccaaagccagaagnatggagctgtctcaagt

SEQ ID NO: 60784 - DNA, 246 bp, Zea mays
attagatcgtacagcgaggatgacatccacaagagcgtcgtgtacaatgtgtgggcaagcacaaccaacggatccaagatgcttgatgcggcttaccaagaagctcagtcaaagggatctgcatgccctatattctggttcttctcagtgaatacacgtgggccgtgtattggtgttgctgaaatgactggcgccgttgattttgagaaaaccctcagagtattggcaacaggacaagtggtacga

SEQ ID NO: 60785 - DNA, 256 bp, Zea mays
cttcctcatcatcatcctcttcttcatcctcatcatcttcgtcatcgtcttcatcatcatcatcttcatcatcatcgcccaactcaccaaaatcctcaccttgcacagcctcaccagtaaaccaggaaactgcgtgagggataatcttatcccttatggtggtcccaatgtcataatcatgctccatttgactctgcagctcatcagcagtgtcttcatcgatgtcatcatcatcttcagggacctgcgggggatt

SEQ ID NO: 60786 - DNA, 255 bp, Zea mays
atcaaacattcttcttggagaaggatttcatccgaagctatcggactttggccttgcaaaacttggtccggttggtgacaagacccatgtttcaacacgtgtgatgggtacatatggctactgtgccccagaatatgcaatgactgggcagctgacggttaaatccgatgtgtatagctttggtgttgtgttccttgaacttatcacggggcgtaaagcaattgacaatactaagacccaaggggagcaaaattt

SEQ ID NO: 60787 - DNA, 210 bp, Zea mays
gcgatatgagaaggctgccaagtacattgagtacgacacttcgttcagtgaagatgagcagacgcaatccaagcaactgtagatcagctgcaacctaaacaatgctgcctgcaaactgaagttgaaggattacaaggaagctgcgaactttggcaccaaggttctggaactagacagccaaattgtcaaggctctctacaagagggtgca

SEQ ID NO: 60788 - DNA, 258 bp, Zea mays
agaacagacaacccgtccttctccttcccatcggctccacacaaccagaaggttcttcgcttcactctgccctgcgccgccgccaacgctgcagccgcagttgccgcaagcgggaacttggacgtgctactcgcgactgctctcatctgttcccgcgtaggattcgttcacaatggcccgtgtgtatgtcggcaacttggatgcacgcgtgacttccggggaactcgaagatgagttccgacgtgtttggagttctgc

SEQ ID NO: 60789 - DNA, 257 bp, Zea mays
cgagcttgatcggatcaggaaagaggagggggacgacagctacgttctcaagctcaaggaagccacctgggttcctcacctgttccgtgtcagcgtcacgcagcatgaatacatgaacgagaagaggcagagaatcaccgtgaggggtgaagcaccggtcgacttcgcagctgagtccaagtacttgcttgaagagatcgcgaagctcaccgcttgctagaagacgcagtctttctggtggttcttgaaggactggc

SEQ ID NO: 60790 - DNA, 249 bp, Zea mays
gagtatcaccaatgggtatgatcttcattccctgttacaaaggttacagccacaagccggaggagtatgcatcacccgaggacatggcgaatggggtgaaggtcctagccttgacaatggctacgctgtcgctggagtgacttgttagcgtttggaggaatcaagtcagcccgtgccaaaaaggcaaaaacaaacacctgtgttatttctaataataagctgcatagcattggcgtcatcttccctgca

SEQ ID NO: 60791 - DNA, 251 bp, Zea mays
gtaggagcagccccgcgccaggaggaagtttgttcttttaacaatatgtcgagggaggagaatgtttacatggccaagttggctgagcaggctgaaaggtatgaggagatggttgagtatatggagaaggtggctaagactgtagatgtggaagagctcactgttgaggagcgtaaccttctgtctgttgcatacaagaatgtgattggggctcgccgcgcttcatggcgcattgtttcttccattgaaca

SEQ ID NO: 60792 - DNA, 275 bp, Zea mays
  unsure (1)..(275): unsure at all n locations
tagaagaagtacggtcaggatgcgacaaacgttggggatgaaggtggttttgcacctaccattcaggaaaacaaagaaggccttgaactattgaaggcagccatagaaaaggctggctacactggaaaggtggtcattggaatggatgttgctgcttctgaattcttcggtgagaaagacaagacttatgatcttaatttcaaggaggangacaacgatggctcaaacaaaatttcaggcgacagcctgaaagacctgtacaagtcctttgtttc

SEQ ID NO: 60793 - DNA, 268 bp, Zea mays
cacgaggactccacgaacaggaccaagattgctgagctcctgaggtaccactcgaccaagagcggggatgagctgaccagcctcaaggattatgtgaccaggatgaaggagggccagaacgacatcttctacatcactggtgagagcaagaaggctgtggagaactccccgttccttgagaagctgaagaagaggggctatgaggtgctgttcatggtggatgccattgacgagtattctattggacagctgaaggagtttgagggca

SEQ ID NO: 60794 - DNA, 266 bp, Zea mays
tagatttcacaactggcttgaaggtgctcgtgattgggctgttagcagaagtagatctggggtactccacttccactgtggataagtcaagatggtgaagaaattgttgttatggattctatagagaagcttgaaaaattatctggagtcaaggtcactgatcttcaccgacactatgttgatgatattacaattccctctaagagaggacctgagtttggggtgctcaaacgtgttgatgatgttttcgactgctggttcgagag

SEQ ID NO: 60795 - DNA, 265 bp, Zea mays
ctaagagaatatattgagaatgaagacatagatgaagcctttaggtgtataagagagctcagccttccatttttccatcatgaggttgtgaagcgtgctctcacctttggtatagagaacgtatcctcgcaaccatcaatccttaagttattgaaggaggcagctgcaagttgcttgatcagtcctaatcaaatctcaaagggtttttctagactagctgagggtgttgacgacttgagtcttgatattccttctgctaaagttc

SEQ ID NO: 60796 - DNA, 223 bp, Zea mays
aagatgggcgttcataaaagaaggggtgttgtatatcttgatgttcataagcccctgaaagaccaaaaagtgaagttgagcgtaagagatgttattggggctattcttttgaaaaccttgccactgagaactcattcagcgacgatggaaggggtatcgatgcaaatgtagagttttgttctgtaataaagacatatttgggtgcccatcggattgtcatggg

SEQ ID NO: 60797 - DNA, 261 bp, Zea mays
ccgataacactggagccaagaacctgtacatcatttctgtgaagggaatcaagggtcgccttaacaggcttccttctgcctgtgttggtgacatggttatggcaaccgtgaagaagggaaagcctgaccttagaaagaaggtgatgccagctgttattgtgaggcagcgcaagccatggcgccgaaaggatggtgtctacatgtactttgaagacaatgctggagtgattgtgaacccaaagggagagatgaaaggttctg

SEQ ID NO: 60798 - DNA, 263 bp, Zea mays
aacggccataattgcccaggtgaacgaagcgatcggggcagacgggatcatcagcacggagtgcaaggaagttgtgagccagtacggagagatgatcctcgacatgctcatcgcacagacggatccacagagggtgtgcagccaggttggtctgtcgctgggcgatggcgctcgatctgtaagcgaggggattgaatctgttgtcgggaaagaaacctgggctcagatgcatgtgctcggcctgtcagatggctgcgtgtgga

SEQ ID NO: 60799 - DNA, 260 bp, Zea mays
tgggattaactcgagaaccgacttataccgggtccagacctcccctttatatagatgaagggctacgaccgattgaaccccccacaatcgatccaatcaaatctaattatcgtttttaccttatgcattaggagtagctccaagttaagcctccctctacctcgaatcttcacctctcttccactatatgtcgactagaggcgtcttgggtggctaccccccacaatcgatccaatcaaatctaattatcgtttttacct

SEQ ID NO: 60800 - DNA, 259 bp, Zea mays
gaggtgcgcgaggaggtcgccaagtacaaggtgggggctcctgctcgtgttggtctggttgctccagttgatgttgttgtgccccctggcaacactgggctggatccgtcccagacctctttcttccaggtgcttaacatccccaccaagattaacaagggtaccgtggaaattatccccctgtggagctcatctcaagaagggtgaaaaggtgggctcgtccgagtctgccctgctcgccaagctgggtatccgcccc

SEQ ID NO: 60801 - DNA, 260 bp, Zea mays
attcttgcttccagagcaatacgggcagcacattgcttaacatccattcagttctcacctacatccgaacacatacttttggcatatggtcgtcgtcatagctcgctccttaggagcatagttgtggaaggcgaaaatggggttcccgtatatactattttggaggtatatagagtttcagatatggagcttgtgagagtgcttcctagcgctgaagatgaagttaatgttgcatgctttcatccttcaccaggaggtgg

SEQ ID NO: 60802 - DNA, 255 bp, Zea mays
gagcacgacgcacgcagagccgcagagatccgtcacactgcaagttttgaaaactgaactgtaagatggcatcagcagagctttcccgtgaggaaaatgtgtacatggcgaactcgccgagcaggcagagaggtacgaggaaatggttgagttcatggagaaggtagcgaaaactgttgactcggaggagctcactgtggaggagcgcaacctcctgtctgttgcatacagaacgtcattggagccgccgtgcct

SEQ ID NO: 60803 - DNA, 264 bp, Zea mays
accagaatatccaccgtgttcaccatgagttcactgcgccaataggattccagctccatatgcacactgggctgaggtgctgatactcggcatcccctccttcgtcgggccagccattgttccaggccacatgatcacattctggctctggattatactccgtcaggtggaggctatcgagacacatagcggctttgatttcccattcaccccgacaaagtatattccattctatggaggagcagaataccatgactatcatca

SEQ ID NO: 60804 - DNA, 259 bp, Zea mays
cccaagcattggatgctcgacaagcttggcggacttttgctcccaagcatcttctggacctcacaagtccagggagtgccttcctctgatcctcatcatcaggaacaggctcaagtatgctctgaactaccgtgaggtcatttctatcctgatgcaacgccatgtacttgttgatggcaaggtcaggactgacaagacctaccctgctgggttcatggatgtcatttccatccctaagacaatggagaactacaggctg

SEQ ID NO: 60805 - DNA, 261 bp, Zea mays
aggagaagtcgaagcctgatggtccaaaccaagagaacctcttcccggagctgattgctgagccaactgatgctcgctcgatgtcctttgttggcactcatgagtacttggccccagaaataataaaaggggagggccatggaagtgctgtggattggtggacctttggcatattcttgtacgagctgttgttcggcaagacccctttcaaaggttccggcaaccgggctacactcttcaacgtcgtgggccagcccttga

SEQ ID NO: 60806 - DNA, 261 bp, Zea mays
ccttgaggagggggcgctttctgagctaattgttgcattctctcgggaagggccaacgaaagaatatgtgcagcataagatggtggaaaaggccacagatatttggaacatcatctcaaatggtggttacttatatgtttgcggtgatgccaagggaatggctagagatgtacacaaaatgcttcatacaatagtccaagagcagggatctttggataactccaaaaccgagagctatgtaaagagcctgcagatggaagg

SEQ ID NO: 60807 - DNA, 252 bp, Zea mays
ctcgagcgctgttgcttggtgcgtgctgcagatcggccggcccgtgctgttctcgctggcggtggacggcgaggccggcgtgcggaaggtgctgcagatgctgagggacgagctggagctcaccatggcgctcagcggctgcacgtcgctgagggagataacccgcgcacacgtcatcaccgacagcgaccggatcggccgctcgcggctgtagaatcattgtgcagttcacctcagaatgatgttggtctc

SEQ ID NO: 60808 - DNA, 256 bp, Zea mays
tgtgttcatggtgcacctggccaccatccccgtcaccggcaccggcatcaacccggccaggagcctgggcgccgccgtcatctacaacaaggacaagccctgggacgaccactggatcttctgggtgggccctctcgtgggcgctgccatcgcggccttctaccaccagtacatcctccgggctggcgccatcaaggccctcggctccttcaggagcaacgcgtgatgagcggggcttggctgtggagcaatggcg

SEQ ID NO: 60809 - DNA, 259 bp, Zea mays
agggctggcaatgctgataagaaggtgcaagagctaaatatgaagctggagaagaggacaagcagtgatcaaaagcgcaggattcagaagactgaacatgctcttaaagctgctgaggaggagctgatgaaggctcagttggaaacaacaacaaaagtaaaacagcttagagaggttcatggagcctggttgccaccatggttagcgacacatgcagcccgctctatggaggtgatgtcaaatcactggaatgaacatg

SEQ ID NO: 60810 - DNA, 258 bp, Zea mays
gagcaattttgtcaaggtggactccatctttggcccgggaacaaaaatggtctacaagcatttggccacactatactttgtttttgtctttgatagctctgagaacgagcttgccatgctcgacctcgtacaagtgtttgttgaaacattggacagatgcttcaagaatgtatgcgagcttgacatcgtatttaacttcaacaagctgcacaccattttggatgagatgatatcggggggacaggtgatcgaaacaag

SEQ ID NO: 60811 - DNA, 255 bp, Zea mays
gtccccgcgacgagcaggatctgcccagttgctcttgcggtagttccccaactgtcaccatgcagaacgaggagggtaagactgtggacctctatgtccccaggaagtgctcggccacaaacaggatcatcactgccaaggaccatgcctctgtccagatcaacattggccacttggatgcgaatggcctgtatgatggtcacttcacaacgtttgctctctctgggtttgtccgtgctcagggcgacgcagaca

SEQ ID NO: 60812 - DNA, 254 bp, Zea mays
gctggctgctgctgtgcttggtggtgttgacaacatctggattgccctggtacccgtgtgctgtatcttggtgctgcttctggcacaactgtatctcatgtgtctgatattgtagggccggatggtctggtctacgctgttgagttctctcacaggagtggaagagaccttgtcaacatggcaaagaagaggaccaatgtgatccccattattgaggatgccaggcatccggcaaggtaccggatgttggttgg

SEQ ID NO: 60813 - DNA, 257 bp, Zea mays
attcacaaaacatttgagggtaacttgaccaccaaaccaattaatggtgctattttcattttcaatccaagaacgggtcaacttttccttaaggttatccacacaagtgtatgggtggggcaaaagcgtcttgggcagctcgccaagtggaaaaccgctgaggaggttgctgcattggttcgatctcttcctgtagaagagcagccaaagcaaattattgtgacaaggaagggcatgttggatcccttggaggtcca

SEQ ID NO: 60814 - DNA, 236 bp, Zea mays
ccaggagctcacgtcggaccagagccaacaactgatagattcgtagttgtcatgtcaggatctgatggaaggaccattcctggcaatactattgccgttcaagctgacatgccattcactggtcttacaacctttgggggagcgtttctgtcgaagtttgaatgctctcagatgccacatccgctgctagagcatatcacctttgtggacactcctggtgttctctctggggaaaa

SEQ ID NO: 60815 - DNA, 274 bp, Zea mays
gtctcggaggcgatcgcgtcgctcaaggagaggacggggtccagcagctttgctattgccaagttcttggaggacaagcacaaggacaagctcccgcccaacttccgcaagcttctgaacgttcagctcaagaagctcgtcgccggcggcaagctgaccaaggtgaagaactcgtacaagctgtcgtccgccaccaagccaaaggccgccccgaagaagaccaagaccggcgtgaagaagcccaaggccgctgccaaaccgaaggccaagtccc

SEQ ID NO: 60816 - DNA, 259 bp, Zea mays
cttctcgccgcccaaggccgagaagaagcccgcggagaagaagccggcggaggagaaggccgagaagaagccaagggcggagaagcgcgtgccgagcaaggagggcggcgagaagaagggaaagaagaaggcgaagaagagcgtcgagacgtacaagatctacatcttcaaggtgctcaagcaggtgcacccggacattggcatctcgtccaaggccatgtccatcatgaactccttcatcaacgacatcttcgagaag

SEQ ID NO: 60817 - DNA, 253 bp, Zea mays
atctacttcaaataatggtgggtttactagtataaggacaaagtttttactgtgccagaggacctgtcagcatatgatggtattgagttacgagttaatggtgatgggcgacggtataaactcattatacggactagctatgaatgggatactgttggctatacagcaagttttaacacaactaaggggggatggcaaagtgttaaagtacctttctcttctctgaaacctgtattccgtgctcgtactgtga

SEQ ID NO: 60818 - DNA, 274 bp, Zea mays
tgttgttgatgacacactcgagtttcttatccttgcaagtgatgggctgtgggatgtggtctctaacgaggaagctgttgcgatgactagatccattaaggacccagaagaggctgcaaagatgctcttgcaagaggcgtacaagagggagagcagtgacaacataacttgcgtcgtcgtgcacttcttgcatgggcaaggtagcagcggatacgcttaaagcgtagcagtaaaattattttacgcatggtgtgctctgatgtacatgcgtcga

SEQ ID NO: 60819 - DNA, 273 bp, Zea mays
tgttaagcctggcatttatgttacatacaacggtgacttttttgactggccatttttagagaagagggctgcacaccatggaataaaaatgaatgaggagattggtttccaatgtgacaataaccagggcgagtgtcgggctaaattttcttgccatcttgactgttttgcttgggtgaagcgagacagttaccttccacaaggaagccaaggtctaaaggctgttacaaaagccaagctaggttacgatcctctggaggttaatccagaaga

SEQ ID NO: 60820 - DNA, 273 bp, Zea mays
tgtgcggagttccatccaactcactgtaatacactagcatatagtagctcaaagggtactattcggcttattgatctgcgacagtcagcactgtgtgacaaccatgctaaactatttgaggagcatgaagcacctggatcaagatccttttttacagagataatagcatcagtttcagatataaaatttgcaagggatggaagacacattcttagtcgtgattatatgacactcaagttgtgggatctaaacatggattcaggcccagttgca

SEQ ID NO: 60821 - DNA, 272 bp, Zea mays
tcaaacaaaagaagtcattgatgaagatggttggttgcacactggagacataggtctgtggctacctggaggacgtttaaagatcatcgataggaaaaagaacattttcaagttagctcaaggagaatacatagctccagagaagattgaaaatgtctatgccaaatgcaagttcattgcccaatgttttatatatggcgacagtttcaactcttccttagttggtattgttgcagttgaaccagaggttatgaaggcttgggctgcatctg

SEQ ID NO: 60822 - DNA, 271 bp, Zea mays
tacaaggagatcttcctcagggagctcatctccaactcctccgatgccttggacaagatcaggtttgagagtttgacggacaagaccaagctggatgcacagccagagctgttcatccacattgtccccgacaaggccaacaacacgctgacaatcatcgacagcggcattggtatgaccaagtcagaccttgtgaacaaccttggtaccattgcgcggtcaggcacgaaggaattcatggaggcacttgctgctggtgctgatgtgtcca

SEQ ID NO: 60823 - DNA, 269 bp, Zea mays
gcctgccgcgagctcgcgccgcaacgccaccatgaagttcaacatcgcgaacccgtctaccgggtgccagaagaagctggaaatcgatgacgaccagaaactacgtgccttttatgaccgaaggatctcccaggaggtcagtggtgatctacgggtgaggagtttaagggttatgtcttcaagatcatgggtggatgtgacaaacaaggcttcccaatgaagcaaggagttctgacttctggtcgtgtccgccttctgctccacagagg

SEQ ID NO: 60824 - DNA, 270 bp, Zea mays
gttgatccgaacaagctcatgcagatcacctcggtggatcgctacatcaagtaccatgtgcaggagttcgagagggcattcagggagaggttccctgcctgcacactgtcagccaagagacatattgactccactaccaccatactggacgtccatggtgtggggttcaagaatttctcaaagaccgcaagggagcttgtccaacgtatgcagagaatagacagtgactactatcccgagacgctacatcagatgtatgttgtgaatgca

SEQ ID NO: 60825 - DNA, 272 bp, Zea mays
gtaccagaagagcacggagctgctcatccgcaagctccccttccagcgcctcgttcgcgagatcgcgcaggacttcaagacggacctgcggttccagtcctcggccgtggcggcgctgcaggatgccgcggaggcgtacctggtggggctcttcgaggacaccaacctctgcgccatccacgccaagagggtcaccatcatgcccaaggacatccagctcgcccgccgcatcactcccgagagggcttgagctgtcgcgctgctgctgttcg

SEQ ID NO: 60826 - DNA, 272 bp, Zea mays
tgaaccttgcctccgaggtgccgccctccccgccccgcctgctccgcttgctcatcgcttctctccccgcggcggcctcccagatccggttggatcgaggggcaaggtcaagagatggggcaggccttccgaaagctgtttgatgccttcttcggcaacaaggagatgcgggtggtgatgcttgggttggatgcagctgggaaaaccaccatactctataagcttcacattggtgaagttctctccactgtccctaccataggtttcaatgt

SEQ ID NO: 60827 - DNA, 266 bp, Zea mays
aggtttcttgaggctgagaacatggtgctgaagacggaactttgccgcttcagcgccagaagatttatcctgggaaaggcattagatttatccgtgctgattctcaggtcttcctttttgccaactcgaaatgcaagcgctacttccacaaccgcctgaaacctgcaaagcttacctggacagcaatgtacaggaagcagcacaagaaggatatccatgctgaagcagtaaagaagaggcgccgcgccaccaagaagccatactcc

SEQ ID NO: 60828 - DNA, 278 bp, Zea mays
cataattcctacctcactgggaacagctcaatagtgactccagtgacgtcccaattgtaaaggcgttgcagagaggtgttagagtcattgaactcgatatgtggcccaatccttcaaaggacaatgtcgatattcttcatggagggacattgactgccccagtggaaatgatcaaatgtttgaataccatcaaagaatacgccttctgtgcctcaaattatcctcttgttattactcttgaggatcacctcacatcagatctccaagctaaagttgct

SEQ ID NO: 60829 - DNA, 272 bp, Zea mays
gcagagtcttgtgacttgggctaccccaagacttagcgaagacaaggttagacaatgcgttgactcgaggcttggaggggactaccctcctaaagctgttgcgaagtttgcagctgttgccgcgctgtgtgttcagtacgaagcggacttccggccaaacatgagcattgttgtcaaggcgctacagcccctgctgaatgcgcatgcgcgggcgaccaacccttgagaaaaatgctagctcaaaagcttcgcattgctcctctccgccctct

SEQ ID NO: 60830 - DNA, 271 bp, Zea mays
gcacggcaacatctgcctggacatcctccaggacaagtggtcctccgcctacgacgtgcgcaccatcctcctctccatccagagcctgctcggagagccgaacaacgactcgccgctcaacacgcaggcggcggcgctttgggcgaaccaggaagagttcaggaagatggtggagaagctctacaaggccgccgcgtagaggacagcacacggcgcagatgccgactcaggttcttcaagcaccgatctcacttggatcgattgacgtgga

SEQ ID NO: 60831 - DNA, 264 bp, Zea mays
taagtaaccagcagaatctgggcacaattaaatcgtcaaacctgtgcactgaaataattgagtttacaagtcctactgagaccgctgtctgcaacctagcatctattgctttacctcgttttgttcgggaaaaggatgttccattggagtcccatccatctaagcttgtgggtagcagtgattcaaaaaatagatattttgattttgagaagctagctgaggttacctcaactgttacttacaatcttaacaaaattatcgata

SEQ ID NO: 60832 - DNA, 226 bp, Zea mays
gtcgcagatgcttctaaggctttgtcccgtgctgtttgcattgctgtacgatacagcgccatccgaaagcagtttggctctcaagatggtggccctgagactaaggtccttgattacaagactcaacaaagcagactctttccgttgctggcttcagcatatgcatttagatttgtgggtgactggctgaagtggctatacatggatgtcactcagaaactgggag

SEQ ID NO: 60833 - DNA, 269 bp, Zea mays
gctacatatggacatcatggatgggcacttcgttcctaacctgactattggggctccggtgatccagagcttgaggaaacataccaaagcatatttggactgccatcttatggtcacaaagccttcagattacgtagaaccatttggaaaggctggcgcttctggattcacattccatatagaagttgctagagacaactggcaagatctcatccaaagcattaaatcaaagggtatgcggcctggtgtatcattgaggccaggtactc

SEQ ID NO: 60834 - DNA, 265 bp, Zea mays
gatgcaggcatctagggcaaggcttttcaaggagtacaaggaggtacagcgagagaagtcagctgaccctgatatccaattaatatgtgatgattctaacatattcaagtggactgctcttatcaagggcccttctgaaacaccttatgaaggtggtgtgtttcaacttgcattcgcaattccagagcagtatcctctgctgcctcctcaagttcgatttttcgaccaaaactttccacccaaatgtgcatttcaagacaggtga

SEQ ID NO: 60835 - DNA, 269 bp, Zea mays
  unsure (1)..(269): unsure at all n locations
gtggcaagatcgacgctgaactgagcaatatctgctgatggaatcttgacagctgcattgactcccatctngtgcctntcttcgtactgctgctagaatcaaaggtcttctacctcacagatgaagggtgactatcacaggtatccttgcggaatttaagactggtgctgagaggaaggaatctgctgagagcaccatggtggcctatacagctgctcaggacattgctctcgctgagctggcacctacacatccgataaggctgggac

SEQ ID NO: 60836 - DNA, 267 bp, Zea mays
gggcacttgtggatgcccctgatatggtcaggtgccaggtgaacttcaagcggctctcacttactgacatcaagattgacatcaaacgtgtccccaagaagacagccctgatcaaggcgatggaggaagctgatgtgaagaccaagtgggagaacagctcatggggcaagaagctgattgtccagaagaggagagcatcgctcaatgactttgataggttcaaagtcatgctggcgaagattaagaggggcggtgctatcaggcaag

SEQ ID NO: 60837 - DNA, 264 bp, Zea mays
gtgctttgcgagcgtcttccgagtccgatgggagaatcagccgtggactgtggcagtcttgcgtccatgcctgacattgcgttcaccattggaggcaagaagttcaagctgaaaccagagcagtacattctgaaggttggtgaaggacaggctgcccagtgcatcagcggattcacagctatggatatcccaccaccccgtggccctctctggatcttgggtgatgttttcatgggagtctaccacaccgtcttcgactatggc

SEQ ID NO: 60838 - DNA, 270 bp, Zea mays
cagaagataggcacattgttgttctcaagcacaatgtttggcgtgtaaaaggactaattcaggtttgtagatcaatcaatgtgcaaccactacaaccacatgaccagtttctcatatttgcatctgatggactttgggagcacttaaccaaccaagaagctgttgatattgttcacagtagcccccgcagtggctgtgctaggaggctgataagagcggcgctgcaagtggcagccaagaaaagggagatgaggtactcagacctcaaga

SEQ ID NO: 60839 - DNA, 269 bp, Zea mays
ggcccccaagcgaggtggcagggcgccggtgccggccaagaagaagacggataaagtgacgaaccctctattcgagaagaggccgaagcagttcggcatcggcggcgcgttgccgcccaagaaggacctgcaccggttcgtcaagtggcccaaggtcgtgcgtatccagcggcagcgccgatcctcaagcagcgcctcaaggtaccaccggcgctcaaccagttcacccgcaccctcgacaagaacctcgctacgaacctgtttaagat

SEQ ID NO: 60840 - DNA, 268 bp, Zea mays
gcgacttgctagcaacgaatcgcatggctgctcaggatgttggtgcttcaaagtacagtatcaagcatgatactaatggtaacacgaatgtgtcggaccttacgatcattgacgtaactagtatcaacgaagtttcttctctccttaggcgggctgctcagagcagatcagttggtagaacacaaatgaatgaggaatcatcaagaagtcactgtgttttcactcttcggattttcggtgtaaatgagggaacggatcaacaagtgca

SEQ ID NO: 60841 - DNA, 269 bp, Zea mays
gaagagcacccagttctgctgacagaagcacctctgaacccaaaggcaaacagagagaagatgacccaaattatgttcgagacattcaatgcaccagcaatgtatgttgctatccaagctgtcctttccctgtatgccagcggtcgcactacaggtattgtgctcgattctggtgatggtgtgacccacaccgtgccaatctacgagggatacgcgctccctcatgccattcttaggctggatcttgctggccgtgatctgactgactg

SEQ ID NO: 60842 - DNA, 269 bp, Zea mays
cttgtgaccctccctcagccgcgtcgcgtcgcatcctacgatccaaagctctctctgctcgcagccatggcgaagaactacccgaccgtgagcgccgagtacagcgaggctgtggagaaggccaggcgcaagctccgagccctcatcgccgagaagagctgcgccccgctcatgctccgcctcgcgtggcactccgcggggacgttcgacgtgtcgtcgaggaccggcggtccattcggcacgatgaagcatcagtcggaattggctca

SEQ ID NO: 60843 - DNA, 268 bp, Zea mays
atctcacgatccactcgagcaccaagccgagggaaggtgaggagcgatggcgcgcggcgtggtgtcggcgaagggcggcgcggtcgcgggcaagaagaaggggtcggtttccttcacgatcgactgcaccaagccagtggaggacaagatcatggaggtcgcctcgctcgagaagttcctgcaggagcgcatcaaggtcgccggcggcaaggctggcaacctcggcgactccgtcaccatctctcgcgagaagaccaaggtcaccgtc

SEQ ID NO: 60844 - DNA, 268 bp, Zea mays
acatcctgataaataatgcaggcgtcatgttctgcccttttcaactgtctaaagggtgtttcatcgagttgaagctagacctcagctccctcaagtctgtcagggcttttgtggaccagttcaactcgatgaaactcccgttaaacatcctgataaataatgcaggcgtcatgttctgcccttttcaactgtctaaagacggggtcgagatgcagttcgcgacaaatcatctaggacactttctgcttaccaatctgctccttgatac

SEQ ID NO: 60845 - DNA, 267 bp, Zea mays
gacctacacatacctcgtgacaaggaaactagccgaccaaaaggttatgcttttgctgagtatgaaacagaggagattgcccagtatgccattaagctattttctggccttgttcgacttcataataaaacacttagatttgcgatctctgggcaagacaaaccctcattaaatggcaatattcctgtaactcctagtttgaactctgtaccacagccaaagcctcctcatcaacatatgaggtctagtgatatccctttgccacaa

SEQ ID NO: 60846 - DNA, 268 bp, Zea mays
ggcccccaagcgaggtggcagggcgccggtgccggccaagaagaagacggataaagtgacgaaccctctattcgagaagaggccgaagcagttcggcatcggcggcgcgttgccgcccaagaaggacctgcaccggttcgtcaagtggcccaaggtcgtgcgtatccagcggcagcgccgcatcctcaagcagcgcctcaaggtaccaccggcgctcaaccagttcacccgcaccctcgacaagaacctcgctacgaacctgtttaag

SEQ ID NO: 60847 - DNA, 226 bp, Zea mays
tgaaatttgttctccatctataattcacaagaactttaagtcgtccaatattttactggagaccgagctcaatcctcacatttctgatgctggacattcaagttttgttccagatgctgaattccaggcttcagatcaggggtctggtatagtgcccctgaggtcgagatgtccggtcagtataccctcaagagtgatgtctacagctttggggtcgtcatgctgg

SEQ ID NO: 60848 - DNA, 276 bp, Zea mays
cagccatctatggcggcgtccctgctcctccgcgccgtgcccgaagggagcttgcgtcccctctcggatccctgggtgccagcatagagtcaagatgtgttgccaagatatgctcaaaatggggaaggtttgctagacctttcatgcaaaagctgctggaaatgaggttattgggattgatttggggacaacgaactcatgtgtttctgttatggagggaaagaagccaaaagttattgagaatgctgaaggtgcgagaacaacaccatctgttgt

SEQ ID NO: 60849 - DNA, 280 bp, Zea mays
atcttgacatcctgaaggaccagtggagcccggcgctaaccatctccaaggtgctgctgtccatctgctccctgctgaccgatccgaaccccgacgatcctctggtccccgagatagcgcacatgtacaagacggaccggaacaagtacgagaacaccgcgaggacctggacccagaggtacgccatgtagggagggggtaccctacctggccctttgggggtccgccggaattgccgctgctgcgttgtgttcctggacctggacctggactggagact

SEQ ID NO: 60850 - DNA, 279 bp, Zea mays
accaaaggttggcaaatcttgggacgcaggctgcaaaccttcaaattggggtggccccatttgaagaaaagcacaggcgttattttgatttccagcgtaggtgtggtcaattgcctttgcagaaggagggtgaggaagttgactaagaaatgttctgcatcgtgatggttctgtactgatgtcagtttccctggatcagttgaaggctcctgatctcctttataggtctcttgcagcaaagcttgtggttggcatgcctttcaaggatctggctactgt

SEQ ID NO: 60851 - DNA, 282 bp, Zea mays
cagactttaaagtacaacatgaagtcaagggctgggagaggctttacccttgaggagctgaaggctgctggcatcccaaagaagcttgctccaaccattggtatttctgttgatcaccgccgcaagaacaaatcccttgagggactgaggcgaatgtccagaggcttaagacatacaaggccaagctggttatcttcccaaggcgtgcacacaaggttaaggctggtgactctactccagaggagcttgccaccgctacccaggtccagggtgactacatgc

SEQ ID NO: 60852 - DNA, 272 bp, Zea mays
agcgcaggcaagtccgggaagccgctccactacaagggctctacctaccaccgcgtcatcgcccagttcatgtgccagggacgcgacttcacccgcggcaacggcatcggcggcgagtccatctacggcgagaagttccccgagagaagttcgtccacaagcacaccggccccggggtgctcgccatggccaacgccgtccccaacatcaacggcactcaactcttcatctgcaccgtggagacgccctggctggatggcaagcacgtcgtc

SEQ ID NO: 60853 - DNA, 277 bp, Zea mays
agcttgtgcagctcaagcgtgaggcccggttgaagggtgggttctatgtgagcccagaggccaagcttctgtttgtggttcgcatccgtggtatcaatgcgatgcagcccaagacccgcaagatcttgcagctcctgcgattgaggcagatcttcaacggtgtcttcctcaaggttaacaaggcaaccattaacatgctgcgcagggtggagccatatgttgcgtacggataccccaagctgaagagcgttagggagttgatctacaagagaggtta

SEQ ID NO: 60854 - DNA, 277 bp, Zea mays
gcacgactctacacagtagacagacgcagagaagcatatgctagaatactgcattcagcaagtgaatatgtttgctgcgcgatcacggcagctcaaagcattcgtcaggcaggatcaacaagagacctagttattctcgtcgacgacaccataagtgaccaccaccgcaaggggctggaatctgcggggtggaaggtcaggataatacagaggatccggaaccccaaagccgagcgcgacgcctacaacgagtggaactacagctaattccggctgt

SEQ ID NO: 60855 - DNA, 269 bp, Zea mays
acgatggagaaacgttcatatcagcagatgatctgcgaataaacctttggaatttagaaattagcaatcagagctttaacattgttgatgtgaaacctgcaaacatggaggatctaactgaggtgatcacttgtgcgagttccatccaactcactgtaatacactagcatatagtagctcaaagggtactattcggcttattgatctgcgacagtcagcactgtgtgacaaccatgctaaactatttgaggagcatgaagcacctggat

SEQ ID NO: 60856 - DNA, 272 bp, Zea mays
cgagaggcacctgatctttccttcccgtcttcctcccagacgtccccatgaccattgctgcgacgagagtgagcgggagagggtaggtggcgaggcggcggagatggggcgggggccggtgcagctgcgccggatcgagacaagatcaaccgccaggtgaccttctccaagcgccggaacgggctgctgaagaaggcccacgagatctccgtgctctgcgacgcagaggtcgcgctcatcgtcttctccactaaggggaagctctacgagta

SEQ ID NO: 60857 - DNA, 271 bp, Zea mays
ccagtgggaaacggtgcaaatcggcggaggagagcaatggcgcggaggagaactccggcaagggtaaggccgccgcgcagagcaagagcgacaacggtgggaagaagcaggggaaggacggcgcgtccaagcctccggaccgcccaaggactagatccacgtccgggcgaggcgcggcgaggcgacagacagccacagcctcgctgagagggtgagaagggagaagatcagccagcggatgaagcttctgcaggatctcgtcccgggctgc

SEQ ID NO: 60858 - DNA, 273 bp, Zea mays
ctagggttttgctgctctccgaccccgagctccgaaggccgcagcatcaggcgcggcccccctcgcgtgtgaccgagatggcgctgccgaatcaggggaccgttgattaccccagcttcaagctcgtcatcgtcggcgaggtggaactggtaaaactacatttgtgaagaggcatctcactggagagtttgagaagaaatatgaaccaaccattggtgtggaagttcatccgttggatttcaccactaactgtggtaagatcagggtctactg

SEQ ID NO: 60859 - DNA, 272 bp, Zea mays
atagcgctgatttgatctctcagctacgagctgagcaccacaaagagaactccactgctggaattgatgtcatcacaggcactgttggggacatgcaaaagctagggattcaagagtcgttcaaggtgaagctggccatcttctgtctgctacagaggctgccgagatgatcctcagggtcgatgagatcataacctgtgccccgcgcagaagagaggataggatgtgatattacacgctgtttctcgatgtagcgggatgctcatcaccct

SEQ ID NO: 60860 - DNA, 276 bp, Zea mays
cccggaacagagcgaggcgacgccgaggcacctcatctccggcgaagggaaatggcgaccgttccaggggatctgatctggcagattgtgaggaagaagaactccttcctggtgaagcagtttggcaacggcaatgccaaggtgcagttcacgaaggagcccaagaacctctagaatgtagactcctagaagtactctggcttagcaaacaagaaaactgtaacgatcgagccagctgctggaaaggactcggctgtggtcctctctactaccaag

SEQ ID NO: 60861 - DNA, 281 bp, Zea mays
atccacggagtggcgttgaaaaatttcagcaaaactgcacgcgaattaattcaacgactgcagaaaattgacaatgataactagccagagactctataccaaatgtttatcgtcaatgctggtccgggcttccggttactatggacaccgtgaagtccttccttgatcccaaaacgaccgccaagatacatgttcttgggaacaaataccaaagtaagctgcttgaaacaattgacgctagtgaattgccagaattccttggtggcacttgtacctgtcct

SEQ ID NO: 60862 - DNA, 271 bp, Zea mays
caacagaggccaaggagaatgctgcagctacgctcttcagtttatctgtggtccatgactacaagaaaaagataatgaatgagccaggggctgtggaggagcttgcgtctatgctgaccaaggggacagcaaggggaagaaagacgcagtgatggcattgttcaacctctcaagacaccgagaaagctcaggacggatgcttgagtcatctgcagttgtatctttaattgagtcactgaggaatgataccgtttcggaggaagctgctggt

SEQ ID NO: 60863 - DNA, 266 bp, Zea mays
tattcatatcaccttggcataaagcaggatggtgaaccattaggtgatgttggtctccctccatgggcaaagggttccccagaagaatttattcatatcagtcgagaagcccttgaaagtgaatatgtaagctctatctagatcattggattgatctcagatttggttagtagctgcgaggctagcctgctgttgaggctgcaaagagatttgatgatctgacatatgagggtgccgttgatttggagaacatggatgatatgtta

SEQ ID NO: 60864 - DNA, 268 bp, Zea mays
atatgatctacacattttacaaggcagaaggatattctgttggaaaatctctcgtggaagaggataaacttgagctcgcaacttctcttattgagaaggcgaaggcaaagggggtttctcttttgcttcccactgaattgtagtagcggacaagtttgcagccgatgctgagagcaagattgtccctgccactgctatccctgatgactggatgggtcttgatgttggccctgatgccacgaaaaccttcaacgaagcattggacacc

SEQ ID NO: 60865 - DNA, 272 bp, Zea mays
tgggaactggatttatgcaccgtgcttttcaggcatatgctaaatacagaggtccactgggcagtgtcagaaaaggagttctgatatctgttggtaagggacttatcacttcacatgcccttatgagtttagaagctcgtgggatcctctttgtatcccctggaatggaggcatatgaagggatgatagttggtgagcactcacgtgacagtgatcttgaggtgaatcctgtgagaactaaagaacttacaaatatccgagcccctggaaag

SEQ ID NO: 60866 - DNA, 273 bp, Zea mays
ccaagaagcgtaagatgaagacgtacaccaagcccaagaagatcaagcacaagcacaagatggtcaagctctccgtgctgcagttctataaggtggacgacaccactagctaggtgacccgcctccgcaaggagtgcccaacacagagtgcggcgcgggcgtcttcatggccaaccacttcgaccgccactactgcggcaagtgcggcctcacctatgtctacaaccagaaggcgtgattgcttgccccgatttgcttgatccgcctacccta

SEQ ID NO: 60867 - DNA, 269 bp, Zea mays
cgacaagctcaaggctgagcgtgagataggtatcagcagtgatatcgctctgtggaagtttgagaccaccaagtactactgcacggtcattgatgcccctggacaccgtgacttcatcaagaagatgatcactggtagctcccaggctgactgtgctgtccttatcatgtgaatccaggactggtggttttgaggctggtatctccaaggatggccagacccgtgaacatgctctccttgcgttcagccttggagtgaagcagatgatt

SEQ ID NO: 60868 - DNA, 273 bp, Zea mays
gaaggaggttgctgtgtttggctgcaggaaccctgaggagatcccatggggttcggttggcgctgaagatgttgttgagtctgactggtgttttcactgaccaggagaaggctgcagctcacttgaagggtggtgccaagaggttgtcatttctgctcctagcaaggatgctgccatgttcgttgttggtgtcaacgagaaggagtacaagtctgacatcaagagtgtctctaatgctagctgcacaagcaactgccttgctccgcttgctaa

SEQ ID NO: 60869 - DNA, 257 bp, Zea mays
ctcgagcgttcctcaagaaagttgagaaatctagtgtaatcgataatgtcctctcatgggctgatttcaaacttagcaaagaattaaagaagactgatggaagcaagaagtcaagaatttctggcatccctaagcttgaggatgcaaatgaagctggtgggaaggactctcacaagtgcaccttgattctgactgagggtgactctgcaaaagctcttgctatgtcgggcatagctgttgtaggagagattactatg

SEQ ID NO: 60870 - DNA, 260 bp, Zea mays
gcggcggcctcgggcattgtcccagcgggagcaggacatccagatgatgctcgccgccgatgtccacctcggcaccaagaactgcgacttccaggtggagcgctacgtgtacaagcgccgcactgatggtatctacattattaaccttggaaagacctgggacaagcttcagttggccgccagggtcatcgttgccattgagaatccgcaggacattatcgtgcagtctgctaggccctatggccaagggctgtcctcaa

SEQ ID NO: 60871 - DNA, 263 bp, Zea mays
agcgaatccctcgcatcgcattcgcagcctttgctgcatcacaccaccgcgaaaccccagcagccgcatcgatggcgcctaaggcggagaagaagccggctgcgaagaagccagcggaggaggagcccgctgccgcgaaggccccggcggggaagaagcccaaggccgagaagcgcctcccggcggccaagtcgtccggcaaagaaggcggcgacaagaagggtaagaagaaggcgaagaagtcggtggaacctacaagatct

SEQ ID NO: 60872 - DNA, 136 bp, Zea mays
cgaagtaatcataaggatgaatatctttgtgtgggctgtgaggagccaaggcttggaacctgatgcaaaaagcttctgcaacatgcacgaattgttatacgagacaaaaccctggggtaaggaacaatatcacaac

SEQ ID NO: 60873 - DNA, 261 bp, Zea mays
ggaagaaggatgtacctgattacaagtataccattgccatgttgggctatgctgatgaggacaagacaactgttctggagctgacgtacaactatggagtcacagaatacagcaagggcaatgcatatgctcaggtctctatgaaatctttatctggagcatttttttctagttgtattttggcatttcttaattgtttagctgatgtaagcgcaggttgccattggcaccaatgatgtgtacaagacgccgaggcggttg

SEQ ID NO: 60874 - DNA, 259 bp, Zea mays
gtggagaatgtcattgatggcgcccccaccaacggctcctcagatgtcgtcaagaaggggtacgtagggatccacagctcggggttcagagacttcctgctcaagccagagcttcttcgcgccattcaggattgcgggtttgagcatccttctgaagtgcaacatgagtgcatccctcaagctattcttggaatggatgtcatctgtcaagcaaaatctggaatgggtaagactgcagtttttgtcctgtcaactcttc

SEQ ID NO: 60875 - DNA, 256 bp, Zea mays
gatcaaggtcgttgcaccgcctgagaggaagtatagtgtctggataggagggtccatcctagcctcgctgagcactttccaacagatgtggatatctaaggaggagtacgatgagtctggcccggcaattgttcacaggaagtgcttctaggcttcgcaagttcctcatcgttgcctagtctcaagttatgtccccttcatttctcaagatacgtgtggcagatttgcatggtacggttcattatcaaattatgcc

SEQ ID NO: 60876 - DNA, 257 bp, Zea mays
cggtgaagttgctccatgaggcagcgggtcatgtggtgacggtggagctcaagaccggcgaagtgtaccgggggtccatggtcgagtgcgaggataactggaattgccagctcgagaacattaccttcaccgccaaggatgggaaggtttcgcagctggagcacgtcttcatcagaggaagcagagtgagatttatgattatacctgatatgctcaagaacgctcccatgttcaagcgcttggaagcgagaattagg

SEQ ID NO: 60877 - DNA, 256 bp, Zea mays
acagaaggcattctgccgttgttgaatatgtttttagtggccatcggttcaaactaacaattcctaaggagacttgcagtattgccttctcattatctggtgttcggtgtcctggtaaaggcgagccatactcagatgaagctattgctttgatgaggagaaggatactacagcgtgatgtggagatagaggttgaagcagttgacagaacaggaacattcataggttcgttgtgggagtccagaccaacatgggc

SEQ ID NO: 60878 - DNA, 255 bp, Zea mays
acagaaggcattctgccgttgttgaatatgtttttagtggccatcggttcaaactagcaattcctaaggagacttcgagtattgccttctcattatctggtgttcggtgtcctggtaaaggcgagccatactcagatgaagctattgctttgatgaggagaatgatactacagcgtgatgtggagatagaggttgatgcagttgacagaacaggaacattcataggttcgttgtgggagtccatgacaacatggg

SEQ ID NO: 60879 - DNA, 260 bp, Zea mays
atctggactcaatggggagcttcttatgctcagcaggctgcatatcctgcatatggaacttatgactacagccatcaaatgccacaacatactcctcaaacagctgcctatggtgcttatcctccaacatactctgttcaggcctatacaggaaggaaggtggccattgttggcagtggaccatctggtttggctgctgcagatcgactaaataaaatgggccacttcgtaactgtgtacgaacgtgagatcgcattgga

SEQ ID NO: 60880 - DNA, 161 bp, Zea mays
gaacgtcgctgtgaaggatatcaagcgtggttatgtggcctccaactccaaggatgaccctgccaaggaggctgccagcttcaactaccaggtgatcatgatgaaccaccctgggcagatcggtagcggctatgccccagtgctggactgccacacctccc

SEQ ID NO: 60881 - DNA, 260 bp, Zea mays
ggggttttgtcaagacccacaagaccaatgcgtacttcaagcgtttccaggtgaagttcaagagaaggcgcgctggcaagacagactacagggccaggataaggctgattaaccaagacaaaaacaagtacaatacacccaaatacagatttgttgtgcgatttaccaacaaggacatcacagcacaaatcatctctgctagtatagcaggtgatatggttcttgcttctgcttactcgcatgagttgccacgatatggt

SEQ ID NO: 60882 - DNA, 255 bp, Zea mays
ggtctactgctgggataccgcaggcaagagaagtttggtggcctcagggatggatactatatccatggccagtgtgcgatcatcatgtttgatgtaacctcaaggcttacttacaagaatgttcctacgtggcatagggacctgtgcagggtctgtgaaaacatccccattgtcctctgcggtaataaggttgatgtgaagaacaggcaggtcaaagccaagcaggttactttccacaggaagagaatctgcagt

SEQ ID NO: 60883 - DNA, 255 bp, Zea mays
ctcagccgatcaggcttgtcataagaagggatctctttctttacgaagcatgaaaagaagggaaggtgttttttcgccgaaggtcaaaaacggtatgtgtgtaaatttcatgcatcacaaagaaataaattacaataatttacatattcgattcaaagttacatacatcaaatgtcacatagttttgttataatagaaacttaatgttcattccattgtcccatacatcaagcatttcaaatattattacaatga

SEQ ID NO: 60884 - DNA, 256 bp, Zea mays
ccttcctgtgttcactggacggtcatggtcgcccggagctacgtcagtcacaccctctccaacactctctatgataccgtcaggcgaccatgtccttcctgtgttcactggggagtgcaaggagtgtgcccactgcaagtcggcagagagcaacatgtgtgatctgctcaggatcaaagacgagtgcggtgtgatgattgccgatggcaagtcgcggttttcaatcaatgggaagcctatctacactttgttggga

SEQ ID NO: 60885 - DNA, 251 bp, Zea mays
ggaattgctgatagcttctcggaatctggagtttttcaccaatggttatcgatatttgattcagattctgccagctgcagttgttgctccaatgtacttctcagggcaaattgagtttggagtaataaaccaatcggtgtctgctttcaatcatattcttagtgatttctctctcattgttttccaatttcagtcaattagtgcattctcagcagttatcgatcgtctaggtgagtttgtgatctattgga

SEQ ID NO: 60886 - DNA, 253 bp, Zea mays
tgcaccatgaggctctccaggaggcccttcccggtgacaatgttggcttcaacgtgaagaatgttgctgtgaaggatctgaagcgtgggtatgtggcctccaactccaaggatgaccctgccaaggaggctgctagctttacctcccaggtcatcatcatgaaccaccctggccagattggcaatggctatgccccagttctggactgccacacctcacacattgctgtcaagtttgctgactcgttaccaag

SEQ ID NO: 60887 - DNA, 255 bp, Zea mays
agggcatggacgtcgtcaaggccatcgagaaggtgggcacccgcaacggctccacctccaaggtggtcaaggtcgctgactgcggacagctctcctagatctctctgatctggtctgttcggccgctctccctccgtcatcgtcgactccccctgcgtccgttcctttggatctgaataagatggtggtgatctgagtggtggtcttagtttatcatgtatcgctcgcagtttaatttagcggttaggtgtggat

SEQ ID NO: 60888 - DNA, 208 bp, Zea mays
cttaaatcggaaaagaagtgtatcaccaaaggattgctaccgcgacattcacctggcttgagctggcttttgctatagcgtgcaaggggttgctgggtgtcgtacctacctgacttatcattatctgtggttacattctggaccctgtattttctatgctttcatgtctctctactttctagtattaattatcaataagttggtttgg

SEQ ID NO: 60889 - DNA, 253 bp, Zea mays
gaaagttgtgtaggacctcttaccggctgctcaccgaattcgcttttgtgaacttgcgtccaaaagctcatcttttgtgatggttgatccgtgggaggcaatgcagaatggttatcagcgcactttgaccgttctttcgagaatacgaaactcactatgcaaggatggtgtagctgaccaaggtagcctcaaggtaatgcttttatgtggctctgacttgctcgagtcattcaccactccagtgtttggatcc

SEQ ID NO: 60890 - DNA, 256 bp, Zea mays
cttggaggaagctaatggtgatattcttgttttcatctcatcattcaacccaatgaagaacagcatatccaagcgccaagagaagactatcatgaaactggtagttgatgctgaaactgacaaagtacttggtgcatccatgtgtggaccagacgcacctgaaattatccaggggcatcgctaagtcggttaaatgtggagccaccaaagcagacttcgacagcactgtcggaatccacccttccgctgctgaaga

SEQ ID NO: 60891 - DNA, 254 bp, Zea mays
gtgccagggagagtgctttccggaacatcaaaaccattgccgagtgccttgcaccagtggtgaggaggtagatggcctggttcaccactggtgccagggagagtgctttccggaacatcaaaaccattgccgagtgccttgcagatgagctgatcaacgctgccaagggctcatccaacagttacgccatcaggaagaaggacgagattgagcgtgttgccaaggccaaccgttgaacggacttgtatcctggt

SEQ ID NO: 60892 - DNA, 258 bp, Zea mays
gtcttctacctcaagatgaagggggactaccaccgctacctcgccgagttcaagaccggcgccgagcgcaaggacgccgcggactccacgctcgccgcctaccaggccgcgcaggacatcgccgtcaaggagctgccgcccacgcatcccatcaggctcggcctcgccctcaacttctccgtcttctactaacagatcctcagctcgccggaccgcgcctgctcgctggccaagcaggccttcgacgaagctatttca

SEQ ID NO: 60893 - DNA, 250 bp, Zea mays
cagaagcggcggcggcggagaaacgcaggcgaaggcgagggtgtgagggaaggagcaccagccatggtgcacgtcaacttctaccgcaactatggtaagacgttcaagaaaccaaggcgtccttatgagaaggagcgtcttgatgctgaactgaagctggttggtgagtatgggctgaggtgcaagcgtgagctttggagggtccagtatgcactgagcaggatccgtaatgctgcaagcacttgctcac

SEQ ID NO: 60894 - DNA, 256 bp, Zea mays
agtcagccggcgaggtgtttgccaatgtcgctaacggggtgctgcacgtccgggtgaaccacacgtatccattgtcggaagctgcccaggcccatgcagatctggagggcaggaagacatcagggtccatagtgctcatcccgggatagactcaagggcatgtgaatgaataaatggggtgatctggttatgggaacggcgtaataataattatatctatgctgtttatgcggtatgttcgatctgtttctgagtt

SEQ ID NO: 60895 - DNA, 229 bp, Zea mays
aggattcggagtctgtggttgtgaggataactggatgccctaatggatgcgctagaccatatatggcagagcttggttccgttggtgatggcccacaaagttaccagatctggctgggtggaacaccaaaccagagtacgctagcagaatcatttatggacaaggtgacgcttgatgacatcgagaaggttgaggatgctcactttacctattggaatggcacacgcca

SEQ ID NO: 60896 - DNA, 251 bp, Zea mays
gtttagtcgcgccgccgccgccgccgaaacagcacatcgctctctcgatctcagccatggcggaggtggagcagccccaggacgcggtgaagctcttcaaccgctggaccttcgacgatgtccaggtgaacgatatctcgctgaacgactacctggctgtgactgcggcgaacgcgcgacattcctgccgcactccgcggggcgctactccaagaagcggttccgcaaggcgcagtggccatcgtcgagcg

SEQ ID NO: 60897 - DNA, 248 bp, Zea mays
aggattcggagtctgtggttgtgaggataactggatgccctaatggatgcgctagaccatatatggcagagcttggtttcgttggtgatggcccaaaaagttaccagatctggctgggtggaacacaaaccagagtacgctagcacgaatcatttatggacaaggtgaagcttgatgacatcgagaaggttttggagcctctctttacctattggaatggcacacgccaggaagggaatcttttggaa

SEQ ID NO: 60898 - DNA, 171 bp, Zea mays
gatccgaagtctatgttgggggcatcgcctctgatgtctcttctgatgatctcaaaaaactctgcgagtctgttggggaagtagtcgaagtgcgaatgccaggaaagagtggtaggctgtatgcctttgtcaatttcagaactaaagagctggcttcaaaggccatccaga

SEQ ID NO: 60899 - DNA, 258 bp, Zea mays
tgagcaggctaaacggttgcaggaggcaaagaaggatcctgagaaggcaagcaaaattgcttgggatgtggccagaagacgtgctgctggtgagaaggtccatgatgaccccaagctgattaaggagagcttgaagaaggaggaaaagcggcagcagaagcatgctgcgcagtggaaggagaggcagaaaactgtagataagcagaggaaggacaagcagaagaaaaggacagagaacatccgggatcgggcacagca

SEQ ID NO: 60900 - DNA, 254 bp, Zea mays
caagaacgaggataagcttgagttcagcaagattttggaggctattaaggcaaacttcaacgacaagttcgatgaggtcaggaagaagtggggaggtggcatcatgggatccaagtcgcaggccaagaccaaggcccgggaaaagctgctcgccaaggaggctgcgcacgagatgacctagattgtctactgctgtgtctgccctgtagtttaacggggaagaactgatgaactcgtattgtggttttccgaat

SEQ ID NO: 60901 - DNA, 209 bp, Zea mays
caggagtggtgcaaaggaagttctagatgaaagacgccgattaaacatggcatttgatgtggccaaaggaatgaattaccatatacgacgcagccctcctattgttcatcgtgatctgaagtctccaaatcttctagttgacaagaagtatactgtcaaagtatgtgactttggcctttcaagactgaaagctaacactttcctgtctt

SEQ ID NO: 60902 - DNA, 276 bp, Zea mays
gaggctctgttttcggccaagtcatttgaagaacttggtttgccacctttgcttgttgaccagttgaacacggaaggtctgactgccccaactgaggtccaatccgcagcaattcctataatagcacaaaagcatgatgttgtgatccagtcatatactggctcagggaaaactcttgcttatcttcttccaattctttctgatataggccctctgaagaggactatggaacaagaccattctgagaaaagatcaggtatagaagcagtcatcgtt

SEQ ID NO: 60903 - DNA, 276 bp, Zea mays
atccaagtcggcaacgcgtgctgggaactttactgcctcgagcacggcatccagcctgatggccaagtgcctggagataagaccgcgggacatcacgatgatgccttcagcaccttcttcagccagactggtgctgggaagcacgttccccgtgcaatcttcgttgatctagaacccactgtgatcgatgaggtgcgcactggcacgtaccgccagctcttccaccctgagcagctcatcagtggcaaggaggatgccgctaacaatttcgcccgt

SEQ ID NO: 60904 - DNA, 278 bp, Zea mays
agcaactggtggatggcatgggcaaacccacaaacagaaggagatgctcccaagacagatagtgtggtccttctggttgtttatatgtcccttgcctttggaagttcactatttgtgttcatgagaagccttcttgtggctacgtttggtttagcagctgcccagaagctttttataaaaatgcttaggtgtgtctttcgagctccaatgtcattctttgacaccacaccatctggtcggattttgaacagagtttctgtagatcaaagtgttgtgga

SEQ ID NO: 60905 - DNA, 277 bp, Zea mays
catcattgggtccgccaacatcaaccagaggtccatggacggtgccagggactccgagatcgccatgggcgcgtaccagccgtaccacttggcgactaggcagcctgcccggggccagatccatggcttccggatgtctctttggtacgagcacctgggaatgctggaagacgtcttccagcggcccgagagcgtagagtgtgtgcagaaggtgaacgaggtcgccgagaagtactgggacctgtactcgagcgacgacctggagcaggacctcccg

SEQ ID NO: 60906 - DNA, 273 bp, Zea mays
actggttctatcatcttgcatggcccgcaccagttgttggcaagctctcgaaggactacgagaggaagctgaaatgctacaagctaaacacagatgagagcccggacatcgcaagccagtacggggtccggagcatccccaccacgatgatcttgcaagatggcgagaagaaggattcggttatcggggccgagagagagagcacactggtcacatgcatcgagaaatttgtcgagacgtagaatgcgtagtggatctcttgagcggtttcct

SEQ ID NO: 60907 - DNA, 274 bp, Zea mays
ctcatcgatctacacacatacatagtttcttctactacacgactacaaacatggggaagcctgcgaagatcggagagtggggtggatacgccggcgatcgtcgggatctgagggctactccggaccggctgatcgaggtgaaggtcacggcggacaacagcagctgcatccgctccatctccttcatctacatcggagccgatggcaaaccgtacgaggaggggccatggggtttcggccatgctggcacggagtacaagattgatctgtgcag

SEQ ID NO: 60908 - DNA, 273 bp, Zea mays
catcattgggtccgccaacatcaaccagaggtccatggacggtgccagggactccgagatcgccatgggcgcgtaccagccgtaccacttggcgactaggcagcctgcccggggccagatccatggcttccggatgtctctttggtacgagcacctgggaatgctggaagacgtcttccagctgcccgagagcgtagagtgtgtgcagaaggtgaacgaggtcgccgagaagtactgggacctgtactcgagcgacgacctggagcaggacct

SEQ ID NO: 60909 - DNA, 289 bp, Zea mays
gctttctgtttctcaaaagatattttattgtattagctttgttggtggccaatatgtatggtcacgattacaatctttttctgctttccgtcgatggggcgattctgaacagagaccactagctcgccgtgcttgggcgttgatgcggaatgctgaagtattttatagggctgcttcattctttaacctattattgtttctttatggtggaaggtacaaaactgttgtagaaaggattctgaaggcaagacttgtttatgggagcccaacatgaatagagctgttagtt

SEQ ID NO: 60910 - DNA, 280 bp, Zea mays
gctttctgtttctcaaaagatattttattgtattagctttgttggtggccaatatgtatggtcacgattacaatctttttctgctttccgtcgatggggcgattctgaacagagaccactagctcgccgtgcttgggcgttgatgcggaatgctgaagtattttatagggctgcttcattctttaacctattattgtttctttatggtggaaggtacaaaactgttgtagaaaggattctgaaggcaagacttgtttatgggagccccaacatgaataga

SEQ ID NO: 60911 - DNA, 244 bp, Zea mays
cttctttgatgagcttgactcaattgcgactcagagaggaagtagtgtgggtgatgctggaggcgcggctgatagagtgcttaatcagctactgaccgagatggatggcatgaacgccaagaaaactgtgtttattattggtgctacaaacaggcctgacatcattgatcctgctcttctgaggccagggcgtcttgaccagctgatctacattccactgcctgatgagcagtctaggctccag

SEQ ID NO: 60912 - DNA, 183 bp, Zea mays
gccatcctcggcgtggacggcttctcgtcgctccccaagaactgcctcaccctctgctacatcttcttcgcggcggccatcgtcgtcaacctggtcagggacctggtgccgaagaaggtcgccaggttcatcccgctcccgatggccatggcgatcccgttctacctcgggtcattcttcgcc

SEQ ID NO: 60913 - DNA, 275 bp, Zea mays
tgtgattgttggcacagtcacagatgacaagaggatccaagaggttccagcaatgaaggttactgccctgaggttcaccgagacggcaagggccaggattgtcaatgctggtggggagtgcctcacatttgaccagcttgctctccgtgctccacttggcgagaacacagtcctcttgaggggccccaagaatgcccgtgaggcggtgaggcacttcggcaaggctcctggagtgccgcacagccacaccaagccatatgtgcgctccaagggaa

SEQ ID NO: 60914 - DNA, 271 bp, Zea mays
cttctttgatgagcttgactcaattgcgactcagagaggaagtagtgtgggtgatactggaggcgcggctgatagagtgcttaatcagctactgaccgagatggatggcatgaacgccaagaaaactgtgtttattattggtgctacaaacaggcctgacatcattgatcctgctcttctgaggccagggcgtcttgaccagctgatctacattccactgcctgatgagcagtctaggctccagatcttcaaggcctgcctaaggaagtcc

SEQ ID NO: 60915 - DNA, 274 bp, Zea mays
cctgggcgcgcctcgccacctcagacgtgcacgtaggcgggtaccttgtgcccgcgggcaccaccgccatggtgaacatgtgggccataacccatgaccccagcctgtggcctgagccaatggagttcaggcccgagaggttcatgggccctgccgccgaggacgtcccgataatgggttcggatctccggctcgcgcctttcgggtccggcaggcggactgccccggcaagtcactcgcggtggctaccgtcggattctgggtcgccaccctg

SEQ ID NO: 60916 - DNA, 277 bp, Zea mays
ccttgccaatgatagcttaaggacaactctgtgtgtgcgatttaagagtgaagtagtagcatgcggagttgtgtatgctgcagctaggagacaccgggttccccttcctgaagatcctccgtggtggactgtctttgatgctgatgacacaagaattcaggaagtttgcagggttcttgctcacctctacagcttgcccaaggcccaatacattccagtatataaagacaacgattcctttactgttaagagaatctctgatctacaggcttcaaag

SEQ ID NO: 60917 - DNA, 278 bp, Zea mays
atcccagccaccgccgctagaagaagagctcggcgattcccaggtcccgcgagaatatgccgaagcagatccatgagattaaggacttcctcctcaccgcgaggaggaaggatgcccgctcagtgaagatcaagaggagtaaggatgttatcaagttcaaggtgcgctgctccaagtacttgtacacgctctgcgtcttcgatgctgagaaggcaaacaagttgaagcaatctgttcccccaggtttgaccgtcgaggaggtctgattggatacatgg

SEQ ID NO: 60918 - DNA, 272 bp, Zea mays
cttggtgctgcttctggcacaactgtatctcatgtgtctgatattgtagggccggatggtctggtctacgctgttgagttctctcacaggagtggaagagaccttgtcaacatggcaaagaagaggaccaatgtgatccccattattgaggatgccaggcatccggcaaggtaccggatgttggttggcatggttgatgttatcttctctgatgttgcacagccagaccaggctaggatcttagcacttaatgcttcatacttcttgaagaa

SEQ ID NO: 60919 - DNA, 174 bp, Zea mays
atcatcatgttttgttgcttttggttcttgaacagcgtttgcagctagctgtaatgctttaattcgactttctatatattgttgaaccgtgttgtcgacaccatgccagcttgttttgcatctatgtttttgcttgaaaaaaaaaaaaaaaaaaaaaaaggggggccgccgatt

SEQ ID NO: 60920 - DNA, 288 bp, Zea mays
aggtcttctatctcaagatgaagggtgattactacagataccttgctgagttcaagactggagctgagagaaaggacgccgctgagaacacgatggtggcatacaaggctgcccaggacattgctctggctgagcttgctccaactcaccctattaggcttggactggcacttaacttctcagtgttctactatgagattctgaactcacctgatcgcgcctgcagtcttgcaaagcaggcttttgacgaggccatctcggaactggacaccctgagcgaggagtcta

SEQ ID NO: 60921 - DNA, 278 bp, Zea mays
gttccaggacatcacgacactgctgctcgaccccaaggcgttccgtgacaccatcgacctcttcgttgagcggtacaaggaccaagggatcaccgtagttgctggtgtggaagctagagggttcatttttggtcctcctatcgctcttactatcggtgctaaatttgtacctttgaggaagccgaagaagttgccaggcgaggtgatctccgaagaatattctctggaatacggaactgacaagatagagatgcatgttggagctgtacaggctaacg

SEQ ID NO: 60922 - DNA, 272 bp, Zea mays
catcgacatgtgtgattatgctgtggggctaagtcgccaactaaatggatccattataccatctgaacgaccaaaccatatgatgatggaggtgtggaatccccttggagttgtgggtgttataacggcatttaatttcccttgtgctgtgcttggttggaatgcttgcattgctttggtctgtggaaattgtgtcgtctggaaaggtgctccaaaactccactgatcactattgcaatgacaaaatagtgggtagtgtattggagaagaca

SEQ ID NO: 60923 - DNA, 276 bp, Zea mays
acttcacagcgtatcatcgttttccatcgctcctactcctatcatccagaaaatctgagcggtattgatggcgcccaaggcggagaagaagccggcggcgaagaaggtggcggaggaggagccctcggagaaggcggctccggcggagaaggcccccgcggggaagaagcccaaggcggataagcggctacctgcgggcaagtccgccggcaaggagggcggcgacaagaagggtaggaagaaggcgaagaagagcgtggagacctacaagatcta

SEQ ID NO: 60924 - DNA, 268 bp, Zea mays
gacgggctggcagagcgttgggacgaatggcagaaagtagaggtggtgaggcaggaggctgagtcggcaccgctccgcaatgactggatcgtcgattccacgtacaaccttcgtgccgtcgagctgtccggcccaaggtagccactccacgactccgatgaaagaaaacactgaattggccaagattcagtctaattgctgcttgtgtatatgaaaggtagcttttggaattgttagcgacaatttgaaaggatcttttttttggatt

SEQ ID NO: 60925 - DNA, 276 bp, Zea mays
acataatgcgcaaggctggtcagttgcatcttgtgaaaccatatatggttgcagttcagagtaacaatgtctctgctgtgaatgaagccttgaatgagctttatgttgaagaggaggactatgagagactccgtgaatcagttgacatgcatgacaactttgaccagataggtcttgtacagaagcttgagaagcatgaattgctggagatgaggaggattgccgcctacatttacaagaaggctggcaggtggaagcattcgatagctctatcga

SEQ ID NO: 60926 - DNA, 275 bp, Zea mays
cctacactgggtttgagctgtttagaattaaggagagggatatcccaattgaggtccttgaactcgagaacaagaacgacaagatcattgcatttgcatgggaacctaaaggacatcgctttgctatcatccatggtgatggccctaagcctgatgttagcttctacaccatgcgaacagccaataacactagccgtgtatccaagctcacaaccctcaaggccaagcaagctaatactctgtactggtctcctgctgggcgcttcatagttctt

SEQ ID NO: 60927 - DNA, 276 bp, Zea mays
catcaatgaatcatggtgccaaggtcttgatggttcgacttcaaggtactgatattctccaggactattgttagcatcccttgtggtccatctgcattagcagtgaagaaagtcgcatggggacttgcttgatatgttgttattgctcagacatggctgagaaggaggaaacaaagggccgctgccctgcctgccacacacgttatgacaaggatatgatcgtcaagatggccgccacttgtgacaggacagtggcagataaaaatgcggagaaga

SEQ ID NO: 60928 - DNA, 274 bp, Zea mays
acaaccacttactctcgtgcgctctccgtgggagcgaggactcgcggccggcgcacggcaggttctcctagatctccggcatcatcagtaacaaatggctgacggtgaggacattcagccccttgtttgtgacaatggaactggcatggtcaaggctggttttgctggtgacgatgcgccaagggctgttttcccaagcattgtcggacgcccccgtcacactggtgtgatggttggcatggggcagaaggatgcgtatgttggtgacgaggcc

SEQ ID NO: 60929 - DNA, 274 bp, Zea mays
tgagcttgttgagcattttgatccttgccaccccattcttgttggggggattggccttggtgaggagaacacaggattcatgcaggctagtttgaagcgccataggtggcacaggaaagttctgaagacaaaggatccaatcatagtttcaattggttggaggcgatttcaaacataccctgtgtatgcaatagaggatcggaatggtcgacaccgcatgctgaagtatacacctgagcatatgcattgctttgctatgttttggggaccactt

SEQ ID NO: 60930 - DNA, 271 bp, Zea mays
gggatctactattacaaaggttgatatattcagagatgctgcagtgcttatggtgaattatgtcgatgaaattcgagcacaaggttttaagttggagtacctgaatattggaggtggtttgggaatagattaccatcataccgatgcagtcttacctacacctatggatctcatcaagatagtacgagaattagttctctctcaagatcttactcttattattgaacctggaagatccttgattgctaatacttgctgcttcgtcaataga

SEQ ID NO: 60931 - DNA, 272 bp, Zea mays
tctggtttcctatatgatatgctgcaaaaagaggtaatttctttgagaaagacatgccatgagaaggatcagattctaaaagataaagatgatgctattgagatgttagcaaagaaagtagacaccttaactaaagcaatggaagtggaagctaaaaaggtcagacgggaggttgcatccatggagaaagaagttgcagcaatgcgtgccagtaaagaacaagaaatcagagccaagcggcttggtacgaaaggctctggtagttcacaact

SEQ ID NO: 60932 - DNA, 201 bp, Zea mays
aaaggaaaagaagaagaagaagatcaaggaggtttctcatgagtggcaattggtaaacaagcagaagccaatctggatgaggaagcctgaggagattaccaaagaagagtatgctgctttctacaagatcttgaccaacgactgggaggagcatcttgccgtgaagcacttctctgttgagggccagcttgagttcaaggc

SEQ ID NO: 60933 - DNA, 252 bp, Zea mays
gtcggagggaaccgaaaactcagggtctcgaatttcctaggagcggaggcgatggctgggaagggaggaaaaggattgctcgccgcgaagacgacggcggccaagtcggcggagaaggacaaggggaagaaggcccccatctcacggtcctcccgcgcgggcctccagtttcctgtggacgaatccaccgtcagctgaagcaaaggactcaggcaaatggccgcgttggtgccactgcagccgtctactctg

SEQ ID NO: 60934 - DNA, 240 bp, Zea mays
caatgagaaggaccgctgcccagggtgcaagggtgagaaggtcgttcaagagaagaaggttcttgaggttcatgttgagaaggggatgcaacacaaccagaagatcaccttccctggtgaagctgatgaagcgcctgatactgtcactggagacattgtattcgtcctccagcagaaggacactccgaattcaaaagagagggtgaagatctcttctatgagcacaccttgtctctgacc

SEQ ID NO: 60935 - DNA, 195 bp, Zea mays
ggaacatccgtccgtgaggaccaaaggattcttggcagtggtgtgcatgttgttgttggtacacctggtcgtgtgtttgatatgctgcgcagacagtccctccgccctgataacatcaagatgtttgttctagatgaagctgatgaaatgctttctcgtggtttcaaggatagatttacgacatcttcgagcttc

SEQ ID NO: 60936 - DNA, 126 bp, Zea mays
ggtgccccgaggtcctcttccagccatccatgattggtatggaggctgctggaatccatgagacaacatacaattcaatcatgaagtgtgatgtggatatcaggaaggacctctacggcaacattg

SEQ ID NO: 60937 - DNA, 262 bp, Zea mays
gggacagacaggccaggactgctctctgaggtcagcgctgtgctcaccagcctcaagtgcaacgtggtcagcgccgagatctggacccacaacacccgagccgcggccgtgatgcgggtcactgacgaggacactgggctggcggtcacggacgccgagaggctggagaggatcagggagaagctgtcgtacctgttccgtggaggcaatctctctcgaggtgccacagtgtcgtcgaggactgccaccacgcacaccgaga

SEQ ID NO: 60938 - DNA, 135 bp, Zea mays
agacactgagtcaccttccaaggacaccaggactgagagggtggaatcttatgctgcaaagccaagcacgaagaaatggttttgttgtgtgacagccagccctacgcaatcctgaggaagacaactgcatgcgtt

SEQ ID NO: 60939 - DNA, 281 bp, Zea mays
agcaaccaccgcctccccgatctcgtcgagaggaagcccaatcccgaaaccgtcgccgtattccaatggcgcccaaggccgagaagaagcccgccgccaagaagcctgcggaggaggagccggcggcggagaaggccacggcggggaagaagcccaaggccgagaagcgctccccgcgggcaagtccgcaggcaaggagggtggcgagaagaaggggaagaagaaggcaaagaagtcggtggagacgtacaagatctacatctttaaggtgctgaagcagg

SEQ ID NO: 60940 - DNA, 279 bp, Zea mays
gtcttcatggaggagttcaggtagacgaagaacgcgctcggaggcctcttgggcttgttcttcgtcttcatggaggagttcaggaagccctacaaggagaagcaccccaatgtgaagcaagtctccctgattggcaaggctggtggtgacaagtggaagtccctgtctgatgccgagaaggctccctacgtgtctaaggcagagaagctcaaggctgagtacaccaagaagatcgacgcttacaacaacaagcagtctggagaccccacggcgtctggt

SEQ ID NO: 60941 - DNA, 268 bp, Zea mays
gttgggatcctcaagacaggctgcggcaactcgtacgccccatttcctaaaggttgcttctacaccacctccggtgggctgcagagcttcgagcacccgttgcacgaggtcaaagcggtgccacgcgtggacagccaaggccagatgtgcggctccatcttcaaggtcgacagcgagagcaagaagaagcaggacgctagcatcccccgcgtcggcagtgctgccgactggtccaaccagttctgaccatcttcttgccatccattgt

SEQ ID NO: 60942 - DNA, 148 bp, Zea mays
cttatttatgagctaccactagcagagatggttggcgatttctacgatcaactgaaatcacgaagtaaaggatatgctagcatggaatattcagttgttgggtacagagaaagccaacaagtaaagctggatatacaaatcaacgggg

SEQ ID NO: 60943 - DNA, 223 bp, Zea mays
aaggatctaattcgagcccatatgcttaatgtagatgaagaaaattacaaagaagctgtggactcttcatataaagtatcagtcactccaggaatcagtaatgagattcgtcagataattgatgataactcggccgaggacaattcctcatcgtcagatttttggatttagtggctgctttaaaggagtttattgcaaaggagggcaacggtgagctacctct

SEQ ID NO: 60944 - DNA, 180 bp, Zea mays
agaagcgtcatcacaccaggttgtttgctaataatcacaatgataatcgtgctgtcgataaaagcgggaacatactgcctggcaccgtggtggactcgaagatctgccatccaactgagtttgatttctacctgtgcagccatgctggcattcagggaacaagccgcctgcccattacca

SEQ ID NO: 60945 - DNA, 200 bp, Zea mays
cacaagagcttcgaaggaactcccaaggttgtcaagccagaaagaaacgttgggaatgagaatgctactaaagtctcaagcgcctttgctggcaccagagagaaatgtgttggatgcagcaagacagtctatccaactgagagggtcactgttaacaacactagtaccacaagagctgcttcaagtgctgccatggaggg

SEQ ID NO: 60946 - DNA, 205 bp, Zea mays
gtgggacgactggaaggacgacaaccctcgcggcgctggcaacaagaagctcacgccctgtggctagactgcaaatcgaagcacgctcgctgtgtgatcgtacggtgtttgactcgaccagtatttagtttgtatctgacgatcagtgtatttattatataggctgcttctgtaacagtgtgtttatacaccatccactgcagct

SEQ ID NO: 60947 - DNA, 199 bp, Zea mays
atagaagactgtgaattcacctatttgtccactcagatacttcactttttgggaaatgaaggccccaaaacatcagatcccagtaaatacatacgctatatatacaatagggtgatacttgaaaatgctacagttcgagctagtgcagtcagcacattggcaaatttggtgccttggttgactcactcaagcctcgcat

SEQ ID NO: 60948 - DNA, 276 bp, Zea mays
gactagttctagatcgccgacgcctacttcggcctgcttaaggtcggtcccgaaggcgggctggccacgccgctcgcaacggaggccgagggcgtgcgcctcaacttcaccaacgacctcgatctcgacgacgagggcaatgtgtacttcacggactccagcatcactaccagagacggaatttcatgcagttagttttctcgggggaccctctgggagacttctgaaatataacccacagacaaaggaaacgacagtactgcatcgcaacctcca

SEQ ID NO: 60949 - DNA, 165 bp, Zea mays
atggtggattggcatctcttatcttctgtggctatatcatctatgacacagacaatatcatcaagcgccacacatatgatcaatacatatgggcagctgtttcactctacctcgacgtcatcaacttgttcctgtctctgctgcagctgctgagggcagccgata

SEQ ID NO: 60950 - DNA, 229 bp, Zea mays
atgcaaaggagttgcacactgccatagccatggtgtccttcaccgggatttaaagccacaaaacctgctggtggacaaggagaagggtatactgaagattgctgatcttggactcggtagggctttcactgtgcccatgaaaagctacacccatgagattggaccctttggtacagagctcctgaagttttgcttggagcaacacattactcaactggcgttgatatgt

SEQ ID NO: 60951 - DNA, 208 bp, Zea mays
agaaggctgaggagctcatcaggatgggcttgcatccaagtgagatcatcattggctacactaaagccatcaacaagacaattgagatcttggaggatcttgttgagaaaggctcagagaacatggatgtgagaaacaaggaggacgttgtgttgaggatagatccgctgtcgcgagcaagcagtttggtcaggaggatataatgtgc

SEQ ID NO: 60952 - DNA, 187 bp, Zea mays
ggaaaaaccttgccacgagtcgccgacactccatcccggaagagctaacgaggtgacaccccaccgcgcccatgggtgacagccagtactccttctccctcaccaccttcagtccgtcggggaagctcgtgcagattgagcacgcgctcacggctgtcggaccgggcagacctcgctcgggatcaaa

SEQ ID NO: 60953 - DNA, 275 bp, Zea mays
caaaaagaaaaattaaatgaattaataggagctattcatgagaaggatgaactcttggatagccaagaggaattccttattaaggaaaacaaaaagcatgttaaggcgaaaaatgcttatgctcaggaagtagagaaatgtgaaaaattaactagtgagcttgaattttccatgacactatctctcaccttagaattgaaaatgccaaattaattgctaaggttgagaaattaaatgcttgtgatgattctcttgtcaaccttaagaatgataat

SEQ ID NO: 60954 - DNA, 277 bp, Zea mays
acgtaagtgggacaagaggatgctagaatttgttcaacacgtggataaacccttaatctggtgtggggacttgaatgtcagtcatgaagaaatcgacgtcagccatcctgatttctttagcagcgctaagctgaatggatacaccccacccaataaagaggacgtggatggccttgattcaccccagcagagagacggcgttttggcaacatattattccaaggaaagctggtagatgcttacaggcacctgcacaaagaaaaggacatagacggtg

SEQ ID NO: 60955 - DNA, 184 bp, Zea mays
atcaagatgtttgttcttgatgaagctgatgaaatgctttctcgtggtttcaaggatcagatttatgacatcttccagcttctgccatccaagattcaggttggagtcttctctgctaccatgccacctgaagcccttgagattacccgcaagttcatgaacaaaccagtgagaattcttgtga

SEQ ID NO: 60956 - DNA, 271 bp, Zea mays
gatccgtgttccgtgtccgcgtccagtgtgtccgctactccgctccccctcagtcctcagttcctcacctagcggtagcgtgcgcgcgggagacgtagatggcggcttcggaggcggcagcggcggcggcaacaccggtgacgccgacagatcgaccggtgatcgcgatccacagcctggaggagtggagcatccagatcgaggaggccaacagcgccaagaagctggtggtgattgacttcactgcaacatggtgtcctccgtgccgcgc

SEQ ID NO: 60957 - DNA, 260 bp, Zea mays
ggattcatgacaatgagccattgatttctaaagttttccaagctaacctatttgctttgtaggcaagaaggtgagcaaggcacctaagatccagtgcttgtgaacccttgaccctacagaggaagcacactagaatcattgacaagaagattgccaagaagaagtctgaagctgtcgagtaccaaaagcttcttcccataggctgaaggaatagagaccgccacaacgagagcttggccaagagaagatccaagctttct

SEQ ID NO: 60958 - DNA, 254 bp, Zea mays
cccagcacggggtgactgctcctgccggaatccacaacctgttctccttgataagcaagaggatagagatgaaggggttcatccagagcgattacgtgcacctgttcccgcagttcgtcgatgacatcaccaggcattacagagacgggaagatcgtgtatgtggaagacatgagcgttgggctggagagtgggccggcttccttcgtcggtctgttcagcggtaaaatgttggccagcaggtcgtctgtgtgt

SEQ ID NO: 60959 - DNA, 274 bp, Zea mays
gacggacacagattgttcaagtttaataaagtgtttagtccatttgcttctcaagctgaggttttttctgacatacaaccactaatccgatcagtcctggatggattcaacgtttgtatttttgcatatggtcagactggttctggcaaaacttacaccatgagtgggcctagcacatcgaagcaagattggggtgtcaattatcgggctttaaatgatttgtttgatatttcactaagtagaagaaatgccttctcatatgaggtgggtgtac

SEQ ID NO: 60960 - DNA, 228 bp, Zea mays
aacaagggagcttgtgcaagatttgcatttgctgctgcgatttttggtgatttccaagaagcacttttctggctacagctgcctcaagctcttcgccacttcctgggtaaatcaacaagtagatcaagagagaagatctcacaatcaagttaaaaccggtttctgaacaaagctccagatttaatcggatagcttcaagagagagatctgcttctgaaaagttcacga

SEQ ID NO: 60961 - DNA, 266 bp, Zea mays
gactagttctagatcgcacaaatcctcttcctcgagttctcctcaaccaaattcaaggtcacagcggcgaacctctcggctatcatgtctggccgcggcaagggcgggaagggtctgggcaagggcggcgccaagcgccaccgcaaggtgctgcgcgacaacatccagggcatcaccaagccggcgattcgcaggttggcgaggaggggcggcgtcaagcgcatctccgggctcatctacgaggagacccgcggcgtgctcaagat

SEQ ID NO: 60962 - DNA, 263 bp, Zea mays
agatcagcaaacagtacttggcaaatgtctcactgaaaattaatgttaagatgggaggaagaaacactgtgctcctggacgcaataagttggagcattcctttggtcagtgacatcccaactattatatttggtgcagatgtaacacaccctgaaaccggggaggactcaagtccatcaatcgctgccgttgttgcttctcaagattggccagaagttacaaagtatgctggattggtttgtgctcaggcacaccgggcagag

SEQ ID NO: 60963 - DNA, 247 bp, Zea mays
atcaagaaatggaaggtgatctacacagatgacgaggacgatatgatgctggtcggggacgatccatggagtgaattttgcaggatggtaaaaaggatatacatttattcctacgaggaggccaagtccttgactcccaaggcgaagtgccggccatcggtggtgacaccggcgtcaagccgacccaagcaaatgccaccagatctgacgtgcacagagcgatccgacaacagtgctccgttgctgc

SEQ ID NO: 60964 - DNA, 279 bp, Zea mays
ctagcatccgcagttcccccgcgcccgagacgcaaccccgcgccaggagtaagtttgttcttttatcgatattatcgatatggcgagggaggagaatgtctacatggccaagctggctgagcaggccgaaaggtatgaagagatggttgagtatatggagaaggggctaagactgtagatgtggaagagctcactgttgaggagcgtaacctcttgtcggtcgcatacaagaatgtgattggggctcgccgtgcttcatggcgcattgtctcttctatt

SEQ ID NO: 60965 - DNA, 264 bp, Zea mays
acaccacctcgccgcgatctccgtagcctccgtcgcgtcgagcatcgatcatgtcggcctactgcggaaagtacaaggatgagctcatcaagaatgctgcctacattggcacccctggcaagggtatccttgctgctgatgagtccactggcaccattggcaagcgcctttccagcatcaatgtcgagaacgttgaggagaaccgccgtgccctccgtgagctccatatatctgacctggtgctcctccatacatcagcggtgt

SEQ ID NO: 60966 - DNA, 262 bp, Zea mays
cggctcgaggggaggtttttttgctgaccagtttgagaatttggcaaactatcgagcacattatgaatgtactggtcctgagatttggaaacagactaaaggtaacctgcatgccttcgttgcagcagctggtactggcggtacaattgccggagtctcacgatatcttaaggaaaagaacaggagcatcaaatgttttttaatggaccctcctggatctggtctgttcaataaggttaccagaggggtgatgtacacaaaa

SEQ ID NO: 60967 - DNA, 274 bp, Zea mays
cctgacaggaaagcctgttattgtcaaactcaagtggggtatggagtacaagggttatcttgcttctgtggactcatatatgaatctccagcttgccaacactgaggagtacattgatggtcaattctctggaaacctgggagagattctgatcaggtgcaacaacgtcatgtatctccgaggcgttccagaggatgcagagatagaggatgcagagtgagaagatgcgatcaatgttagattgataaatgtaatatggttctgacatctatgt

SEQ ID NO: 60968 - DNA, 214 bp, Zea mays
gcgagacggagacagagagagagatggtgacgacggactgggggccgatcatcgtggcggtggtgctgttcatcctgctgtcgccggggttcctgttccagctgccggcgagggtcagggttgtggagttcggcaacatgggcaccagagcgctcgccatcctcgtccacgccatcctctacttctgcatactcaccatcgtggtggtagccat

SEQ ID NO: 60969 - DNA, 264 bp, Zea mays
gctgatctgctatcccaggcagaacatggtccagatagtcaggttgaactagttgttgctggagacggtgttgatctgggtgccatacgaggcagaagttagcaagcagtgcaacgcgcttccacagaggtgaattcgcctcaaaagcacttagccacagcttcactgtgttcgcgaaagatatggttgaggcgatatcattctcaaatctgtatgcccctgagcatttgatcatcaacgtaaaggatgctgagcagtgggagg

SEQ ID NO: 60970 - DNA, 268 bp, Zea mays
gctccgcagatattcaaaagcacgctctggtaatagtgttacatcgcaaaatgatgttaaccaagcatataagccaccaaatatcgaaatgtatgaaaaacgtgtccaagaactgacaaaaacagccgaggattctcagaagaaagcagatcagtgcgagaagatttacagttgaagacaaaacaagaaacagagatgcaagaagagttggaagggctaagagataccttgcaatctgaacgacaagttccaaagacataaaaaatga

SEQ ID NO: 60971 - DNA, 259 bp, Zea mays
attctagggttttgctgctctccgaccccgagctccgaaggccgcagcatcaggcgcggcccccctcgcgtgtgaccgagatggcgctgccgaatcaggggaccgttgattaccccagcttcaagctcgtcatcgtcggcgatggtggaactggtaaaactacatttgtgaagaggcatctcactggagagtttgagaagaaatatgaaccaaccattggtgtggaagttcatccgttggatttcaccactaactgtgg

SEQ ID NO: 60972 - DNA, 251 bp, Zea mays
cagtcgaatcgagcgaatctcgagccgaagctctcaagtctcccctgataggattgtttgagaagagtagagctgggacattcttcctttatgtccaagattataaggaaaatgacccaagtactcataagggttacaaccttactaaactaacgacaaaagaacttatctcaaaatatggtttggaggataatacgatagacttcattgggcatgcagtggctcttcatagagatgatagctacttgaca

SEQ ID NO: 60973 - DNA, 262 bp, Zea mays
cgtggactccgcggaagggatcgcctacctgcaccacagcgcgacgccgcacatcatccacagagacgtgaaggcgagcaacgtgctcctggacgccgacttccaggcgcgggtcgccgacttcggcttcgccaagctggtcccggacggcgcgacgcacgtcaccaccaaggtgaaaggcacgctggggtacctggcgccggagtacgcaatgctcggagaagcctccgagagctgcgacgtcttcagcttcggggtcacg

SEQ ID NO: 60974 - DNA, 261 bp, Zea mays
aaaggacaaaaggagggcatttcttaaaatctgcagcaactttaggcctgtgatgcaccacttctttcttgaaagattcttgctgcctgctgattggttccaaagtagacttgcttacacaaggagtgtagcagcaagctcgatggtagcatcatatagtcggtcttggggatcgccattccatgaatattctcatcgaccaagacacagctgaggttgtacacattgatcttggtgttgcatttgaacagggtctcatgc

SEQ ID NO: 60975 - DNA, 271 bp, Zea mays
gaccaggaatgctgtttcagggaatgtatatacatttacagctcttatcagtggtttctgcaaggatggaaatatggatgaagcaactaggttgtttcataaaatgatggagagttccctagtgccaaatgaagtgacttttaatgttatgatagaaggtattgccgtgtaggcaatattaggaaggcattccagttatatgatcagatgctagatagaggcctaacgcctgacaattacacttacaggtcactgataagtgtagtttgtt

SEQ ID NO: 60976 - DNA, 234 bp, Zea mays
gttgcggaggcaggaagagagacgacggcggccatggcgacctccttccaggggacgaccaccaagtgcaccgcctgcgacaagactgtgtaccttgtggacaagctcaccgccgacaaccgcatctaccacaaggcctgcttccgctgccaccactgcaagggcaccctcaagctcgccaactacaactccttcgagggagtgctctactgcaggcctcacttcgaccagctg

SEQ ID NO: 60977 - DNA, 270 bp, Zea mays
gagagttgttcaggagaagatgcctgaaggcgtaaatgaaagcggccttaccttgactgggttcctttttctgcatgccctctttattgaaaaacgtcgtttggaaactacttggactgtattgaggaaatttggttacgacaatgacatcaagcttagggatgaccccattgcattgccaattaaaagagctcctgatcaaactctggaaatgacaagcgagtggtcgatttcttgagagggatattcaacatgtttgacattgataat

SEQ ID NO: 60978 - DNA, 271 bp, Zea mays
acttcaacacatttattcgtgcatgtgagaaatatggtcgcaatgatattaaaagtatatcatctgaaatggagggtaagacagaagaggaagttcaacgttatgctagagttttcaaggagagatacaaggaactgagtgattatgatagaattataaaaaatattgaaaggggggaagcaaggatatcccgcaaggatgagattatgaaggctattgggaagaagctagaccgctacaagaacccatggttagagttgaaaattcagta

SEQ ID NO: 60979 - DNA, 277 bp, Zea mays
gaggcacttaaattgtgtgtgcacactgtgcctgtgatgccaatcacactgacttctaaacccttttgcagtctgtcacaagggtgaagccatatatctgacacgatgccgttgaaactcgacgatggctggaacaacatccagttgaaccttgctgatctgacaaaaagggcgtacggcacaaatttcgtcgagacgctgcgggtgcaagttcatgcgaactgccggctcgctatcatctacttctctgaccgcctctactcggaggaggagctgc

SEQ ID NO: 60980 - DNA, 271 bp, Zea mays
gtgcggcctctactgacctggagaaggctgaggcccagatcggagtcgatgttcacagtgccctcaatgctgcattgaccggttaattggtggcattttaaattgtcttgtatttttcatctacagttttagagtgagtttaagtttgcaaactcatgggcatgggatggagggaatgatcctaaataaattatactccatctaaaacatggacatatgtttcttgtttcctgaatcctgcatggatttctttttgtactggtgaacattt

SEQ ID NO: 60981 - DNA, 267 bp, Zea mays
ctcgagccgctcttccccaaccccgcgcgcgggggagcgataaaccctagtcttcgccgtcgtcgcaggaggacccgcgatgtcgcacttcgggaggtcaggcccgccggacatccgcgacaccttctcgctcctcgtcctcaacatcagcgttcgaacacggccggacgactcttcccgctcttcgagcgctacggcaaggtcgtcgagtctgtaaccccgagggacaggaggaccggggactcgaggggtttcgcgttcgtgcgg

SEQ ID NO: 60982 - DNA, 268 bp, Zea mays
agaaaaagctagaggaagacgaggacttcctcgacaatctcaacccttgcactcgacgggaaatcccagcccttggagatgcgaacatgaggaacatcaagcgtggagaggtcatacagctcgagaggaaaggctactatagtgtgatgccccttttatcagatcgtccaaaccggtggtcctgtttgcgatcccagatggcaggcagcaggcctcgcttagctaggcatggtgaccaccttttgggcacatggaattcctgagttgg

SEQ ID NO: 60983 - DNA, 173 bp, Zea mays
gaagttttgaactatttgggtgcactagatgatgaaggtaatctgacacagttaggtgagatgatgagcgagtttcccctggatccacaaatgtcgaagatgctcgtcatcagtccaaaatacaactgttcgaatgaaatcttatcagtatctgccatgctgtcagcacccaa

SEQ ID NO: 60984 - DNA, 291 bp, Zea mays
ggcggcatgatcagggagctgttaatatccttcaggaaggccactgggcagaagccattgagaataatattctacagggacggtgttagtgaaggccagttctatcaagttctcctttacgagttagatgccatccgtaaggcatgcgcatccctagaaccaaattaccagcctcctgtaacatttgtggtggttcaaaaacgtcatcatacgagactatttacaaacaatcacaaagacagaagtagcatggacaagagtggaaatattttgccaggaactgttgttgat

SEQ ID NO: 60985 - DNA, 292 bp, Zea mays
gcaaccaggcagaaccttggatggccctatgacacattctttgtaccagaggacgtcaagagtcactggagccgccacacacccgaaggtgctgcacttgaggctgattggaacgctatgtttgcagagtacgagaagaagtatgcagatgatgcagcaaccttgaaaagtatcatcacgggggagttacccactggctgggttgatgctcttcctaaatacactccagagagcccaggagatgccaccaggaacctctcccagcagtgcctgaacgcgcttgctaatgttg

SEQ ID NO: 60986 - DNA, 288 bp, Zea mays
aagcaatgcctgataaagtgtttgatgtgctgaatgaagttgttgttgatcgaggttccaatccatacctatcaaaaattgagtgttatgagcataaccaccttatcactaaggtgcaaggtgatggggtgatagttgcaacaccaacaggcagcacggcatattctactgcagctgggggatcaatggttcatccaaatgtcccatgcatgctgtttactccaatctgccctcactcactgtcatttagacctgtcatccttccggattccgcacggcttgaattaa

SEQ ID NO: 60987 - DNA, 289 bp, Zea mays
caatgagcttggagcaatggtggatcgcatggaatcggcgaaactgaagactgttaatcttactgataatgatttagcaaaggaccaccttagatactttattggaggtagatcagaaataaaagatgaacttgtttaccggttcatttttccagaaaggcctggtgcccttatgaaatttttggatgcattcagccctcgttggaacatcagtcttttccattaccgtgcacagggtgaaactggagcaaatgtattagttggtatacaagtgccgccagtggacttc

SEQ ID NO: 60988 - DNA, 284 bp, Zea mays
caccgtattgtgagcaagagagcagttgaagctggcgaagatgcagcatctgggcctggcaagggcgagaagattaacataaaggatgatgtttcggcggtgaagaagggtggctgctgctctagctgacctgccctgctgtattttttttggagctgtggtgatgtagcttatggtacggcatttccagcgaccgagaactggtagtggcattagcagcttctatgttacctagagagtttattgtcaaactgggggaaaaaaactgaaggttagatcggtgt

SEQ ID NO: 60989 - DNA, 293 bp, Zea mays
ggtcaagggataggagtcggtccaggagtccagatgatagaaatccagggaataacctttatgtaactggattgtctactcgtgtaacggaagatgatcttgagaagttctttagtaaagaaggaaaggttaagaactgtcatgttgttcttgatcctaggacaaaagaatcccgtggctttgccttcgtgactatggatactcttgaaggtgcaagacgctccatcaagtatctgcaccgcactgtacttgaaggtcgcctggtcactgtagagaaggctaaaagaactcgt

SEQ ID NO: 60990 - DNA, 291 bp, Zea mays
tgccagtactgcaatggctacgaagcttgtggttctcggtatcccctgggatgttgacactgaagggttacgagagtacatggccaagtttggacccctagacgattgtgtcgtcatgaaggagcggtcttctgggcgatctcgcgggtttggctatgtaacattcgcctcagctgacgatgcaaagaatgttcttgattgcgagcatgttcttgggagccgtacattagaagtgaaggtagctactccaaaggaagaaatgaaatcacaaggatcaaagaaagctacaag

SEQ ID NO: 60991 - DNA, 193 bp, Zea mays
ctcgagcgtgaagaaaggagcgtaacttaacccaagtattgaagaccaggcaaattggggagatgaatatgtccggttaaaatccaaacttgatgcacttcagaagagtcaaaggcagctgttaggagaacaattgagttcactgaccataaaagaactccagcaactggagcaacaactggacagttctttg

SEQ ID NO: 60992 - DNA, 283 bp, Zea mays
ctgagcgaaaagatcagtctcggaagggccattgtcggcagcaaggtcaaggaggtggacgagcggtaccaggtctcagaactcaccaagtccgccttggctgccgccgagcagaaagccagcgtcgcgggctccgctatactgagcaaccagtatgtctcggctggtgcctcgtggctaacaagcgcgttcgatatggtaacgaaggcagcgggcgacatgacctcgatggccaaagataaggtggagagggccgaggaggagaggaaagccatcatgtggg

SEQ ID NO: 60993 - DNA, 289 bp, Zea mays
ctcgagccgtgaagaaagggcagtacttaacccaagtattgaagaccaggcaaattggggagatgaatatgtccggttaaaatccaaacttgatgcacttcagaagagtcaaaggcagctgttaggagaacaattgagttcactgaccataaaagaactccagcaactggagcaacaactggacagttctttgaagcatattaggtcaagaaagaatcagctcatgttcgattcaatttccgcgcttcagaaaaaggagaaagcacttacagatcaaaacggtgtcctg

SEQ ID NO: 60994 - DNA, 286 bp, Zea mays
gcccatcgggacggcggcgcagggcccgtgacgacaaggactacaaggagcccccgccggcgccgctgttcgagcccggggagctcaagtcctggtccttctaccgcgcgggcatcgccgagttcgtcgccaccttcctcttcctctacatcaccatcctcaccgtcatgggcgtctccaagtccacctccaagtgcgccaccgtcggcatccagggcatcgcctggtccttcggaggaatgatcttcgcgctcgtctactgcaccgccgggccgatccggagaca

SEQ ID NO: 60995 - DNA, 287 bp, Zea mays
acgctagatctgcatggtcccgttgcagcacaattgggaacatacttgatcaaggtcactgtggctcttgttgggcttttggtgctgtggagtgcctccaggaccgtttttgcattcacctcaacatgagcattttactttcagtcaatgacctactggcatgctgcggttttatgtgcggcgatgggtgtgatggaggctatcctatagaggcatggcgctactttgttcaaaatggtgttgttacggatgagtgtgatccatacttcgacccggtcggttgcaag

SEQ ID NO: 60996 - DNA, 289 bp, Zea mays
attcggctcgaggatgttcacaagagcgttaagtacaatgtgtgggctagcactcccaatggtaataagaaacttgatgctgcctatcaagaggctaaagaaaaatcaagtgaaactcctgtttttcttcttttctctgtgaatgcaagtggccagtttgtcggccttgctgaaatggtgggtcgtgttgattttgaaaaaacagtagagcattggcaacaggacaaatggactggttgtttccctgtcaagtggcacattgtgacggatgttccaaacagcttgctga

SEQ ID NO: 60997 - DNA, 289 bp, Zea mays
aaaaaaaactctctttctctctctttcccagccctctctctccctctccacccggccgccaccatgtcaggcctctacagccagggcttctcccctgcaagaaccctctccccccagattaggagcaaccccgacgctgacagccagtacttggccgagcttctcgcggagcatcagaagctggggcccttcatgcaggtgctgccgatatgcagccggctgctcaatcaagaaatcatgcgggtatcaagcatggttcatgaccatggatttagtgatcttgacaggc

SEQ ID NO: 60998 - DNA, 286 bp, Zea mays
actgctggagacaaacatgagagacgacatggggatgacgatcgaagacatgatcgaggagtgcaaggtgttctacttcgtcgggatggagaccacgttggtgctgctcatgtggacgatggtggtgctcagcatgcacccggagtggcaggaccgcgcgagggaggaggtgacggctctgttcggcagggacggcaagcccgagtatgacggcctaagccacctcaaagtcattgcaagaacgggactgctaagcaagctaagatttcaatggcatattccttca

SEQ ID NO: 60999 - DNA, 288 bp, Zea mays
gcaaatccagaaactgaaagtgagctatggcgagcgaggctccccaccgaagattccaggcggacgactctggtcttcgacacggagcttatcgccgtcaacgggaagacatctggcggtgcaaatccagaaactgaaagtgagctctgatacgatgcatttggatggagagtttcagctcgagggagtagtagcagagtcacgtagttcatttggtgccgtgaaagggctgttgtcttgtttccttcatgcatggcaatttatgttttagagatgtcatactctggg

SEQ ID NO: 61000 - DNA, 288 bp, Zea mays
tcgggaagaccctccttgcgcgtgccgtcgctggggaggccggggtgcccttctactcctgcgctgcctctgagttcgtcgagctcttcgtcggtgtcggtgcctccagggtgcgcgacctcttcgagaaggccaaggccaaggcgccctgcattgtcttcattgatgagattgatgccgttggaaggcagcgcggtgccggacttggtgggggtaatgacgagagagagcagaccattaaccagctcttgacggagcaggatggcttcgctggcaacagcggtgtca

SEQ ID NO: 61001 - DNA, 288 bp, Zea mays
gagtcaaagcaggatcttgctgttgttccacctaacagcacagtaatatatgaagttgagcttatttcatttgtgaaggacaaggagtcgtgggacttgaacaatgaagagcagattgaggctgctggtaagaagaaagaggaagggaatgcattgttcaaatcgggcaaatatgctagagcttccaagcgatatgagaaggctgccaagtacattgagtacgacacttcgttcagtgaagatgagaagaagcaatccaagcaactgaagatcagctgcaacctaaac

SEQ ID NO: 61002 - DNA, 285 bp, Zea mays
ggcggacgtaaggcgaaggagtagcagcagcaggcggcgccgagtagcggctccccatctcgagcttgccaccatggctagaggattgaagaagcatttgaagaggctcaatgcccccaagcattggatgctggacaagcttggcggagcttttgctcccaagccatcttctggacctcacaagtctagggagtgcctgccactgatcctcatcatcaggaacaggctcaagtatgctcttacataccgtgaggtcatttccatcctgatgcaacgccatgtact

SEQ ID NO: 61003 - DNA, 286 bp, Zea mays
ggcggacgtaaggcgaaggagtagcagcagcaggcggcgccgagtagcggctccccatctcgagcttgccaccatggctagaggattgaagaagcatttgaagaggctcaatgcccccaagcattggatgctggacaagcttggcggagcttttgctcccaagccatcttctggacctcacaagtctagggagtgcctgccactgatcctcatcatcaggaacaggctcaagtatgctcttacataccgtgaggtcatttccatcctgatgcaacgccatgtactt

SEQ ID NO: 61004 - DNA, 286 bp, Zea mays
caataatatgcagatacagatttcttctcttgcgttccattgcatctcaagatccacttagtgtttcaattgctgttttgcaacagttcaacattccccctgaaatgtatcaagttggctacacaaaattatttttccgtacaggacaggttgttgcactggaaaatgctaaaaggcagatgcttcttggaaccctccatattcaaacacagttccggggtttgcattctcggcggggatatcaacgactaaagaaaggggcgatgaatttgcaatcatttatacg

SEQ ID NO: 61005 - DNA, 282 bp, Zea mays
acatcaccctgttccgagggctcctgtactgggtggcgcagtgctggggtccaccgtggcgtgcttcctgctccgcttctcgacgggcgggcagaccacgggcaccttcgggctgacgggcgtgtcggtgtgggaggcgctggtgctggagatcgtgatgaccttcgggctggtgtacacggtgtacgcgacggcggtggccccgaagaagggcagcctgggcaccatcgcccccattgccatcggcttcatcgtgggggccaacacctggtgggcggcgct

SEQ ID NO: 61006 - DNA, 289 bp, Zea mays
aagaaaactagaaaaggctcctcccgaccgcaacgcccctcatctccctcgaccccgacatccccgacccgatggcgcccaaggcggagaagaagccagcggagaagaagccggcggccgaggagaaggcggagaagacgaccgcagggaagaagcccaaggccgagaagcggctgcccgcgtccaagtcctccggcaaggagggcggcgagaagaaggggaagaagaaggccaagaagagcgtggagacctacaagatctacatcttcaaggtgctgaagcaggtgca

SEQ ID NO: 61007 - DNA, 281 bp, Zea mays
gaagggttgtactgcatggcaactagaaacttcaagaaagctgctagtttattcttggattcaatttcaactttcacgacatatgagctattcacatatgatacattcatcttctacacagtcctcacgagtgttatatctctggaccgtgtatctctgaaacaaaaggttgtagatgcgcctgagatcttagccgtaattggcaaagtacctcacctctcagagtttctcaattccctctacaattgccagtacaagtcattttttattgcattctctgg

SEQ ID NO: 61008 - DNA, 71 bp, Zea mays
gtgaacttgtgctgtgaacttgttgcaaaacctcttgaacctgaagcattcaacatgatgtgagcttgtgc

SEQ ID NO: 61009 - DNA, 287 bp, Zea mays
acttctgtttaggggattcctgaacaaatggaggttcctgcaccgcctccgagttcccaaccagtcgaccctgttcaggcggtacaaccagctcaagctggaccaaatgctaaccctctcgacctctttccccaatctcttccgaatgattccgctaatgccaacacaggaaatcttgatgttttgcgtaataactcacagttccaaaacctacttggtttggttcaggctaaccctcaaattttgcagccattgcttcaagaattgaggaaacaaaatccccgggt

SEQ ID NO: 61010 - DNA, 286 bp, Zea mays
atgaaaactagagaaggctcctcccgaccgtaacgctcctcatctccctcgaccccgacatctccgacccgatggcgcccaaggcggagaagaagccagcggagaagaagccggcggccgaggagaaggcggagaagacgaccgcatggaagatgcccaaggccgagaagcggctgcccgcgtccaagtcctccggcaaggagggcggcgagaagaaggggaagaagaaggccaagaatagctggaggacctacaagcatctacatcttcaaggtgctgaagcagg

SEQ ID NO: 61011 - DNA, 281 bp, Zea mays
gttatccatgtttctgaaatcgaagagtggaatatggtcaaaagcctacatatcaagacggtggatgaacttggacttccaagatctgtaatacaagacatgctagatgaactggagcaactattgaaaggtatcgctatgatgaaagagctgacgcctaggaccagtgactaccttgtttcatttggagaatgcatgtccaccaggattttttctgcttatttgaacaaaattcgtgtcaaggcacggcagtatgacgcatttgatattggtttcattac

SEQ ID NO: 61012 - DNA, 269 bp, Zea mays
ggctcgaggtccatctcctccgtcaccacgatcggactatggggcggacagggagggtcggcacaggacatcacggcagagcagccaccacggcgtctgcacagcatcaccgtccgcgctggcgttgccgtcgactccatcgagttcacctacaccgacgacgctgggcagaggcgcactgctgggcggtggggtggacttggcggcaatgttcgaacgatcgaccttggcgacgcagaggatgtcagggaagtctcgggaacatacgg

SEQ ID NO: 61013 - DNA, 277 bp, Zea mays
gaagacaacccgtcagcccctctcgtttttcatccgccttcgcctccaaccgcgtgcgctccacgcctcctccaggaaagcgagagcttctgcataagaacaacaaatcaaaagcgtgatcagctcggtgccaaacaaacctcaacaaccaagtttcatgtctgatctcgacgtccagcttctaactgcctttgatccgtttgctgaggcaaatgctgaggactctggtgctggtcctggaacgaaggattatgtgcatgtgcgcaccagcagcgca

SEQ ID NO: 61014 - DNA, 155 bp, Zea mays
  unsure (1)..(155): unsure at all n locations
tgattggtcncgtgaggcttttacaatggatgagcagagatcaaaagccgtaactgaagcttttgtcaggttacataaggaaggcctgatatatcgagattatcgccttgtgaattgggattgcacgcttcgaactgcaatttctgacattgagg

SEQ ID NO: 61015 - DNA, 279 bp, Zea mays
  unsure (1)..(279): unsure at all n locations
gagattcgcaagaccttcaacatcaagaatgacttcacccctgaggaggaagaggagatccgcnaggagaaccagtgggccttcgagtaaggaggtgctggatctattgatgcctaagtttcgtggtgtctactactatgtctactttatgttgtcctaatggttgtaagtattttgggagtcactttgcttgcgaatgtctcgcgtaagacttatgtggtcaatggtcggttattaacttattaccatgaaagcacttcgtctgccaccctaagaggt

SEQ ID NO: 61016 - DNA, 281 bp, Zea mays
tccaaactggtttcagggtactgcagatgctgtaaggcagtacttgtggttgtttgaggagcataatgtgatggaatttctaattcttgctggcgatcacctgtaccggatggactatgaaaagttcattcaggcacacagagaaacaaatgctgatattaccgttgctgccctaccgatgaatgagaaacgtgcaactgcatttggcctcatgaaaattgatgaagaagggaggatcattgagtttgctgagaaaccgaaaggagagcattgaaagcaat

SEQ ID NO: 61017 - DNA, 279 bp, Zea mays
cattgatgttatcgagaagggagagaagcagcccaacatcactattggcattctggtctccgttgtcgtcgtgttcgttaccgttctcttcaagatcctgtttggaggcaagaagccggtggcacctgtgaaacctgcagctgaggcgaagaagcccaaggccacagtgaccgacggtgctggaagcagtggcgacaaggatgagaaagaggacgaaaaggaggagacagtaggcccacgtcggaggacccgaagtaggacatagagactatttttgat

SEQ ID NO: 61018 - DNA, 280 bp, Zea mays
gaaggatctacagttaatagcatcttctgttttacttgctgcactatccgtgtcaccttatgacaaaaaatatggtgcatttgagacagagaatgagaaagagcgcaacatgcgtctgtccaaccttgttaacttttcgcttgataacaagcgtgaaaacagggaaatgccttcaagaccatatcttctatcagagatggcctccaaaggagtcctttcatgtgcttcccaagaagtgcgagatttgtacaaccttttggaacatgatatctacctctgg

SEQ ID NO: 61019 - DNA, 148 bp, Zea mays
agatcccacatcatccagcagtccatcaggcaggctgctggagatatgcgcttgatgaacccagtagcccttgttgagaaccatccttcgtgcaggaaaaaccgtgagggccagaaagtgcttccgaatggccaaagctggaggcatc

SEQ ID NO: 61020 - DNA, 279 bp, Zea mays
ggcagaggaggtggtccaactcatctggccatattatctcagccaccagacacgatacatggatcacttcgtgtaacagttcaaggcgaagttattgagcactcctttggagaggagctcttgtgcttcagaactttgcaacgctacactgcagctactcttgagcatggcatgcatcctccgatttcccctaagccagaatggcgtgctctgatggatgaaatggctgttgtagcaactaaagaatatcgatcaattgtcttccagaaccacgcttcg

SEQ ID NO: 61021 - DNA, 279 bp, Zea mays
cgacgaatgtgcacggagatgaactcattatcacaaccacaagtccatatgagcaacaagcattcgcatcgaagactgattggactgtcagagccatctctgccacaaacttgtatctacgtgtaaatcacatttatgtcaattctgatgatataaaggaaactggctacacttacattatgtacaaagaacatattgaagaaattcatatgcgtagcgatctgcgtacacaaatcgctggattcttatatgggctgagtccacaggacaatcccaagt

SEQ ID NO: 61022 - DNA, 275 bp, Zea mays
gtggatcctaatgtcaacaagtgggaccaaccttttgtgttgggagttgttgatctgcatgactcattatctcatcctgccggggtttctgatgtccaggctgagtccaccacttgtctagatcctgatctatttacgaactttttggtacgtgagctatatattcctttcattattgctatcttatgctagacttgaaaaaactcaaatgcagttaaaaaagttttatgatgagatatctcttgctttgacaacatgttgcgctgatgcatctg

SEQ ID NO: 61023 - DNA, 278 bp, Zea mays
agatatattatccgaacagtgtactcgcaacaaaaccaattatgaatttctacagaagtcctgatatgggcgaacaattgacttctccattcatgttgcaactcctgccgagaaactggccctgatgaaggaacggatactgcgctacattgacaacaagaaggaacattggtacccgggcgcgatggttgtactccgggacgtcgatgataccaacaaactgaaagtgtcaatatggctgcgacacacactcaacttccaggacatggcacgcgttt

SEQ ID NO: 61024 - DNA, 275 bp, Zea mays
gcaagggaacccattgggcgcggtgccgccaccttcgagaggacggccgccgccgctgcggcgagtctggaggagccgaccctgtggcggcgttccgtggcaaagactggggcgccggcgacctcttccgctccttcctcttcgagcaagacggtcttggcaaggttccggtgttggattcgtcaaatcttggattgatcaaaccgaacaccctggtccggtatcggggaatggttcaggatatgcttgggaatgagtactacttggtgctttca

SEQ ID NO: 61025 - DNA, 274 bp, Zea mays
tcaggcttccacgaatctccccgccgccctcaattcccctctgcgccgccgccctcaattcccctcggcgccgccgcctcctcccctcgcttcggtcctcggttagttaaccatccaggttctgtcaagatgtctgatagccatgagactgacaggaacattgagatttggaaaattaagaaactgatcaaggcattggaatcagccagaggcaatggcacaagcatgatctctctaatcatgcctccacgtgatcaggttgctcgagtggcta

SEQ ID NO: 61026 - DNA, 276 bp, Zea mays
cccgaagccacagcggcacagcgccacggcaacagtcaccagaccaccactaccagtctaccacccacctgacctgagcgaccccttcgcttccactccactgaagcgggccaaaagaaggaaagaaggcgggcaagcgacaggaaggaggaggaggaggaggaggagaagccatggcgagcgacggcgacgggaagggccgggtcgcgacggcgccgggggcaggagggtacggctacggctacggctacgccggcttccgagcggaggaggacc

SEQ ID NO: 61027 - DNA, 273 bp, Zea mays
atgtaattttgtttgggttgtgtcccgtgcctataaatatgtgaacagtacccccgtactgttcacgctgacttggcattcgctttctacgtcacgtttgtactatcatctccttccagttaaaggtacacttgtaattcaacgatatttctgtttatgcctgataataatacataattgtttatgttggcttttatattccttatatttcctccctcgtcattgtataataaagttatgaaggtacgcctctcataaccttcgtccaaaaac

SEQ ID NO: 61028 - DNA, 275 bp, Zea mays
agatagaacatctggggagtacttggtgaagaatggcatccgcacctttgcttgcagtgagacagttaaatttggccatgtcacatttttctggaacggtaaccgttcgggatactttgatgcaactaaggaggagtatgtagaagtacctagtgacagtggtattacattcaatgttgcacccaatatgaaggcgcttgaaattgctgagaaagccagggatgctctcctaagtggaaagtttgaccaggtacgtgtcaactgccaaatggtga

SEQ ID NO: 61029 - DNA, 273 bp, Zea mays
aacacatcaaatatgcctgttgctgctcgtgaagcctccatttatacaggaattacaattgccgagtattttcgtgatatgggctacaacgttagtatgatggctgactccacctcacgatgggctgaggctttgcgtgagatctcagggcgtttggctgaaatgcctgctgatagtggttacccagcttacttggctgcgcgtttggcatccttttatgaacgtgctggtaaggtgaaatgcctgggaagtccagacaggatggcagtgtca

SEQ ID NO: 61030 - DNA, 274 bp, Zea mays
atgtgaagagcgctttcctcaacgggccaatcaaggaggaggtgtacgtggagcaaccccctggcttcgaggatgaatggtaccccgaccacgtgtgtaagctctctaaggcgctctatggacttaagcaagccccaagagcatggtatgaatgccttagagatttcttaattgctaatgctttcaaggttgggaaagccgatccaactcttttcactaagacatgtgatggtgatttgtttgtgtgccaaatttatgtcgagacataatattt

SEQ ID NO: 61031 - DNA, 271 bp, Zea mays
gagtggcaattggttaacaagcagaagcctatctggatgagaaagcctgaggagattaccaaagaagagtatgctgctttctacaagagcttgaccaacgactgggaggagcatctcgccgttaagcacttctctgttgagggtcagcttgagttcaaggctgtcctgtttgtgccgaagagggccccctttgacctcttcgacaccaggaagaaactgaacaacatcaagctctatgtgcgccgtgtcttcatcatggaaactgtgagga

SEQ ID NO: 61032 - DNA, 277 bp, Zea mays
gaacaggacgatggccgagggaaagaggtggcggttcgcgatggtctgctcctcgaacatgaaccggagcatggaggcgcactcgcagctgggccgcgcggggctcgacgtcgagtcctacggcacgggcacccacgtcaagctccccggcaccatccctccacgagcccaacgtctacgacttcggcaccccctacggcgccatctacgacgacctccgccgcaaggaccccgaactgtcagtacgagcacctactgtcatcttcctctccccacc

SEQ ID NO: 61033 - DNA, 269 bp, Zea mays
gaagaagaccagttcccctctcctgatcgtcctgttcctcacagcagcagccatggcggccgagccggagaagcaggcggcccccgcggcacaggagacggccgtgcacatcgtgtacgttgaccgccccgaggacgccgaccctgaggagttccacatccgcaccctcacccccgtcctcggcagcgaacagaaggccagggacgcagtgctctaccactacaagaacgccgccagcggcttctccgcgaagtcaccccccagcagtc

SEQ ID NO: 61034 - DNA, 270 bp, Zea mays
gggctggccaccagtccgatcgtaccgcaggaacgccatgacgaccgtcgtccaggccgtgaggagcaagaaggaagaggaacctgagaagcagcaacagcccgctgccgccaacgccttcgtgaaggtcagcatggacggcgcgccctacctgcgcaaggtggacctgaagacgtacagcagctacaaggacctctccgctgcactcaagaagatgttcggcaccttcaccgcatctgggaacagcatgaacgaggggagttggttgat

SEQ ID NO: 61035 - DNA, 270 bp, Zea mays
cctcagacccgagaagcgcactgcggccatggacgccaccggcactggagctggagggaaggcgaagaagggagcggccggtcgcaaggccggcgggccgaggaagaagtcggtgacgaggtccgtgaaggccgggctccagttccccgtcggccgcatcgggcgctacctcaagaagggccgctacgcgcagcgcgtcggcagcggtgcccccgtctacctcgcggccgtcctggagtacctcgccgctgaggtcctggactcgccggc

SEQ ID NO: 61036 - DNA, 271 bp, Zea mays
cctatggataattatggaatactgtggtggtggaagtgttgctgacttgataggcatcacagaggagcctcttgatgaatcccaaatagcttacatttgtagagaagcactaaaggttctaacaccacatttgtggggcaattaaatgtcttcgaatatttaacttttgtgtgcttattttcttctccagggccttgcttacctgcactccatttttaaagttcacagagatattaaggggggcaacatccttctaactgacaggcgaggt

SEQ ID NO: 61037 - DNA, 148 bp, Zea mays
acccattaccaatgccaagaacaagaaaccagagaggacagccgcgaatacaatccgaatcccctccagaaaacccaccataccgtctcccccatctgcaagaacaagatcaggagagcatcctagggggaagaaacaggagggggaa

SEQ ID NO: 61038 - DNA, 272 bp, Zea mays
gagtggcaattggttaacaagcagaagcctatctggatgagaaagcctgaggagattaccaaagaagagtatgctgctttctacaagagcttgaccaacgactgggaggagcatctcgccgttaagcacttctctgttgagggtcagcttgagttcaaggctgtcctgtttgtgccgaagagggccccctatgacctcttcgacaccaggaagaaactgaacaacatcaagctctatgtgcgccgtgtcttcatcatggaaactgtgaggag

SEQ ID NO: 61039 - DNA, 272 bp, Zea mays
gcacccgcgacgagcaggatctgcccagttgctcttgcggtagttcccccaactgtcaccatgcagaacgaggagggtaagactgtggacctctatgtccccaggaagtgctcggccacaaacaggatcatcactgccaaggaccatgcctctgtccagatcaacattggccacttggatgcgaatggcctgtatgatggtcacttcacaacgtttgctctctctgggtttgtccgtgctcagggcgacgcagacagctcctggacaggctg

SEQ ID NO: 61040 - DNA, 275 bp, Zea mays
aaggctagcaggtaggctggctctcgccgagcgatggatctcgagttcggaaggggcctgaggtccccaaagagagactcgtggaagaccaccttgctgctggcgtaccagagcctgggggtggtctacggcgacctcagcatctctccgctgtacgtgtacaagagcaccttcgccgaggacatccagcactcggagacgaacgaggagatcttcggcgtgctctccttcgtcttctggacgctcaccctcatccctctcgtcaatacgtctcc

SEQ ID NO: 61041 - DNA, 270 bp, Zea mays
aagggagcggtgttatcttgaaagacaacccagttgctggcacaaatggtggtgccacgtgggcctacgaggttgctggccaaactatggtttgcccaataatcattgaggatctttcgccacctggtcagatgcttgttgagatgctttgcgaggaacaagggctctttctggagatagctgacaacatacgtggaattggtctgacggtcttgaaaggacggatggagctctgtgatggcaagatatggtcgcggttcttgtcgaggc

SEQ ID NO: 61042 - DNA, 268 bp, Zea mays
gttatccatgtttctgaaatcgaagagtggaatatggtcaaaagcctacatatcaagacggtggatgaacttggacttccaagatctgtaatacaagacatgctagatgaactggagcaactattgaaaggtatcgctatgatgaaagagctgacgcctaggaccagtgactaccttgtttcatttggagaatgcatgtccaccaggattttttctgcttatttgaacaaaattcgtgtcaaggcacggcagtatgacgcatttgata

SEQ ID NO: 61043 - DNA, 267 bp, Zea mays
ttcgttacaaggatcttcttgatgatgtttactctgatatatcaaatttgctgaaatcaagcgggaatgtttgctcaattatatattgccttgaacgggcagcttgtgatgatctaagcatgcatttgtcacagcagggtgtctcttgtgctgcttatcatgctggcctaaatagtaaagtgcgaagttctgttctcgatgactggctttcatcgagaactcaagttgttgttgcaactgtagcatttgggatgggtatgatagaca

SEQ ID NO: 61044 - DNA, 302 bp, Zea mays
ctggaaagactgtggatcttagtgtggatttgagtgcagctagtgctgctgaagaatactgatttcagtcataatgtttatcaaagatcacatcattggggacagcacatgaccaaacttcaatgagtggctagtatgagtttagtcggttccagattataccatgccgacttctactgtacctcgtgaatcgtgatgtctattgggcacttgttgctgacagaactgtgcacaatgttgatccaatttgatggatggtggtggttctgttatttactagtcggtcaaaacactaaacggtg

SEQ ID NO: 61045 - DNA, 292 bp, Zea mays
cagctccccgagaagaagtccacaaatcaattgacacatgttatggttgcaacaagagacaacaaagaaacaacagaggccatttgccgtaagattggggttttcagccctatgaaggtcaaactggcatggtccggcatggatcctgccttgcccacctaggaggatgctacagctttgaaggaacgctccctgcacgcgtcgcttggggacaaccgcatttgaagacccggggaatgtcagcactgatgatccacaagagaaggagacgatggagctgaagactgacaaa

SEQ ID NO: 61046 - DNA, 293 bp, Zea mays
gattgagccacagtttgcttcaaacaattatacgtttgatgtgtatgtgaggacagatgggcgagtcaagctcatagatttcaatccatggggtggttataccttgccgctgctgtttacttgggaggagcttgaggagaaggggagagggtctgagctggagtttcgggtggtcatgcataagggtgcagtgaggccaggattgatgacagctgtgccatatgatatgctggattggggtgaggggagtggctgggatgtttttctgaagaaggctgacgaggagcttgaca

SEQ ID NO: 61047 - DNA, 293 bp, Zea mays
ggtcaagggataggagtcggtccaggagcccagatgatagaaatccagggaataacctttatgtaactggattgtctactcgtgtaacggaagatgatcttgagaagttctttagtaaagaaggaaaggttaagaactgtcatgttgttcttgatcctaggacaaaagaatcccgtggctttgccttcgtgactatggatactctgaaggtgcaagagctccatcaagtatctgcaccgcactgtacttgaaggtcgcctggtcactgtagagaaggctaaaagaactcgtga

SEQ ID NO: 61048 - DNA, 290 bp, Zea mays
aggactttatggccctcctggcttatgaagagccggagaagtcacctatgtatcatctactaagcccagagcacaggcagaatgttgcagagggcttgaatcgggctgtccttgcacatgctaatcttccagcatattcatcgttggagagggtggtccagcaagcgactgtggttagacaatacctacagcaggaagttggcaggattcttaccaccattttctttgaaggcctttctgagcaagtaaatgtgcaaatggtcacttcttcagaacagggtaaccactct

SEQ ID NO: 61049 - DNA, 296 bp, Zea mays
cccttacctgagactgctcctatttctaaacggccatacaggatgtccatagaagaactaaaggaacttaagaagcaattaacgggattacaagaggctgattacattcgtccgagttcctcaccttagggagcgtcggttctgtttgtacaaaagaaggatggatcacaaagagtgtgtgtggattatagatttcttaatgatgttacgttgaagaacaagtattcgttaccccatattgaggatttattcgatcagatgagatgtgcaagggtattttcgaagattgatctccg

SEQ ID NO: 61050 - DNA, 292 bp, Zea mays
caggcctcaaattaatgccttcctggaagggtttaatgaactcattccacgggagctgatatctatcttcaacgacaaagagcttgaacttctgattagcggtcttccagatattgacttggacgatttgaaagcaaatacagaatattctggctacagcatagcctctccagtcatccagtggttctgggaaatcgttcaggggttcagcaggaagacaaagcccggttcctccagttcgtcactggcacttcaaaggtaccgttggaaggttttagtgcacttcaaggga

SEQ ID NO: 61051 - DNA, 290 bp, Zea mays
ggactccaagacccttctcttcggtgacaagccggtcaccgtctttggcatcaggaaccctgaggaaatcccgtggggtgaggctggcgctgagtatgtcgtggagtccaccggcgtcttcactgacaaggacaaggctgctgcacatctcaagggtggtgccaagaaggttgttatctctgccccaagcaaagatgcacccatgtttgttgttggtgtcaatgaggacaagtacacctcggatgttaacattgtttccaatgctagctgcaccacaaactgccttgctc

SEQ ID NO: 61052 - DNA, 289 bp, Zea mays
aactcttacttcaaggaacttctgagtggcgacaaggagggccttcttcagctcccaagtgacaaagccctgctgagcgaccctgtcttccgccctcttgtggagaaatatgctgcagatgagaaggcattctttgatgactacaaagaggcccacctcaagctctccgaactggggtatgtcgatgcttaaatggccatatcctggagcgggatacaaactgctgcctgtatggactcgtgcgatcttttgcatttggattcagggtgaaccaccagattgtctagtg

SEQ ID NO: 61053 - DNA, 283 bp, Zea mays
ataggaaagaatgcaattttgaaattaatggacgcagttgatgagtacatccctgatcctgtgaggcagcttgataagcctttcttgatgccgatagaagacgtgttttctattcagggtcgtggaactgttgttactgggcgtgttgaacagggaacaatcaaaactggtgaagatgttgagatcttgggtttggcacagactggtccttgaagactacagttactggtgttgagatgttcaaaaagatactggaccatggagaggctggtgacaacgttgg

SEQ ID NO: 61054 - DNA, 129 bp, Zea mays
gttcatcctcggctccagcagacccatgcatcaaccagcatggactgcggatcgatgggtgctgttacccccgtcaggctttattctaagttaaatcctaaggaaaaaaatggtgcttcttggtgctgc

SEQ ID NO: 61055 - DNA, 301 bp, Zea mays
aacatatctcctcgcattttccttgcaaccgattgcctatccccctcccaaccaaagaccgatggcgcccaaggccgagaagaagcccgcggcgaagaagccggcggaggaggagcccgcggccgagaagacgaccgccgggaagaagcccaaggcggagaagcgggtccccgcgggcaagtacgccggcaaggagggcggcgaggcaagcgtggaagaagaagggcaagaagagcgtggagacgtacaagatctacatcttcaaggtgctgaagcaggtgcacacggacatcggcatctc

SEQ ID NO: 61056 - DNA, 293 bp, Zea mays
ggtatctccaaggatggccagacccgtgaacatgctctccttgcgttcacccttggagtgaagcagatgatttgctgctgcaacaagatggatgcaaccactccgaaatactccaaggcacgttatgatgagattgtgaaggaagtctcatcctacctcaagaaagttgggtacaaccctgataagattgccttcgttccatttctggtttgagggcgacaacatgattgagaggtccaccaaccttgattggtacaaaggcccaaccatgcttgaggctcttgaccagatca

SEQ ID NO: 61057 - DNA, 280 bp, Zea mays
tcgattggttgttgttgattgcactgcattgcaggttgagggcaccagcagatacgactgcttcgagcctgggacggtcggccggatggagctcctcgtcctgatggcgctcaactggcggctccgctcggttactcccttcaccttcgtcgacttcttcgcgtgcaaggtcgacccaggagggaggcacaccagtgcctcattgccgggccacgcaagtcattctggctgcgatgcatgacgtcgagttcttggaccactgcccgtcatcaatggcggc

SEQ ID NO: 61058 - DNA, 285 bp, Zea mays
ccaaagaggaccatcagctatatggctgagcgagttgttggaactggatcgtttggggttgtcttccaggcaaaatgcattgagactggtgaaactgttgcaattaagaaggttctacaggacaaaagatacaagaatagggagttacaaataatgcgatcaattgaccattgcaatgtcatttccctgaagattgtttcttctctaccacaagtagggatgaacttttccttaacttagtcatggagtttgttccagagtcactttatcgcgttctgaaacact

SEQ ID NO: 61059 - DNA, 287 bp, Zea mays
cgcttagcacgggcattcaaacccctcacattccaagataaaatacaacagtttgtattcattaaaagatgaaccctcctctacttgaacagacattgccacataaagaatataacatagttaacatttgatgcagactggcaaccttgttcaccaacagtaagatacacatggcccacgacacacacaaaagttccaaactgaaattagtaagatacagaggaacaaggatccattgattcgaaaaccacctccagaccaccagataccatgcaacgaccaacagt

SEQ ID NO: 61060 - DNA, 155 bp, Zea mays
gggcaagggctcgaagtctggtgcctcaatgaggtgccctggttgccagggctcaggcatgaaagtcactattcgtcagctgggcccttccatgatacagcagatgcagcagccttgcaatgagtgcaaggggactggagagagcatcaatgaga

SEQ ID NO: 61061 - DNA, 287 bp, Zea mays
atgatccacaccaggtttggaattctgacgagcacgaagatttgcaagttcttgtgatcatatcgagaccgcctgctaagatatttttatatgatgattggagcatgcctcatacagccgcggtactgaaattccccttcgtctgggatgaggactgcttcgaagcagcaaaagacgaactctaggtcacaagtgttcctgcaattatctgcttcatccatgatcctgctggtgctggactactacaattctcagcactagttgtaataaagccagtgcgcttttca

SEQ ID NO: 61062 - DNA, 290 bp, Zea mays
  unsure (1)..(290): unsure at all n locations
gcattcctcccatctcccaagacctcctcagacccgagaagcgcagtgcggccatggacgccaccggcactggagctggagggaaggcgaagaagggagcggccggtcgcaaggccggcgggccgaggaagaagtcggtgacgaggtccgtgaaggccgggctccagttccccgtcggccgcatcgggcgctacctcaagaagggccgctacgcgcaggcgntcggcagcggtgcccccgtctacctcgcggccgtcctggagtacctcgccgctgaggtcctggagctc

SEQ ID NO: 61063 - DNA, 300 bp, Zea mays
tcgtgcgaaggcgaccctccctccttcgctccttccgcgccgcctcccggccgtcgccgccatggtgaagtactcgcaggagccgggcaaccctaccaagtcggctaaggccatgggcagggatctgagggtccacttcaagaacacaagggagacagcctttgcgcttcgcaagttgtctttgaccaaggctaagcgataccttgaggatgttattgctcacaacaggcaattcccttccggagatactgtgggggtgttggtcgcaccggcaagctaagtcgcgccactccaatgggc

SEQ ID NO: 61064 - DNA, 287 bp, Zea mays
gtaaccaccaacacatcggtcacgcctctactgtccgccgagacgctccccctggccagaaggttggtctcattgccgctaggaggactggaaggctcaggggtcaagctgctgccacagcctccaaggctgacaaggccacctagagtcattgtcgttgtttatctgtctactgtgctttagattgttaaaggacatgtgtttcagaacggtgtgttgttgcctcgtactatggtgaaacattgtctcagtttttgtggtcgctgtcaggattttgcattatgcct

SEQ ID NO: 61065 - DNA, 153 bp, Zea mays
ccatcatgaagttcacccttgtaaacagtgccaaaccctcctcgagcaaggatgaacttcatgatggcacgaaaattgctgtaaagcggatggaggctggtgtgatgggtaacaaggggctaaatgagttttaatcagagattgctgttttga

SEQ ID NO: 61066 - DNA, 282 bp, Zea mays
ggagcacccaagtttcttttgtgtgttctagcggaaagaaagaattccgatatttatgggccttggaagaagaaatgccttgctgaatttgggatcgttacacagtgtgtggcaccaactagagtcaatgatcagtatcttacaaatgtcttgttaaagattaacgcaaagttgggtggcttgaattcgttgctccaaattgaaactccccagcaattcctctcgtatccaaggtcccaactataatcttgggtatggacgtatcacacggatctcctggac

SEQ ID NO: 61067 - DNA, 288 bp, Zea mays
tgaggatgagatctgctgtcgcaagcaagcagtttggccaggaggatatgctgtgccctcttgtggctgatgcctgcattcaagtttgccccaaaaatcctgcaaactttaatgttgacaatgttagagtggctaagctacttggaggtggtttgcacaattcttctgtggtccgtgggatggttctgaaaaatgatgctgatggtagcatcaaaagggcggagaaggcaaagattgtcgtatttgctggtggtgtcgacacctcggcaactgaaacaaagggaacgt

SEQ ID NO: 61068 - DNA, 285 bp, Zea mays
aaaaggtttcgttggcgatggcgagctcgtggacgcttcctgaccacccgaagctccccaaggggaagccggtggctgtcgtcgtgctggacggatggggcgaggccaaccccgaccagtacaactgcatccatgtcgctcagactcctgtcatggactcgttaaagaatggtgctcctgagaaatggagactagtgaaggctcatggaacagctgtgggtctcccatctgatgatgacatgggcaacagtgaagttggtcacaatgcacttggtgctggtcgga

SEQ ID NO: 61069 - DNA, 285 bp, Zea mays
accctcaaggccaagcaagctaatactctgtactggtctcctgctgggcgcttcatagttcttgctggactgaagggtttcaacgggcagctggaattctacaatgttgatgaactagagacaatggcaacaggagagcattttatggcaacagatatcatgtgggatccaactgggagatatctcgcgactgagttacctcagttcatgaaatggagaatggctttcaaatatggtccttcagtggcaagcatctttacaaggtgtcaaaggatcatttctatc

SEQ ID NO: 61070 - DNA, 287 bp, Zea mays
attatgcttagcgtatgcatgtgtgctagatttcaatccgatcctaaggagtgtcacttagtggcggtgaagcgaattcttagatatttggttgctacgccttgcttcgggctctggtatccaaaggggtctacctttgacttggttggatactcagactccgactatgctggatgtaaggtcgataggaagatacatcagggacgtgccaattcttaggaaggtccctggtgtcgtggaactctaagaaacaaacctccgttgccctatccaccgctgaggccgag

SEQ ID NO: 61071 - DNA, 280 bp, Zea mays
ggaacacaaagcttgcttatcccctggagaagttccattctgatgttgctggtaggagctttcacaatgggaggtttatacagaggatgcgtcaaaaagctgcgtctttgcccaatgtccaattagagcaaggaactgttacctcacttcttgaagaaaatggtactgttaaaggtgttcaatacaaaaccaagtcaggtgaagaactaaaggcttatgcgcccttgacgattgtatgtgatggctgcttttcgaatctacgacgcgccctttgctctcc

SEQ ID NO: 61072 - DNA, 284 bp, Zea mays
ctcagtcgcctgcgccgccgcttcgttcgtgtggaggggagaagacaggaaatggcggcgactgagggcgtgctcttggggatgggcaaccccctcctcgacatctccgccgtcgtcgatgacgccttcctgacaaagtatgacatcaagctgaacaatgctattctcgctgaggagaagcacttgcctatgtatgacgagttggcagcaagagcaatgttgaatatattgccggaggagccacccagaactctatcagggttgcccaatggatgcttcaaact

SEQ ID NO: 61073 - DNA, 287 bp, Zea mays
gatcatgactgtggttatgatggagtgagcgttgaagagacactggctatccttagcaggttcccggcaaatgtagcagttcaggtcaccaaggacaagaaggaattcagcatccatttggactcttccatcgcagcaaagcatggagagaatgcatcatcacttgctggttttgatatccagactgttgggcgccagcttgcctaattctccgcggcgaggcaaaaatcaagaacatcaagaagaacaagaccacaggaggcttctcggtaactttcctgggtgac

SEQ ID NO: 61074 - DNA, 290 bp, Zea mays
gtacatacatagaaggatattgcttggccttgattgatcatgtctgatctaagtcgatcattattttcttgaaacttcctttcggacgtggtgctatggttgatgaatttggatgtgtgcgttctgccaggtgtaagcccaaaggtttatacagaccgagttaaggttaggaagagcacgagtgaacttgttctggtttgcagtggttaaggcagaaagttgtttcactgtagttctgagatgtattaccagcggcgctgtaattttagggtgtataatgcggatgctag

SEQ ID NO: 61075 - DNA, 287 bp, Zea mays
gaaacaatcaaccagcaacactcttctcttataacatagtacagcgaaggtaactcacatggcaacttccatgggttgtctcgtcttgctctgccttgtttcttctctccttcccagtgccgtccttggccacccatggggtggcttgttcccacagttctatgaccattcgtgccccaaggcgaaggagattgtgcagtccattgtggcacaggctgtggccaaggagaccaggatggcggcatctttagtcagactgcatttccatgactgctttgtcaagggct

SEQ ID NO: 61076 - DNA, 281 bp, Zea mays
cggtctcaaccccaggcgagctcggctccggtcacccgtcgatccacgcaaccatgtcgaggaggaagaccagggagcccaaggaggagaacgttacccttggacccactgtccgtgaaggagagtttgtctttggtgttgctcacatctttgcatccttcaatgacaccttcattcatgtcactgatttgtctgggagggaactttggttcggatcactggtggcatgaaggttaaggctgatcgtgatgagtcgtctccttatgctgctatgcttgctg

SEQ ID NO: 61077 - DNA, 282 bp, Zea mays
attgatcactcaatcaaagctcgatgaactgaaattgcaacacaatccatcatttgttcctttaaccacagaggagaatgcggtgaaagtgtttgacagtgaaactggtatatcacaacgccgtctttctaacggaatttccatcaactacaagattacacaaaatgaagctagggttggtgtcatgcggctcatagtagggggagggagagcgacagaagattctgaatcaaagggatctgtcattgttggtgttcgttccctgagtgaaggtggctgtgt

SEQ ID NO: 61078 - DNA, 157 bp, Zea mays
agtgaagcagatgatttgctgttgcaacaagatggatgccaccacacccaagtactccaaggcccgttatgatgagattgtgaaggaagtctcttcctacctgaagaaggttggatacaaccctgacaagatccacttcgttcccatctctggtttc

SEQ ID NO: 61079 - DNA, 290 bp, Zea mays
agcaaatcctctagtattgatagatgagattgacagcttgggaagggtcattctggggatccagctagtgcattgttggaactccttgatcctgagcagaatgttaatttcttagatcactaccttgatgttcctattgacctatccaaggttctattcgtttgcacagcaaatgtaatagagacgataccaaatccgttattggataggatggagatcattgctatagctgggtatataactgatgagaagatgcatattgctcgggactatttagagaagaataaaga

SEQ ID NO: 61080 - DNA, 293 bp, Zea mays
atggtgttggattcatgatgtctgcaaattatcacctgcaatgaaaattgtcagacctgtgaggtagaagctgaaaataaagacagttttcaatatccttggtcctctactgaatccagcaagggtgcctcatgctgttattggtgtttaccatgagaatatagttaccaagatggctaaggctgctcagaaatttggtatgaagagagcattggtcgtccattcaaagggtttggatgaaataagcccacttggtcccggatatatccttgatgttactccagagagattga

SEQ ID NO: 61081 - DNA, 288 bp, Zea mays
tccaaggtccaagggaggctgcaggcaggttgtctccctccttcccacctgcaccacccctacccctgccccccatctcatccatcaatgggaaggtcaccttgctgcgatgagaatggtctcaagaagggcccctggacccctgaagaagaccagaagctcatggagtacatccagaagaacggccatgggagctggagggcgctgcctaggcttgccgggctcaacaggtgtggcaagagctgcaggctgagatggaccaactacttgaggcaaacatcaaggagg

SEQ ID NO: 61082 - DNA, 283 bp, Zea mays
tgaacggatgcaggtgttcatgctttatcaaatgtttgtcatgttgatgttgagcggataagtaaaaggaagcctggcgaagttttaacacctcatgagcctggagttgtaaaacgtgctgtgaaccactttctactgaagagtgaaggtgacataatggtgactgatgtctgctgtgttgcaccagattttcatgctagatacaaatctctagagcgcacagatcactatcgcttgcttgctggacctgaatcaagatctgtttttgagaaaaactctgttt

SEQ ID NO: 61083 - DNA, 279 bp, Zea mays
aaagctgaccccgccgacgtacaccccttctcccaagcctccgacgcccaagcagaccacgccgacgtacactccaagccccaagcctccgacacacacgacgcccatgctgaccccaccgacgtagaccccttccccaaagcctccgacgcccaaactgaccccaccgacgtagaccacttccccaaagcatccgacaaccaagctgaccccacagacgtagactcccacaccgaagccgccggataacaagcagcacacatagactccgacgccgcc

SEQ ID NO: 61084 - DNA, 283 bp, Zea mays
ataggactgcagggtggcggcgatcggaaagatggtgcgcaaggcgaaggttgagtacgacgagcagccgccggataacttcgacccgaagaacccgtatgccgacccggtggcgatgctcgagtaccgggaacacctggtgcgagagaagtggatccagatcgagaccgcgaagatcatccgagagcgcctccgctggtgctaccgcatcgagggcatcaagcacgaccagaagtgccgccacctcgtcgaccaatacctagaggctacccgcggctgggtt

SEQ ID NO: 61085 - DNA, 283 bp, Zea mays
actaatctcgccttccgaggaaactcaccagcccaccacagacccgagcggaagaagccatgtccgggcgcggtaagggtggcaaggggctcggcaagggcggcgcgaagctcatccggaaggtgctgcgcgacaacatccagggcatcaccaagccggcgatccggcggctggcgaggaggagcggcgtcaagcgcatctcgaggctcatctacgaggagacccgcggcgtgctcaagatcttcctcgagaacgtcatccgcgacgccgtcagctacactga

SEQ ID NO: 61086 - DNA, 165 bp, Zea mays
atccggcaagaacttcgtctgggtcgtcggggcgcggacaccgaggagtcggaatggatgcccgatgggttcgcggagctggtggcgcgctgcgaccgcggcttgatcatccggggctgggcgccgcagatgctcatcttgactcacccggcggtgggcggtttc

SEQ ID NO: 61087 - DNA, 282 bp, Zea mays
tgccagcaaggttgacgaatattctcggacttctgctcctagtggatgggctgtgggtgatgtaagatagcggattaatggaagacctgttgcattgatggtggctacttgctttgctaaaactgtgtttggtggccagcaagttaagcctgatcagagagatgttccttgtgctgttttctccattccacgactagctgtagtgggcctcagcgaagaagaggccttggaggaagctaatggtgatagtcttggtttcatctcatcgaggaacccaatgaa

SEQ ID NO: 61088 - DNA, 285 bp, Zea mays
attggattctaacaagcagccagaccaagagttcttggcccaggtgtctatggtgtcaaggctgaagcatgaaaatgttgtcgagttgcttggttactgtgctgatgggacactccgtgtccttgcttatgagttcgctacaatgggttcccttcatgatatgcttcatggatggaaaggggttaaaggggctcaacccggtccagtcttatcgtggtcgctacgtgtgatgatagcggttggggcagcgaaaggcctcgagtatcttcatgagaaaggcagccc

SEQ ID NO: 61089 - DNA, 281 bp, Zea mays
agcgctcgcattctgcaacctggcactcggcaactacctcagtggcttcctggtgaccatcgtgcaccggaccacggggtccgggctgaactggctggcgcaggacctcaacaagggccgcctcgacctcttctactggaccatcgcaggcatcggcgtcttgaatctgatctacttcgtcatctgcgccaggtgggactggttctagggaaccagcaactgatccgccgaggtgaccagagatcgtctctctcatggttggacaggttggtggggttgat

SEQ ID NO: 61090 - DNA, 280 bp, Zea mays
ttcgagctgcggtgacaggtacctggctggcgagaacgtggtcctgccggagtccgtcgtctggcgggcgtagggcgccgtcgcggaggtctaggacctgggctgctgcgggagttgctgggctttctcaagaatagcggctgtggtaggcatgaagcagattgttactggcgagatgatctccttgtctgagctggagcttgttgactgtgacacttcagagtacctggggtgctatggtggtctgatggactatgcgtttgagttcatcatcaaaacg

SEQ ID NO: 61091 - DNA, 286 bp, Zea mays
catcgtttcgcgtccgcctcagcccgccgcaaggagaggtaagttcaggagacatcttcgagaagctgaaatggctcctaaagctgctcctgccaagaagggtgatgccaagacccaggccttgaaggttgccaaggctgtgaagtctggggcagccaagaagaagaccaagaagatccgcacgtctgtgacatttcaccgccccacgaccctgaagaaggctagggaccccaagtacccacgaatcagcactagcggaaggaacaagcttgatcagtaccaattc

SEQ ID NO: 61092 - DNA, 132 bp, Zea mays
aaggcagacggttgctgttggagttatcagagtgtggagaagaaggacccgaccggcgccaaggtgaccaaggcggctgccaagaagaaatgatgcgatcctgcgcctgctttagcaatacctagttttcat

SEQ ID NO: 61093 - DNA, 252 bp, Zea mays
aggcaactggtggatgcagttcggcaaggactacgtgctggggtactggccgtcgttcctcttctcgtacctggcggacagcgcgtcgatggtggagtggggcggagaggtggtgaactcgcaggcggacggcgtgcacacgtcgacgcagatgggcagcgggcacttccccgaggaagggttcggcagggcgagctacttcaaggggggtgcaggtggttggacagcagcaacaacctcggggcgcccagg

SEQ ID NO: 61094 - DNA, 285 bp, Zea mays
atggagcacaggtcagcgtcaacttgtgtgtctgggaagggtgattctgaaacggaggaagatcttggttttggatgaggcaacttcatccgtggatccaattagagacagcttgattcaaaaaagcttaaaagaacaatttctcaaatgcacaatgattagaatagctcaccgtatcagatcagttcttgatagcgagaaagtcttgcttctggataatggtgaaattgcagagcatgacgccccagcaaaactgctagaggacagttcatccctattcccaaa

SEQ ID NO: 61095 - DNA, 233 bp, Zea mays
aaacttatacctcaagaacttggatgtagcattggagatgatcaactttgtgaattgttctctaactttggcaaaattacttcgtacaaggtgatgcgtgaccaaaatggtcttagcaaaggctctggatttgttgctttctcaactcgtgaggtagcatctcaggctttaactgaaatgaatggcaaaatgatatctggaaaaccatggtatgttgcatttgcacagcgcaa

SEQ ID NO: 61096 - DNA, 283 bp, Zea mays
taaaactgtatgaagcgaattggttggatttagtcaaaggtggatttattgcaaatgtgcagtgtgcagaagtatggtgtcctatgaccaaagagttctttgctgagtatttgaaaaaggaaaattcaaagaagaagcaggtactgtatgtcatgaatccgaagaagttcagggcttgtgaattcctgattcgattccatgagcaacaacgtggagacaagataattgtgtttgctgataatctgtttgcactaactacttatgcgatgaaactgcgaagcaa

SEQ ID NO: 61097 - DNA, 281 bp, Zea mays
cgggtgggttgcgatggccgccgcggggaggaatgctggcttcctcgcgctcttcgacgtcgacaggaccctcacagcgccgcacaagggggtgacgccagagatgctagagttgatgaagcagctagcgccagatggtgagagtgggcgtggttggcggatccgatctggtgaagattaccgagcagctcggcagtagagttattactgatgatgagtacgtcttctccgaaaacggcctggttgcacacaaaaatggccaactaattggaacccaagtt

SEQ ID NO: 61098 - DNA, 275 bp, Zea mays
atgaagactctctcctaggcgagggttcgcttggtcgtgttgagaaggctggttttcctaatgggaaggtacttgccgtgaagaaggtagacgacagtgccagcttgctgtctctgtatggaggaggagaagaagacgccttccttgagctggtctcgaacgtctctcggctcaggcatccgaacatcgtgcccctcacaggctactgcgtcgagcacggacaaaggcttctcgtgtacgagtacgttgggaacagaacgctgcatgatgtctgc

SEQ ID NO: 61099 - DNA, 260 bp, Zea mays
tagaagtaaggcggtctggaggctcactgtttcatttatctgtacagttgcaaactatgagtatggtttgtactggcacttctatcaggatgggtaaatagaggcagaagtaaagcttactggaattctcagtttaggggccttgatgcctggggaatcgaggaaatatggcacaactattgcccctggtctgtatggaccagttcatgagcatttctttgttgcccgtatggacatggctgttgaatgctaacctaatg

SEQ ID NO: 61100 - DNA, 271 bp, Zea mays
acaccatagctacaaggtcccgtaactgaatttttggtatgcttatatgttaactatgtagttgtgggcttttgaacaatagctggagtgagatgaaacattagtgatgtagttgtgggcttttgaactgcttcaagcaggagtgatgccgttgtggtgcttttgtgactgatcatctctggagcttttgtgaatgatctagctagctatctataaatgatctagttgtgaatgatatgagaattgtgatgcttttgtgaagatataaaaa

SEQ ID NO: 61101 - DNA, 270 bp, Zea mays
aaactgcaagaaatattggcatagggaactccatggaaggtgatgctgatgcaaatgatccagggaaagaatgtgttatttgcctctcagaaccaagggatactactgtcctgccatgtaggcatatgtgcatgtgcagtgagtgcgccaaggtcctgaggtaccaaaccactcggtgccccatctgcaggcagcctgtagagcgtctcctggagatcaaagtgaacaacaaatctgaagatcagcagcagacgccccaatctccacgct

SEQ ID NO: 61102 - DNA, 273 bp, Zea mays
ttccagtggcctacttgtcaagaagggattcacatatcagattatggctcctgaagatctccgtgtgttcacgcagttatctacagctaacatcattcagcgtatcgcggtcccttactctggatcttttgaagtcataaggtacagactgatagaaatatacgagagcgtggagtcagcaacagaggaatctgatgttccgacgttaatcgtgcatgatagagtgacggttcgcctggattcagaaagttatgttacactgcagtggcgtcc

SEQ ID NO: 61103 - DNA, 269 bp, Zea mays
attccactccgcctccgtgccggtcgccgactccgaaactccgacagtccgaccacaaggtcttgtgcgggatccacagaaggatgagtgaagaggataagactgctgcttctgctgagcagccgaagagggcccctaagctcaatgaaaggatcctctcttctctgtccaggaggtccgtagctgctcatccatggcatgatcttgagatcggtcctgatgctcctgctgttttcaatgttgttgttgagacgccaaagggaagcaaa

SEQ ID NO: 61104 - DNA, 276 bp, Zea mays
atttacgaaggatatgccttcctcatgccattcttcgtttggatcttgctggtcgggacctcacagactccctcatgaaaattctcactgagaggggttactccttgacaacctcagccgagcgagaaattgtaagggacatcaaggagaagctagcatatatagcccttgactatgagcaagagttggaaactgccaagaacagctcttcagttgaaaagagctatgagctacctgatggacaagtaatcaccattggtgcagagagatctggtg

SEQ ID NO: 61105 - DNA, 272 bp, Zea mays
attctcgcaaggtcagggaggtggttttaggcctggtggtccttgtgcacctgggtctgatggcgaaccatcagcacctggatcttatggtctacctaatacacttggtaactatgggctggtacctccatcagtgaatcctggtggtaacagagttcctggtgtgaatcctagttatggtggggatggcagacagggggctggaccagcatatggtggagataactggctaagaggttctggtcagtatcctagcccaggtgaaggacagg

SEQ ID NO: 61106 - DNA, 267 bp, Zea mays
tttctcaaaggtttcgttggtaggcaaaacaggacaccaacgattgtcatcgtctggtccattctgctggcttcaatcttctcgctcctttgggttcggattgatcctttccttgcgaaggatgatggtccgcttcttgaggagtgtggtttcgattgcaactaggatgtcagtgcatcagctcccccaatctgcatatgcttgaagtatattttctggtgtttgtccccatattcagtgtctgtagataagagacatgaaatgccc

SEQ ID NO: 61107 - DNA, 273 bp, Zea mays
taacgtcgtacaacggcggggaccaggggtacctgaacgagatattcacgtggtggcaccggatcccgaagcacatgaacttcctgaagcatttctgggagggcgacgaggaggaggtgaaggcgaagaagacccggctgttcggcgcgaacccgccggtcctctacgtgctccactacctggggaggaagccgtggctgtgcttccgggactacgactgcaactggaacgtggagatcctgcgggagttcgcgagcgacgtcgcgccgcccg

SEQ ID NO: 61108 - DNA, 204 bp, Zea mays
  unsure (1)..(204): unsure at all n locations
attcggagcgggcagcagcactcagccccatcccaatcctagtcgatcctttncccctcctcaaggaagaaaagaagctgaaccatggggaagagaaagtcagctgctaagccacctcctaagaagcggatggacaagcttgacactgtcttttcctgcccattctgcaacctacggagtagtgttgaatgccgaattgacatg

SEQ ID NO: 61109 - DNA, 229 bp, Zea mays
caagagagagggtcactggcggtggattgtatcttgatctgataccaactgccacaaagagggatcctgctgctcagtttttagtcactttcagaaacaaggacactatgggattgcgatctttattgctggaggcaaactattacaggctaataataagatggagttcgtcttcgcaagtcattcttttgatgtttgtgagagctggatgctggaagggtgcccttca

SEQ ID NO: 61110 - DNA, 241 bp, Zea mays
ccggatctttatatggcttttggagtatccggagcaatacaacacttggcaggaatgagagactcgaaggtcattgtggctgttaataaagatgctgatgcccccatatttcaggttacagattacgactggttgctgatctgttcgaggttctggatgagttattgaagaagatcccagagaagaaataagtggccgttaatagttcttcactcctgcatgttcatttgcccatgtggcg

SEQ ID NO: 61111 - DNA, 250 bp, Zea mays
tgaagaattgggcgcaggagaaatacttcttaactgcattgattgtgatggccaaggttgtggatttgacatagatttggttaaaatggtttctgatgctgtgacaatccctgtcattgcgagcagtggtgctgagctgttcaacatttttctgaaatttttgagaaaacaaatgcttctgctgcccttgctgctggcattttccaccggaaagaggttcctatactagcagtgaaagagcatctggtca

SEQ ID NO: 61112 - DNA, 237 bp, Zea mays
agctttcagtttttgatgctgctatgaaatacaagaatgaagggcatgatactattatcctggctggtgccgagtacgggagtggtagctctcgggattgggctgcaaagggcccaatgcttcagggagtgaggctgtgatagcaaagagctttgagaggattcaccgcagcaatcttgctggcatgggaatcatccctctatgcttcaaagcaggggaggatgcagacaccctggg

SEQ ID NO: 61113 - DNA, 242 bp, Zea mays
caggagagagcgcgatggggaagatgcggcactgatctgcctcgtggccgccgtcgccgccgcggccatcctcctgacagcgtcggccaagaagtccggcgacgtcaccgagcttcagatcggcgtcaagtcaagcctgagtcatgtacgctgcaagcacacaaaggagacaaaattaaggttcactatcgtgggagactcactgatggatcagttttcgattctagctatgacagaggtga

SEQ ID NO: 61114 - DNA, 246 bp, Zea mays
gaaccatctagcatgacttctgacgcagcctctgaagttgcctcggaggatggtgcttcaacgacagcaccgtccgagtcagaagaggtgaactcgctgtctgatagcatatcgaatttgacaacggatgagctacttcaaacgccccatctgctgtatacggaaatggtgtggcagggtcctgatggatatgattatgcagacgctgttctttcctccccatacagtgctgttacaggaaatagt

SEQ ID NO: 61115 - DNA, 246 bp, Zea mays
gcggaaggagtcggagggaaccgaaaactcagggtctcgaatttcctaggagcggaggcgatggctgggaagggaggaaaaggattgctcgccgcgaagacgacggcggccaagtcggcggagaaggacaagggaagaaggcccccatctcacggtcctcccgcgcgggcctccagtttcctgttggacgaatccaccgtcagctgaagcaaaggactcaggcaaatggccgcgttggtgccactg

SEQ ID NO: 61116 - DNA, 247 bp, Zea mays
gttgagctggaggtgttcaacttcactggtgccggaggagttgccttatcaatgtacaacactgacgagtccatccatgcctttgctgacgcttctatggccactgcttatgaaaagaaatggccattgtacttagcaccaaaaacactattttgaagaaatatgatggcaggttcaaggacattttccaggaggtgtatgaagctggttggaaaaccaaatttgaagctgccggcatatggtatga

SEQ ID NO: 61117 - DNA, 245 bp, Zea mays
gggctgccaaaaccgtttaccaggtgatccattctgctcgggccaatgcatctcacaaccatggattggatcctgataagctcattgttgaggaggcctttgtgggaaagggacttttcctgaagataggtcttaccatgccagagggaggtccggcattatggtgcgaccaaggtgcagactgacattggtggttagagaagctacagctgaggaggaggcaaagatcgccaaactcagggtga

SEQ ID NO: 61118 - DNA, 243 bp, Zea mays
cggctcgagctcgaggtgattatgatgcagaataggttcagccagctcggcgggctccagctcgataaggaggtccgctctctgatcaaccatttctcagagatgtcccagagaccagtcagagctaagtctctaggctttcgcagatgtcgaccattttgaacttcgagcgggtatcggagatattggatttctggggtgacaatgctggccatctgatgtggctgttgacacctgcagagg

SEQ ID NO: 61119 - DNA, 245 bp, Zea mays
ccatgctgtgctgcttcaagtacggcaccttcctcttctacgcgtcgtggctggttgtcatgaccgccttcgccgtggcgttcgtgccggagaccaagggcgtgccgctcgagtccatggctcacgtctcgcgcgccactggtactggggcaggttcgtcaaggaccaccagaagttgggcgaagagtccacctagctaagctaataattcggaatcagcgaacgacgtaccctactaccagtag

SEQ ID NO: 61120 - DNA, 246 bp, Zea mays
aaagctgctctcgtccctagaaataaagcagctcctccgcggggcggcgaactgctactcatcgccaaaaccctagccccgatccggtcgaggagcactacttcttggcatggcgggcaccccgagccagcaagcctcctgctccagaagcagctcaaggatcttgcgaggaaccccgtggatgggttctccgcagggcttgtagacgcgtgcaacgtcttcgagtggcaggtcaccatcatcggc

SEQ ID NO: 61121 - DNA, 242 bp, Zea mays
ctcatgggaatattgtgtcggaccttacaattattgatgtctttggtattgctgatgtgactagtctactagagaaagcatcccagagtaggtctgtgggtaagactatgatgaatgaacagtcgtcagaagtcattttgtattcacattaaagatatctggatctaacgagaacacaggccaaaatgtccaaggagtccttaacttgattgatttagctgggagtgagcgtcttgctaaaa

SEQ ID NO: 61122 - DNA, 241 bp, Zea mays
tccgccattatgggtcgcatgcacgctcccgggaagggcctgtcccagtcggcgctgccctaccgccgtagcgtgcccacgtgtctgtagttgacgtctgacgacgtgaaggaacaaatttacaagtggccaagaaaggcctgactccttcccagataggtgtgattctgagggactcacatggtgtggcacaggtccgttttgtgaccggaaataaaatccttgagaatccttaagtcca

SEQ ID NO: 61123 - DNA, 243 bp, Zea mays
agatcctgttgtgttccttgaaaatgaacttctttatggtgaatcatttcctgtatctgctgaggtacttgattctagcttctgccttccgattggaaaggctaagatagagcgacaagggaaagatgtcactatcactgcattctccaaaatggtgggatatgcccttcaggccgctgatatactggccaaggaaggtatcagtgccgaggtaatcaatcttcgctcaattagaccgctgga

SEQ ID NO: 61124 - DNA, 246 bp, Zea mays
atgtactccaagtcaactaaggttggcgacatcatgactgaagagaacaaactgatcacagtgaatcccgacaccaacgtccttcaggcaatgcagctcatgacagaaaaccgcgtcagacacatcccggtgtcgacggcacggggatgctggggatggtctccatcggcgctgtcgtgcgcgcggtggtggccgagcacagggaggagctgaaccggctcaatgactacatccagggaggctact

SEQ ID NO: 61125 - DNA, 244 bp, Zea mays
gccgtctcccttttgcgtgagaaagaaagagagcgagaagcagtcgccatgtctggcatcatccacaagatcgaggagaagctccacatggggggcgaccacaagaataaggaggaggagcaccacagaaggccgaggagcaccacaagaaggaggagggggagcaccacaagaaggacggcggggagcacaaggaaggcatcgtggagaagatcaaggactagatcaccggcgagcacggcga

SEQ ID NO: 61126 - DNA, 262 bp, Zea mays
aagactttcacttccttcagtcaaagccaaaaggagatcttagaaaagcctcttggtgtgaagtataaagatattactattgccaggcttgggccaggacaggctatcgagctcgaggcacatgctgttaagggaactgggaacgttcacgccaagtggtctccagttgctacagcctggtacagaatgctccctgaggttgttattcttaaagaagttgaaggccctcaggcagaggagctggtgaataagtgccgggtta

SEQ ID NO: 61127 - DNA, 255 bp, Zea mays
gttcctctagccgtctcgcgcagcacagcctccatttctcctccgacggcggtgcggctagctcaaccatggcggactccaaggccacctcggcggtcaccctccgcactcgcaagttcatgaccaaccgcctgctggcccgcaaacaatttgtgcttgaggttatccaccccggccgcgccaacgtctccaaggcggagttgaaggagaggcttgccaagatgtacgaggtgaaggacccaacaccatcttcgt

SEQ ID NO: 61128 - DNA, 255 bp, Zea mays
cttgattgtcagtacacgaaaggagtcccttcaacacttcaagaaaccatgggcttatgagcataaaccactcagcaacctcttagatgctgttaatgctatcaaaccaacagtgttgattggcacatccgggaaggggcaaactttcacaaaagacgttgttgaagcaatctcctcatttaacgagagaccaatcattcttgccctatcgaacccaacatcacaatctgaatgcacagctgagcaagcttacac

SEQ ID NO: 61129 - DNA, 254 bp, Zea mays
gacctctgcctctccttcgtggcggaagatccggcccttctccccccgtcgattaccgtcggcctcctccattgccgctggcattaaccgtctcttggtgcctgtagctttagagctaccctcggcgagattcatgagctgcctgccatggtgaaggacagcgcctactacgatgtcctggggctcagcgtcgacgcgtcccccgccgagatcaagaaggcgtattacattaaggcgaactggtgcatccggac

SEQ ID NO: 61130 - DNA, 258 bp, Zea mays
gtcgccaacgcgagggtgtacaaccagtacctcatcaaccacgtcgggcgcgggacgcgcgccaccccggcgccatcgagacctacctcttctccatgttcaacgagaaccagaaggagagcggcgtggagcagaactgggggctcttctaccccaacatgcagcacgtctaccccatcagcttctgaagaaccgttaaccgtaccgatccaagctagctgctagctggccctggtggtggctccgaccgacgacgga

SEQ ID NO: 61131 - DNA, 258 bp, Zea mays
cggaagaacaggctccattacccagattcctattctaacaatgcctaacgatgatatcacacacccaactcctgaccttactggatacattactgagggacagatatacattgataggcagctccataacagacagatttatccacctattaatgtcctgccatctctttcacgattgatgaagagtgctattggtgagggcatgacacggtcgagaccattcggatgtatctaatcagctttatgccaactatgcta

SEQ ID NO: 61132 - DNA, 264 bp, Zea mays
atgacatcaaggcaccgtcggtgttcagtgtgcgcaacatcgggaagactctcgtatccaggacacagggtaccaggattgcttctgagggtctgaagcacagagtctttgaggtttgcctagctgatcttcagggcgacgaggatcaagcttacaggaaaatcaggctccgtgctgaagatgtgcagggcaggaatgtgctcacaaacttttggggcatgaattttaccactgataaactcagatccctagtgaagaagtggc

SEQ ID NO: 61133 - DNA, 253 bp, Zea mays
  unsure (1)..(253): unsure at all n locations
gaccgcaggantgcacaagatgccattcgcgatttggatggtaagaatggttggagggttgagctgtcaaccaaagatggtggtggccgtggccgagaccgtaatcgttctgatatgaagtgctatgagtctggtgatattggccactttgcacgtgaatgtcgcttacggattggttcgggagggctgggtagtggaaggcgtcgcagccgatgtcctagatatctcagccggagccgaagtcgcagccgga

SEQ ID NO: 61134 - DNA, 252 bp, Zea mays
gtgccataatggctgagctgttgacactccatcctctctttcctggaaccagtgaagcagatgagattctcaagatatgcaatgtcatcggttgtccagatgagcaatcttggcctcaaggattgtctcttgcagaagcaatgaagtatcagttcccacagaccaaaggcagtcaattgtctgaggtgatgacaacagctagtagcgaggcaattgatctcatctcatcactatgctcatgggatcctagca

SEQ ID NO: 61135 - DNA, 253 bp, Zea mays
tgccaaattcattggtgcaggtgctgccacagtaggagttgctggttctggtgctggtattggaacagtctttggcagtcttatcattggctatgccagaaacccttcactgaagcagcagctgttctcatacgctatcctgggatttgccttgtctgaagctatgggtctcttttgtttgatggttgcgttcttgatcttgtttgccatgtaacagaaattactgcctaaaatgttggcattcatagtaatt

SEQ ID NO: 61136 - DNA, 120 bp, Zea mays
ggtgaatgtaaaaaatctcaagacatgtatcttgacgaagacacagtgtcttagctctatattcgagacaggagactatctgattggtcactttaatttattgaatgctctgattggtac

SEQ ID NO: 61137 - DNA, 253 bp, Zea mays
aacttttcaattagcgatgatgatgatgcaaacatcagtgatctttttgaggaagcatcagacttcattgatcatgtggatcatgttgggggcaaggttctagttcattgctttgaagggaaaagtcggagtgccacagtcgtacttgcctatcttatgcttagagagggctttactcttgcaaaagcctggaacttactgaagaaagtacaccgtcgagcgcaccaaacgacggcttcgcaaaggctctcct

SEQ ID NO: 61138 - DNA, 251 bp, Zea mays
gtgaacgacgagacggtcaagttcgagatatgggacacggcggggcaggagcggtaccacagcttggctcccatgtattaccggggcgctgcggctgccatagttgtctacgacatcacgaacgcggcctcttttacgcgtgcgaagaaatgggttcaagaacttcaagcacaaggaaactcgaatacaatagtggctcttgccgggaacaaggctgatttgttagatacgaggcaggtgtcagcagatga

SEQ ID NO: 61139 - DNA, 251 bp, Zea mays
acctgacaaaacttgagaagcttcagctgcagaacaacaacataattgggccaatcccagcagagatcggcaagttagcaaagctcaggacgctggttctgtccagtaacaaattacatggcacagtcccaaattctttaggccgactcagaaggctccagtacatagacttgtcgtacaataacttgagtggcccgataccaaaaacgtctgcaagaacgctcaacatagccgggaatcctctcatctgt

SEQ ID NO: 61140 - DNA, 253 bp, Zea mays
atgctttcttggcatcagaggccatcatcaagcagattccccgtctccttggtcctggtctcaacaaggcaggcaagttcccgaccctggttactcaccaggaatccctcgagtccaaggtgaacgagactaaggcaaccgtcaagttccagctcaagaaggttctttgcatgggtgttgccgttggcaacttggcgatggaggagaagcagatccagcagaacatccagatgagcgtcaacttccttgtttc

SEQ ID NO: 61141 - DNA, 252 bp, Zea mays
ctcagctgtgcgggatcagcatgtcagacaatctcaagccgatgatggcttatctggagagcatcggcgtcgacaaggctcagtggagcaaggtgatcacccgcttcccggcgctcctcacgtacagccggaacaaggtgcagacgaccgtgagcttcctcgccgagctaggggtctccaagaagagcatcggcaagatcctgacgcggtgcccccacatcatgagctacagcgtggacgacaacctcaggc

SEQ ID NO: 61142 - DNA, 252 bp, Zea mays
gccatgggaaaaaatgtgtcaaatgcaaagacatttcttgaaaagagatacacagaggatatggaacttgatgatgccatccacactgcaattttgattttgaaagaaggatatgaggggcaaatttcctccaacaacattgaaatcggaattattcgagctgactgtgagttcaaagttctaagcccattagagatcaaggatttcttggaagaggtggagtaagttgtctgttgatgatttactgtttca

SEQ ID NO: 61143 - DNA, 254 bp, Zea mays
aaatgatggcaaagatctgcacgtctccgttactatgcaatctattgaggttggcacagttggtggaggcacgcagctggcctcacaatctgcctgcttggacctgcttggcgtcaaaggtgctaacagggaatccccagggtccaacgcgcggctcttggccacggtggttgccggtgcggtcctagccgcggagctgtccctcatctctgcgcaggccgctggccatctggtccagagccacatgaaataca

SEQ ID NO: 61144 - DNA, 252 bp, Zea mays
gtttggtgagattgagaatctgaatgtttgtgataaccttgctgaccacatgattgggaatgtctatgtccagttcagggaggaagagcaagcagccgcagcatacaacgctcttcaggggcgcttttactctggccgccctataattgttgagtattctcctgtgaccgacttccgtgaagcaacctgtaggcagttttaggagaacagctgcaaccgtggtggctactgtaatttcatgcatgtgaagca

SEQ ID NO: 61145 - DNA, 256 bp, Zea mays
ggcctcttacgaggaaatcaagaaagctattaaggctgcttctgagggcccactcaagggtattatgggctacgtggaggaggatctggtttccaccgacttcacccggtgacagcaggtcgagcatcttcgacgccaaggccgggattgccctgaacgaccacttcatcaagctcgtctcttggtacgacaacgagtggggctacagcaaccgcgtcgtcgacctgatccgccacatgttcaagacccagtagag

SEQ ID NO: 61146 - DNA, 251 bp, Zea mays
atttcttctctctctgctcctccgcctccgcctgatccatccaagacagggatcgccatgtcggactcggaggagcaccacttcgaatcgaaggccgacgctggggcgtccaagacctacccgcagcaggctggcaccgtccgtaagaacggcttcatcgtcatcaagaaccgtccctgcaaggttgtggaggtttctacctccaagactggtaagcatggccacgccaaatgccactttgtcgccataga

SEQ ID NO: 61147 - DNA, 248 bp, Zea mays
acaacaccggcatgctgccagaaattcaggcaaccatcaggcctcctgtggtgaagaacatggagaaagctctatggttccagttcaccattggctccttgcctctctatgctgtagtttttgtgggttactgggcttatgggtcctcaacatcaggctacctcctcaacagtgtcacaggcccagtctgggtgaaagcggttgcaaatctgtcggcattttttcagacagtcatagcgctgcacatc

SEQ ID NO: 61148 - DNA, 256 bp, Zea mays
ggctcccgtctggttaacatatgatttcccgccagatgtcagaaccaaactgaatgccatgtggggaaccgattggaaaggtccaagctcaaaaatggtttttatttagacttactggaaatgactatgagattaaccttaatggtgatggatctgagaagccagagtttggtgaatggacattgattacacccaaggaagttatcgaaaaggcagttgatttcaaagaaacctgtatatgaggaagcattgaaac

SEQ ID NO: 61149 - DNA, 251 bp, Zea mays
ctcgccgccgcatacgccggcattgtcacgtcgagcatagcgtactacgtgcaaggcctggtgatccagaagaccgggcccgtgttcgcgtcggcgttcagcccgctgatgatgatcatcgtggccgtcatgggctccttcatcctcgccgagaagatattcctcggcggcgtcctcggcgccgtcctcatcgtcatcgggctctactcggtgctctggggcaagcacaaggagacgcaggacaaggagga

SEQ ID NO: 61150 - DNA, 253 bp, Zea mays
ccgcgcttggtctgctctcgtccttccggaggccgcggcgcaacatggcgaagatcaagccgaaggccttgctcgcgcaaagcaaggtgaagaaggtccccggccaaatcagcgtggccacgatcgtcacctacatgatcctcggcgtcctggttgtgtcctccgtttacgctgcctacaggtactgctgggcaggcacaggagcagcggaggcagtgggcgcccaggggaactgatcccccttccgactgcg

SEQ ID NO: 61151 - DNA, 249 bp, Zea mays
gcgatggggaagatgcggcactgatctgcctcgtggccgccgtcgccgccgcggccatcctcctgacagcgtcggccaagaagtccggcgacgtcaccgagcttcagatcggcgtcaagtacaagcctgagtcatgtacgctgcacagcacacaaaggagacaaaattaaggttcactatcgtgggacactcactgatggatcagttttcgattctagctatgacagaggtgacccgtttgaattcact

SEQ ID NO: 61152 - DNA, 249 bp, Zea mays
cggctcgaggccaagatcacaactgaaggatcaaccatctacccaccatattccttgaagacctactggggcttctctcactttgaaaacccagcccagggcgctgtgggatcatggtagattaatgcgccgcgcacgccgcatatcatgccatgaacttagttgaggccaatctgtgctgctgaaatcaaacacttatgaacgtttgttctgaacatcactggaactctccatttgcttgtatgacat

SEQ ID NO: 61153 - DNA, 250 bp, Zea mays
ggacgcacaccagcacctgccctcctcgccgtcgccgcctccctccgcgcgaccgatctaacctccgccgccaccatgtcgctgatcgccggggaggacttccagcatatcctgcgtttgctgaacaccaacgtggatgggaagcagaagatcatgttcgccatgacctcaatcaagggtgtcgggcgtcgcttctccaacatcgtctgcaagaaggccgacatcgacatgaacaagagggccggcgagc

SEQ ID NO: 61154 - DNA, 244 bp, Zea mays
agaagttcgagccgaaataccgcctcatcaggaatggtcttgctactaaggttgagaagtcccgacagcaaatgaaagagcggaagaacagggccaagaagatccgcggtgtcaagaagaccaaagctggtgacgccaagaagaagtaaacgttcgtttacatttgtattactgttctgggctctgggtggtctagctgcaatgtcataattatggtcgtgttaggttttgttccacccttggc

SEQ ID NO: 61155 - DNA, 245 bp, Zea mays
cttgaagctgctagactcccacctagtgccttcttctagtgctgctgaatcaaaggtcttctagaccccgatgaacggtgactatcacaggtatcttgcggaatttaagacttgtgctgagaggaaggaatctgctgagagcacaatggtggcctataatgctgctcaggacattgctctggctgagctggcacctacccatccgataaggctgggacttgctcttaatttttcagtgttctatt

SEQ ID NO: 61156 - DNA, 253 bp, Zea mays
ggggtgttcccgatgactacgaatgtgaggtgattgaagacgacaccccaattcctaagcatgttcctcagcaccggcctgttgctcttcctgaggagttcttcaaggcactagatgctgtcaaatctgatcctgctcttcaaggcgatgctcctcctcaagtgaaggcgtaaggatggctgttcctggctaacgtcatttcacattttgccgcggtgggtagggactggtttcttgtgtcatttgccagcaa

SEQ ID NO: 61157 - DNA, 243 bp, Zea mays
ctcttctcctccatatagtggcgggcctccgtcggcccccttccaccccgttttgccgccccacaggccacagcccaaaatcctcctcgtcgctggtgccctctccgcggcctcctccgccagccatggccgccgctgggcccgggctctactccgacatcgggaagaaggcaagaggtctcctgtacaaggactaccacactgaccggaagttcacgctcaccacttacgccgccaacggag

SEQ ID NO: 61158 - DNA, 242 bp, Zea mays
ccattatcttgtgaaacactgtttagttctttggcatattcatcgttgcaggctgtgcggcgaagatttgacaagcgtatctacattccgctacctgacacgaaagcaaggcagcatatgtttaaggtccatctcggggatacaccacacagcttaactgaaagcgatttcgagagcttggcccgtcgaacagatggattttctggttctgatgttgctgtttgtgttaaggatgtcttatt

SEQ ID NO: 61159 - DNA, 240 bp, Zea mays
gcgacagtatgatggcttcaatggagcctttgctgtacgctgctcatgtggatatggtaatagcaggtcatgtccatgcttatgaacgtgcggacgagtctacaattccagacctgatccttgtggcgctgtccacataactatcggcgacggtgggaaccgtgaaggcttggcccgcaggtaccgtaacccgaagccagcctggtcggtcttcagggaagcgagctttgggcacggcga

SEQ ID NO: 61160 - DNA, 243 bp, Zea mays
gattggcaaagctaagatagaacgtgggggtaaagatgttaccattactgcattctccaagatggttggctatgctctccaggctgcagagatactgtccaaggaaggaatcagtgctgaggtgatcaaccttcgatcgatcagaccacttgatagagctgctattaatgcatctgtcaggaaaaccaaccgattggtgactgttgaagaagggttccctcaacatgggattggtgccgagat

SEQ ID NO: 61161 - DNA, 240 bp, Zea mays
ggcgttctcgctgtctctcgagcatttggtgataaactcttgaagccgtatgttgttgctgaccctgaaatcaagcacatctgaaaacgacttttgctattacaatcaggaggaggtggtcgacagctccctcgaattcctcatccttgctagcgacggactctgggatgttgtcactaatgaggaagctgttgccatggtcaagcctatccaggacccccaggaagcagcaaacaagct

SEQ ID NO: 61162 - DNA, 239 bp, Zea mays
ggcgaagatggttttgagatctctgttccgtcagagaatgcagtggatcttgcagaggccatcctagagagatcggaaggcaaggtgcggctgaccggcttgggcgcccgtgacagtctccgactggaggcaggcctgtgcctgtacggcaacgacatggagcagcacatcacgccggtggaagccggcctctcatgggcgatcggcaagaggaggagggcagagggcggtttcctggg

SEQ ID NO: 61163 - DNA, 243 bp, Zea mays
ctgttcctcgccctcggggtcccccgccaccccatggagatgagaacagagagatggatgatccttctgtgggccccaagatcccccaggctttggaaaagattctgcagctgaaggagagccgtcaggaagcgatgaactcccagcaggaggaagaagaaatggagacagacactcgctcatctctgggacagtcagcatcagagactgaggaggacactgtgtctacatccaaaaaagaga

SEQ ID NO: 61164 - DNA, 240 bp, Zea mays
ctgtatcaaacagtgatcttgttttgctactgatatctgattctgctcaggctgataactacgagaaaattttctcgcacatgaaaccaaacagtattcttggtttgtcacatggatttctccttggacatttgcaatctctgggttttgatttccctaaaagcatcagtgtgattgctgtatgccccaagggaatgggcccatcagtcagaagactttatgttcagggcaaagagatca

SEQ ID NO: 61165 - DNA, 239 bp, Zea mays
ccgggtcctcggagcacgatgaagtttgttgctgcctacttgcttgctgtcctcgctgggaacgccagcccctccgctgaggatttgactgccattctggagtcagttggctgtgaagttgacaatgaaaggatggaactcctgctgtcccaactgagcggtaaggacatcaccgagctcattgccgcgggcagggagaagtttgcttcagtcccatgtggtggcggtggtgtcgctgt

SEQ ID NO: 61166 - DNA, 237 bp, Zea mays
ggatgccaaggacaagataacaaagctcctggaggagtatgagagtggaggcgatgtaggggaggcatgcaactgcatccgtgagctgggtatgtctttcttcaaccatgaagttgtcaagaaggcgctcgtgatggcaatggagaagaagaacgagaggaccctgaacctgctgcaggagtgctttggtgaagggatcataaccatcaaccagatgaccaaggggttctcaagggt

SEQ ID NO: 61167 - DNA, 237 bp, Zea mays
caagaagtatgcccacacgaggcctgatgcccttacaggcaaagagctacaggagatgatgaaagcaaacagagaacccaaggacttgaaaggatggctgggtggcttcacagagtggaaggtgctgtactccctgtgcaaagacaaggacgggtttctccacaaagacactgtcagggcggtctacgatggcagcctgtttgaaaggttggagcaagagaggaactcaaagaaaga

SEQ ID NO: 61168 - DNA, 237 bp, Zea mays
ccacaggatgctgaacgaggatgaattgagggatgctgtcttgctcgttttcgcaaacaagcaagatctaccaaatgcaatgaacgctgctgagatcaccgataagcttggtctccattccctgcgccaacgccactggtatatccagagcacttgtgctaccacaggagaaggtttgtacgagggtcttgattggctctccaacaacattgcaaacaaggcctgaatggacaattc

SEQ ID NO: 61169 - DNA, 242 bp, Zea mays
gcggctccccaccaacgagacgccccctaaggagctccacccggtgttcttcctcttcgtggcggcgcccagcgttgcgcgcatggcgtgggccatgatcacgggcgagttcggctacgggcccaggctggcctacttcatcgccatgttcctgtacgcgtcgctggcggtgcgtatcaacttcttccgggggttccgcttctcgctggcgtggtgggcgtacacgttcccgatgaccggcg

SEQ ID NO: 61170 - DNA, 238 bp, Zea mays
atgggatcaagttttttgaaacgagtgccaagacaaacctgaacgtggagcaagtgttcttctccatcgcacgtgacatcaagcagaggcttgcagagactgattcaaagccagaggacaaggcaatcaaaattaacaagccagaccagggttccgaggcaccagctgcccagcgatctgcatgctgcggttcataagcagacgcacgatagccataatcattggttatttgacacta

SEQ ID NO: 61171 - DNA, 239 bp, Zea mays
tcgaccgccgccgtcccagttcgcttcgcgtcaccgagagctcgtcggcctccgtccccgcgagaagcgagagcatggacacccaagtgaagcttgctgttgtggtaaaggtgatgggcaggaccggctccaggggtcaggtgacccaggtcagagtgaagttcttggatgaccagaaccgtctcatcatgaggaacgtcaagggccctgttcgtgagggtgacatcctgaccctgctc

SEQ ID NO: 61172 - DNA, 237 bp, Zea mays
cttcaacgctgttggtggaggaacgggctctgggcttggttctctcctcctggagcgcctgtctgttgactatggcaagaagtccaagctcggtttcaccgtgtacccatccccccaggtgaccacatccgtggttgagccatacaacagtgtcctgtccacccactctctcctcgagcacactgatgttgctgtcctgctcgacaatgaggccatctatgacatctgccgccgctc

SEQ ID NO: 61173 - DNA, 234 bp, Zea mays
cgacaatcctgtcaatgcatcattttttgaatcctatgaaagtgcacactccatgcatgatttgactggctctattgcagagaaacttggtgtccaagctcctccagttagaatcgacagccaagcaaaatatggtgctctggcccgaggtgatggcgccatttacttgcgctttccacacaaaggttatacagagaaaatatgggaccatgcagcaggctcaattgtcgtgac

SEQ ID NO: 61174 - DNA, 348 bp, Zea mays
tgcgcgtcaccgtcaagctcactgtccagaaccgccaggccaaggtctccgtcgtctcctccgccgccgcgctcgtcatcaaggcgctcaaggagcccgagagggacaggaagaaggtcaagaacatcaagcacagcggcaacatcggcctcgacgacgtcgtcgagatcgccaggaccatgaggaacaggtccatggccaaggagttggccggcaccgtcaaggagatcctcggcacctgcgtcagcgtcgggtgcaccgtcgacggcaaggaccccaaggacctgcagcaggagattgatgacggcggggtcgagatcccgtccgcttgaagactagacatgcaag

SEQ ID NO: 61175 - DNA, 313 bp, Zea mays
cgtgaattagctcatttccgattcgaaatactccaaggatcgtgagtctgtctatgagaagtgtaagcgagatttcaatgatattaggacaagagcacgtgaggtcttgcagagggacgacgatcgtagatgagattgtggcagcttgttggtaaagatgcgctggcataatctgacaagattacactggagacagcatagctactgagagaagattatttggcacaagatgcatctactccatatgataagttctgcgcattctacaaatgccgttagatgatgcgcaatattattcagtgcaacacattgg

SEQ ID NO: 61176 - DNA, 353 bp, Zea mays
cacccgtattggttccgctggtgttgtgaggaggcaggccgtggatatctcacccctgaggagggtgaaccaggccatctacctcctcaccactggtgccagggagagtgctttccggaacatcaaaaccattgccgagtgccttgcagatgagctgatcaacgctgccaagggctcatccaacagttacgccatcaagaagaaggacgagattgagcgtgttgccaaggccaaccgttgaacggagcttgtatcctggtgcactctgcgctggaaacttttatgttgctggcagtcgtatcggttcctgttttaccaatgtttagagtttttttgagacctatatgcggttt

SEQ ID NO: 61177 - DNA, 353 bp, Zea mays
caatattactgacagaatgagaagaattaagattccactgcctcccgttgatgagaagaaaaaggttgttgaagatgttgacaaagacaggaggtatgcaattgatgcatcaattgtgcgcattatgaagagccgcaaagttatgggtcatcaacagctggttgctgaatgtgttgagcagcttagccgcatgtttaagccggacttcaaagccataaagaagaggattgaggatctcatcacaagggactatttggagcgcgacaaggacaacgccaatacgtacaaataccttgcctgattggtggttagtgacaagtccagaacagctccgggactatgcgataccactg

SEQ ID NO: 61178 - DNA, 357 bp, Zea mays
cacggcaagtccgctgacggactcggcacttgcacctacgtcaaagctaggcacgtattgtgtgagaagcaggggaagatcaatgaagcttataagaagttgcaggatggatggctgaataatggggacaaagttcctcctgctgagtttgctaaggtagcacaagagtattctgaatgcccatcagggaagaaaggtggagatcttggttggttcccgcgtggcaagatggctggtcctttccaggaggtttgcttcaacacacctgagggaactgttagcgcaccattcaagtccacgcacgggtatcacttgatctctgcgaggaaggaagactgatctgaaatgtcggttggg

SEQ ID NO: 61179 - DNA, 352 bp, Zea mays
atgtgctggtttgattgggggcttgggcctaacacccagttgcaatattggtgaaggtggcatttgtctagcagaagctgttcatggttctgctcctgatattgctggcaagaaccttgcgaacccgactgctcttatgctgagtgctgtcatgatgttgcgccacttgcaattcaacgacaaagcagaccggatccacaacgccatcctgcagactattgctggggggaagtacaggactgctgatcttggtggaaaggcatcaacatccgagtttacaaatgcagtctgtgatcacatctgagaatcggatgtggttcgttccttctgattgttctgtcgtcctaatatc

SEQ ID NO: 61180 - DNA, 337 bp, Zea mays
ccctacgcgcgtttctctctcgtcgcgcaacatcagagcacaagcgaggaacccagtccagtcccgggaatggagtgcgtattgggcgtggttggccgcgacttcgtgctggtggcggccgacacctccgccgtgcagagtattctcgtccacaagaccgacgatgggaaggtgatggtgctcgactcgcaaaagctgatgggcgcttcaggggagcctggtgatctggtgcaatttacggagttcatacagaagaacttccacctgtaccagttccggaacaccatcccgctctcaaccgccgccgccgccaacttcacacgcggcgaactcgcca

SEQ ID NO: 61181 - DNA, 351 bp, Zea mays
tgccgcctcagcgcctctctcaatctgataccgcagatccgtcgtccggtgagtggaagccgcacgaacccatggcctccggcgagcttgcctgcacctacgccgctctcatcctcagcgacgatggcatcgccatcaccgccgagaagatcgccacgatcgtgaaggcggccaacatcaaggtcgagtcctactggccggccctcttcgccaagctcctggagaagcgcaacgtcgaggacctcatcctctccgttggatctggtggcggactgctccagttgctgctgccgcacctgctggtggtgctgcggctgctgctgccccggctgtcgaggagaagaaggaaga

SEQ ID NO: 61182 - DNA, 343 bp, Zea mays
tggaggtaatgtgaaatggagggctcttcgccttgatactggtaactactcatggggaagtgaagctgttacccgcaagacccgtatcctcgacgtggtctacaatgcgtcaaacaatgagcttgtgaggacacaaacccttgtgaagagtgccattgtgcaagttgatgctgccccattcaagcagtggtacctcactcactatggagttgacattggtaggaagaagaaaacccctgctgcaaagaaggataatgctgagggacaagaggttgaggcagcagctgaggaaacgaaaaagagcaaccatgtcacgaggaagcttgagaagcgcaaggaggga

SEQ ID NO: 61183 - DNA, 119 bp, Zea mays
atggctcatttcctattcgaaatactccaaggcccttgagtccttgtatgagaagtttgatccagatgtcagtgatattatgacgagagcacgtgaggcgttgcagagggaggacgatc

SEQ ID NO: 61184 - DNA, 308 bp, Zea mays
  unsure (1)..(308): unsure at all n locations
attgccctgtacgcggtgcaatgctataagtgctacaaatggagtacggttccanaagaagaatttgagacgcttcgtgaaaacttcactaaggatccatggttctgcagcagacgaccagacagctcttgtgaagacgatgctgacattgagtacgacagcagccgcatttgggttttggacaagcccaacataccaaagcctccaccagagacggagaggctagtggttatgaggggcgactacagcatgatggacacatattatgtcatgcccatgggaagcgtcaaggtgtctggtgatgtgat

SEQ ID NO: 61185 - DNA, 349 bp, Zea mays
cagcccgaagggaagaagctgccacgcaccttctgccagctgatcctggaccccatcttcaaggtgtttgatgcgatcatgaatttcaagatagaggagacagcaaaactgatagagaaactggacatcactcaaccataacacttgatgccgtttctttcaatatttatttccagagtccggacgcagcagacacgccctcttagtagggacttaatgggccggtcggggagggggaggcgggatgggacactcaacactttttccatttcttcagagggaaactcagatgtccagactaattttaacaaacgcattaagaggtttatttgggtacatggctcgcagt

SEQ ID NO: 61186 - DNA, 345 bp, Zea mays
cgacaccaacttcaccgtcacctccaaggcctcggatgaagacggcgacttcgcggactgtacatgttcaagtggacgacacttctgatcccgcccaccaccatcctgatcatcaacctggtcggcgttgttgccggcatctcctacgccatcaacagcgggtaccagtcgtggggtccgctcttcggcaagctcttcttcgccttctggaagatcgttcacctgtacccgttcctcaagggtctcatgggtcggcagaaccgcaccccgaccatcgtggttgtctgggcgatcctgctggcgtcgatcttctccttgctgtgaggtcgcatcgatccgttcacc

SEQ ID NO: 61187 - DNA, 347 bp, Zea mays
ctctgctgcctctccgcgatgccgacgcgctcccgttctccaccgggcgcttcgccgacatcctcgccatgttcgcgccgacgacatccgacgccatgggcgaagagatacggtcgacgctcgacacctgcgagaacacgcgcccgctccccggcgagaaggccgcctgcgccacctccctcgagtctctcgccaggatacccgccgtcctcctcgggacacgcaacgtccgcgctttctccggcgacatgcccaccgatcctgccggcacgtcggcgaacggtgggcggtataacgtaacggccgtgcagaagctctccgagtcactgacggcggcggcgtgccat

SEQ ID NO: 61188 - DNA, 348 bp, Zea mays
cattggcaaagctaagatagaacgtgggggtaaagatgttaccattactgcattctccaagatggttggctatgctctccaggctgcagagatactgtccaaggaaggaatcagtgctgaggtgatcaaccttcgatcgatcagaccacttgatagagctgctattaatgcatctgtcaggaaaaccaaccgattggtgactgttgaagaagggttccctcaacatgggattggtgccgagatatgcatgtctgttgtagaagaaagctttgagtaccttgatgccccagttgagaggatcgctggagctgatgtacctatgccctatgctgccaaccttgagagaat

SEQ ID NO: 61189 - DNA, 149 bp, Zea mays
atttcgcgtccgcctcagcccgccgcaaggagaggtaagttcaggagacatcttcgagaagctgaaatggctcctaaagctgctcctgccaagaagggtgatgccaagacccaggccttgaaggttgccaaggctgtgaagtctggggc

SEQ ID NO: 61190 - DNA, 344 bp, Zea mays
accaatttgcagagtcgagtaaagaaaggaaaaatgaccgaggagcgatatgagaaggctatgtctctcgttactggtgtccttgattatgaacgtttcaaagatgtagacctcgttatagaggcagttattgagaatgtgaagttgaagaggcaaatattttctgacttagagaagtactgtccttcacattgcatccttgctactaacacatctacaattgatcttaatctgattggggagaatacaaaggctcaagatcgtattgctggtgcacacttctttagtcctgcgcatgtgatgccattctggaaatagttcgtactcagcacacttcaccacaa

SEQ ID NO: 61191 - DNA, 335 bp, Zea mays
gctacttcagcaaaggtccgcgacaaaggttacctttcctttagtttggaccaatacctgctgcagccaccctctgtaccgtgagtctgagcttatccaggagaactaccttggtgtgagaaatgcagcacagaggaagctactggatgagctgggcatcccagcagaagatgccccagttgaccaattcacccctctgggccgaatgctttacaaggcaccatctgacgggaaatggggggagcatgagcttgactacctgctgttcatcgtccgggacgtgaaggtgcaccgaacccagatgacgcgctgacgtgaagtacgtgaacgcgacg

SEQ ID NO: 61192 - DNA, 342 bp, Zea mays
  unsure (1)..(342): unsure at all n locations
atnttgagaagtgcgttgaaaaaaggtataaagaagctgagctcaatatgggtgagaacagttgcattgatcgatgtgtttcaaagtattggcaggtgactaatttagtaggtcagatgcttgggaaccagcctcagatgtgaaccgagatgcactagttccattttgtagcagaatcctattgctctgtttattctttttggttggtatttgaatcccgccacctgctattaagtacaccaatacagcaccagacttgttaatgcgtggatcgctctgaagaaaaatcacggtgtcttgccctttccagtgatgtgcattatctttgaatcatgaacgggg

SEQ ID NO: 61193 - DNA, 353 bp, Zea mays
  unsure (1)..(353): unsure at all n locations
cgctcgcccgcccaccagccgccgccgcaccgccaccgcgcgacctcccttcttcgccgcaaaccgctctgggcgcttgaagatggcggtgccgctgttgactcagaagatcgtgaagaagcgggtcaagcagttcaagaggcgccacctcgaccgctacaagtgcctcaagccaagctggcgcaggcccaagggtatcgactcccgtgtcaggcggaagttcaagggatgcaccttgatgcctaacattggatatggctctgacaagaagaccaggcactatcttcccaacaagtgtaagaagtttgtcgtgcacaatngttcttgagctgagttcttatgatgcacaacag

SEQ ID NO: 61194 - DNA, 341 bp, Zea mays
  unsure (1)..(341): unsure at all n locations
aggagagcaagcatgttctcagggttgaccaagatgagctcgagaccgtgatccctcagatcggtgggctgttgcggatattgaatggtgcttatcggggatcaaatgccaggttgctctcagtggacactgagaaattctgtgcaaaagtgcaggttgagaaaggtctctatgatgggaaggttcttagggctgtcgaatacgaggacatttgcaagatatcctcatgatatacagtgtgatccattccattttcctggatcatcaccgaagcaaacaagcactatgcaacccagtgtactagctctgccagttacatatctgatagtgtntgtgcttgt

SEQ ID NO: 61195 - DNA, 341 bp, Zea mays
accgggaccttgctctgggcgcgaacttgcagtcccagttctccatcggaagggggtcgaagatggcagtgcgacttggtctgaacaacaagctgagcgggcagatcacggtcaggacaagcacctcggagcaggtccagatcgcacttctgggtctcgtaccggttgcagcctccatctacaggagcttccggcccagtgaaccgtccttcgcttattagcctgtcaggagtctcagtccaattacttcataaccatgtggtttctcttggcaattttcttcttcacatgaaccatgtttcttgctgtttcagtttactcccttgtaattggcagatcgt

SEQ ID NO: 61196 - DNA, 341 bp, Zea mays
ctacagggacggtgtcagcgagggacagttctaccaagtattgctgtacgaacttgacgccattagaaaggcctgtgcgtccctggagcccaactaccagcctccagttacttttgtcgtggtccagaagcgccatcacactaggctgtttgctaacaaccacagtgatcagcgcacagtcgatagaagcggaaacatactgcctggcaccgtggtcgattcgaagatttgccatcctactgagtttgacttctacctgtgtagccatgccggcattcagggaacgagccgccctgctcactaccatgtcctgtgggacgagaacaagttcacagctgacg

SEQ ID NO: 61197 - DNA, 310 bp, Zea mays
caacggcgctggaggaggctggctccgactacgagatcgtgcccatcaacttcgccaccgccgagcacaagagccccgagcacctcgtccgcaacccgtttggtcaggttccagctctgcaggatggtgacttgtacctcttcgaatcacgagcaatctgcaagtacgctgctcgcaaaaacaagccagagctgttgagggaaggaaactcgaggatgcagcaatggtggatgtttggatcgagggtgaggctaaccagtacaccgctgcactgaatcccatcttcttccaggtcctcatcagtcctatg

SEQ ID NO: 61198 - DNA, 340 bp, Zea mays
attttccatcgctcctactcctatcatccagaaaatctgagcggtattgatggcgcccaaggcggagaagaagccggcggcgaagaaggtggcggaggaggagccctcggagaaggcggctccggcggagaaggcccccgcggggaagaagcccaaggcggagaagcggctacctgcggacaagtccgccggcaaggagggcggcgacaagaagggtaggaagaaggcgaagaagagcgtggagacctacaagatctacatcttcaaggtcctgaagcaggtgcaccccgacatcggcatctcctccaaggccatgtccatcatgaactccttcatcaac

SEQ ID NO: 61199 - DNA, 339 bp, Zea mays
atctttttaaacactctatacaggtgcacacaaagggttgttgaaacagaaacacaaacgcacggcgaaataatattatttattcgacttacgaatttttcaaagaaatcgtactggtgtgaagtggaaagtttcaaagatagtttgaaaagcagggaaaaaagaacatagtgaaccttcatcgccacagtgacaggttcaaggaaaaaattcacacacacacacatacgcatacgcacacagagcactcagctctatatacataacaaagaatattgtaattcgacactatgtggtacattcagagggtcctaagacagcacaaatcagttatataga

SEQ ID NO: 61200 - DNA, 340 bp, Zea mays
gaagaacttagatgataacattgatgatgataagttgcgtgaaatctttgctgagtatggcaatattacttcttgcaaggttatgcgggattcttatggtgttagcagagggtctggatttgtttctttcaaatctgctgaagatgctaaccgagcttcttaccgagatgaatggcaaaatggttggaagcaagcccctttatgtagctcttgcacagcgtaaagatgacagaaaggcagagctacaggcacagttttcacaaatgcgtcctgttgcaatggcaccttcagtaggtcctcgcatgcccatgtttctaccttagtgttcctggagttggtc

SEQ ID NO: 61201 - DNA, 294 bp, Zea mays
  unsure (1)..(294): unsure at all n locations
caggatatccttgtgtatcaaagcggcatcaaaggctgctaactggactttttaaccattctgttcaggcgataatctctgtgagatcgaatcacaagtgttttccatcatctgaaggagtgctctcaggagatgatggcaacgctgaagattcctctgttcgacatgcatgagctccgtacctggagtacattgcatacctgtatcagaagatggatccgcttcctgagcangaacgctttgagattaattacagggattttgtgcagtctcctctcgagcgtctaatggata

SEQ ID NO: 61202 - DNA, 305 bp, Zea mays
tggacaccgtgacttcatcaagaatatgattactggcacttcccaagctgactgcgctgttctgatcattgactccaccactggtggttgtgaggctggtatctccaaggatggacagacccgtgagcatgctctccttgctttcacgcttggagtgaagcagatgatttgctgttgcaacaagatggatgccacacactcaagtactccaatgcccgttatgatgagattgtgaaggaagtctcttcctacctgaagaaggttggatacaactctgacaggatccacttcgttccatctctggt

SEQ ID NO: 61203 - DNA, 165 bp, Zea mays
  unsure (1)..(165): unsure at all n locations
ctatggcaattgtanagagtgatatcggcggcaatatcacaagactggagaacaagtatacttcagaaccatcaaagtatgaacacttgtacagcatggttcaggaggaagttcaaaacaagaccgcaaaaggttcctcaagctgcacaaatgggcttctgtggc

SEQ ID NO: 61204 - DNA, 358 bp, Zea mays
cgaagatttgtgcttgagaattggagtgaaacagggtggatgctcaggcatgtcttacaccatggagttagaaaatcgagcagatgccagccctgatgattctgttgtagagtatgatggttttgccatagtctgtgaccccaaaagccttctcttcatgtttggaatggagctggactacagcaacgcactcattggtggaggcttctcttttcagaatccaaacgcaacaaaaacctgtgggtgcggcaaatctttcgcgactgggaaggaatccgaggctgcagcaaaagcttgcaacaactagagtagtgaaatattgatagcaaatcgtgatgtaacttgttatatagcttgc

SEQ ID NO: 61205 - DNA, 156 bp, Zea mays
ccacaggcagctcatcaggctcgtcatccttcacggaaggtctgaaaaggacccacggggcgctcaacctgttcgcctggggcgtgctactgccgatcggcgccatcgtcgcaaggtactgcaggagatgggaccctctgtggttctacctccacc

SEQ ID NO: 61206 - DNA, 201 bp, Zea mays
ggcctccatttgtaacatttctgctttgtttttaaatgcaggttcatcttattgagggaataattgatgaagtggacagtacagttcatgtttcgtgggtcaagcccagagtgcttggaatcccacaggttaaggctttgcgcgaccgcctggatgcctgggttggaaaggtgcatactacatggctttcagttgagacag

SEQ ID NO: 61207 - DNA, 203 bp, Zea mays
atgaagcagaatcctgcttacaagggcaagtggcatgcacctatgattgacaaccccaactacaagggaatctggaagcctcaggagatccccaaccctgagtactttgagcttgacaagcctgactttgatccaattgctgctattgggattgagatctggacaatgcaggatggcatcctgtttgacaatatcttgattgc

SEQ ID NO: 61208 - DNA, 143 bp, Zea mays
tcgccgcgatgagatgcatggctgccacatgcatgcttgcttgcttggtcctcgtatcgtacgtcgccgtcgtcgtcttcttctggttgcgctgctaccttactgctctcgccctcgcgtatgcatgtacttttgcgtaattt

SEQ ID NO: 61209 - DNA, 180 bp, Zea mays
cgcagagcatgacgtctcgcccaatgaaggggatgctgactggcccagtcacaatcctcaactggtccttcgtccggaatgaccagccgaggtttgagacttgctaccagatcgctcttgcgatcaagacggaattcgaggatctcaaggctggtggtattcaggttatccaaatcgacg

SEQ ID NO: 61210 - DNA, 343 bp, Zea mays
cttccagccgccgccgccgcgtccgcctcgcccagcgcagcagccgccgcagcacatcgctatctcgatctcagccatggcggaggtggagcagcaacaggacacgccgaagctgttcaaccgctggaccttcgatgatgtccaggtgaacgacatctcgctgaacgactacctcgctgtgaacgcgacgaagcacgcgatgtacctgccgcacaccgcggggcgttactccaagaagcggttccgcaaggcgcagtgcccgatcgtcgagcgcctcacaaactccctcatgatgcacgggcgcaacaacggcaagaaggtcatggctgtccgcatcatcaag

SEQ ID NO: 61211 - DNA, 177 bp, Zea mays
  unsure (1)..(177): unsure at all n locations
cacaaatgtagttagtgagatctccatggcaaactcgcgccagaatatccggaagttggttaaggatgggtttatcatcaagaagcctcataagatccactctagatcccgtgcaagagnggcacatgacgccagacaaaagggacgccactcaggctatggtaagcgtgagggtac

SEQ ID NO: 61212 - DNA, 332 bp, Zea mays
ctacaaggaatactggagagtgaagatcactatcacgaacttcaacttccgcatgagttacacacagtggaacttagttgctcagcatccaaactttgataatatcactcagttgttcagcttcaactacaagccacttactccatatgggggtggcataaatgatacggcaatgttctagggtgtaagattctacaatgatttgctgatgcaagccggcgaacttgggaatgtgcaatcaggactgcttctccgcaaggactcacggacttgcaccttcgaagagggatgggctgtcccacgccgatgtacttccatggcgatattgggtc

SEQ ID NO: 61213 - DNA, 355 bp, Zea mays
ataagatgcaactgagcttgtagcaaagcttagggcatatcatcatactgctcaaacaaaggccgataagcaacattattcaagtatgggtcttgacctatctaaaggtatcgttcgcaacaaccttgagtatggcgtgatagagccatcgatgagcaaagtggagatattccatttggcaacggaggctgccattactatactgaggattgacgacatgatcaagcttaccaaggaagagggtaacgaagaagagtaatcagcccaccagtattggtgtagtggactcttgtgcgctggttgtcatagcgtgtaactttttgtcttcttcccatttttccgtttagttttttgc

SEQ ID NO: 61214 - DNA, 165 bp, Zea mays
ctgaggtgaagtctgttgaaatgcaccatgaggctctccaggaggcccttcctggtgacaatgttggcttcaatgttaagaatgttgctgtgaaggatctgaagcgtgggtatgtggcctccaactctaaggatgaccctgccagggaggctgatatcttcacat

SEQ ID NO: 61215 - DNA, 172 bp, Zea mays
ctccacgactggagcgacgcgcactgcgcacgctgctcaagaactgctacgacgcgctgccggaaaatggcaaggtcatcgtcgtcgcttgcgtgctgccggtcaacacggaggccacccccaaggcgcagggcgtgttccacgtcgacatgatcatgctcgcgcacaaccc

SEQ ID NO: 61216 - DNA, 171 bp, Zea mays
caagattggagtgaacactattcctggtattgaggaggccaacatctgtcaaggatgctattgtgatccaattccagaacgctaaagtgcaagcatccattcctgcaaatacatgggtaatcagtggagtaccccagacacaaagtctacgagaccttctgccaacaatta

SEQ ID NO: 61217 - DNA, 342 bp, Zea mays
ggatcgcgcagggctccgcgagggggctggcgtacctgcacatgtcctgcgacacccacatactgcaccgcgacatcaagtccagcaacatgctcctggacgacaacttcgaggctcacctggccgacttcggcttggccaggctcatctgcgcgtacgagacgcacgtcaccaccgacgtcgtcgggaccctgggctacatccctcccgagtacggccagtcgccagtggcgacctacaagggcgacgtatacagcgtcggcatcgtcctactcgagctgctcaccggcctggagccggtcgacatgtagcgagccacagggaccatggacgtcgtatcgt

SEQ ID NO: 61218 - DNA, 166 bp, Zea mays
gatcaactttgcagtgttcccatctctccaaggtggccctcacaaccaccagattgctgcacttggtgttgctctagcagaaactatgtcgcctggcttcaaggactatgcagagcagtatgaaggcaatgctgttagaattgggagctatctcatgagcaagggt

SEQ ID NO: 61219 - DNA, 171 bp, Zea mays
ctggtcggtgccaaatccgaggtgccctcgacagctgaactatcgaagtccttgaggacgtcaagctgggttacatattgcctcgtttcaacggcttggactctacccatgactgggccagtgttctttcgctgggggagcagccgcgtctcgcgttcgcccggctattac

SEQ ID NO: 61220 - DNA, 313 bp, Zea mays
caattccctcgtagcagcagcaccagtagagtctccttcctctccggcggcgatgtctgggcgcggcaagggcggcaaggggctgggcaagggcggcgcaagcggcaccgcaaggtgctccgcgacaacatccaagggatcacgaagccggcgatccggaggcttgcgaggaggggcggcgtgaagcgcatctccgggctcatctacgaggagacccgcggcgtgctcaagatcttcctcgaaaaggtaatcgcgaacccggacactaactgtgaacacgcccgtcaaaaaacgtgcacgccatggacgtcgt

SEQ ID NO: 61221 - DNA, 337 bp, Zea mays
taagcgtataaagctacagatttgggatacagcgggccaagaacgcttccgtactacttaccactgcgtactaccgtggagctatgggtatcttgctggtttatgatgtcaccgatgaatcttctttcaacaacatccgaaactggattcggaacattgagcaacatgcctctgataatgtcaacaaaattttggtgggcaacaaggccgatatggacgaaagcaagagggccgtacctactgcgaaaggacaagcacttgctgatgagtatgggatcaattttttgaacgagtgcccaacagacccttgaaggtggaacaaattgtcttctccatc

SEQ ID NO: 61222 - DNA, 315 bp, Zea mays
ttcacagttacctcaaaggcatctgatgaggatggcgactttgctgagctatatgtgttcaagtggaccagtttgctcatccctccgaccactattcttgtcattaacctggtcggaatggtggcaggactttcgtatgccattaacagcggctaccaatcctggggtccgctctatggaccgctgttcttctcgatctgggtgatcctccatctctaccccttcctcaagggtctcatgtggaagcagaactgcacgccaacattcgtcatcgtttcgtccatcctccttgcgtctatctgctcctcactgtgg

SEQ ID NO: 61223 - DNA, 167 bp, Zea mays; identical to SEQ ID NO: 37106

SEQ ID NO: 61224 - DNA, 339 bp, Zea mays
caggtgtatcagcaggatccttaccagtgccggtgtgacaatgattgcacgggcaggcagtctagttgatgctcatactgttgaagttacgcagcatgatggttcaaagcaaacgtatacagcgcacacattttgatcgcgactggtagccgtgctcaacgtgtcaacatacctggagaggatctggctattacttctgatgaggccttgagcttggaggagcttccacagcgcgctgtaatcctgggtggcggatatattgctgttgaatttgcttctatctggacggggatcggtgctgaagtagatttgttttatcgaagagatcttcctctaaga

SEQ ID NO: 61225 - DNA, 311 bp, Zea mays
tggagatgcacaggcctggtaccccgctctacaacatcaaggctttcctccctgtcatcgagtcctttgggttctcaagcagctgagggctgcaacctctggtcaggcgttcccccagtgtgtgtatgaccactgggacatgatgggctcggatcctttggaggctggctcccaggctgcccagctggtgctggatatccgcaagaggaagggtctgaaagaacagatgactcgtctttctgagtttgaggacaagctctagtcttttcgtttttgctactgttactggtattaattgtcattcggagtct

SEQ ID NO: 61226 - DNA, 336 bp, Zea mays
tgcagtccacagttggaacacaagcgcacgcagcaccgtcgtcgaactcttcacttttcggcggcattggagatggcggcgagtctagaggacgtgcagtctctggatctgatgcacgaactgatccgtcggatgaagtgcagctccaagcacgacaagcacctcatcgtcatcggcacacctggctctggaaagggtagtcagtctccggttattaaggatgaatattgcctgtgccatttagccactggtgatatgttgagggctgctgtggcagccaagacaactctacgtatcaaagctagagaagtatggataagggagagttgtttcaga

SEQ ID NO: 61227 - DNA, 309 bp, Zea mays
ggctggcatgggtcttgatgttggcgctgatgccaccacaacattcaacgaagcattggacaccaccaagactgttatttggaacggccacatgggagtgtttgagttcgagaagtttgcagctggcactgaggcgattgccaagaagctagctgagcttacaaccacgaagggtgtcactaccatcatcggcggcggcgactctgttaaggctgtcgagaacgctgggctggccgacaagatgagccacatttcgaccggcggcggtgcgagcttggagatcttggaaggcaagatctactggtgtcc

SEQ ID NO: 61228 - DNA, 345 bp, Zea mays
ctgcgggcgggcggacaaggagcaggcagaggacgagatgtgccgagccacaatgggtatctcacgcgagtcgatgcacaagcgtcgtgcaacaggtggaaagcagaaggcctggaggaagaagcgaaagtatgagcttggtcgccagccggccaacaccaagttgtcaagcaataagacagtgaggaaggtccgtgttcgtggaggtaacgtgaagtggaggggtcttcgccttgatactggtgactactcatggggcagtgaagctgttgaccgcaagacgcgtatcgtcgacgtggtctacaatgcatcgaacaatgagcttgtgaggacacaacacttgtg

SEQ ID NO: 61229 - DNA, 299 bp, Zea mays
tgtgttcaccacctaccaggaccagcagaccactgtctccatccaggtctttgagggtgagcgcagtatgaccaaggactgccgtcttctcggcaagttcggactcaacggcattgcgccagtccaacgtgcacaccccagatcgaggtgaccttcgaggtggacgccaacggtatcctaaacgtgaaggcggaggacaagggcacgggcaagtcggagaagatcacgatcacgaacgagaacgggcggctgagccaggaggagatcgaccgcatggtgcaggaggcggaggagttcgc

SEQ ID NO: 61230 - DNA, 348 bp, Zea mays
gtgtgaccacagaactaccatatgttccgctgtattgctaggtatgggtataaggatgtacgcaaggagaaccaccaagcattcgaacagcttctgctagaaagccttgaaaagttcatacgccgagaggcccaggaacgctccctggaacgctccctggagagcgaccataatgacgacaaagactctgaagaggagattgcttcttcatcatcaagagttattgacgagtcaggcggtgctgacaactcagccatgggatcaagcatgtcgttggaggagggatcaagcatggacaacgagctatctttcatccacaaggccaaagagtcgggcgtggtgtacttc

SEQ ID NO: 61231 - DNA, 318 bp, Zea mays
tgttggccaagcaagagtgccaacgaaacagcacgttcgctgtagcgcatcccttggtgtccagaacccagcttgtcccgcgactacctacatcgacagtctcattgggcctgacacggtcaacacgatgcccgaccaagctttgcacgcattcatagaccacggcactgtctcgaggacagttgatgcgaatgtgtccgaggcggaaggtgtatacagcgccttggagaagcttggcattgactcgggcgaggtcggaaagcagcttgagctggaaggtgtggactcttcaagcagactttgacagcctactcgtga

SEQ ID NO: 61232 - DNA, 326 bp, Zea mays
acggtccaggaagctctgctgagaagcatctagcaacactcgagcaaacgggacacggccggcagcaacacacgtagacgttccacacccggttcattgcgtgcggatgatctcgtcggatgcacagccgcggttacccaatcaggcatcgcattcgcatggcggccaacgccgggaataagatcctcaacgccaagctggttcttcttggagatgtgggcgctggcaaatctagcttggttactcggtttgttaagggacagtttgttgaattccacgaatcaacagttggagcagccttctcttcgcagacgttagcggtcaat

SEQ ID NO: 61233 - DNA, 312 bp, Zea mays
attgcatcacgacgggctcgatcggtcctgcccctgcaaggttcttgctgctgctgcgtcactggcacattggcaagctgcttatcaccatcagtgtcgaaacgtcgaggagaactcggcggctctccgtgagctcgtgtatctgctgcctggtgccctccagtacatcagcggtgtgatcctcttcgaggagaccctctaccagaagaccaaggatggcaagcattttgtcgatgtctcaaggagggaggcgtcatcctggtatcaaggtcgacaggggcaccattgaggttgttcgcaccggcaaggaga

SEQ ID NO: 61234 - DNA, 319 bp, Zea mays
  unsure (1)..(319): unsure at all n locations
actggtgttgcatggtccttctatcccacgattgggtacctgcgcttatgttagacaaactgaggaaacagctatttcttcattgaaagaggtcgcttggtgctctgaacacacacattgcttcaaacacataccttgttgggcatgctgttactctagctgacattgtaatgacatgcaacctctaccatggaattgcacggatcttgaccaagaccttcacgtctgatttcactcatgtcgagaggtatntcatggacatggttaaccagcctaacttcaagaaggtcattggtgaggtcaagcaggcagagtctgc

SEQ ID NO: 61235 - DNA, 363 bp, Zea mays
gattcgctccaccgtagtaactcggagttaggctcgagttgtccactgctttgacggcgagaacgtggagagtgctcatcctcctatgaagaacgactacagactgggtaatcttctatgctgggacgaggaaaacgatgccatggaggagaaggcgggagtgcttgatgagtaagacgggcatctggggtcgatttgcttctgagttgtatattttatatcgtcgcaatttcgtggttgtcgtttggttattctgtgaagcagccaagccaagctattgttatgagaatttgtcgtctgtaagcatgtgaacttcacgacgttgcacatgctggatcagtctgaataagtaagtatgcagct

SEQ ID NO: 61236 - DNA, 329 bp, Zea mays
gtccaataccgagcagcagtgcgagtcgagcgctcgcgcagcgcgtccatttcaacgaggaagcgcggtacactggtagcggcagagtaaggggcagatgtcgtcggcgttcaacggcgatgagagcgcccctttcttcggcttccttggcgcctccgctgcgctcgtattctcatgcatgggggcggcgtacgggacagccaagagtggcgttggcgtggcgtccatgggtgtcatgcgcccagagctcgtcatgaagtccatcgtgtccgtggtcatggctcgtgtgctcggtatctacggcctcatcgatcgccgtcatcatcagc

SEQ ID NO: 61237 - DNA, 312 bp, Zea mays
cgcgccccgctcgcttcacttctctaggtgcgcaccgatcagaagagatggcggtgccgctgctgacgaagaagatcgtgaagaagcgggtcaagcattcaagaggccccacctcgaccgctacaagtgccttaagccaagctggcgcaggccaaagggtattgactcccgtgtcaggaggaagttcaagggatgcaccttgatgcccaacattggttatggttctgacaactgacacgcactacctccccaacaattcaagaagttgtggtccacacgttctgagctgagtgctcatgatgccacagacta

SEQ ID NO: 61238 - DNA, 218 bp, Zea mays
ccatgctgtgctgcttcaagtacggcaccttcctcttctacgcgtcgtggctggttgtcatgaccgccttcgccgtggcgttcgtgccggagaccaaggcgtgccgctcgagtccatggctcacgtcttcgcgcgccactggtactggggcaggttcgtcaaggaccaccagaagttgggcgaagagtccacctagctaagctaataattcggaatca

SEQ ID NO: 61239 - DNA, 168 bp, Zea mays
  unsure (1)..(168): unsure at all n locations
cgaggagttgtangtggaagaggcggtggcgatggagtcgcagaccatccgccacatgatcgaggatgactgcgccgacaacggtatccctcttcctaacgtcaactccaagatcctatccaaggtaatcgagtactgcaacaagcacgtacatgccgccgccgccgc

SEQ ID NO: 61240 - DNA, 374 bp, Zea mays
gtgagcgtccctatgtgaccgcgttttcgacggcctcgcccccttcggcgatctcgccttcatcgccgccgtgcgtacccaggctctgcagctcatatcgttcggtgacgctatctcttcctcaagccgctcgccggagcgcctcttccgcgtcgttgacatgtacgaggctgtgcgtgacattctccctgaccttgatcctgtgttctctgacccatactctgctgcactccatgcggaggtctccgccatgtgcaacacactggggtcctctatcaaaggtacacctatggagttggaaaatctcatccgccgtgaccctgcccgagttgctgcccaaggtggtgccatacatcctatcactcggtatgtat

SEQ ID NO: 61241 - DNA, 325 bp, Zea mays
ctcggtcttgttatctctggagccatccgtgtccacgaggacatgcttcttgccgcctcggaagcactagctgctcaggccacacaggagaacttcgacaagggatcaatcttcccgcccttcaccaacattagaaagatctctgcgcgcattgccgcagccgtggctgcaaaagcttatgaactcggtttggcgacccgtctgcctcccccaagggacctggtgaaatatgcacagagctgcatgtacactcctgtctaccgtaactaccgatagtgctgctgggatcaattctgcagtaataaaatatgtcgacgcagatgat

SEQ ID NO: 61242 - DNA, 359 bp, Zea mays
gcaagaacatcccacggcttgttccagggtggacaaagcccatttgcattgggaggcatgcattcggcgatcagtaccgggcaactgatggcagctatcaaggggccggggaagcttaaattagtttttgagggaaaagaagagcaagttgagctggaggtgttcaacttcactggtgccggaggagttgccttatcaatgtacaacactgacgagtccatccatgcctttgctgacgcttctatggccactgcttatgaaaagacatggccattgtatcttagcaccagaaacactattttgaggacatatgatggcaggttcaggacattttccaggaggtgtatgaagctggttgg

SEQ ID NO: 61243 - DNA, 283 bp, Zea mays
tgacaactgtcacataagtggagatgataacaaggacggttcctcaggccacatggataaacccatcgggaaagtgaggattcggctttcgacacttgacacggcgcgtgtgtacacgcactcatatccattgctcttcctcagcccatcaggagttaaaaagatgggtgagctccaccttgccatccggttcacagtcacatcccttatcaatgtgctcttcacatactctaggcctctccttgccaagatgcactacgcacagcctctgtccatagttcag

SEQ ID NO: 61244 - DNA, 327 bp, Zea mays
aaatgttgcgtgagagttatgacaagggtgataatccagaagatgatgatctgatccgcctccagttggaaacactactagctgagaaagcacggcttcgcatgagaactcagtatatgcacgagaaaacagattcctgcgggaaatagttgagtatcaccagctcactatgcaggatgtcatatatgtagacgaaggcatcgaagaggtcaccgaggtgtaccctacacaagtactacctcgcactgggtcgagcgtcagtcgtgcagccactgcagctacaccgaaatctgctccgacgtcaacataatcttgccctgtcgtaca

SEQ ID NO: 61245 - DNA, 299 bp, Zea mays
  unsure (1)..(299): unsure at all n locations
ccgcaagctccgcatagaggacgcgaagaatgcgacttttgcagcaatagaggaaggtattcttccaggaggcggtgcagcatatgttcatctatcgacattcgtaccgggtatcaaggagacgttggatgatcctgaggagcgcctaggtgctgatatcattcagaaggctttggtgcacctgcaacgctgatagcccataatgctgggtgggaaggtgaggtgattgtggatanaatccgggacagcgagtgggagttcggttacaacgccatggcggacaagcacgagaactggtg

SEQ ID NO: 61246 - DNA, 328 bp, Zea mays
acagtgtcctgtccacccactctctcctcgagcacactgatgttgctgtcctgctcgacaatgaggccatctatgacatctgccgccgctcccttgacattgagcgcccaacctacaccaacctcaacaggcttgtgtcccaggtcatctcatccctgactgcttcctgaggttcgatggtgctctgaacgttgatgtgaacgagttccagaccaacctggtgcactaccctaggatccacttcatgctttcgtcctacgctccagtcatttctgctgagaaggcctacacgagcagctgtcgtggccgaaatcacacagcgcttcga

SEQ ID NO: 61247 - DNA, 339 bp, Zea mays
gtgaggagcgcagacgcgagagggagagggagaggaggctggaagcaaggatgctgcaatgggcaagaagagtaagatcacaagggacagggatcgtgatatcagtgagaagattgctcttggtatggcaagcactggtggtgcaaaaggtggtgaggttatgtatgaccagcgtctgttcaaccaggacaagggaatggactctggttttgccacagatgatcagtacaatatctactctaagggtctcttcacagcgcagtccacgatgtccacgctatacaggcctaagaaggatggggattctgatgtatatggtgatgcagatgaacagctgga

SEQ ID NO: 61248 - DNA, 324 bp, Zea mays
gtgctggtgcatgagagcgccaagattggagaaggttgtctgattggtcctgatgtcgccattggacctgggtgtgttgtggaggacggcgtgaggctttcccgctgcactgtcatgcgcggcgtgcgtatcaagaagcatgcttgcatctcaaacagcattatcggctggcactcaactgttggtcaatgggcacggatagagaatatgactatcctgggggaggatgttcatgtgtgtgatgaggtgtacagcaatggcggtgttgttctcccacataaagagatcaagtcaagcattctgaagcctgagatcgtcatgtga

SEQ ID NO: 61249 - DNA, 307 bp, Zea mays
gctacgcatcttgttttatttgttctaaaccatatattttacgtggcagcacaaatgctacatagttgctacttgtgatagagatttgaagaagaggataagaaaggtatgtttggtgtttagtgctcatagctcaggacatgcttctaatatcgcaaaagctttttcatgcatgcttgtaccatgggcattttcccaatcttgcaggttcctggtgttccaatcatgtacatcacaagacataggtattcgatagaacggctctctgaggccacaattggtggaggtatgtgatatcttcatctga

SEQ ID NO: 61250 - DNA, 330 bp, Zea mays
  unsure (1)..(330): unsure at all n locations
tttgaagcagaagaaggctcacctgatggagattcaggtgaatggtggtaccattgctgacaaggtgtactatggctacaaattctttgagaaagaggtccctgttgatgctgtacttccagaaggatgagatgattgacatcattggtgtgaccaaggggaaaggttatgagggtgtggtcactcgttggggtgtcaatagnctcccgcaagacccacggggtctccgcaaagttcttgtatcggtgcaggcatcggtaggctcctaaggttgctcctggtggtcaaatggtgtacacacgcactggatgacaagagttacagtcggca

SEQ ID NO: 61251 - DNA, 255 bp, Zea mays
tgtatcagttgaaaatgctggtttgctagctttgacacgcgttggtagccgaagggtagtgcagatatcagctggtttcatgatattctttctattctcgggaaattcggagctgtgttcgcctcaattcctgcacccatctttgcagctatgtattgtatcttctttgcttatgccggttctgctgggatcggcttccttcagttctgtaacctcaacacctttaggaccaagttcatccttgggttctcagtt

SEQ ID NO: 61252 - DNA, 330 bp, Zea mays
gtccgtctcccagccgtcgtctgctgcgtactccgcctccagtttggtctgtttcttgcaagttgctcttgcggtagttcccccaactgtcaccatgcagaacgaggagggtaagactgtggacctctatgttcccaggaagtgctcggccacaaacaggatcatcactgccaaggaccatgcctctgtccagatcaacattggccacttggatgcgaatggcctgtatgatggtcacttcacaacatttgctctctctgggtttgtccgtgctcagggcgatgcagacagctccttagacagggtgtggcagagaaagaggctgatatc

SEQ ID NO: 61253 - DNA, 347 bp, Zea mays
agctgattggttgctgtgttgaagggagtaacagactattggtgtacgaatatgcagagaataatagtttggcgaatgctttgcttggacaaagaacaaatgtatcccattggactggcagagaagagttgctatatgtattggaactgcttctggccttgcttttcttcatgaggaagcacaaccacggattgtccaccgtgatatcaaggctagcaacattttacttgataagaagctgctgccgaaaattggagattttggattggcgagactctttcctgatactgtcactcacattagcacgcgtgttgcatgaacaatgggttatttggcaccagagtatg

SEQ ID NO: 61254 - DNA, 354 bp, Zea mays
  unsure (1)..(354): unsure at all n locations
gagcgatggcgcgcggcgtggtgtcggcgaagggcggcgcggtcgcgggcaagaagaaggggtcggtttccttcacgatcgactgcaccagccagtggaggacaagatcatggaggtcgcctcgctcgagaagttcctgcaggagcgcatcaaggtcgccggcggcaaggctggcaacctcggcgactccgtcaccatctctcgcgagaagaccaaggtcaccgtcacctctgacggacccttctccaagaggtacctgaagtacttgaccaagaagtacttgaagaagcacaacgtgcgggattggctacgcgtggttgctgccactaagacgnaacgtctatgagctcgcta

SEQ ID NO: 61255 - DNA, 355 bp, Zea mays
  unsure (1)..(355): unsure at all n locations
tggacacaactcttaggcgccacattactctgatcctggccgctgttgggacattgttgataaatatggagtgacaatattctataatgcaccaacacttatacgttcacttatgcgtgatggtactgagtatgtggctcggtactctcgcaagtctctccgagtacttggaagtgttggttagcgaatcaaccccaccgcatggaggtggttttatgatgttattggtgactcacgatgcccatatcagatacttggtggcagactgaaactgggtgattcatgatcactcgtgtacctggtgcttggcctcacgagccangatcagcaacgttagctgtcttcggtgtgcagc

SEQ ID NO: 61256 - DNA, 340 bp, Zea mays
cattaatcgaagcccatgttgatgtcaagacaaccgacaactacatgttgcgtttgttctgcatcggcttcaccaagaggcgcccaaccaagtcaagagaacctgctatgctcaggcatcccagatccgtcagatccgccgtaagatggttgagattatgatcaaccaggcttctacatgtgacctgaaagaacttgtttcgaagttcattcgagaagatatgggaagggagtttgagaagtcaacttcaggcatcttcccacttcaaaacgtcttcatcgcgcaggtgaagatactcaaggctcgcaagttcgatcttgggatactcatggagggtcat

SEQ ID NO: 61257 - DNA, 357 bp, Zea mays
attgactttaagatacgaacaatagaattggatggcaaacgtataaagctacagatttgggatacagcgggccaagaacgcttccggactattaccaccgcgtactaccgaggagctatgggcatcttgctggtttatgatgtcaccgatgaatcttcttttaacaacatccgaaactggattcggaacattgaacagcacgcttctgataacgtcaacaggattttggttggcaacaaggccgatatggacgaaagcaagagggctgtacctactgcaaaaggacaagcacttgctgatgagtacgggatcaagttttttgaaacgagtgccaagacaaacctgaatgtggagcaa

SEQ ID NO: 61258 - DNA, 295 bp, Zea mays
  unsure (1)..(295): unsure at all n locations
gacatcactaaggatgccttgtggttctgaaaataagaacttggtgatgcagatgaatccattacacttctttttctagaaccagactgctccacggcatccttgtttatgataagacagttggccatcaagcaggtggtagttttcacctaggaattttgtccatacataagctgtttgagatttgacccttgcgtttctttaagagcatcgtcgaatangaagatgactgcagtcagattgctatcatgtgatacctcatattggcgcatcgggtagtgatgacatgtaatat

SEQ ID NO: 61259 - DNA, 348 bp, Zea mays
gaagctctcctgagaagcatatagcaccagcggaacacgggaacggcggaagcaaacaactagaaattccccagcccggttctatgcgtgcggttgatctcgtcggaggcccggccgcggttccccaatccgccatcgaattcgatggcggccaacgccgggaataagatccgcaacgccaagctggttcttcttggagatgtgggcgctggcaaatctagcttgcgttcttcggtttttaagggcacattgttgagttccacgaatcacaattttggagcagcttcttgtcccagacttagcggtcaatgatgagactgttaattcgaaatctgggatatgccgggc

SEQ ID NO: 61260 - DNA, 325 bp, Zea mays
  unsure (1)..(325): unsure at all n locations
ctccgatccccaattcctccttcggatctcgcattcagcgcagcacaggtgtgaaggaagggggacgcggaggaagatggggtcgcgttcgggaagctcttcagccgactcttcgccaagaaggagatgcggatcctcattgtcggcctcgacgccgccggtanaaccaccatcctctacaagctcaagctcggcgagatcgtcaccaccatccccaccatcggtttcaatgttgaaactgttgagtacaggaacattagcttcactgtctgggatgtcgggggtcaggacaagatcagacctctatggaggcattacttccaga

SEQ ID NO: 61261 - DNA, 148 bp, Zea mays
cgcaggccaagaccaaggcccgggaaaagctgctcgccaaggaggctgcgcacggactgacctagattgtctactgctgtgtcgccctgtagtttgacggggaagaactgaactcgtattgtggttttccgaatctagtttcatatgt

SEQ ID NO: 61262 - DNA, 346 bp, Zea mays
cctcactccaaaacgagttgttgagattgttgagatgcttagaagaggtgaaacaccccctcgaggtacacagcacccagagcgaaaaaactgtggccctgccggggggaacaccaccttgcacggagagccgaaacctcctccatgcagggatctggatgcctgctaggtttgcttcggagcattacgagcacgcgcataacttggctcgtactgtaaggtgtgcaaactgcacacagcggaggctgtgttatttgtattctgaagctttcttgtgtttcgtcaagaaagcttctctaacttttatcctgcactatcagatcaacggtaaattgatagagcataa

SEQ ID NO: 61263 - DNA, 344 bp, Zea mays
  unsure (1)..(344): unsure at all n locations
agaanacccagccgccgccgcatcggcctcccaggtaagcaggagcgtccaccccagccgccgccatgaagcgcaacccccgcgtcacgagctcccgccggaagtgccgcaagcgcacttcacggccccgtcctccgtccgccgcgtgctcatgtccgcggcgctatcgacggagctccgccacaagtacaatgtgcgttccatcccgatccgcaaggacgacgaggtgcaggtcgtgcgcggcacctacaagggccgtaggcacaacgtggtgcaggtgtaccgccgtcgctgggtcatccacgtcgagcggatcaccgcgagaaagtgaacggctctacgtg

SEQ ID NO: 61264 - DNA, 349 bp, Zea mays
tgcaaagcaggcgtttgatgaagctatctcccagttagacacccttggggaggagtcatacaaagatagcactctgatcatgcagctcgttagggacaacttgaccctttggacctctgacctcacggaggatggtgctgatgagggcaaagaagccccgaaaggtgaggctggtgacggacagtaatcttgggagagcgcatattgttcgagcccattgttttagatgctctatgctgtcgaagctgaagctgtgccgtgctattattgtagctgatttcctgttccctcacttctttttgtatattagtaggctggtagtgttcgaattagttccccattgctttgt

SEQ ID NO: 61265 - DNA, 282 bp, Zea mays
ccggcctgctccttatctctgggcctttcaagatcaatggagtaccgatccgccgtgtgaaccagacctatgtcattgcacatcaaccacagttgacatctcaggtgttgatgtcgccaagtttgatgacaagtactttgccaaggagaagaagcagaaggtgaagaagaccgagggcgagctttttgagacagaaaaggaggcatccaagtcactgcctgacttcaagacaggtgactcaaggtctgagaattctgctctgatcaaggctatcgaggctgt

SEQ ID NO: 61266 - DNA, 323 bp, Zea mays
gtcctctcaggagcaaaggtgcagttcgaacttcactaccaggaggtgaagttgaggaagctgggctcctatgagcacagatctatctgcaacctggacggctggccaaacacttagaggtagatgtgtgggttatcgaaccacagggactgagatttcttcatgttcccgacacatttgaaggccatttcgatggtgttccggtcatttctaaaggacaacagaaggcgcacgtctccttcaagcccacggtagcacagagagaatatgcctagctgcgggagatgcggtagatgggaacggtgtgctgtagcgtaaagaga

SEQ ID NO: 61267 - DNA, 347 bp, Zea mays
  unsure (1)..(347): unsure at all n locations
cgagtgcgaggataactggaattgccagctcgagaacattaccttcaccgccaaggatgggaaggtttcgcagctggagacgtcttcatcagaggaagcagagtgagatttatgattatacctgatatgctcaagaacgctcccatgttcaagcgcttggaagcgagaattaggggcaaaggatcagctattggagttgggcgtggacgtgcagttgcaatgcgtgctcgggctgcttctggtcgtggtggtggtcctgttgggcgaggcagcgcgcctcctgtgaggaggtagattgtatggtgtcatgcggcttntcttgtctggctgaggatgttgcagtctga

SEQ ID NO: 61268 - DNA, 348 bp, Zea mays
cgcgctcacggctgtcggatccgggcagacctcgctcgggatcaaagctgccaatggtgtagtcattgccactgagaagagctgccttctattttagtggatgaaacatctgtgcaaaagattcaggcactaacacctaatattggagttgtctatagtgggatgggtccagatttccgtgttctggtgagaaaaagtcgaaagcaggcacaacaatattatcggttgtacaaggaacatatacctgtaacacagcttgtacgatgagactgctgctgtcatgcaagagttcacacagtcaggtggtgtgagaccatttggagtatcactgttgattgctgggtatga

SEQ ID NO: 61269 - DNA, 237 bp, Zea mays
ggctgggaggagattttatgagaaggaagggctccctgctttccctatgggaaaaattgatcaaacacgtatgtggaaggtggtgaaaggagtcgttcaaccaggccattaggtgatcttggcccactgcatcccttcactgctggagtgtatgttgcactaatgatggctcagattgaggtccttaggaagaagggccactcttactcagagataattaatgagagcctgatcgag

SEQ ID NO: 61270 - DNA, 218 bp, Zea mays
agcagttacccgaccacaccgttcctccgagcccaggagcagccccgcgccaggaggaagtctgttcttttaacaatatgtcgaaggaggagaatgtttacatggccaagttggctgagcaggctgaaaggtatgaggagatggttgagtatatggagaaggtggctaagactgtaggagtggaagagctcactgttgaggagcgtaaccttctgtct

SEQ ID NO: 61271 - DNA, 156 bp, Zea mays
gtcatccaagagccttctgatgaagtggacaagcttgcagagaagacagaatcgctagcagttgcagaacctgctgaacttaacttcactggaatgaagaagaccaagacgaagcaggtggatcttgattcacctattgatgcccttggagatggg

SEQ ID NO: 61272 - DNA, 215 bp, Zea mays
gatgaactggatggacaagaaggggatgggagtggcaagtcgaagcaaagcaggagtgagaagaagagccgcaaggccatgctgaagcttggcatgaagcccatcactggtgtcagccgggtcactgtgaagaaaagcaagaatatgctttttgtcatctcgaagccagatgtgttcaagagcccaaactcgacacctatgtcatattcggcgag

SEQ ID NO: 61273 - DNA, 213 bp, Zea mays
cacaagcgcttcgccgccgcgttccagcggtacagccgcctcgtggacggcgccaggttctacagcaccaactccatgggctctgcaagctcatcgagtggaaggacgggatcggaaacagcctgctggtggagccccgggagttcgactgcctggagaaggtgagcgggctcgacgagcacgccacctcgtccacgacctctaccccgacgg

SEQ ID NO: 61274 - DNA, 213 bp, Zea mays
tggcgatggtaccggacgcggtggcgaaaccttcgtggagcactactaccggacgttcgacaccaaccgcgcggcgctggtggggctgtatcacgagacctccatgctcaccttcgagggccagaagttccagggcccatccgccattgccggcaagctcggatctcttcccttccaggcctgcgagcacagatcgtcaccgtcgactgccag

SEQ ID NO: 61275 - DNA, 105 bp, Zea mays
cgaggatcttgaggctggtggtattcaggttatccaaatcgacgaggctgcactgagagaagggctgccgctccgcaaggctgagcatgcattctacttggactg

SEQ ID NO: 61276 - DNA, 212 bp, Zea mays
gcgcactgtcctcgctattgcactcagtttattgagatatgcgtcatgctttgtgctgatcatgcgtcctgtgtatctggtgctcataactctatagttactgctgatggccggataacgacacgtttccagcttggtgtctggattattgacgactggtccccgtttcggtggagcaattgatgatcagcccgatacttcaaagatgcatg

SEQ ID NO: 61277 - DNA, 223 bp, Zea mays
ttcctcttctccttcctcgttgggctcgctgggctcgcgcttggtggcctctcgtccactgcatcggtctccatgccctccacctgccgcatcctctacagtggcgttgaccttaggtcatcaaaagtttgcgagcttgggttattgaactatagagctaagcatgtcttctacccatcgagtaagagagattccgctgccatgatgactactactgggcttc

SEQ ID NO: 61278 - DNA, 153 bp, Zea mays
  unsure (1)..(153): unsure at all n locations
atctcgcctccaaacccgaactccaagtcgccccgcatcgatggcgcccaaggccgagaagaagcccgctgcgaagaagccggcggaggaggagcccgctgccgataangcgccggccgggaagaagcccaaggcggagaagcgtgtcccagc

SEQ ID NO: 61279 - DNA, 220 bp, Zea mays
gcgacgcggccaacgggccggaccacgtcgccgtcagcggcttctggctcgttccgcagtacttcctcgtcagcgccggcgaggccttcagctacgtgggccagctggagttcttcatccgcgaggcccccgagcggatgaagtccatgagcaccggcctcttcctcaagacgctctccatgggctcttcctcagcagcttcctcgtcttcgccgtcgac

SEQ ID NO: 61280 - DNA, 223 bp, Zea mays
gcagcgcagcactgaagcaccacttcctgcactcactgtgctagctgctcaactcgtagtagtaacagtccatcaccaccaatggctacccaaggttgcgctcttccttgccctgagcctcctgtttgctgccaccgcgcatggctgcgaacccaactgttctggcccaagcgtcccaacgccgccatcgtgccgactccgtcgtcgcacagccacgggcgct

SEQ ID NO: 61281 - DNA, 206 bp, Zea mays
attggttgacctttaatgagccgcaaacgttttcttctttttcatacggacacgggctatgcgccccagggcggtgcaccccaggacagaaatgtgctaacacaattggaaactcgctcactgagccatacactgttggccataaccttctccgagcccacgctgaggctgttgatctttacaaaagtattacacgggtgagaatg

SEQ ID NO: 61282 - DNA, 193 bp, Zea mays
ttggtcgccagccagccaacaccaagttgtcaagcaataagacagtgagtagggtccgtgttcgtggaggtaatgtgaaatggagggctcttcgacttgatactggtaactactcatggggaagtgaagctgttacccgcaagacccgtatcctcgacgtggtctagaatgcatcaaacaatagcttgtgagg

SEQ ID NO: 61283 - DNA, 225 bp, Zea mays
gccaatgcgtggtcagcaagaggtgttccctagaggtggtcgtggctatcgctatcctactggacgtggaatgcctgattactgtcatgcacagtgttggtgctgtgatgccaccttcatatgagctgggagggatgccaatgagagaagctgccccccaacctgttcccgttggggcgctagccatgcacttgctaacgccccaccagatcagcagagacttat

SEQ ID NO: 61284 - DNA, 85 bp, Zea mays
agcggctacacaaggcaccgtggcgatcactgccaaggatcctatatccatgtactagaattattcagtgtcagtccacatcgtg

SEQ ID NO: 61285 - DNA, 214 bp, Zea mays
  unsure (1)..(214): unsure at all n locations
ctctgaatgtgctgtgttgagaggatttatgcggtggcagcatncctggcagcggcatcccgcttcccaggctagtagcaacgcatangnatctctgaatgtgctgtgttgagagttttatctagttgctctgcaaggatatagaccaatgttctaagactaccatgtaatgtagtctgctgatgcttataattcatgaacgatttttgcagct

SEQ ID NO: 61286 - DNA, 219 bp, Zea mays
cacgactggagcgacgcgcactgcgccacgctgctcaagaactgctacgacgcgctgccggaaaatggcaaggtcatcgtcgtcgagtgcgtgctgccggtcaacacggaggccacccccaaggcgcagggcgtgttccacgtcgacatgatcatgctcgcggacaatccaggcggcaaggacggtacgagcgcgagttccgcgagctcgccaagggcg

SEQ ID NO: 61287 - DNA, 215 bp, Zea mays
ttaacaccgagaagagaccaggccgaaggaaaacaatcctgaaaccaagccatgggtctgcaggaggaatttgaggagcatgctgaagaaggcaaagaccttgcctgagaacacgagcaatgagaacaagctgatcctatacgggctctacaagcaagccacggttgaggatgtgaataccgatgtccgggcatattctaccaaaaggacaaggg

SEQ ID NO: 61288 - DNA, 374 bp, Zea mays
tacggcaccacctgaacacgatcaccacccacaccatgttgtcccgattgctggcgacggtgagccttcttcgccggtcgctccgagaaccgcgcggcttcagctcgtctgtgctggcttcatctaaggaaacggccgacggaaagctggtggagtaggtgcttttcgagcgtctccccgtcgtcatccccaagatccaccccgttgtctacgctttccaagaattctcatttcggtggaggcagcagtacagacggcaataccccgaggacgtcctcggcaaggccgacgcgaggggtaagggtgattatcatattgattatgtgcctgctcgaagaactaccgaggccgacaaaacaaatgactggaagtct

SEQ ID NO: 61289 - DNA, 365 bp, Zea mays
cgacgacaacatcctcggcttcatcaagggctacaagcgcacctttaatctcgcttgcattgaccacagaggcacaccggagcatccggcgaggacctgcacgcttgaaaccgacgacgaggccatatgctggggaattgcatattgtgtcaagggtggtccagaaaaagagctaaaagcaatgcaggtgcgctattttttttctcccgtgttctgcagttccaaaaaaactagaattacactgaaatttcaccttcattttagtacttggagagaagagagtgtgagtacgacgagaagatatccattgatttctacatagaaggagatcccttgaactactgtgacagcgcttagtgtcgttc

SEQ ID NO: 61290 - DNA, 365 bp, Zea mays
tcttggtctactagttgaggatacaacagtggagcagcttggcatagctcggaaagttacaatctcaagttcctcgacgaccattatagcagatgctgctagcaaagacgatatccaggccagaatcgcgcactgaagagagagctttctcagacggactcgacgtatgactctgagaagttggcagagagattgcaaagctttctggtggagttgctgtggttaaggttggagcatcgaccgaggcagagctagaggaccgcaagctccgcatagaggacgcgaagaatgcgacttttgcagcaatagaggaaggtattgttccaggaggcggtgcagcatatgttcatctatcgacattcgta

SEQ ID NO: 61291 - DNA, 255 bp, Zea mays
tgaagggagacgcgggaatcgcagctgtgtacgacaaattgctagtggctgatgatttgcaatccttcggcgagcaactgaggaagaactatgaggagacaacagagctactccttcaggttgctggtcacaaggacgtccttgaaggtgatccttatctgaagcagcgtctgctgctgcgtgagtcctacacaccactctgaacgtgtgccaggcctacaccctgaagcggatacgcgacccgagcttccaggt

SEQ ID NO: 61292 - DNA, 349 bp, Zea mays
caaatatgccaggagatgttccccgagtatgtggtcagttggctgtctccagagcttttggagacaggaatctaaaatcactattgagatcagagcctgatataaaagtcgaagacatagatcacactgccgagctacttgttcttgcgagtgacggtctatggaaggtgatgaacaatcaagaggttcgtcgatttggccaaaaggtacaaggatccctatgctgctgccaagcaattaaccgtcgaagcacaaaaaagagatagtaaggatgatatatcatgcatcgttgttcggttcaaggtgtaaatcggtctcgaaggattttcatcgagagcaaaaacaagtg

SEQ ID NO: 61293 - DNA, 361 bp, Zea mays
tgccgccctccatctgatggagcaagtggactccttagagctgacccttccaaggggatcaccgtgaccaacgcgaggttcccgaaactcttgattgatggaccatacggtgctccagcgcaagactatcaggaatatgatgtgctcctgctcattggactgggcattggagccacaccattgattagcattgtgaaggatgtacttaaccacatccagcttggaggatctgttgcaggcacggagcctgagggcagtggcaaggccaagaagaggccattcatgacaaagagggcctacttctactgggtgaccagggaagaggggtctttgaatggttccgaggggtcatgaatgaggt

SEQ ID NO: 61294 - DNA, 252 bp, Zea mays
atctcgtagtggacccaaggcttttgtaagtgagtacgctgtttggagaggtgatgcaggtagaggaagtcttgttgcttcgttggcagaagctgctttccttactggactggagaagaatagtgacattgtttccatggcaagttacgcgccactattcgtaaacgacaatgaccagacgtggaacccagagcaatcgtcttgaactcctggcagcattacggcactcccagttactggatgcagacgctt

SEQ ID NO: 61295 - DNA, 365 bp, Zea mays
ttcaactttcagagagtgggcaacttcagaggatccacgacgagtggttctcacggtctagttgctccgcagatgacagcgaagtgggagcaaccaggcttgacctcggaagcttttggggccttttccttgtgtgtgccctgatatgcctcttcgctctgctggtgttcttcatacgagtctgccggcagtaaaccagtactccagttctgaagctgccggcgagcccagcgcagctgctgcggatcctgtcctaagacagcggcgaccatcacgccttggcagcttcaaagatctgatccagttcgtcgacaagaaggaggatgagattaagataacgatgaaacgaagatcaggcgagaaag

SEQ ID NO: 61296 - DNA, 257 bp, Zea mays
  unsure (1)..(257): unsure at all n locations
tagcncgaggctggccgcctgggccaagcgctgcgccgagcgccccagcgtcaccaagaacctctacccgcccgagaaggtctacgacttcgtctgcgggatgaagaagaggctgggcatcgagtagagagcatccatcggtcggccggtggctggccgggagtaataatgacgaaccaattatctagttttggttgagtgtgctcagcagagcagttcgtcgtcgttgtattttctattgtcagcggtggcagcgc

SEQ ID NO: 61297 - DNA, 380 bp, Zea mays
catcgtgagctcgatcggctcaggtgtttcgagtcggtacgacagcggatcgctcaccacttcgctggcacgcgccgtcgcgccgtatggccgtgtccacaccttcgatttccacgagcagagggccgcctcggcaagggaagactttgagaagaatggcctgagcagcctcatcacagtcaatgtgagggatatacaaggtgaagggtcccagaggaatattgtggtgctgctgatgctgtcttcctggacttgccacagccttggcttgcaataccatctgtcggattgatgctaaagaaagacggtgttctgtgctccttttcgccttgtattgagcaagtgcagcgtgcttgtgaggccatgaagacttgtttcac

SEQ ID NO: 61298 - DNA, 252 bp, Zea mays
accgctaacaacagtggcgcggagtatttctatgaaggatgtggtagcggcactcgagcgagagcctcagatgtcaaaatcctcattacttttccgcctatatggaaggacattgacagaaccatctgcaaagtaatttggatgataatcattgcagttcatattacagaggggcaacttttggtcaattatgaggaggctcaatcaccaagcgatggggctgattggtcgacgatcaattttgcggggatt

SEQ ID NO: 61299 - DNA, 247 bp, Zea mays
cacaaatatgtaactgcggtgcacctgatacaggtaacatggaggtcctgttgaggtatggcactaaggagcaacagaagcaatggctagttcctttattggaagggacaattcgttctggatttgcaatgacagaagcacaagttgcatcttcagacgcgacaaatatagagtgctcaatatccaggcaggagattattttgtgatatatggtaggacgtggtggaccagtggagctatggatcct

SEQ ID NO: 61300 - DNA, 343 bp, Zea mays
atccacgactgcattcacggcaaggtatggccagtcatgggcgctgggtatcacaccatccaccatacgacttactaccacaactatggccactacaccgtctggatggactggatgtttggtacgctccgtgagccagatgatatcctcaagaaggcctgagttcgtcgtagctgtggttttcctacgtgctggatgtgcttggtctgttctgtccccagtgcctctaatccgctgagcctgttcagcgctctgtttctgtaggctttggtgtgctatttagtttgctaggctttatatgttgtgcttattctgtaatttagtgatgtttgtctgatgacgc

SEQ ID NO: 61301 - DNA, 250 bp, Zea mays
ccagtgtggatgattatttatggctgatgggaagagctggttacaagccagtaatcgagtactgtggaggcacagagattggtggtggatttgttactggatcgatgctacaacctcaagcgttgtctgcattcagcacacctgccatgggttgtaacctgttcattcttgatagcagtgggaatccttgccacaagactctgtcggcattggtgaacttgcacttgatgcaactttatttggatcatca

SEQ ID NO: 61302 - DNA, 251 bp, Zea mays
  unsure (1)..(251): unsure at all n locations
tgtctnagatgcagtgcttcaatctccgacggcataaagccagatgagattgaagcactgcatcttgtcccaagagagctctcgctgaagattgtgagcaagattgaagctggcgagcattttgccatttatgtcgtcctgccaatgtggccagaaggccctcctgctagtgggtcgattcagggtatatggactggcagaggaggaccatggagatgatgtacaatgacatctctgttgcgctcgatgca

SEQ ID NO: 61303 - DNA, 245 bp, Zea mays
gccgccgcttcagcaatcacagcagcccggagaacgccctggtccaacaagatgcagatcttcgtgaagacgctgacagggaagaccatcaccctcgaggtcgagagcagcgacaccatcgacaatgtcaaggccaagatccaggacaaggaagggatcccgccggaccagcagcggctgatctttgcgggaagcagctggaggatggccgcacccttgcggactataacatccaaaaggagtct

SEQ ID NO: 61304 - DNA, 252 bp, Zea mays
  unsure (1)..(252): unsure at all n locations
accgccgtcgccgcccaaccgcagtaaggaggaaggagcaggaagatgccggcggggcacgggctgcggtcgcggacccgcgaccntgttcgcgcggcccttccgcaagaaggggtacatcccactcaccacgtacctgcgcacctacaagatcggcgactacgtcgacgtcaaggttaacggcgccgtcacaagggcatgccgcacaagttctaccacggccgcaccgggagcgtctggaacgtcaccaag

SEQ ID NO: 61305 - DNA, 344 bp, Zea mays
cgcctctcctgctcctaccgcagctctccctcaggtttagtgttcgcaatggcggccttcaacaagcttggtggccttctaaggcacagttctctggtgagcggtatcactggtggctcttctcctgcagtgttcaatgctgcacggctcatgtctaccaagctatttattggtggtcttgactgggtgttgatgacgtgaaactaagagaagcatttagcagctttggagaggttactgaagcgagggtgatcacagacagggagactgggaggtcaagaggctttggctttgtgaactactccgacagtgatgctgccaaggaagctatttctgcaatggat

SEQ ID NO: 61306 - DNA, 252 bp, Zea mays
  unsure (1)..(252): unsure at all n locations
catcacgcgcctccactcncccctcccaggtgctgcccaggtaagtcggcggcggcgatgacaacgcgcttcaagaagaaccgcaagatgcgcggtcacgtgtccgccgggcacggccgcatcggcaagcacaggaagcacccgggaggtcgcggtaacgccggtggcatgcaccaccaccgtatcctttcgacaagtaccatccggactacttcggctaggttggcatgcgtcatcttcataagctccgca

SEQ ID NO: 61307 - DNA, 236 bp, Zea mays
tgccttgcagatttttaagcatcatgatggtgtcgttgaagatgttgcttggcacttgacgcatgagtacttatttgggtcagttggtgacgattatcatcttttgatttgggacctgcggtctcccgcccctactaaacctgttcagtcagtggtggcgcaccagggtgaggtgaactgcctggctttaacccgttcaacgaatgggttgttgcaactggatctactgacaagac

SEQ ID NO: 61308 - DNA, 234 bp, Zea mays
caaaaggtagttgaagccgccaccacgtgaccacgcctcaaaaagaattgcgttttgatttgtatatccaagctgccacaccggcaggcagtcggtgccaaaaaaaaaaataatttgtttgcttctgcagcgatcgagacgacactgtggtcgatcgagtggggcatcgccgagctggtgaaccagcggcgatccagcacaagctccgggaggagtcgcctcaatgctgggcgc

SEQ ID NO: 61309 - DNA, 233 bp, Zea mays
agctgacgctgtgcctgctggcggtgctggagatcaagtggtcggggatcagtctggaggagtggtggcggaacgagcagttctggctgatcggcggcacgagcgcgcacctggcggccgtgctgcagggcctgctgaaggtggtggcgggcatcgagatctccttcacgctgacgtccaagtcggcggcgacgacgtggacgacgagttcgcggacctgtacatcgtcaagt

SEQ ID NO: 61310 - DNA, 355 bp, Zea mays
tacaagccacagctaatcgatgctgcgctcttgcgacctggaaggtttgatcgtctagtcttttgtgatttccctcgatgggatgaacgtttagaaattctgaaggtgcattctaggacggtttcactggcaagtgatgccagtctcgaagatgttgcttctctgaccgaagatttactggtgcgatctcgctgctattctaacggatgctggactagctgcaattcatgaacttttggacaaccaggagaacggtgttccagaaaccgaaccgtgcatcagcaaagaacttctcatgtacgtcactaggaaggcaagaccttcgacaccagcagacgagaagatgcggtatgat

SEQ ID NO: 61311 - DNA, 230 bp, Zea mays
cggctggtcgagcggcgccgcccttggctaggtcttcgctgggttcttcgccggcgacgaacgtccatctggggtcgactgaactgagcaggcagtaggaagagacactatgttgttcttctcctacttcaaggagctggtggggaatgaggtgacagtggagctcaagaatgacttggcgatcgcgggacgctccactcggttgaccagtacctcaacatcaagctcga

SEQ ID NO: 61312 - DNA, 235 bp, Zea mays
atctttcatatcctcactcgccgccgccgccgctcgtccctcgccccatcgcgatggcccggatcaaggtgcacgagctgcgggggaagagcaaggcggatctgcaagcgcagcttaaggagtttaagtcggagctctccctgctacgcgtaccaaggtcaccggcggggctcccaacaagctctcaagatcaaggttgtgcgcacctccatcgcgcgcgtgctgaccgtcatct

SEQ ID NO: 61313 - DNA, 112 bp, Zea mays
atctttttgtgtttaacttatctgctaccgtcctgtaacgaattcactaagttctagttcttttgtgctttgttaagaatataaacaatgaggtttcaattttggtggcgcc

SEQ ID NO: 61314 - DNA, 231 bp, Zea mays
actctacgtgcctttcctggctcaagtgtttgggattgtgcccctcagtttgaacgaatggctcttggtgatagcagtggccttaccagtggtgctgatcgatgaggttctcaaatttgttgggcggtgcctgacagctcgtgcccgaaaacaatcagggaagaggaaggcagagtagatgctgtgatcatcggtattagaatctgtagcgccacgggaatcgatattgga

SEQ ID NO: 61315 - DNA, 230 bp, Zea mays
  unsure (1)..(230): unsure at all n locations
tagataggatccgccggatcagcagcggctgatctttgccgggaagcagctggaggatggccgcacccttgcggactataacatccaaaaggagtctacgctccacctcgtgctcaggctccgcggtggcatcattgagacctcgctgcangcgctcgctcgcaagtacaaccaggacaagagatctgccgcaaatgctatgcacggctgcaccctagggctgtcaactg

SEQ ID NO: 61316 - DNA, 339 bp, Zea mays
agggcagactcccgtgttccctcggatctttggccacgaggctggaggtatcatagagagtgttggagagggtgtgactgacgtagctccgggcgaccatgtccttcctgtgttcactggggagtgcaaggagtgtgcccactgcaagtcggcagagagcaacatgtgtgatctgctcaggtcaacacgcgtccgcggtgtgatgactgccgatggcaagtcgcggttttcaatcaatgggaagcctatctaccactttgttgggacttcaccttcagcgagtacagcgtcatgcatgtgggctgtgttgcaaagatcaacgctcaggctcgccttgat

SEQ ID NO: 61317 - DNA, 350 bp, Zea mays
tacagaggtcactagcaagcttgcagccttaaagggactcgatgcaaggcttagggagatccgaagctatttggatcttgtaattgacgggaagctcccactgaatcacgaaattttgtaccatttgcaggatgtctttaatctccttccaaatctgaacgtaaatgagctaattaaagccttgcagtattaactaacgacatgatgttggtgatatacctgtcttctctgatccggagcgtcattgcgcttcacaatttaatcaacaataagatgctaaacaaggagcacgagaaggccgaggattcgaaaccaaccgccattcctactgctgccggaagctaaacgtg

SEQ ID NO: 61318 - DNA, 349 bp, Zea mays
agaagttctatatgctctatagcttcttctttgtgaggagagttgtagcgccgacggctgcctgtattctctacaatgtcatcatccccatctcagtcacaatcccggagctttacctaccagtgtggggtgttgcctatattcccatggtgcttaccgtggtcacagctataagacatccaaaaatctacacatactgccattttggattttgtttgagagtgtgatgacattgcatcggatgagggctgcgatgactggactgctggagctagaaggattcaaccagtggattgtgacaaagaaggtggggaatgatctcgaggacactgaagttcctttgcttcag

SEQ ID NO: 61319 - DNA, 229 bp, Zea mays
ctacatttatgagaagggtgggaagccaaagccagatcctagtgttaagcatgttatcgaggagtaccgaaagcacgcaaacacaatgcctggtggaaagcctgttactttaacggatcaagatattttggagatgattttcttcccagttgtgaatgaggcatgcagtgttatggatgaaatgttgtaattcgagcttctgatcttgatattgcttctgttcttggaa

SEQ ID NO: 61320 - DNA, 228 bp, Zea mays
tatgagggtatggaggagggcgagttctccgaggctcgtgaggatctggctgcgctcgagaaggactacgaggaggtcggtgctgagtttgacgagggtgaggacggcgacgagggtgacgagtactagacgctctactggcgcagcgtcgtcgggcttgtgtgccactgctatcctgtgactgcactgagtggctcctatcgtgttatgtttctgtcggttcttatc

SEQ ID NO: 61321 - DNA, 333 bp, Zea mays
  unsure (1)..(333): unsure at all n locations
aananatgganaaacacaaggttgtctagaagaccagtggaagaggcgtactgtgctccagacagagggttcctttcctgctttggtgaaccgtctgccagtcaccaaatctgaatctctggagttctctcctgtcgagaatgcgattggaatgatcgaaacaagaacagctgcattgagaaatgaactagaagaacagcggagttctgaaggtgatcaactcccaaggcttcaacagttgcaaaggatactccaaggaagtgtggctgtgcaggtcaacagtggggtataagtgtgtgcactgcattctatctggcgagcagcaataggtca

SEQ ID NO: 61322 - DNA, 155 bp, Zea mays
attttgataaggtacaaatataggttcaatccctgttagtttcacccagtctggtgaacgtagacaagtgaccctaaagtacaaaaaggtacacacggccacacgccataattagctgcctggcttgttttgcgccctttgtaaatatgtgtaag

SEQ ID NO: 61323 - DNA, 342 bp, Zea mays
gagtgaggtcaccatcaaggagctcgccgaactagtcaaggaggtggtcggcttccaggggaacctggtgtgggactccagcaagccggacggcacacccaggaagctcatggatagctccaagatacacgggatggggtggaagcccaagatcgccctcaaggaaggcctcgtggaaacctacaaatggtacgtcgagaatgtcatctcgaacaagaagtagggccgtgacatgccagtggtgctgtcttgctctccgttgctgcttccacaaggtggttggatatctgatcatacggttatcagttttaagttaacccacatagaagaggcttgttatgt

SEQ ID NO: 61324 - DNA, 331 bp, Zea mays
ctcagctatcgggtttgagggctatgagaagcgccttgagatcacattctctgatgcacctgtctttgtagacgctcatgggcgtggtgtgcgtgacctctccagggtccagattgactctgttctggatcttgcacggtgcacaattgtgtccgagctctccaacaaggatttcgactcatatgtcctctctgagtcaagcttggttatctatcctctgaagattgtcatcatgacctgtggcactaccatgctcctgctcaccattccaagaatcctgagcttgctgaagactatctatgccattgctactgtgagtactccgtgggac

SEQ ID NO: 61325 - DNA, 325 bp, Zea mays
gggagacgggagaaccagggagcggaggcgtgcgtgctgcggcctgcggcctgcaggaccagagctcggggactgagctagggtctgggactgggaggcggagatgtcgacgccggcgaggaagcgcctgatgcgggacttcaagcggttgcagcaggacccgcccgccggcatcagcggcgcgccgcacgacaacaacatcatgctctggaacgccgtcatattcgggccggatgacacgccgtgggacggaggcacgttcaagctgactctgcaatttacagaagattaccccaacaaacctccgactgttcggtttgtttcg

SEQ ID NO: 61326 - DNA, 326 bp, Zea mays
tggacgcacatcgctctcgtgttcttggagggcgtgtggacgacaaacatccacgactgcattcacggcaaagtatggccagtcatgggcgctgggtaacacaccatccaccatacgacttaccgccacaactatggccactacaccgtctggatggactggatgtttggtacgctccgtgagccagatgatatcctcaagaaggcctgagttcgtcgtagctgtggttttcctacggtgctggatgtgcttggtctgttctgtccccagtgcctctaatccgctgagcctgttcagcgctctgtttctgtaggctttggtgtgct

SEQ ID NO: 61327 - DNA, 316 bp, Zea mays
  unsure (1)..(316): unsure at all n locations
tataaacgctgttgcatattactctacatcggtgttccgtaatgcaggcattacatctgatgttgctgctagtgctcttgttggagcagccaatgtttntggcaccatggttgcattttctctaatggacaagcaaggaaggaacagccttctgatgacaagcttntctggaatggtaaatgccttgtgtttcacaaatcatgtgtctatgttctctctcaatcagcanatggagggttcatattcactttttttctcccttgaagggtgcttcaatgctactcctagcattgtcttcactggaaagctctggcac

SEQ ID NO: 61328 - DNA, 335 bp, Zea mays
  unsure (1)..(335): unsure at all n locations
tcacggccgtcactcggaancggctcgaggcccacatgctctacatccttactgaaccgngcacttccccngtgacctacgatgtcagatcgagactagatctgccgacctacctaggtggccaataaaccactgttgcccacttcccctgccccacaagacctgccacacatgaacaagaacgtggtctccgtgattgacatcagtggctccatgataggccagaaagtgaagcagaccaaggaggcatccttaaaattctagcgtacatgcagccatgggactcatttgactagttctctttgtggactcgagtacaatcgtggcagggctcg

SEQ ID NO: 61329 - DNA, 331 bp, Zea mays
gagctttcaatatgtctcagatttggtggaagggctgatgaagctcatggaaggggagcacattgggccgttcaacctcggcaaccctggagaattcagcatgctggagctggctaaggtggtccaggacaccatcgacccagaggcgcacatcgagttccgtccgaacaccgcagatgatccgcacaagcgcaagcctgacatcagccgcgcgaaagagctcctcggctgggagcccaaggttcccctccgtgagggccttccccgcatggtcactgacttccgcaaacgtatcttcggggcacaggaagggtccaccgagtcagctggt

SEQ ID NO: 61330 - DNA, 322 bp, Zea mays
  unsure (1)..(322): unsure at all n locations
cgcgcctctacatttcttctctctctggtcctccggctccgcctccgcctgatccatccaagacagggatcgccatgtcggactcggaggagcaccacttcgaatcgaaggccgacgctggggcgtccaagacctacccgcagcaggctaccaccgtcagtaagaacggcttcatcgtcatcaagaaccgtccctgcaaggttgtggaggtttctacctccaagactggtaagcatggccacgccaaatgccactttgtcgccatagacatattcaatggganaaagcttgaagatattgttccttcatcacacaactgtga

SEQ ID NO: 61331 - DNA, 329 bp, Zea mays
gcgctgcacgcaggtcacgcggcgatggacatatgcgatgtttgagcaggcggtggcagatttctgctggcatgcgagggaagtagtgtcgtcagggatggggctctggggttggccgtgggggcgacgtgggccgtcgggcttcggctccgcgtccaccgccgaggaggtcaccgccggcgtcgacgcaagcaacatcactgccatcgtcacaggagcgacgaatggcattggaaaggagacagccagagttctagcactgaggggagccaaggtaatcataccagctaggacactggagagtggcctcaagttgaaggagagctcgc

SEQ ID NO: 61332 - DNA, 335 bp, Zea mays
  unsure (1)..(335): unsure at all n locations
tgaaaagattgctgtccactgcacagttcgaggggccaaggcagaagaaatcttggagaagggtctaaaggtgcgggagtatgagttaagaaaaaacaacttctcagatactggaaactttggttttgggatccaggaacacatcgatttgggtatcaaatatgacccaagcattggtatctacggcctggacttctatgtggtgctgggtaggccaggtttcagcatcgcagacaagaagcgcaggacaggctgcttggtgcnnaaacacagaatcagcanagaggaggccatgcgctggttccagcagaagtatgatgggatcatcttcctgg

SEQ ID NO: 61333 - DNA, 336 bp, Zea mays
cttttacccgcggctgatccacgtcgccagcctcgaggctaccgcccaggattactttcagaagttcgcctgctgccgtgtaccttcaggtcagcacggtcagtcaagcccttatcttcgtgacatggtcgcgcactagtcgtttctggcgcgtcctgggttcttgactggtcttcgctttacttggtggctaagctgattgccactctgatcgctgtatatgccaactagggcgtgcactgcgatctagggcattagatggggctgagccggtgtcatctagctctataacatcgtcttctacttcccgctggacatcatcaagtgcctcatccg

SEQ ID NO: 61334 - DNA, 332 bp, Zea mays
caggctgtgatcaatgcaaatatacttgcacctctggtgaactcctgcaaactgctgaatttgacatcaagaaagaagcagcctgggcaatttcaaatgccacttctggtggcacacatgactcagatcaagtaccttgttgcccagggttgcattaagccactctgtgatctgcttgtttgcccggatcccagaatcgtaacagtttgcttggagggtctcgagaacatcctgaaggttggcgaggcagagaaaaaccttggtgcaggtgatgtcaatgtctatgcacagatgattgatgatgctgagggcctggacaagattgagaactg

SEQ ID NO: 61335 - DNA, 322 bp, Zea mays
gccggacgtcttggtcgcttgcgtcgggggtggatcaaacgccatgggcctgttccacgagttcgttgaggatcaggatgtgaggctgatcggagtggaggcagctggccatggcgtagacaccgacaagcatgcggcgactttgacaaagggccaagttggagttctccatggatctatgagctatttgctgcaggacgacgatcggcaagttatcgagccccactccatcagtgctggactggattaccctggcgttggacctgagcacagtttcttgaaggactcggacgcgctgatatgacagcgtgactgatcagag

SEQ ID NO: 61336 - DNA, 316 bp, Zea mays
agcgtgttaccacaaaatgggcaatggaacaatttgtggagggcaatgctatccagacactagatccgaatctggaagcgaccgatgcgatcaatctagcggtcgcgaagctgtatgagctggctctgcaatgcttagccccaactaagaggaaccgaccgagcatgaagcggtgcgcagagattctgtggagcatccgtaaagattacagggagttggttgtacccacctctgccatgaactgaagcaggtcgtctggagcagtcaagtgaacaaaaagatgtatcattccagtttgcctctcttgattcgcttc

SEQ ID NO: 61337 - DNA, 320 bp, Zea mays
ctatgatttcgggacaagcttataaagccgtcaaggataagtacggctttaatgggacatacactgaagactgccaaaatgccatggacttagccacccaagaaaaaggaaatattgataattggacagattcaccagagacaatgctgccatcaataaagaaactcatttcaagtggcacgagaatatggctgtacagtggtgatatggatgcagtgtgctcattcatttcaacacaatatgtgctggacaacttgggcttctatagaagcactggcgtccaggcgcgtcgacaatgagtgctggctagtcatgggtat

SEQ ID NO: 61338 - DNA, 338 bp, Zea mays
  unsure (1)..(338): unsure at all n locations
tgtganaacaagacacgagaactcattttgaattatgctaatcagctctgtgagcgtctccctagccccaatggcgagtcaactgttgattgccatcagatctcaaagatgccaaatcttgcattcaccatagcaaacaagactttcaccttaacaccagagcagtacatagtgaagctggagcaagcaggacaaactatctgcatcagtgggtttatggcatttgacgtaccgcctcctcgtggtcctctctggatacttggtgatgtttttatgggtgcctaccacactgtttttgacttcggcgagaacaggattggatttgccanatctgcatg

SEQ ID NO: 61339 - DNA, 331 bp, Zea mays
acaagattcaggataaccttgcgctggtatacctgtcaagcatcacaaggacacaaatcagcatcgccgagaagttgaacactgctgctcaagtgctgtaggtttggcggtgtggcatctggtttggacgtggatggcttgatgctatctgtgatgcttggcgtaagtgtgattggtgacagaaatgcatttttgtactcattattattattgctaaatgagagacctgatggaaagggttagccaacgatgagatcccacaatgttgccagaatgccagtagagtggtggatggcgagatgtttctgtttggatagtatctgtgctccag

SEQ ID NO: 61340 - DNA, 325 bp, Zea mays
cttcttacttcagatggcaacactaaggatgatcttagactcacaactgatgagactcttgtggcccagattaaggaagggttcgaaagcgggaaggatcttgttgtgactgtccagtctgcgatgggggaggagcagatctgcgcgctgaaggatgttggccccaagtaacttccttggctttggagacggaaccctactctatctcaacttaaatcggaaaagaagtgtatcaccaaaggattgctaccgagacattcacctggcttgagctggcttttgctatagcgtgcaaggggttgctgggtgtcgtacctacctgact

SEQ ID NO: 61341 - DNA, 327 bp, Zea mays
cacaaaagctctcgatctcaccgacaccgaggaagaagagatcaatggcgtccgagcagggagtcgtgatcgcgtgccacagcaaggctgagtttgacgcccacatgaccaaggcccaggaagccggcaagctggtggtcatcgacttcactgccgcctggtgcggtccatgccgcgccatcgccccactgttcgtcgaacacgccaagaagttcactcaggtcgtcttcctgaaggtggacgtggacgaagtgaaggaagtcaccgcggcctacgaggtcgaggcgatgcgaccttccattcgtcagaacggcagacgtcgcgaca

SEQ ID NO: 61342 - DNA, 328 bp, Zea mays
gtgctagaggtgtacgaggcacgcctgaccaagtgcaagtaccttgctggagacttcctcagcctcgccgacctgaaccatgtgtctgtcactctctgcctgtttgctacgccctacgcatctgtgctcgacgcctacccgcatgtgaaggcctggtggtctggtctgatggagaggccgtctgtccagaaggtcgctgccctgatgaagccatctgcttgaaacggttgccctgtcaatcggtgaatggaataagccaagtctgttctgggttgtctgcttgttcagtgatgtgtcttctatgacgacgttgagtgcctatgtgtga

SEQ ID NO: 61343 - DNA, 148 bp, Zea mays
catggaatgactgcacttaatgatggaataccaagttagattaagaatgcaggaccttattcttcgactctagaagcagacatacatcatatggcattatattagaagtggatgatcactcatgagaagaatcgaagttcatagattc

SEQ ID NO: 61344 - DNA, 322 bp, Zea mays
  unsure (1)..(322): unsure at all n locations
tgcactccanaagcatagtgcatgttgatctgacatgcgacaacttacttgttaacttgagagatcctcagaggccaatttgtcangttggagactttgggttatcanagatcacgcgcaacactctggtttctgggggtgtcgcgggcactcttccatggatggcaccagagctaactgaatggcagcagcagcaaagtctctgagacagtggatgtgttctcttttgggatagttttatgggagatcttgactggtgaggaccgtatgcaatatgcattgtggtgctatcatagggtacgtcataaacactcggctccat

SEQ ID NO: 61345 - DNA, 305 bp, Zea mays
gaaggcgtttaatgtggcagaattctttgggacactgtgtcttgaaagcagactttcccaaaggcaaaaaggcacttgcagtatcattgttccagagcgtggttttgatgttgttcaatgacgcacaaaagttaagcttcattgacatcaaagattccactggtatcgaggatacagaattgagacgaacattgcaatctcttgcatgctggtaaagtcggggtctcccaaagatgacaaagggagagatgtagaagtaaggatgaatttgtattcatgaagatttagtgctccctctaccgcat

SEQ ID NO: 61346 - DNA, 321 bp, Zea mays
  unsure (1)..(321): unsure at all n locations
acgcgggcggacaaggagcaggcggacgaggagttgtgccaagccacaatgggtatctcgcgtgactcgatgcacaagcgccgagccaccggtggaaagcagaaggcctggaggaagaagcgaaagtatgagcttggtcgccagccagccaacaccaagttgtcaagcaataagacagtgaggagggtccgtgttcgtggaggtaatctgcncatggagggctcttcgccttgatactggtaataccctgagngaatgaactgttacccgcaagaccgtatcctcgacgtgctaaagcatcaacatgagctgtgaggcaca

SEQ ID NO: 61347 - DNA, 324 bp, Zea mays
  unsure (1)..(324): unsure at all n locations
taaggagggccttcttcagctcncaagtgacaaagccctgctgagcgaccctgttttccgccctcttgtcgagaaatatgctgtggatgagaaggctttctttgatgactacaaagaggcccacctcaagctctccgaactggggtttgctgatgcttaaatagaccctatcttggagtgatacattctgctgcctgtatggaatcatgtggtcttttgcatctggagtcaatgtgaacaagcagattgtcgtattgtctctctcgtaataaatttgtcgatgttgagcccttaggctgttgttggtacattggtacttcgtcg

SEQ ID NO: 61348 - DNA, 330 bp, Zea mays
  unsure (1)..(330): unsure at all n locations
ccaatgaagaacagcatatccaagcgccaggagaagactatcatgaaactggtagttgatgctgaaactgacaaagtacttggtgcatccatgtgtggaccagacgcacctgaaattatccagggcatcgctattgcggttaaatgtggagccaccaaagcagacttcgacagcactgtcggaatccacccttccgctgctgaagagttcgtgaccatgcgcaccgtgacaaggcgcttgaggccgacatccaagccanagacgaacttgtaagcaagatattggtgttttgggggaatgttacaccggacaaatacactggtttcatca

SEQ ID NO: 61349 - DNA, 318 bp, Zea mays
  unsure (1)..(318): unsure at all n locations
gtgcaatgcctgtgagatggctgtggtatggatgcagaaccaacttgcccagaacaagacacaggagctcatcctgaactacattaatcagctttgcgagcgtcttccgagtccgatagaggaatcagctgtggactgtggcagtcttgcgtccatgcctgacattgcgttcaccattggaggcaagaagttcaagctgaaaccagagcagtanattctgaaggttggtgaaggacaggctgcccagtgcatcagcggattcacagctatggatatcccaccaccccgtagccctctctggatcttgggtgatgtttc

SEQ ID NO: 61350 - DNA, 327 bp, Zea mays
tgaagagcatgtgggattcgtcttggaaaccattactcacaggaagggtgaagtagttgacatgggcccggttcctggcacaactggaagaactcgaatcttcatgacctgtccatctaggggtttggtgggtgtcaaaggaattttcagcagctttacacggggaactggatttatgcaccgtgcttttcaggcatatgctaaatacagaggtccactgggcagtgtcagaaaaggagttctgatatctgttggtaagggacttatcacttcacatgcccttatgagtttagaagctcgtgggatcctctttgtatcccctggaat

SEQ ID NO: 61351 - DNA, 326 bp, Zea mays
aggactcgcaacttgattgtgaggctgcgccacaatgtcattcgaactggactgcgcaacatcagcatttcttactcaaggatctcccttgctgacattgctaagaagctaagactggactctgagaaccctgttgctgatgcagagagcattgtagccaaggccataagagatggcgcaattgacgccaccatagatcatgcaaatggctggatggtatcgaaggaaaccggtgatgtctactctacaaatgagccacaaattgcattcaactccaggattgcgttctgcctcaacatgcacaatgaggcggtcaaggcgatgag

SEQ ID NO: 61352 - DNA, 313 bp, Zea mays
agagacactcaggagatattcaatcgatggcactgagcttggggacctcttcgcgctctgctatgggatgttctcttctcctgcggtaaggatcttctctgctgaaaacgttcgagctgagcttcaggagtccatgagagactacatccgagcgtcagttggcataaacgacaagggagagctcgtagtccccaagctactgcagagctacgccaagggcatcgtggaggactcgctgctcgccgactggatctgccgcatctgacactagatgaagtcgccgcgatccaggaacgtcatcgtcgtcgtgcat

SEQ ID NO: 61353 - DNA, 135 bp, Zea mays
agacaagcccagaaacgcaacaagggtcggtccaaaggttccaaggcccaagttgggcggcggtggtgggaagcgctgaaagaacttaaggcctgtttggaggctgacgtcgaacgccacaccccgcctaagatg

SEQ ID NO: 61354 - DNA, 358 bp, Zea mays
  unsure (1)..(358): unsure at all n locations
gacggaaagggggagatgagccggagcctggggatcccggtgaagttgctccatgaggcagcgggtcatgtggtgacggtggagctcaagaccggcgaagtgtaccgggggtccatggtcgagtgcgaggataactggaattgccagctcgagaacattaccttcaccgccaaggatgggaaggtttcgcagctggagcacgtcttcatcagaggaagcagagtgagatttatgattatacctgatatgctcaagaacgctcncatgttcaagcgcttggaagcgagactccgcacacacgatcagctattggcagttggcgtgacgtgcagttgcatgcgtgctcgggctgcttctg

SEQ ID NO: 61355 - DNA, 273 bp, Zea mays
gcaaagcggaagttgcggttggcctcgtcatcctcttctccgtcgcggctcagatctctgcgtgcggcgatggcgtcgttctcggaggctccccccgggaacccgatagccggcgagacgatctttaagaccaagtgcgcgcagtgccacacggtcgacaagggcgctggccacaagcagggtcaaacttgaacggtcttattgggaggcagtctggtaccactgcaggctactcctactctgcgggaaacatatacaaagctgtagtctggg

SEQ ID NO: 61356 - DNA, 311 bp, Zea mays
agaaattcagcggcaaggatgtggtatttgttgctacacggaggattgtgaggccacccaagaagggttcagctgttctgcgcactcgcaccaggactctgactgctgttcacgatggcatcttggaggatgttgtctacccagctgagattgtggggaagcgtgtcagataccgtctggatggttccaagattatcaagattttcttggactcaaaggagaggaacaacactgaatacaagctggagacctgcactgcggatctacgcaggctgtgtgggaaagatgtggtctttgagtaccctatgacc

SEQ ID NO: 61357 - DNA, 294 bp, Zea mays
tccaggtggagttgtatgcacccaggcagagagcatatggctacatatgcacatcattgaagatattttcgtcaattgccgccaagttttcaaaggctcagttaactatgcttggacaacagtacctacataccctagcggagttattgggttcatgctttgctccaccgaagggcctgctgttgatttccagcaccctgttttcaacatcgaggaggatgaacattctacgaaatcaaaaggacccttaagtctacaactcggagatccacacggcatcattctgtttgccct

SEQ ID NO: 61358 - DNA, 342 bp, Zea mays
  unsure (1)..(342): unsure at all n locations
atacattactacagctactggtgatggggactttggtcttttgctngaaagtacaagtttctatgctgaacaaggaggccagatatttgacactgggagcattgaggggtcatttggaactttcaatgtgaacaacgtccaagtgtttgctggctatgttctacatattggctcatttacaaaaggttcgaaggttttgtctcttggagatagtgtgatatgcaaggttgattacaaccggcgcacactgattgctccaaatcatacgtgtacccacattttgnactttgctctaagggaggtacttggtgatcatgttgaccagaaggttcaattgtgcta

SEQ ID NO: 61359 - DNA, 267 bp, Zea mays
  unsure (1)..(267): unsure at all n locations
atcaccaccaaggccaatgttgactacgagaagattgtcagggagacctgccgcaacattggttttgtgtcaaacgatgttgggcttgacgccgaccactgcaaggtgctcgtgaacattgagcagcagtcccctgatattgctcagggtgtgcatggccacttcaccaagcgccccgaggagattggagctcggtgacagggacacatgttcgggtatgcgaccgatgagaccctgagtngatgccctccagcatgtcctttgcac

SEQ ID NO: 61360 - DNA, 330 bp, Zea mays
  unsure (1)..(330): unsure at all n locations
atcagatacaatggtggccttgacactgaggaatcttacccttaccaaggtgtcaatggaatctgcaatttaagaatgagaatgttggagtcaaggttttggactcggttaacatcaccctgggtgctgaggatgaactgaaggatgctgttggtctggttcgcccagttagtgttgccttcgaggtgatcactggtttcaggctgtacaagagcggagtttacactagcgaccattgtggaactacaccgatggatgtgaaccacgctgttctggctgttggctacggtgtcgaagatngtgtaccctactggctcatcaaagaactca

SEQ ID NO: 61361 - DNA, 192 bp, Zea mays
gatcaagaaaggtgccttatctgttgaaggtgttgaggctacaatatggcaggtcactgaaattctctctgaagaagtgcttggaaagatgagcgcgctccctaagcccgacgtgccagtcatcacaccgcaggaacttgcagaggctgacggtatcctctttgggtttccgacaaggttcggaatgatggc

SEQ ID NO: 61362 - DNA, 354 bp, Zea mays
  unsure (1)..(354): unsure at all n locations
caacaacatctacctgaactttgatgctttacatggagacaaggaccatggtggtgtgcgcgacgggacggcccttgtgctgtgggagtggtgcgagggagacaaccagcgctggaagattgttccctggtgaacaaggaaatgtgtgaccgagcccgcaccaaggaggagctcctgccgtaataagtgaagtgattggtactgaagtttctggccataagaggctcttctgagatgcctgtttgtgtgagtatttgcgtttccattccgttttcatgataatanaacgcattgattattaatatatgtaatgtcatgctacactgagtggcagcgttggtatatatgtgtaag

SEQ ID NO: 61363 - DNA, 224 bp, Zea mays
gccgccaacaacttgaagcgccttgcggaagagttcggtccagagtgggcaatgcagcatataattcctcaggtgctggagaagatcaacaatccgcactatttgtaccgcatgacgattctgcaggctatctccttgctagctcccgtcatgggtgcagagatcacttgtcaaaagctgcttccagtcgtcattaattcttcaaaggacaggggtcctaacat

SEQ ID NO: 61364 - DNA, 278 bp, Zea mays
aacagaagtagatacagcgtagtaagtcggaatcggtcgagctggaggcttgcgtccgcatggttgctattgtgtcctcgtctatgtatggagaatggtgcaaagggtttgaggtgattgtgaatggaaagctcagggccaaagagccaagtccatgaagttcaaggatggctacatgatctcatctggtcagccagtgaacgagtacattgactcggctgtgagacacgtccttctcagacagggtgttctcggtatcaaagtgaagatcatgcttg

SEQ ID NO: 61365 - DNA, 321 bp, Zea mays
ctcgcagccgccctagcacccgcgacgagcaggatctgcccagttgctcttgcggtagttcccccaactgtcaccatgcagaacgaggagggtaagactgtggacctctatgtccccaggaagtgctcggccacaaacaggatcatcactgccaaggccatgcttctgtccagatcaacattggccacttggatgcgaatggcctgtatgatggtcacgtcacaacgtttgctctctctgggtttgtccgtgctcagggcgacgcagacagctccttggacaggctgtggcagaagaagaaggctgatatcaagcagtaga

SEQ ID NO: 61366 - DNA, 302 bp, Zea mays
ccggtccagcagactctgccggccatggcggctgcggcggcgcagaagctcctcgaggcgagcacgaagatcatcggcgtcgggcgcaactacatcgtccacgccgaggagctcggcaacccgatctccaaggagcccgtactattcctgaaagcgacctcgtcgttactccacgctggcgtggccaccgcggcgtcgagatccggagcgctcgatcgctacacacgaggtgactcgcgtctcattccgcgtggcgtaatctgaggtcgcatgactctcgagtatcactgcttgactgcaca

SEQ ID NO: 61367 - DNA, 206 bp, Zea mays
caacaacatctacctgaactttgatgctttacatggagacaaggaccatggtggtgtgcgcgacgggacggcccttgtgctgtgggagtggtgcgagggagacaaccagcgctggaagattgttccctggtgaacaaggaaatgtgtgaccgagcccgcaccaaggcggagctcctgccgtaataagtgaagtgattggcactgaa

SEQ ID NO: 61368 - DNA, 171 bp, Zea mays
  unsure (1)..(171): unsure at all n locations
ggcgtgccaaaacatcacgtgaacaaatggncgcgcggtgaaggtgaatttgatcgcgctggttccgcagtcaacaacttgatgggaggcgacctgacgaagatccagacggtagggcgctacatgatcgagatttggaaagcggctgggatgaaccttgacggggtggag

SEQ ID NO: 61369 - DNA, 301 bp, Zea mays
agcggatggacaagcttgacactgtcttttcctgcccattctgcaaccacgggagtagtgttgagtgccgaattgacatgaagaatctgattggcgaagatcttgtagaatctgtcaggaaaacttcagcacaactgttaatgcactcactgagcctattgatatatatagtgaatggattgatgagtgtgagcgtgtcaacactgtgaaaggcgacgatgatgcgtgacttgccccatgtgatgaactgttacctacaacgtaatgtaatggctggtatctcgaatgcatagccatagtc

SEQ ID NO: 61370 - DNA, 338 bp, Zea mays
  unsure (1)..(338): unsure at all n locations
ggcctcgccatgaggctcttcctgtcgctcccggtcctggtggtggttctgtcgatcgtcttggaaggcccagccccagcgcaggggactccagacgtctccagtgccttggataagctgaaggagtttggaaacacactggaggacaagctcgggaactcatcagcggcatcaaacagagtgaactttctgccaagatgcgggagtggttttcagagacatctcagacagtgaangcagaactcaagattgactcatgaggacctgaagggtgacatccaggaggggctctgaatttccacacccagcgcgtttgcggccgcgactagtgactcgtc

SEQ ID NO: 61371 - DNA, 349 bp, Zea mays
  unsure (1)..(349): unsure at all n locations
aagacacgtggtatgggagccgggcgcaactcaagatccaccgcagaaccagcggtgggctgacaaggcatacaagaagagccatttgggcaatgagtggaagaaacccttcgctgggtcatcccatgccaagggcattgtcactggagaagattggtattgaggccaagcagcccaactccgctatccgtaagtgtgctcgtgttcagcttgttaagaatggcaagaagattgctgccttcgtgccaaatgacggttgtttgaactacattgagganaatgatgaggtcttgattgctggatttggtcgtaaggggcacgctgtgggagatattcctgtgtccggttc

SEQ ID NO: 61372 - DNA, 353 bp, Zea mays
  unsure (1)..(353): unsure at all n locations
ganattggaactacatcacagtcactcccatcactacgagttgttggtacatgtggttacatgcctccagagtatgctcgatatggtgaggtttctcctaaggtggatgtctacgcttttggtatagtcctgtatgaacttctttctgccaaagaagctattgtgagatcaacagaattcactgatgcacaaggcctggtttatctgtttgaggagactctcagcatgccaaaccccatggaagctcttcaggaaatgattgatccaaggctaggaggtgactaccccattgactcggctgtgaagattgcgtaccttgcaaagtcatgcacgcatgagagctcaggatgagg

SEQ ID NO: 61373 - DNA, 349 bp, Zea mays
tgcaaaacctagctgagttccagttttcttgtgtcatgtacaatggtgccctagagaatgcatgcagtgagcttggagcccgtatgtctgccatggacagctctagcagaaatgctggcgatatgcttgatcgtctcacgcttacttacaacaggacacgccaagcatccatcaccacagagcttattgagattatatctggtgcatcagcccttgaaggataggtgaagagactatgtggacttctccctttttccccattggtgttcctctcacatgaaggcttcttttcttccggaggctcagtttcaacccttgtcgtttcacttttccttgataacgtactctc

SEQ ID NO: 61374 - DNA, 352 bp, Zea mays
cgttccggtgctggcgccgcttccgatcgggttcgctgtgttcatggtgcactggcgacgatcccgatcactggcactggtatcaacccggcgaggagcctcggcgccgccgtcgtgtacaacaacagcaaagcctggagcgaccagtggatcttctgggtgggcccgttcatcggcgcggcgatcgcagcgctataccaccagatcgtcctccgcgccacgccagggggtacggctccttccggagcaacgcctaggaccatctccttccgggctattcagctcttcctcctccgcagtttaaggtgaacggagaaggagagcgcgagggggtacgagcacgcctaggctc

SEQ ID NO: 61375 - DNA, 351 bp, Zea mays
caggaatttattgaagctacaaaggagccagggcttaccttcatggttgcaaatttgatggcattcttgggctaggctttcaagaaatctctgttgggaatgcaacaccagtgtggtataacatggtgaaacaaggtctcatcagcgaccctgttttctctttctggtttaaccgacatgctgatgaaggagaaggtggtgaaattgtgtttggtggaatggattctagccactacaagggcgatcacacgtttgtcgcagtcactcggtaaggatactggcagttcaacatgggtgatgtcctggttgatggaaagtccatgggttttgtgccggtgctgtgcagccatc

SEQ ID NO: 61376 - DNA, 350 bp, Zea mays
atcaagttgggatccactgcgatcggtttgaagacaaaggatggtgttgtcctcgccgttgagaaacgtgtgacctcaccactgctggaaccaagcagtgtggaaaaaataatggaaattgatgagcacataggctgtgccatgagtggacttattgctgatgctagaacactagtggaacatgctcgtgttgaaactcagaatcataggttctcatacggagagccaatgactgtagaatcttcgacacaagctatctgtgacttagctctgcgttttggcgaaggtgacgaagagtcaatgtcacggccatttggagtctctctcctaattgctgacatgatgagaat

SEQ ID NO: 61377 - DNA, 330 bp, Zea mays
ggagttcctccaccaggcagtgaccatctgcctgaacatccagaaggagtacggcaagctcctcaaggacttcaacaagggctttgtaaacaacaaggacatcgagaacctcaaggtccaggtggagaagtttgccgactccttcgacatgcctgggttcacgcttgagagcatgaaatacaaggagtagacatgcctcccatgcgcggcaaggtcctcctgtaccgatgtctttccttgtggtggcgcagggtgccatggcactgcactgccgccacacttacgatgatgatggtgggttatggcatttgtctacaatgtcagcagata

SEQ ID NO: 61378 - DNA, 336 bp, Zea mays
  unsure (1)..(336): unsure at all n locations
catgtgatctcgaagattacatttgcgagttacgggacncctacaggaggttgccagaacttctctgtagggaattgccatgcatcgactactctagacttggtggtagaggcctgcgaaggcaagaacagatgcgcgatcagtgttaccaacgaagtatacggagatccatgccgcaaagtcgtcaaggatttggcagttgaagccgagtgctccccgccatcggttaaccaagaacctcgatacgatatatgatcacggtactgtattgtggtgctcaggtcttggtggacgttgccgcactttgcagggcgtgcacaatgtctcatcgtgtct

SEQ ID NO: 61379 - DNA, 324 bp, Zea mays
gaaggaactcacctgatgatcccgtggatcgaaaggccgatcatctacgacgtccgcgcccgacccaacctcgtcgagagcacctccggaagccgcgacctccagatggtgagaattggtcttcgtgtccttactcgacccatgccagaccagctacctaaaatctacaggaacttgggggagaacttcaatgagagagttctgccttcaatcattcatggaacactcaaagctgtggttgctcaatacaatgccagccagctgatcatccagagagtagctgtcagcagggagattaggaagattctgactgagagggccaca

SEQ ID NO: 61380 - DNA, 338 bp, Zea mays
cggctcgagcggcgcgcgcgagaagaagaaggcggcggaggacgacggcgacaaggacaagaaggacggcggcggccccagcaagcccggcgagaagaaggacaccagcagcaaggtgacgctgtcgggcctgctcaacttcatcgacgggctgtggtcggcgtgcggcggcgagcggatcatcgtgttcaccaccaaccacgtcaagaagctggacccggcgctcatccgcagagggcgcatggacaaacacatcgagatgtcctactgcggcttcgaggcgttcaagttcctggccaagacgtacctcgacgtggactcgcacctctttcgagccg

SEQ ID NO: 61381 - DNA, 345 bp, Zea mays
  unsure (1)..(345): unsure at all n locations
ctgtctacctcgcagctgtcctcgagtacctcgccgctgaggtctggagcttgctgggaacgcagcgagggataacaagaagacccgcatcgtgccgcgtcacatccagctcgccgtgcgcaacgacgaggagctgaccaagctgcttggtggtgccaccatcgcgagcggcggcgttatgcccaacatccaccagcacctcctccccaagaaggctggctcgtccaaggcttccaccgtcgatgacgatgacaatgaagnctgcccactggagaaggcattcgctaccgtcttgtttcctaggtttagcacgcattagtcggcatgtcttgagagctcgatgtg

SEQ ID NO: 61382 - DNA, 344 bp, Zea mays
cgctgttgcactgctgctgtcttctgccatgatgttgaggcacttgcaattcccatcttttgctgaccggctggagacggcagttaagcgtgtcattgcagaaggcaagtacagaaccaaagatttgggcggcaccagcaccacccaggaagtcacagatgcggtcattgccaaattgggttagaaaccaaccgtgtctttaatacaacttttttttatctcttggactaggtaactagtcctgtcaaaacatttgctcctctcgtaggtttagttcaccattttgttcggcaaatccttgtacaatcttcaggtatctcgtttctgaccagtttgggtttggg

SEQ ID NO: 61383 - DNA, 351 bp, Zea mays
  unsure (1)..(351): unsure at all n locations
cgcataaccaatcttgccatcaatatgttcagtgtgatatctgtggtacgaaacagctaaagaagaatttccagcgccatcatcggatgcatgaaggttcctgcgtcactgagagggttanatgccacatcgaggactgcaaatgttcgttctcgaagaaatccaatttggacaagcatgttaaggcggtacatgagcagcgtcgtccttttgtgtgccaattctctgggtgtggcaagaggttttcttacaagcacgtaagggacaatcatgagaagtcaagcgctcatgtgcacactgagggtgattgtgtcgaggctgatgagcagcggccagttcagtaggtgggtg

SEQ ID NO: 61384 - DNA, 332 bp, Zea mays
gccaccctgggggcgtccaccttgaaatgactgggcagacgtgaccgagtgcatcggtggatcacggaccgtgaccttcgacgatctgagcgaccgctaccacacccactgcgacccaaggctgaatgcctcccagtccctggagctcgcctttatcatcgcagagaggctgaggaagaggaggatgcgatcggggctcaacagcagcctgccactgccgccactggctttctgagtagccggagccaaacacaaaggagggtaggaatagctgtggtgactcggaagagaaagagacagtcgacgccttgttttgttgatgctagtgtggt

SEQ ID NO: 61385 - DNA, 340 bp, Zea mays
ccatgaagttcaaggatggctacatgatctcatctggtcagccagtgaatgagtacatcgactcagctgtgagacacgtcctcctcagacagggtgttctgggtatcaaggtgaagatcatgcttgactgggacccgaaggcaaggttggcccgatcacccctcttccggacctggtgaccatccataccccgaaggaggaggacgagctgcgccctcctgtcttggcagctgaggtctaaggtcccaacagcgtcctcgaaatggcagtttgatcgggtcctagctaggtttgatcttatgataagggcagtgctaagacagtcgttccgtgtcacttc

SEQ ID NO: 61386 - DNA, 325 bp, Zea mays
gcctcgaacagcagcaaatgtctgtgtgaccatcagtgacgtcaagaccgaagataggaagcaaaagctttccacgtataggaagaagaagataaagcggaactttggcaggaagatcaagtacgcgtgcaggaaggctctggcagacagccagccaagagtgcgatggagatttgccaagatcgaagaatgcgacctgctgaagccaagcaagtagatccaagtatgcttggtgttggcttctagctaggcgccgctccatcgtccttaccttgtgcgctggagaggcgcgcgatgccgtcggaatcattgattgactctctgt

SEQ ID NO: 61387 - DNA, 338 bp, Zea mays
gcgcctacgccaccacctctgccatggccccgaagaaggataaggccccgccgccgtcgtccaagccggccaagtccggaggcgggaagcagaagaagaagaagtggagcaagggtaagcaaaaggagaaggtcaacaacgctgtgctcttcgaccaggccacctatgacaagttgctctccgaggtgcccaagtacaagcagatcaccccatccgtcctctccgagcgtctcaggattaatggatcattggcacggagggcaatcaaggatctgatggcaaggggattcataaggatgatctctgttcattccagccagcagatatacaccgggcaa

SEQ ID NO: 61388 - DNA, 301 bp, Zea mays
  unsure (1)..(301): unsure at all n locations
aagaaggataggaatcctcttgtgtcctggccgcggcagtcgctgcgtcgttccagatttggggaaggaaatccggcaccgagattcgagtcgataaggacatcatttgctagatggcgcgtaccaagcagatcgctcgcaagtccactggaggaaaagctcctaggaagcaactcgctacaaaggcagcccgtaagtctgcacccacaactggnagacgtgagaagcctcaccgttactgcccaggactgttgctcttcgtgagatccgcaagtaccagaagagcactgagttgctgatt

SEQ ID NO: 61389 - DNA, 329 bp, Zea mays
  unsure (1)..(329): unsure at all n locations
gtgtacagcccgctgaagcactttgggctgacgccccgggcctccgtggcggcatcctggagcgcaacgacgtccgctaccgcttcgtcgtcgacgtcgccggtagcaacgtcgaggcggaggcggcggcggcggatgcggccagcaactgatggcaccgcgtcgtcgagtcgaaccacgtctgtgcgccgcgtgcaacgttcgttcgggtcgagtctgcgtgcaacgatctgcttcctttactagttgttgtctttccgccttcttgccgttctgttctgggctttgagatgagacgatggatggtcagttnttaattcagactgaat

SEQ ID NO: 61390 - DNA, 313 bp, Zea mays
cgagatgttctacgccctgaagtaccgtagcctggcaagccaggttccgctgtccttcgattagtacggggaaagaagaagaagaagaagcccaggccggagaaccatcgcctgcatttcgatctgtttcaccgcaattcgcattgttagtcgtgtattggagttatgtgtacttggtttccaagaactttggttccttgtatttatatctttcttgtatgaacgtttttaggcagcgctggcctggttcctagtatggtgagaattggctgcaccttttgcttcgaataaaaatgcctgctcgttcacctgt

SEQ ID NO: 61391 - DNA, 336 bp, Zea mays
aatggtttccctgtgcttgatgagccacccataacggaaaccccggaactggttgggcttgtgactaggtctcatttattagttttgctgaacagcaagaatttcatgaagggacgggttaaaactagtggtagcttcgttctgcgaagatttggtgcatttgactttgcgaaaccaggttcaggtaaaggtttgaaaattgaggacctggatttcactgatgaggagatggacatgtatgtggatctccacccgatcacaaatacatcaccttacacagtggttgagacgatgtcactggctaaagcagcaatccttctcgggaacttggtttga

SEQ ID NO: 61392 - DNA, 336 bp, Zea mays
  unsure (1)..(336): unsure at all n locations
gtccaatcccgagcagaggtgcgactcgagcgctccgccggtgtccatttcaaagaggaagccgcggtagcactggtagcggcagcagtaaggggaagatgtcgtcggcgttcagcggcgatgagaccgcccctttcttcggcttccttggcgcctccgctgcgctcgtcttctcatgcatgggggcggcgtacgggacagccaagagtggcgttggcgtggcgtccatgggtgtcatgcgcccagagctcgtcatgaagtccatcgtgcncgtggtcatggctggtgtgctcggtatctacggcctcatcatcgccgtcatatcagcactgggat

SEQ ID NO: 61393 - DNA, 338 bp, Zea mays
  unsure (1)..(338): unsure at all n locations
tgtgaaggtacgtgtgcagacacaacctggatttgtcgtggattgagtgatgggctcnccaaatttgtccgatctgagggtgttcttgggctctacaagggaattgttcctctctggggtcgtcagattccttataccatgatgaagtttgcttcctttgagaccatcgttgagcttatctacaagcatgctgtgcctgttccgaagtctgagtgcagcaagactacccagttgggtattagctttgctggtggttacgttgccggtgtcttctgtgctattgtttctcacccggctgacaaccttgtgtctttcctgaacatgccaagggagctaca

SEQ ID NO: 61394 - DNA, 341 bp, Zea mays
  unsure (1)..(341): unsure at all n locations
gcacacatcncctcccttcctcgttgcgtgccctcgccgcagacctctgccatggcggaccagctcaccgacgagcagatcgcggagttcaaggaggccttcagcctcttcgataaggatggcgacggctgcatcactaccaaggagcttggaacggtgatgcgctcccttggccagaaccctaccgaggcagagctgcaggacatgatcaacgaggtcgatgcggatggcaatgggaccatcgacttcccggagttcctgaacctgatggcgaggaagatgaaggacacggactcagaggaggagctcaaggaggccttccgcgtctcgacaaggaccag

SEQ ID NO: 61395 - DNA, 334 bp, Zea mays
gttcacgacgcaccaaccgaggccacaggcaccaccattccttccttgttccttccccagctccgcaggctgctcatcgccctccctccgcgctcccgatacagatccagatccaggggcttgtcatcgcatccgaacgtatcctcaaggaattacaggacttgcaaaaggaccctccaacatcatgcagtgcaggtcctgctggtgacgatatgttccactggcaggcaaccatcatcggtcctcctgatagtccatatgctggaggtgcattcttggtgaacattcatttcccgccagactacgccttcaagcctcagaggtatcttttaag

SEQ ID NO: 61396 - DNA, 328 bp, Zea mays
gcgcctagcgaccagcacagattcgttccagcctacctcctgccctcgcccgtgctctcagatctcgcgcgcgccccgcaaagggtaactttgagccatgggcacagttgtggatgctccagcagttgtggctgaagaggtcactgaaaacatgttgggtggtaagaaagttacagttgtatttgttctaggtggtcctggaagtggaaaaggcacacagtgtgccaacattgtggaacactttggattcacccatcttagtgctggagatcttttgcgtgcagagattaaatctggctctgagaatggaaccatgttgaagacatga

SEQ ID NO: 61397 - DNA, 324 bp, Zea mays
atcagaaaatgctttcgttcattcccgagtctctgggtttggaaggctcttcaagtcctctgaacccatggagctgacagaggcagaaactgaatatgctgttagtgtggttaaacacatttatgacggctacattgtattgcagtacaattgtgcaaacactatagaagaacaactgctagaagatgtcactgtttgcgttgatgcctcagatgctgaggagttttcagagatttgttcaaagcctcttgcaagcttgccgtataattcacctgggcaagtttttgttgcttttgagaagccagagcgtgtaccgttgttggg

SEQ ID NO: 61398 - DNA, 332 bp, Zea mays
tgctgccgctcctgttatatcagttgcagtagagagaggttggaatgagtccgcaagtcctaatgtgaggggcctcctgcgcttgttttcagcttctcacggatggaagacagactcaaggctgcctacaaagccacaactgagggcaagttcccagaagcactgaggcagttccttagcatcttacataccattccagttatcgtggtggactcacggagagaagttgatgaggtgaaggagttaatcgagatagtgagggagtatgtccttggtctgaggatggaactcaagagaaaggaactgagggatgatgtgaccgtcaacaggag

SEQ ID NO: 61399 - DNA, 341 bp, Zea mays
gttgctagacagaattgtagcaagaggtgggagatatacagaagaagatgccaaagcgatcattgtacagattttgagcgtagtggccttctgtcatcttcagggagtagtgcatcgtgatttgaagccagagaattttctcttcacaacaagagatgagagcgctcctatgaagttgattgactttggtctgtcagattttattagaccagatgaaaggctcaatgatattgttggaagtgcttattatgttgctcagaggttctacacagatcatacagtatggaagcagacatttggagtataggtgttatgacatacattctgctctgtggcagtcg

SEQ ID NO: 61400 - DNA, 338 bp, Zea mays
cagcgttgcaaggagctcggtatcacagcgctgcacattaagcttcgtgccactggaggcaacaagaccaagacccctggacctggtgctcagtctgctctcagggctcttgctcgttctgggatgaaaattggacgcattgaggatgttaccccggttcccactgacagcactcgcagaaagggtggtaggaggggaaggaggctgtaggcgtgtatccttgctatttgccatcactttgcactggtctctgagagttctgctatttattagcttgccaaaaggagctttaattttgctcatttcgctctatgtcgaggatcatttattgttagccg

SEQ ID NO: 61401 - DNA, 334 bp, Zea mays
cctgggtgctgaggatgaactgaaggatgctgttggtctggttcgcccagttagcgttgccttcgaggtgatcactggtttcaggctgtacaagagcggagtttacactagcgaccattgtggaactacaccgatggatgtgaaccacgctgttctggctgttggctacggtgtcgaagatggtgtcccctactggctcatcaagaactcatggggcgctgactggggcgatgagggttacttcaagatggaaagggcaagaacatgtgcggtgttgctacgtgtgcatcctaccctattgtcgcatgaggcccttacgaatgttacatggtct

SEQ ID NO: 61402 - DNA, 340 bp, Zea mays
attgacaatggtcagcagcttactcggaacagaaagtttttgactgtggtacctgtggtgtatgtatctgatcgcatcgcacttgactgactacaagcagccgatgtttttcctcaatacaatggcagtttttgtgctagttgtggcaaaattgccaaacatgcacaaggtccgcatatttggaatcaatggagacatctgaggaccactgcaggaagtacatggatgcaatgccatgatgtgatgaagagctaaaagaacaagcagtgtgtttctcaaacttgacacaactgtctgtaatatatgtacaggtttaggaagaactgtaaatgttactcta

SEQ ID NO: 61403 - DNA, 365 bp, Zea mays
  unsure (1)..(365): unsure at all n locations
atgctgtacgtagagagctcggattcggtcgacccagatatacttcaagaggaagaagacgggtgggatttctttcaataccactgttcctttgactcatattgatgagaagctgtgctatcagattctgcacgagtacaacattcacaatgctgatgtgttattccgtgaagatgctactgtggatgatctcattgacgttatcgaagggaaccggaagtacataaagtgcgtctacgtatataacaagatcgatgttgttggtatcgatgacgttgataatcttgctggcaaccanattcactagtgatcagctgcaatttgaagctgaacttggacagactacttgcgagaatgtgggagga

SEQ ID NO: 61404 - DNA, 346 bp, Zea mays
atcgagaccgttcccgagatgcccctggttatctccgactcggcagagtccatcgagaagacctcccaggcgctcaagatcctcaagcaggtcggcgcctacgccgacgccgagaaggccaaggactccgtcggcatccgccccggcaagggtaagatgcgcaaccgccggtacatcaaccgcaagggcccgctcgtcgtctacggcacagagggctccaaggtcgtcaaggccttccgcaacctccgcggcgtggacgtcgcacgttggagcgcctaaacctgctcgaccttgcccccggtggccacctcgggcgctttgtgatctggaccgagagcgcgttcaa

SEQ ID NO: 61405 - DNA, 329 bp, Zea mays
gcgcggacatgctgctgacggaggcggactggacctgggcctggtgcggcgcgccacggtgttccactacggctccatctcgctcatctccgagccgtgccgctcggcgcacatggccgccatgcgcgcaccaaggccgcgggcgtgctctgctcctacgacttcatcaaggtcagcgacgacgaggtggccttcctcacgcgcggggacgccaacgacgagaagaacgtgctgtccctgtggtttgacggctcaagctgctcgtcgtcaccgacggggacaagggatgcaggtacttcaccaaggacttcaagggcagcgtgcccggc

SEQ ID NO: 61406 - DNA, 342 bp, Zea mays
atagctgacggtagtagctcggaatcggtcgaagcctggcggacggcaacttcgccggcaactgggtgtactgggtcggcccctcgtcggcggtggcctggcggggctcgtctacggcgacgtattcatcgcctcctaccagccggtcggccagcaggagtagccatgaaagtccggagctagcccgatcgatccgtctgtgttgatttcaccatcgtcgtcgtcgtgtcatctggcgcttcgtgctgtaatcatgtttggtcctgtttgcatttcccaacgtctgttttcatttccattcaccaacggtgccaagatgccgtactgtaagcgagagaagtg

SEQ ID NO: 61407 - DNA, 298 bp, Zea mays
tggagttgtaactcaagttggttcaaatgtcaaaaggtttaaagtgggtgacatgtaggtgttggaacatatgtgaactcttgccgtgattgtgagaactgcaatatctctctagacaaccaattgccgaaagcagtttatactttcaatggcattgatacagatggaactgtcacaaagcgggggttactccactcacattgtagtccatgcaaggtattgcttcaaaatacccgatggctaccctttggcgaaggagcacctcttctgtgtgctggaataacgtgtatactccatg

SEQ ID NO: 61408 - DNA, 333 bp, Zea mays
cttgtcttcaaggctggcatggccaagtccattcaccatgctcgtgtcttgatcaagcagcgtcacatcagggttggcaggcaaattgtcaacgtcccatcattcatggtgagggtggagtctgagaagcacattgacttttcactgtcaagcccattcggtggaggccccgcaggaagggtgaagagaaagaatcagaagaaggcaagcggtggcggcgatgctggcgatgaggatgaggagtgaggaggacaagtagcgttacccaatataataatattatctagttttcttgaacttgttcgaatgatgagtgcttagctgtgtgatctg

SEQ ID NO: 61409 - DNA, 333 bp, Zea mays
tgtgcattacggatcactatgatcctaacaatgcaacccacaaaaggatcaaggatgaaattgagcttggcaatggcctgccagatatcagaagcactcggcaatgtctccaggcagtaaaagacgccgggtttgaggttgtttgggataaggatcttgctgaagattctcccttgccttggtacttgcccttggatccaagccgattctccctgagtagcttccgtttgacctctgtgggacgcatgattaccgcacaatggtcaaggccctggagtacgttggtcttgctccgcagggcagtgagagggtctctaatttcctggagaaggc

SEQ ID NO: 61410 - DNA, 331 bp, Zea mays
gtcctggcatccgcagagagtttgttccgtccaggcaaccaagaagcgttgcaccgccgcgcagaggaagaagagagcagaggaggatggctcgtacgaagcagaccgcccgcaagtccacgggaggcaaggctccccgcaagcagctcgccaccaaggcggcgaggaagtcggcgccgacgaccggcgacgtgaagacgccccacaggtacaggcccggaaccctcgcgctgcgcgagatccgcaagtaccagagagcacggagctgctgatccgcaagctgcccttccagcgcctggtgcgcgagatcgcgaggacttcaagacagact

SEQ ID NO: 61411 - DNA, 331 bp, Zea mays
  unsure (1)..(331): unsure at all n locations
gtgaaccctgcagctgaggcaaatatctttggggatcctgatgcggcagatattgtgttcacctgcggtgctgatattttggccgtgggactanatgtaacccaccaagtagttctaactgatgctgacagggagaagcttgaacagtgtgatagcaaatatgcccgctacttatgcaagataatgggcatttattttgattaccacaaggatgcctacttcattaaaggagtgtatcttcatgatcaacaacggttattgctgctgtgaatccatcgctgctgacttacacagaaggtgttgtgagggtacagacggttggaatcacaaa

SEQ ID NO: 61412 - DNA, 329 bp, Zea mays
cgtcttcgtgctcacacacccaaaccttagtcgcgatcaggccccaaggactcgagatgaagtcgagggcacggtccaccgccggcgactccaggctctcggtgaggaagaccaaggctgagaaggacccaaacaagcccaagaggcctccgagcgcgttcttcgtcttcatggaggagttcaggaaggactacaaggagaagcaccccaatgtgaagcaagtctccctgattggcaaggctggtggtgacaagtggaagtccctgtctgatgccgagaaggctccctacgtgtctaaggcagagaagctcaaggctgagtacaccaag

SEQ ID NO: 61413 - DNA, 329 bp, Zea mays
  unsure (1)..(329): unsure at all n locations
cgcagagtcttcttgtgctgcccttgttgtnnccgtctatttcatctttcggaatcgaccatgatttcactgggatgtgctacccactccttgttagctctgttggtatcattgtctgcttgatcaccaccctttttgctactgatttctttgaagtcaaggctgtgaaagaaattgagcctgcacttaagaagncgctcatcatctccaccgtcctgatgacttttggtattgctctaatcagctggtggcccttccagctaagttcaccatctacaacttcggtactcagaaggaggtttccaactggggtttgttctctgtgtttc

SEQ ID NO: 61414 - DNA, 331 bp, Zea mays
  unsure (1)..(331): unsure at all n locations
tgcattggcatagcgaaaccagaacttgagttatatactgaacacccatcatcactatgatgatactggtggaaacttggaattgtaggcacaatatggtgcaaaggtaattggttctgagaatgataaggacagactacctggcattgacatcacgcttaaggacggtgacacatggatgttcgctggccatcaagttcttgtactggaaactcctggacatacaacatgtcatgtgtgctatgattcgctggttctggctgtatctacacggtgacaaccttgttcaatctatcatgcggaaagcttnttgaagggactccacagcaga

SEQ ID NO: 61415 - DNA, 335 bp, Zea mays
agatgagaagcgacatgaaactgcgtacaccaagatcgtggagaagttgtttgagatcgaccctgatggtacagtggttgctctggctgacatgatgaagaagaagatctcaatgcctgcccacctgatgtttgacggtcaggacgacaagctgtttgagcacttctccatggtcgcgcagaggcttggcgtttacactgccagggactacgccgacattcttgagttccttgttgacaggtggaaggtgcggacctgactggtctgtcgggtgaggggaacaaggcgcaggactacctctgcacccttgcttcaaggatccggaggctagacga

SEQ ID NO: 61416 - DNA, 321 bp, Zea mays
caacaccgttgccggcaagaagatcggcgtcctcggcttcagcttcaagaaggacaccggcgacaccagggagaccccggtcatcgatgtctgcacaggcctgctgggtgacaaggcccagatcagcatctacgacccccaggtgacggaggaccagatccagcgggacctagccatgaacaagttcgactgggaccacccgatgcacctgcagccgacgagcccgacggccgtgaagcaggtgactgcgtgtaggacgcgtacgatgccaccaatggcgcccacgggctgtgcatcctgaccgagtgggacgagttcaag

SEQ ID NO: 61417 - DNA, 328 bp, Zea mays
tgcagaagcgaaagtatgagcttggtcgccagccagccaacaccaagttgtcaagcaataagacagtgaagagggtccgtgttcgtggaggtaatgtgaaatggatggctcttcgccttgatactggtaactactcatggggaagtgaagctgttactcgcaagaaccgtatcctcgacgtggtctacaatgcatcaaacaattgagcttgtgaggacacaaacccttgtgaagagtgccattgtgaagttgatgctgtcccattcaagcagtggtacctcactcactatggagttgacattggtaggaagaagagaaccctgctgcc

SEQ ID NO: 61418 - DNA, 326 bp, Zea mays
tgatgcagagtgtgcaaatggtggcaaatggactgtcccatgcaagagaaaggcaacctttgagaccatgtggcttgaaacgttgatggctcctattggggagcagttcgatgaatcagaggacatttgtggaattgctgctagtgtccgtacaagaggagataagctggcattatggactaggactgctagcaatgaagctatccatgtaaacattggcaagaagtggaatgatgtcatcgactcaacgataagatcacgtacactttccatgacgactctaagagagacaagcccagcagtggtgggcggtacacgtgtaagct

SEQ ID NO: 61419 - DNA, 325 bp, Zea mays
cattgctcatacccagattaggaagatgaagggtttgaagcagaagaaggctcacctgatggagattcaggtcaatggtggtaccattgctgacaaggtggactatggctacaaattctttgagaaagaggtccctgttgatgctgtcttccagaaggatgagatgattgacatcattggtgtgaccaaggggaaaggttatgagggtgtggtcactcgttggggtgtcacccggcttccccgcagacgcacaggggtctccgcaaagttgcttgtatcggtgcatagcatccggctagggtctcctatacggttgctcgtgctg

SEQ ID NO: 61420 - DNA, 245 bp, Zea mays
gtcttacgccatcgggtgcccgagcctctctccgtgttcgtcgacacgtacggcaccggcgcgatccccgacaaggagatactcaagattgtcaaggaagaattcgatttcaggcctggcatgatcatcatcaaccttgacctcaagaaaggcggcaacgggcgctacctcaagacggcggcctacgccactttggaagggacgacctgacttcactgggaggtggtgaagcatcaatggagaac

SEQ ID NO: 61421 - DNA, 311 bp, Zea mays
gtcttctacctcaagatgaagggtgactaccacaggtaccttgctgagttcaagtctggtgcagagaggaaggattttgcggagagcaccatgaatgcctacaaagctgctcaggacattgctcttgcagatctggctccaacccaccccatcaggcttggcctcgctctcaacttctcagtgtactactacgagatcctgaactcccctgatcgcgcctgcaaccttgcaaaacaggccttcgataggcgatctctgagctagacagcctgggagagttctcacaaaggacagcactctgatcatgcagc

SEQ ID NO: 61422 - DNA, 326 bp, Zea mays
ctcggtcaacccttagcagtgagttgacttattcgctgcagtcatgagtaagttgcagtctgagtctgtcaggatgcatctcccagttgttagggatgcaaggagaagcataggaagttcactgagactgtggaacttcagattggtctgaagaattatgatccacataaggacaagcgtttcagtggctctgttaagttgccccatatcactcgtcccaagatgaatgtgtgcatgcttgagatgcccagcatgtcgacgaggccgagaagatgggacttgactacatggatgttgaggctctcaagacaatggagcagaacaac

SEQ ID NO: 61423 - DNA, 313 bp, Zea mays
cactgatgtagactgaccgtacgtaagtcgaatcggtcagtccatctacccagagagtgggtacaccctgataagattgctttgtccccatctctggatttgatggcgactacatgattgagaggtgcaccaaccttgacttgtaaaaaggcccgaacctgcttgaggctcttgaccagatcaccgagtccaagagaccttcggacaagcccctgcgtctccccctgcacgatgtgtacaagaattgtggtattggaactgtacccgttagtcgtgtcgagactcgtgtcatcaagcctggtatgggtgtcac

SEQ ID NO: 61424 - DNA, 314 bp, Zea mays
gagggcaaagttgtgaagatcactggaatcaaggcatgggtacgaccgcaactgtacttgtcaagggatctaaccagttcgttattgatgcagctgcacgcagtctccatgatgcactctgtgtcataaggtgcttggtcagcgagagatttctgattgctggtcgtggtgctccagaaatagtgatgtcaatgcagctggctgcttgggcaaatgagcttcgaaggatggagagttacgcatcaaggagtttgctgaagcgcttgaggtcatcccttacacattggctgagaatgctgggctcaacccaatct

SEQ ID NO: 61425 - DNA, 325 bp, Zea mays
tagcgctcacaagaatcggtcttgctgagcctgcgtgtcatggcggcagaaacttgccctcaacattgcagaggaagggttccccatctctgtgtacaacaggagaagctccaaggtggacgagaccgtgccacgtgccaacgcagtacgaaaccttcccgtctagggcttccatgaccccgcgttcgttgtgaagtccattcagaagccacgggtggtgatcatgctcgtcaaagccggcgcgcagttgaccagaccatcgcgactctcgcagctcacttggagcagggcgactgcatcatcgctcgtgggaacgagtggtacg

SEQ ID NO: 61426 - DNA, 311 bp, Zea mays
gcgacgagggaccggggcggaagaagagagagaagacgtctctctcctctcggcgtcgccgttccccaacctctcgtctgctgcctgcctgcctgcctgcctgcaaaaaggagtttgtcatggcgtctaagcgcatcctcaaggagctgaaggacctgcagaaagacccccccacatcatgcagtgcaggtcctgctggtgaggacatgtttcattggcaagcaacaatttatgggagtacctgacagtccctatgctggtggtgttttcttagtgaacattcatttcccgccagattaccccttcaacct

SEQ ID NO: 61427 - DNA, 327 bp, Zea mays
tgacttactagcatcactacctgtgaagaagatgagacagcttggtgtgaagcttggaagttccttgcaggatgatcttggggttgagaccattggtgatctcctaagttttacagtggcaagattacaagagcagtatggagtaaatactggaacttggttatggaagactgccaggcggattagcggggaagtagttgaggaccgtcttctcccaaagagtcacgggtgtggaaagacatttctggcccaagatcactgaagtacagtgcttctgtcaaaggctggctggatcaactatgtgaagaattaagtgcacgtatccag

SEQ ID NO: 61428 - DNA, 321 bp, Zea mays
  unsure (1)..(321): unsure at all n locations
tgagtgctgcagctnacgaagtcggaatcggctcgaggataggcgttcaccagtgagggcgacctaagcgtgctacttatcgcagaactctatgcttggcagcacaccagctctatcaccatcacctggactggagcatagatgcttcggttcaagcactacttcacataggctgtacaggagcagaatgatgtcatgaaacggcacggcgacaagattgatcatgacatcctcgctgtgatggacgtcctctaccggtgcatcaacgacgcctccgtctcaaccgccgctaatcatgttgcttcgtcaatcacacagcga

SEQ ID NO: 61429 - DNA, 343 bp, Zea mays
  unsure (1)..(343): unsure at all n locations
tgaatgggtgctgtcgagaccctgattgtgtgggaaaatctggatatcaacagatatgtgatcaagaacagtactactggggatattattataaaacatctgaacaaagagcaggaagctgaccagagcaatttccgtgacccatctaccaatactgatctcgaagttcangaaaaaatgtctctcctggaatggtttgccaatgaatacaagaagtttggttgctcggctggagttgtgaccaacaagtctcaaggaggatcccagttctgtagagganttggtggcattggtggcatgttgcgctaccagctggatatccgtcttttgatgagcttctgat

SEQ ID NO: 61430 - DNA, 283 bp, Zea mays
  unsure (1)..(283): unsure at all n locations
gagtaagctcggactccgctcgagctctcacctgncgtcgccgccatcggacactccaacgtgtggcactcgcatcccaagaactacggccctggatctacggcttgccgtatgtgcgctaacgcccacggcttgatccggaagtacgggctcatgtgctgcagacagtgcttccgcagcaacgccaaggacattggcttcatcaagtaccgctgaaacttggggagctccatacacggcaataactgaggcacgacatgggacctcanagatagcatgtact

SEQ ID NO: 61431 - DNA, 253 bp, Zea mays
tatgaatcgcatgcatgttgttggagctgttggtgttcagcaacgacggcttgatattcctgctggtgtggatcctgctgtagcagagataataaggagatgctggcagactgatccaaggatgcggccatcatttcagagatcatggctactttgagaccattgttacaggacatgcctgccaaccagcctaacgagaagcgtgcacaacagacagatgattaacgatatattggtcagtatcagctgaaga

SEQ ID NO: 61432 - DNA, 173 bp, Zea mays
ccagaaatgaattatacatctgatgatcaaccttatcctcgtggagaaatttgtgttagaggacctataatattccagggttactataaggatgaagttcaaacaaaagaagtcattgatgaagatggttggttgcacactggagacataggtctgtggctacctggaggacg

SEQ ID NO: 61433 - DNA, 347 bp, Zea mays
tggggttcaatgatgaagtttcaaataaatctattgttgagcccactcttgaatttgcaattgtacaagatgcagatcgcttggatgcaattggggcaattggtattgcaagatgttttacatatggtggtagcaagaacagcgcattacatgatcctagaattctgccacgtgatagcttgtcgaaagataggtacatgtccaaggaagagaagcagacatcaatcaatcattttcatgagaagctttttaaactgaaggacatgatgaagacagaggccgggaaacagagagctgagaaaaggcataggttcatggatgaatttgtggctgaattctacgaagag

SEQ ID NO: 61434 - DNA, 310 bp, Zea mays
ctagaatcaactgttgttgcgatctttagctctccaatgcattatgctgggccaactgaggtgcagtggcatgctaaggctcgtattaatgctggtgcaaatttctatattgttggaagggatcctgctagaatgagccatcgcacggagataagggacctctatgatgctgaccacgggaagaaggttttgagcatggctcctggcctcgagaggctcaacatccttcctttcacggtggctgcatatgacacgaagcaacagacaatgggattcttcgatcgatcatgaaagatgatttctcttcatc

SEQ ID NO: 61435 - DNA, 310 bp, Zea mays
gcagacaagtgaaggccaatgctgttgcaattggaaactatctcataagcaagggctacaagatggtgactgatggaactgagaaccaccttgttctctgggatctccgaccccttggcttgactggaaacaacgtcgaaaagctatgtgatctttgccacatcacattgaacaagaatgctgtcttcggtgacagcagtgcattgtctcagggtggtgtccgcattggcgcgccacaatgagctcgaggggtctactggagaaggattcgagcagattggggagtactccaccaggcagtgagcatctg

SEQ ID NO: 61436 - DNA, 258 bp, Zea mays
  unsure (1)..(258): unsure at all n locations
caaggggctgctgcgcctggatttcgccgtcgcagcgcagaactgctgggtgcgcaagggcggcgccttcaccggcgagatcagtgctgagatgctggtacacctgcangtagcctgggtcatggtgacgacatctgagcgcagagctctgttgggtgaatcagtgatgtgctgctgatacagttcatatgcactcactcacgtctcaggtaatgctgcatcgtagaccttgacagaagagctgacaccatgatgtgt

SEQ ID NO: 61437 - DNA, 336 bp, Zea mays
  unsure (1)..(336): unsure at all n locations
ggcatntgttctcagttggtttcaagaacactattggagcaaagagggcatcatggagaatcatttgttcacatgagcaaaaggtcgcagctgatcgtcagactggtgtgatgatagatgcctataagaagaaagtagaagaggaactaaggaaggtttgcaatgaagtattgtcagtcattgctattcattgccttcccttggccagtacgggtgaaaatatcgtatcctttataagatgataggtgactactaccggtacttggctgaagttagcactggaactgaaaagaaagctgcctctgatcagtcacttatggcctatcagcatgccat

SEQ ID NO: 61438 - DNA, 290 bp, Zea mays
atggtgtgagccatactgtgctcatttatgaaggatatgccctgcctcatgctattctacgtctggatcttgctagtctggacctcaccgactcgctcatgagaattctcactgcgaggggtcataccttcagaacctccgtcgagcgagagattgtaatggacatgcaagatgagcgtgcgtatatagctcttgactacgactcagagttagtgactgccaagaacagctcctcagatcataagaactatgagctacctgatggctagtaatcgcaacggtcagagaga

SEQ ID NO: 61439 - DNA, 237 bp, Zea mays
  unsure (1)..(237): unsure at all n locations
ccgccgcagacatggcgctgctgaatcagcaaggtctgnattactccaacttcaagctcgtcatcgttggcgacggtggaactggcaaagccacatttgtgaagaggcatcttattggcgactattagaagatatatctagccaccattggtgtttaagttcaccctctcgatttcagcactaactatggtcacattcgttactattgctgggacactactgggcaagaaaagttcg

SEQ ID NO: 61440 - DNA, 317 bp, Zea mays
tatactgagtagtcggatcggtcggacaagctgtgctgttgatacgcataagaagatgctatcatgtgaaattgtcgacgatctgtgtcctcgacactctattgaggacacttacgcaggatgccatcatgagtacggtcagagttgcgacattgtggctttcaacaagatctagtagtcagtttctgagtttgggcaacggcagcggctcagctcgtcaagtttgtgctgggatgccatttatccttctagtctatacagaacgtgtcggagtgatctatataacactggctggttatgtgatgtgcagttttcat

SEQ ID NO: 61441 - DNA, 347 bp, Zea mays
  unsure (1)..(347): unsure at all n locations
gtcgacggtacacggtgaatttgggcttgtgggatactgcagggcaggaagattacaacagactgagggcaactgagttaccgcggacaagatgtgttcgtgctcgcctcctcgcttgtcagcggagctagctacgagaatgttatgaagaagtggctacgggagcttcagcattacgcaccgggtgtccccatagtgttggccggaactaaattggatcttcgtgaagacaggcactacttagttgaccatcctggtgcggtacctgttactacagcacagggggaggaatgcgcaacacattggcgcacttgctacatcgatgcagctcanaatcagcagatgtg

SEQ ID NO: 61442 - DNA, 250 bp, Zea mays
  unsure (1)..(250): unsure at all n locations
atcgcgtgnactcgngaatacagctcgaggccaacgcgactgctgccggaaccggcatgggggcgtacaagtatgtgtcggaactatggaggaggaagcagtcggacgtgatgcgcttcgtgcagcgcgtgcgtgctgggagtacaggcagcagcgtccatcgtccgctcaccaggccagccgcccgaaaggccgtcgtctcgctacaggccaacaggaagtgtctacggtcggtaactgtgcagaagct

SEQ ID NO: 61443 - DNA, 354 bp, Zea mays
gagaagcatggaaaaagatttgtgacattagcaggagtgaatttgacttggtctacaaacgcctaaatgtggtgcttgaagaaaagggggagagtttctataatccttatattcctcaagtgttggaggaattgagtagcaaaggcttgatcaaggagagtgagggtgccagagttatatttattcaaggtcatcagatccccttgatagtggttaagagtgatggtggcttcaactatgcctcgactgacttggctgccctttggtatcggctcaatgttgagcaggcagagtggatcatatacgtgacagatgttggtcagcagcagcactttgacatgttttcagtgctgc

SEQ ID NO: 61444 - DNA, 358 bp, Zea mays
ataattctgaaggatatggcttatcatggagtatttttaaagagggacatttgttaagtgggtctgacgatgctcaaatttgcttgtgggacattaaagcaaatagtagaaacaaaagtcttgacgccttgcagatttttaagcatcatgatggtgtcgttgaagatgttgcttggcacttgaggcatgagtacttatttgggtcagttggtgacgattatcatcttttgatttgggacctgcggtctcccgcccctactaaacctgttcagtcagtggtggcgcaccagggtgaggtgaactgcctggcttttaacccgttcaacgaatgggttgttcaactggttctactgacaag

SEQ ID NO: 61445 - DNA, 356 bp, Zea mays
  unsure (1)..(356): unsure at all n locations
tgatggtcaagagatgttgcaaggctgcatctgcagttgtcagcagcanaattagcagcagccacagcaagaggcaatagaggaatccatgtgctgtttgtgactgattgcttcccaattccaaacctcttctcttgcaaggacctagtgaaacgtgaaggcaatgcttggatgtancaaactgacgtgaaggctctaaaggagaagctcaggctgcctgttggttcctgtgagcttgctgttccactcaacgcaaaagcacgactctacacggtagacagacgcagagaagcatatgctacaatacttcattcagcaagtgaatatgtntgcggtgcgaaacagcagctcaaagc

SEQ ID NO: 61446 - DNA, 301 bp, Zea mays
  unsure (1)..(301): unsure at all n locations
cacaacccagtcgctncaaaccctagagctctcgcctgctcgcctccgccgccggagcgagctccccatcttcatccgtcaaccatggcgacccagatcagcaagaagaagaagttcgtcagcgacggtgttttctacgccgagctcaatgagatgctgacgcgggagctggcggaggatggccactctggcgtggaggtgcgcgtcacgccgatgcgcacggagatcatcatccgcgtcacgcgcacgcagaacgtgctcggcgagaagggcgcaggatcagggagcttacttccgtcgt

SEQ ID NO: 61447 - DNA, 316 bp, Zea mays
tcttcccagacacgggagctgtagaggggacctctgctgcagatgctaggggggctactaggcccaggcagtcttgggacttgggtctgtcctgctgtgcgtccatagtgggtgctttagaaacgggaggcccacccgaagcctctgttgcaagtgaggacaaagtgtgggaaggtcgtgagggtctgcagtccgagatggccttgtcctcaacgtgcagtgcagtgttgatgtggggctagaggctgggatctgggggagccaccctgagggcaatgtctgcctggtgctgtacctgcttgtttcacagcggtga

SEQ ID NO: 61448 - DNA, 359 bp, Zea mays
gctcaacatggacctgttcaggaagtgcatggagcctgttgagaagtgcctgagggatgccaagatggacaagagcaccgtccatgacgttgtacttgttggtggctccactaggatccccagggtgcagcaactgctccaggacttcttcaacggcaaggagctgtgcaagaacatcaaccccgatgaggctgtcgcctatggtgctgctgtccaggctgccatcctgagcggtgagggcaatgagaaggtgcaggacctgcttctgctggacgtcacccctctgtccctgggtctggagactgctggaggagttatgacagtgctgatcccgaggacaccaccatctccaccaagaa

SEQ ID NO: 61449 - DNA, 348 bp, Zea mays
ggctgcatctgcttcttgcctgcttagcctcttggtggtggtggtgctggcggcgctggcctcggcgacgcgtccgttctgctgaacgacacgtccggggagcagaaccagattccgaaccagactctgaatcctaggggcttcgatgtctttgacagcatcaaggcgcaggtggaggcggtgtgcccggggatcgtctcctgcgacgacatcctcgccgtagccgcacaggacggaatggtcgcgctcggcgggccttcgtggacagttgcactggggagaagggactccactgcttcgttcccggcacagacgagcgacctcccgactcctacgtcagcctccagc

SEQ ID NO: 61450 - DNA, 354 bp, Zea mays
gctcaagacaaagatgagctatactttctggtcgaagaatacataccgaatgttgaaagcttggagaaatgtattaatgtctctcgactcgattggtcctcgtgtatcaagataattcaggggatagcaaagggcttacattgcttacataagcatcatattctctatatggatttgaatccagccaacatcctcgtccgttcagatatgaatcctgtggtcatcaattatggatcatcaatagtgctggatcgtgatgatgataaggtcaccggggatgccgtagcaggcacactgggttatgtcgctccagaaaaacttatggaagcttatgcacaatgatgtctgatgtgt

SEQ ID NO: 61451 - DNA, 354 bp, Zea mays
  unsure (1)..(354): unsure at all n locations
gagggaggcggcatcggcgtcgccatcgaaacggcgacgtcgcacatcaaggtggagcccgcggccggcggcgggagcgtggtgaaggtcgaatccacttacaagctgctgccgagcgtggaggtgaaggacgagatcgccaaggccaaggagtccgtcaccgccatcttcaagggtgccgaggcctacctcgtcgccaaccccgacgcctacaactaaaccagtggactgggatgagcttcatttcccttgcggcttgtttggatatagaagggtattgtgtacggagattgggttttctttccccttctttttttttcatacacaataaaataagctgctctanagcagcgt

SEQ ID NO: 61452 - DNA, 299 bp, Zea mays
  unsure (1)..(299): unsure at all n locations
ctgctctcncgcacttccgggtcggcaagagagagcgggggtgcagagagatcgagatccggaggtcgcgagtgggagcgctacaacagcgactgctgcaattggcgngcacggtgacggtccccgggtcgtcgacgccctccacgccgctgctcaaggacgagctcgacatcgtgatcccgacgattcgcaaactcgacttcctggagatgtggcggccctcttccagcctacaactcatcatcgtgcagacgggaccgacaagacataaggtgccgagggtcgatacgacttaaacg

SEQ ID NO: 61453 - DNA, 336 bp, Zea mays
  unsure (1)..(336): unsure at all n locations
cttgatcttgatgagacacttgtgcattcaactcttgaacactgtgaggatgctgatttcacatttccagttcattttaacttcagagagcacacaatatatgttcgatgccgcccctatctcaaggaattcttggatagggttgccagcgtgtttgagacaattattttcactgctagtcatagcatttatgcggagcaacttctcaatgttcttgatcccacaagaaagttgttccgtcatcgtgnttatcgtgaatctcgtgtctatgtggagggaactacatgaaggtctgacagtacttggacgtgacttactcgcgtaatgatgttgaca

SEQ ID NO: 61454 - DNA, 330 bp, Zea mays
gttgttacagtttgccctactatggctttaggaccgctcttgcggcctatgctcaatgtcagccatgaattcctcatgtacattattaaaggaggtcctactatgatgaagaacattccatggcacatagttgatgtccgagatgtggttgatgctttgcttatggtatacaagacagaggaatcgacagggagatacatctgtgcaccagattgcatcagtgcaaaagatctggtgaacatgctgaagagggattatcctaattacaattatgtaaactgcgacaatgatatggtgcttaactctatagttacaccacttatgtcggag

SEQ ID NO: 61455 - DNA, 333 bp, Zea mays
  unsure (1)..(333): unsure at all n locations
tgcgcataaaagctgctgttgatgccaggaatgggagtggatctgatattgttattgtggcaaggacagattctcgtcaagctttgtctcttgatgaagcattatggagagtgcgggcctttgctgacgctggagcagatgttctattcattgatgcacttgcctcaagagaagaaatgaaggcattttgcgccatcgcacctggagttccanaaatggccaacatgttagaaggtggtggtaaaactcctattctgagccctgttgaactggaagaaataggttataaaatcatagcctatccattatctctaattggtgtatcgatgcgtc

SEQ ID NO: 61456 - DNA, 345 bp, Zea mays
  unsure (1)..(345): unsure at all n locations
gtcgagaatggtgtccctactggctcatcaagaactcatggggcgctgactggggtgacgagggttacttcaagatggagatgggcataaacatgtgcggtgttgctacgtgtgcatcctaccctgttgttgcatgaggctcttacggattgtcacatggtctgtttggcatcaataatgcatgcatgtatggcctgagcttggtggatgggctatacagaacgggaactccgttgtgaatagagatcgtgaagggaaggaattacttagcccctgcgtgtacgtctcnctcgtatggctgtgtaggtagatgtcggttcgngatccgaatactcaaacgtcgtc

SEQ ID NO: 61457 - DNA, 313 bp, Zea mays
tccgcctccgctgccgatcgccgtccccgaccgcagtgcaggactgaggatgagtgaagaggataaggctgctgcttctgctgagcagcctaagagggcacctaagctcaatgaaaggatcctctcctctctgtccaggaggtccgtagctgctcatccatggcatgatctcgagatcggtcctggtgctcctgctgtattcaatgttgttgttgagatcacaaagggaagcaaagtcaaatacgagcttgacaagataactggactgattaaggttgatcgagtcctttactcatcagttgtataccctcac

SEQ ID NO: 61458 - DNA, 53 bp, Zea mays
tggtgtcacgagaagtagtataagtccgacatccacaatgtctctaatgctag

SEQ ID NO: 61459 - DNA, 351 bp, Zea mays
gcagcttgtagagattgagaaggttgttctacaccctaactactcccaggtagatattgggctcatcagactcaaacagaaggtgtctgttaatgagagagtgatgcccatctgcctaccttcaaaggattatgcagaagtagggcgtgtgggttatgtttctggctgggggcgaaatgccaattttaaatttactgaccatctgaagtatgtcatgctgcctgtggctgaccaagaccaatgcataaggcattatgaaggcagcacagtccccgaaaagaagacaccgaagagccctgtaggggtgcagcccatactgaatgaacacactttgtgctggcatgtctaagt

SEQ ID NO: 61460 - DNA, 260 bp, Zea mays
tgcgtgcggacgcgcacccgagcaagtaccggggcaggacgccggagaagcacttcaccctgcacaacgactgcgtgcactggtgcctgcccggggccattgatacgtggaacgacatgctgcttcatatgttgaaatgatcatcagtaatttgaattaataatgccaaaccagtgtggctgtgtagtgtgtacaatacggtgctccctctgttgacaagtatatgatgactttgacgttttttcttcaaaaaataaaaa

SEQ ID NO: 61461 - DNA, 260 bp, Zea mays
  unsure (1)..(260): unsure at all n locations
cggcganatggcccccaagcgaagtggcaaggcgccggtgccggccaagaagaagaccgattaagttgagaaccctctatcgagaagaggcctgagcagttcggcatcggcggcgcgttgccgccaagaaggacctgcaccggttcgtcaagtggcccaaggtcgtgcgtatccagcggcagcgccgcatcctcaagcagcgcctcaatgctaccacggcgctcaaccagttcacccgcaccctcgacaagaacctcgct

SEQ ID NO: 61462 - DNA, 340 bp, Zea mays
ccagctcctgtgcctgccagtcggtgccctcccgctccagccatgctctccgccctcgcacggcctgtcagcgctgctctccgccgcagcttcagcacctcggcccagaacaatgctaaagtagctgtgctaggggcctctggaggcatcgggcagccactttcacttctcctgaagaacagccccttggtgagacgcctgaccctctatgatatcgcgcacacacccggagtggccgcagatctgagccacatcgagaccaaagccgctgtgaaaggctactcggacctgaacagctgctgactgcctcatgcgtgcagcgactatgagctcgtcgacc

SEQ ID NO: 61463 - DNA, 290 bp, Zea mays
atagtctaaagtcgcctcacccgtccggctcgagtggactgcatcgaggtcagcgccctgcagttcggctacgaccggcagccgccgctcttcgcgcgcttcaacctctgcgtcgcacccggctcccgctgcctcctcgtcggcgccaacggatcaggcaagaccacactcttgaagattcttgcgggaaagcatatggttggaggaagagatgtggtccgtgtcctcaatggttccgcttttcatgatacacagctagtgtgcaatggtgacctttcgtacttgggtgg

SEQ ID NO: 61464 - DNA, 359 bp, Zea mays
gccaagtggcaccgacgcagtcagcagtatcaggaccgtagcttctttctgtgctgagaaaagagtgacgacgatttacgatgacaaatgtgaagcctcgaagaaactaggggtcagaacagggatggttggaggcctcggtttcggcttctcgttcttgatgctgtaccttacatatggactttgtttctatgttggagcgcagttcgttcgtcacaacaagtctacttttggggacgttttcaaggtgttttttgcactgatgctggcgacaattggggtgtctcagacaagcgcgttggcttctgattctacgaaggccaaggattcagccgtctccatatttgcgttgctggaca

SEQ ID NO: 61465 - DNA, 397 bp, Zea mays
tcgatgagcgtagtaactcggaaccggctcgaggccgcaagactcgcgacggacggagcaacggaggaagcaactacgcggcaccatggtgaacgttccgaaaaccaagaagacctactgtaagaacaaggaatgcaggaagcacaccctgcacaaggttacccagtacaagaaaggtaaggatagcctttcagctcaagggaagcgacgttatgaccgcaaacagtctggatatggtggtcagacaaagcctgttttccacaagaaggcaaaaacaacaaagaagattgtgctgaagctgcagtgccagagctgcaagcactactctcaacacccgatcaagaggtgcaagcactttgagatcggtggtgacaagataggcaagggaactctctgt

SEQ ID NO: 61466 - DNA, 350 bp, Zea mays
cacaagagcgtaaagtacaatgtgtgggcaagcatcaccaacggaaaccaggagctttgatgttgctaaccaagaagctcattcaaagggatctgcatgcccaatattcttgttcttctcagtgaatacaagtgggcagtatgttggtgttgctgaaatgactggcgccgttgattttgagaaaaccctagagtattggcaacaggacaagtggaacggctccttctctgttaagtggcacattgtcaaggacgtgcccaacaatattctcaagcacatcatcctggagaacatgagaacaacctgtcacaacagccgtgacactcagagtacgctcgaaaaggcttcag

SEQ ID NO: 61467 - DNA, 360 bp, Zea mays
gtgaccacaccgtgccaatctacgagggatacgcggtccttaatgcacatctaaggctggatcttgctggtcgtgatctgactgactgcctaatgaggatcctcacggaaaggggttattccttcaccacgacggcagaacgggaaatcgtgagagacataaaggagaagctggcctttgtcgccctagactacgagcaggagctggagaccgctaagagcagctcctccgtcgagaagagctacgagctgcccgatgggcaggtcatcacgatcggcgcggagaggttcagatgcccagaggtgcttttccagccgtcgctgatcgggatggaactctcggcatccacgagaccactac

SEQ ID NO: 61468 - DNA, 344 bp, Zea mays
ctccattgcatgggcgcctcatgaaccttgggctaatgcttggctagctggtcaatcagacgggaccatttcagccttcgttgctcgttctgatggaggttgggacaccacacgtattgaccaggcacatccggttggtgtgacctcagtttcctgggctccagcaatggcaccaggagctctaatcagcgcaggatcttctggccagtttgagtatgttcagaaactcgcttctggtggctgcgacaacacggttaaggtgtggaagctcaacaacgggagttggcggatggactgttaccctgccctacagatgcacaaggactgggtgagagatgtcgcgt

SEQ ID NO: 61469 - DNA, 361 bp, Zea mays
ctccttttgctcggaacgcacacaacggccgttcccgatctccgagtccctcgtcgattcaaagattcaagatctcggtacagaccctcattggaagaactatcaccttccaggtggagtcctctgacacaattgacaacgtcaaggccaagatccaggacaaagagggcatcccccggaccagcagcggctcatctttgctggcaagcagctcgaggacgggcgcacacttgccgactacaacatccagaaggagagcatctccaccttgttctccgcctcagtggaggcatgcagatcttcgtcaagacctcactggcaagactatcacctcgagtggagtctctgacacatcgacacg

SEQ ID NO: 61470 - DNA, 296 bp, Zea mays
ggcgcgccgaagcagaagtggacgtcggaagaggaggatgcgctccgccgtggcgttcgcaagcacggcgccggcaaatggcggaccatccagaaggacccccagttcagcccgatcctctcctcccgctccaatatcgacctcaaggacaaatggagtaatttaagtttcagtgcaagtggactgggatcgagtaaagtacgggttccaaagataactggatcctcatcttcaccatcatctagctcacaggctctgcttctcccagcggcaaataatgttacagaagctatgct

SEQ ID NO: 61471 - DNA, 348 bp, Zea mays
tgtcgtcaaggccatcgagaaggtgggcacccgcaacggctccacctccaaggtggtcaaggtcgctgactgcacacagctctcctagatctctctgatctggtctgttcggccgccctccctccgtcatcgtcgactccccctgcgtccgttcctttggatctgaataagatggtggtgatctgagtggtggtcttagtttatcatgtatcgctcgcagtttaatttagcggtttaggtgtggatctgtgaaccccatggcgcctctgcttgattcgtgtttcacctgttatgttctgagattcatgataatgctatgagaactgaaattcccgtttcatgcttctt

SEQ ID NO: 61472 - DNA, 337 bp, Zea mays
  unsure (1)..(337): unsure at all n locations
ccatcttcggcgggcgtggcatgccgggacatggggaaaggacttgttgcagaggtctatgactgacacaacatggttggaccaggagctgcgctnggaggcggggctctcgtgtaccagagcttctgtgctgctgaagacgctgtagctacctcgcccaaatctgtatatcactgctntgacggcgagaacgtggagagtgctcctcctcctatgaagaaggactacaagctggctaatcttctctgctgggaggaggaagcggatgccatggaggagaaggctggagtgcttgatgagtaagacgggcttctggggtcgattncttctgagttgt

SEQ ID NO: 61473 - DNA, 332 bp, Zea mays
gcagcaccaactaccccagcctcggaaggaactttcagaagcggaagaattttaaggcgttgctttccatccttctggcgcggggtcgcttggatccataacaatggtgaaggctgtgtgtgtttgtagcacgatgtgtcaaggcacatcttttcaccaagaggagatggcctaccgctgtcaccggaagtgtctcatggctcaaagctggcctccatgggttccatgtacatgcacttggtgacaccaccaatggatgcatgtcaactggaccacactacaatcctgcgagctaggagcatggggcacagaagatgagaacgccatgtggt

SEQ ID NO: 61474 - DNA, 182 bp, Zea mays
atttcatcccagaggttcaaaaactcatcgcggaattgaatgaaattttggcacatgatgttgttgatgaggcaggggcctggaaaagcaagcttcagcctgaatcaagggagctgtttgagactttgcccaatactattcaggagcaacttatgcttgaaagggatccccatggcaatgtt

SEQ ID NO: 61475 - DNA, 311 bp, Zea mays
gaggaaagcagttggaatttggggatgcaaggactgtgggaaggtcaaggctggcggtgcttacaccatgaacactgctagtgcagtcactgtcaggagcacgattcgtcgcttgagagagcagactgaagcatgatttagcttgctacatcagggttctcctagttgctgttgtcgggaatgttgagctcctctagttggatcacgagactcgctaaaagttgggtgctaagatttgtagttggttaccgttgcgaatttctcaagtgatattatcctatgcttgtctcaatgactcaaatttggttgtg

SEQ ID NO: 61476 - DNA, 327 bp, Zea mays
  unsure (1)..(327): unsure at all n locations
cgcgagcggcgctccggctgcaccgcgctcgctccgagtttcatgctcgtgctaagctagcgccgtcgtcgtctcccttcagtcgccatcatggttatctattccganctcatcagccacgatgagatgttctccgacatctacaagatccgggagatcgcggacgggttgtgcctggaggtggaggggaagatgttcacgtaggacagaaggtaacattgatgactcgctcattggtggaaatgcctccgctgaaggccccgagggcgaaggtaccgaaagcacagtaatcactggtgtcgatattgtcatgaaccatcacctgca

SEQ ID NO: 61477 - DNA, 356 bp, Zea mays
caaggaaggcgtggaggtgctgcagcaggccccgttccacgaggatgccaagcttggcaagggccacttcacttccaaagtttatcatctgcaaagattccgtcatggatgaagggctttgcacctgccagcgccctcgcggtgcacgaggactcgtggtgtgcgtttccaaagagcagaacagtgatcaagtgcccgctcttcagcaagtgctcactcaccattgacactgtcaccaggcccgacaacggttgctctgaaaatgcgcacggtttgagcggcgagcagttagccgcgagagaagtcgagatcatcgacatcgcttccgtgtcgcgggactactggagcaagcgatc

SEQ ID NO: 61478 - DNA, 343 bp, Zea mays
tgcaactatggaaggcggtgaaattctgggtataatgcaccaaagaattttgcgccagataacacagggaagttactctggcaagtatttggcatccaagctgcacagctatgcctctttggtatccaagaacatgaggatatcatgtgggatgcatttcagagttcaggaaaggggaagatctcagttctatatccaaacaagactaccacccccaagtcagttaaagaccttgaatttgatggtttctccttgactactgaccttcgtgagaatttgccaggacggactttcaattttgttttgcttgatggcactggagcaattctgctgcactgtacag

SEQ ID NO: 61479 - DNA, 356 bp, Zea mays
cgaagtgaacaagcaaggaagagccatggcgagcgagcacgcggcgggagggcgatgctaagcatcaccagaagcagagcctgatggacaaggcgaaggggttcgtcgcggagaagatcgcgcacatccccaagcccgaggccacgctggacggcgtgacgttcaagggcctgagccgggagtgcatcacgctgcacagcagcgtgaacgtgtccaacccctacgaccaccgcctccccatctgcgaggtgacctacacgctccggtgcgccggcaaggaggtggcgtccggcaccatgccggaccccggctggatcgccgccagcggctccaacgcgctggatgatccccgccaa

SEQ ID NO: 61480 - DNA, 343 bp, Zea mays
ccaaggatgacttggctgtctacacttcgttttcggctgctccctcgtccaagtatatcaacgtagcaaggtggtataaccacattgatgcgctcgtgaggctgagcggagatactgcagatggccaaagtgtgaaggttgaattcttagcagttccttcagccccaactccagatgttgctgaagcacaggccccagttgctgaggaggacgacgacgatgatgttgacctgtttggtgaggagacgaagatgagaagaaggctgctcgagagcgtgctgcagctgccaaggcttctggcaagaagaaagatctggtagtcatcagtctacttgatgtgaag

SEQ ID NO: 61481 - DNA, 99 bp, Zea mays
tgttgctgtcattcacgtaggagcacagacagaaactgagctccaggaaaagaaattgagggttgaggattccctgaatgctacaaaggcagcagtcga

SEQ ID NO: 61482 - DNA, 297 bp, Zea mays
atcctgtttgacaatatcttgattgctgacgatgagaaggttgccacctccattctggagagacctggaagcccaagtatgatgttgagaaggaacaggagaaggctgaggaggacgctgctgctggtgcagatggtctttctcgagaccagaagaagatttttgacgtcctgtacaagattgctgatgttccgttcttggcaccctacaacaccaagatcattgatgttatcgagaagggagagaagcagcccaacatcactattggcattctggtctccgttgtcgtcgtgttcg

SEQ ID NO: 61483 - DNA, 254 bp, Zea mays
tgttctgtcaggtgtcgccgttgggtgtgggtggcaagaattcgtagcctacgtgaacattggctgctactacatagttggtgttcccctcggcgccatcctcgggtttgtcttcaagttcggcgtaaagggcatttggagtggcatgattggaggaactttcatgcagacggctatcttattgtgggccacctgagaactgattggaacaaagaggtagaggaagcacagaaaaggctacacaaatgggagga

SEQ ID NO: 61484 - DNA, 255 bp, Zea mays
gaggattcggctttcgacacttgacacggcgcgtgtgtacacgcactcatatccattgctcttcctcagcccatcaggagttaaaaagatgggtgagctccaccttgccatccggttcacagtcacatcccttatcaatgtgctcttcacatactctaggcctctcttgcccaagatgcactacgcacagccttgtcaatagttcagcaggaaatgctccgccaccaagctgtgctgcttgttgcgcacgcctgg

SEQ ID NO: 61485 - DNA, 256 bp, Zea mays
attctagggttttgctgctctccgaccccgagctccgaaggccgcagcatcaggcgcggcccccctcgcgtgtgaccgagatggcgctgccgaatcaggggaccgttgattaccccagcttcaagctcgtcatcgtcggcgatggtggaactggtaaaactacatttgtgaagaggcatctcactggagagttgagaagaaatatgaaccaaccattggtgtggaagttcatccgttggatttcaccactaactgt

SEQ ID NO: 61486 - DNA, 255 bp, Zea mays
gctgatcttcagggcgacgaggatcaagcttacaggaaaatcaggctccgtgctgaagatgtgcagggcaggaatgtgctcacaaacttttggggcatgaattttaccactgataaactcagatccctagtgaagaagtggcagacattaatcgaagcccatgttgatgtcaagacaaccgacaactacatgtgcgtttgttctgcatcggcttcaccaagaggcgcccaaaccaagtcaagagaacctgctatg

SEQ ID NO: 61487 - DNA, 257 bp, Zea mays
tgctctcaaggccagcaacattctcctggacgtggacatgatacccaagatatcagattttggaatggcaaggatgtttggaggggagcataaccaattcaacacgaatcgggtcgtcggtacatttggctacatgtctcctgaatacgcaatggaaggcattttttcagtcaagtctgacgtctatggcttcgagtcctgatcttggagatcatcacaggaaagagggctgtgagcttccactgtcacgaggactc

SEQ ID NO: 61488 - DNA, 258 bp, Zea mays
gcgtggagacctacaagatctacatcttcaaggtcctgaagcaggtgcaccccgacatcggcatctcctccaaggccatgtccatcatgaactccttcatcaacgacatcttcgagaagctcgccgcggaggccgccaagctcgcccggtacaacaagaagcccaccatcacctcccgcgagatccagacctccgccgcctcgtcctccccggcgagctcgccaagcacgccgtctcggagggtaccaaggccgtcac

SEQ ID NO: 61489 - DNA, 256 bp, Zea mays
ctcacatcaatctctcagaccgtctgaaccaggtgctccggtgggctctcggttcagtggaaatccttttcagccggcattgccccctatggtacggctacggaggacgcctgaagttcttggagagattcgcatacatcaacaccaccatctacccgctcacgtccctcccgctcctcatttactgtatcctcctgccatctgcctgctcacggggaagttcatcatcccagagatcagcaacttcgctagtatc

SEQ ID NO: 61490 - DNA, 252 bp, Zea mays
gagcgagcgagcgaggcacacggagctagctaaacagagcacacggatagaaaagcaagatgtcggacggcacggcgacctgcatcgacatcatcctcgccattatcctgccgccgctcggggtcttcttcaagttcggctgcggggttgagttctggatctgccttatcctcaccttcttcggctacctcccggcatcatctacgccgtctgggccatcaccaagtagccggccggtgcgttacatgcaat

SEQ ID NO: 61491 - DNA, 252 bp, Zea mays
ctctttgcaaccaaatgctggtgctgcaggagagtatgctggattgatggttatccgtgcttaccacaactcaagaggagaccaccaccgcgatgtctgcatcattcctgtctcagcacacggcacgaaccctgcaagtgctgctatggttggaatgaagattgttgctgttggaactgatgccaagggtacataaacatcgaggaattgaggaaagctgcagaagcaaacaaggacaacttggctgctctg

SEQ ID NO: 61492 - DNA, 253 bp, Zea mays
ggtcttgttatctctggagccatccgtgtccacgaggacatgcttcttgccgcctcggaagcactagctgctcaggccacacaggagaacttcgacaagggatcaatcttcccgcccttcaccaacattagaaagatctctgcgcgcattgccgcagccgtggctgcaaaagcttatgaactcggtttggcacccgtctgcctcccccaagggacctggtgaaatatgcacagagctgcatgtacactcctgt

SEQ ID NO: 61493 - DNA, 250 bp, Zea mays
cattccgctacctgacacgaaagcaaggcagcatatgtttaaggtccatctcggggatacaccacacagcttaactgaaagcgatttcgagagcttggcccgtcgaacagatggattttctggttctgatgttgctgtttgtgttaaggatgtcttatttgaacctgtgcgcaaaacacaggatgccatttcttcttcaaggcagacggtgacatgtggatgccatgtggaccaaaacaaccgggcgctg

SEQ ID NO: 61494 - DNA, 251 bp, Zea mays
ccaaagtacagcttgaagcctcttgttccacgcttgtctgagcatttggagttgaagtcgtgatggccaatgattgcattggtgaagaagttgagaagttggctgccgctttgccagaaggtggagttctgctcctagagaatgttagattctacaaggaggaagagaagaacgaacctgagtttgctaaaagctagcatctgttgctgacctttatgtcaatgatgcttttggcacggcacacagagctc

SEQ ID NO: 61495 - DNA, 254 bp, Zea mays
ggatgtagtgacggaggtgcagagggcactatgccgtacgttcctgaacttcactggcaacatcgaggaagaaagtgagctggaaaccctcatagacatgcagcttgtggagctccgcaaggtgttcaggataccccataagcctttcgatgaaacgcagggccctacctccaagaagctcctaactctcttcgatcagggaagcttgggccgttcatcctcgacgaccttcctgatggatctgagaaataacc

SEQ ID NO: 61496 - DNA, 251 bp, Zea mays
ggatactgacagtacttgcacaagactcgtgcgcaagggctttgtccgtatgtctgatattaagttcccccttccataccgtccagattcttttaatcttgttattgtgtcagatgctttagattatctgaccccaaggtatctgaacaaaacacttcccggtttagcaagggtttccacagatggcctgtgatttttgctggcaatcctggtcaacagaaagctaaggtctcagaactaccacaatttgg

SEQ ID NO: 61497 - DNA, 249 bp, Zea mays
gctcgaccttccctccggcggacacctcactcacgggtactacacggccggcggtaagaagatctccgccacctcgatctactttgagagcctgccgtacaaggtgagcgccgcaacggggtacatcgactacgagaagctcgaggagaaggcacttgacttccgccccaagctcatcatctgcggtgcagtgcgtacccgagggactgggattacgccaagctcagggccgtcgccgacaaggtcggg

SEQ ID NO: 61498 - DNA, 244 bp, Zea mays
caaatgcaaggcagatccgagctactgggacaagatctcacagggcggcttgcagagaatctatgagaagtacacctggaagctctactccgagaggctgatgaccctgaccggcgtgtacgggttctggaagtacgtgagcaacctggagaggcgcgagacccgccgctacatcgagatgttctagccctgaagtaccgtagcctggcaagccaggttccgctgtccttcgattagtacgggg

SEQ ID NO: 61499 - DNA, 248 bp, Zea mays
ctctcctgcgctgcgccgtccttcacctccgccgccgaatccaagactctgatctcgggttcaccgcagcgcacagagttaccccgactgccgtcccgatacgcgctctcctctacgacgcttcagtcatggcaggaatggcacccgaggattctcagtttgatgctaagcactatgattctaaaatgaggagctgctgagcactggtgagactgaggagttcttcacttcatatgatgaagtttttg

SEQ ID NO: 61500 - DNA, 250 bp, Zea mays
ggaaacactagccgccatatctcacgatccactcgagcaccaagccgagggaaggtgaggagcgatggcgcgcggcgtggtgtcggcgaagggcggcgcggtcgcgggcaagaagaaggggtcggtttccttcacgatcgactgcaccaagccagtggaggacaagatcatggaggtcgcctcgctcggaagttcctgcaggagcgcatcaaggtcgccggcggcaaggctggcaacctcggcgactccg

SEQ ID NO: 61501 - DNA, 247 bp, Zea mays
gcacttccacgcctatcatgatctctccttcagccatgcagaaaatggctcatcctgatggagatcttgccacggcaagagctgcagcttccgcaggtacaataatcacactgtcctcatggtctacttccagcgttgaagaggccatcccagttgggccgggcatacgtttcttccagctacacgctacatggacagcaatatcgtacggcaactcgtgaagagggctgagatggctcgcttcaag

SEQ ID NO: 61502 - DNA, 243 bp, Zea mays
gttccagaccatagacactgacaacagtggcgcaattacctacgatgaactacaagaaggattgcgacaatatggttccacactgcaaggacacttagattcgtgatcttatggatgcagctgatatcgacagcaatggaccattgactacattgaattctcggtgcaactttgcatctcaatagctggaccgcgacgaagatctcgtgacggccttttcatatgtcgacacagatggtagtg

SEQ ID NO: 61503 - DNA, 242 bp, Zea mays
gtcagctaggggacgaagtcaggaagcaggagctgaagctcgactcaccagtggtagagaacggtgagaactggagcgtgggccgcgccactcgtgtgccttggcagggtgatcctgaaacggagcaaggttcttgttctggacgaagccactgcctcggtggacactgcaaccgacggctgatccagagaacgctgaggcggcagttcaaggagaccaccgtcatcacgatagcgcacagg

SEQ ID NO: 61504 - DNA, 247 bp, Zea mays
gtggatggtgccacagctcatgatcctggggctgtcggaggccttcaacctcatcagccagatcgagttctactacaaggagatcccggagcacatgcgcacgtgagccggggcgctcgccttctgaaacctggcgctcggcaactacgtcagcggcttcctggttaccatcgtgcaccggacgcggggtccgggcagaactggctggcgcaggacctcaacaagggccgcctcgacctattctact

SEQ ID NO: 61505 - DNA, 241 bp, Zea mays
gcggtgggtcaaggagtacgtggacatctactaccctaacgacggcgagctccagcgtgacgtggagctgcaggcgaggtggaaggaggtgcgtgaggaggcgcacggcgacctcaaggaccgagactggtggcccaggatggacaccgtccagcagctggctaggacgtgcacgaccatctctgggtggcaccgcgctgcacgcggctgtcaactttggccagtacgcatacgccgggta

SEQ ID NO: 61506 - DNA, 242 bp, Zea mays
cacacactcgagaactccatttcgatctcatttgaaatcaacccatcctcgtttcctccgtctagcagcctctcaccctcatggccaagatcaagatcgggatcaatgggtttggcaggatctgaaggctggtggccagggtggccctgcagagcgacgacgtcgagctcgtcgccgtgaagaccccttcatcagcaccgattacatgacctacatgttcaagtatgacactgtgcacggac

SEQ ID NO: 61507 - DNA, 242 bp, Zea mays
agcaccttcccaaaaaaatcccccattttcttcgaggcgaggagagcgtgaaagacagggcaccggcagcgacgatgtcggggcgcggcaagggcggcaaaggtctgggcaagggcggacaaagcgccaccggaaggtgctccgtgacaacatccagggcatcaccaagcccgccatccggggctggctcggaggggcggcgtgatacgcatttcggggcttatctacgaggagacccgcgg

SEQ ID NO: 61508 - DNA, 243 bp, Zea mays
ctttctcgcctcttccgcaccgcttctcgctccggattccggataccctctgctcttttcctaacgatggttgccatggtggggatgtgtaaggtcgtctgctcaggcgccgccaagaaggccacgtccaggagctccaaggctggcctccagttctccgtgggaaggatcgccaggttctcaaggccggcaagtaatgccagagaatcggcgccggcgcccctgtctacctcgctgccgtgc

SEQ ID NO: 61509 - DNA, 238 bp, Zea mays
gttgatgacagcaatttgatcatcaaggcactcaacctttaccgacagaaaactgggactaataacttcttctggatacatcttgataagaaggtcgcaactggtgctggtcttggtggtggaagcagtaatgctgcaactgcattatgggccgctaaccagtttgctggctgcatacttcagagaaggatcttcaagagtggtctggtgagattggatcagatatcccctttttctt

SEQ ID NO: 61510 - DNA, 130 bp, Zea mays
attgctcatacccagatctagtaagatgcacggttttacgcaggagatggctcaccagatggagattcaggtcaatggtggtaccattgctgacaaggtggactatggctacaatttctttgagaaagag

SEQ ID NO: 61511 - DNA, 244 bp, Zea mays
gggtttttgattttagccgccgccgctgctcatctcacatccctcgagaagacgcctgctcctcgccgatcgatacgatggccgtcttctccgacctccacaccgccgacggcctcaagtccctcgaggctcacctcgccggcaaaacctatgtgtctggtgactccattactaaggatgacttaaggtcttcgccgcggtgccgtcgaagcctggcgctgagtttcctaatgccgcccgctgg

SEQ ID NO: 61512 - DNA, 230 bp, Zea mays
tgtcatcggcagctaccagatctatgccatgccggtgtttgacatgatagagaccgtgctggtgaagaagctgcgcttccctcccggcctcacgctgcgtctgatcgctcggaccctctatgttgcgttcacgatgttcatagccatcaccttccccttcttcggtgggctgctcggtttcttcggcgggttcgccttcgcgccgaccacctatttccttccctgcgtca

SEQ ID NO: 61513 - DNA, 271 bp, Zea mays
ctccagagctcgtcgccaccggccaccgccaccctcgatcacgccgtccgtcgaggtaaggtcagcatggtgagggtcagtgtgctcaacgatgcgctcaagtccatgtacaacgctgagaagattggcaagaggcaggtcatgatcaggccgtcatccaaggtcatcatcaagttcctgacggtcatgcagcgccatggctacattggagagttcgagtacgttgatgaccaccgatcgggcaagattgtggtcgaactcaacgggaggc

SEQ ID NO: 61514 - DNA, 271 bp, Zea mays
ctcgagtctgccaagaagttcgagcccaaataccgcctcatcaggaatggtcttgctactaaggttgagaagtcccgcaagcaaatgaaagagcggaagaacagggccaagaagatccgtggtgtcaagaagaccaaggctggtgacgccaagaagaagtaaacagtcatttatatttctgtattactgtcctgaactctgggtggtcgtctagttgcaatgtcataattatggtcgtgttaggttttgttccgcactcagcagtaagtga

SEQ ID NO: 61515 - DNA, 230 bp, Zea mays
  unsure (1)..(230): unsure at all n locations
ctcatctaaacgctanaaagatatgccacatattgtatcctgtggatgaatcactagatgggcaagtagtccgatgggagcaacaatatncagttgaggacagcctcactacaggacatcagagctcgttttgagagtagagctggcgagtctctcaactgggaggacttctccaccaaagttgctgtgcagatgaatgacactcatccaacactatgtattcctgagtt

SEQ ID NO: 61516 - DNA, 262 bp, Zea mays
acgcatgcgtctgcgagtcactgactgaacatgcagctatctctgagatgtggtatgcacatctcgtcactcttatcggttgctgcgctgaaggctctcacagaatcctggtttacaattacctcgagaacaacagccttgcgcagacattgctaggatccagatacagtaacattcggttcaattggcgggctcgtgtcaaaattgcagttggcattgcctgtggacttgcgtttctccatgaggaaatccgtcctcacat

SEQ ID NO: 61517 - DNA, 226 bp, Zea mays
  unsure (1)..(226): unsure at all n locations
cctctctccatctcnctgctcctccgccttcttcttgatccagccaagccagggatcgccatgtcggactcggaggagcaccacttcgaatcgaaggccgacgccggagcgtccaagacctacccgcagcaggctggcaccgtccgtaagaacggcttcatcgtcatcaagaaccgcccctgccttggaatactgtatctcaaaacctaaatcgaaaaaagaagtg

SEQ ID NO: 61518 - DNA, 265 bp, Zea mays
tgatctcaaggccagcaacattctcctggacgtggacatgaaacccaagatatcagattttggaatggcaaggatgtttggaggggaccaaaaccaattcaacacgaatcgggtcgtcggtacatttggctacatgtctcctgaatacgcaatggaaggcattttttcagtcaagtctgacgtctatggcttcggagtcctgatcttggagatcatcacaggaaagagggctgtgagcttccactgtcacgaggactccttgaac

SEQ ID NO: 61519 - DNA, 367 bp, Zea mays
ctcctcgtctcctcatgggacaagacggtgcggctctacgacgccgacgccaacgtgctcaagggggagttcatgcaccccggggccgtcctcgactgctgcttccacgacgactcctcgggctttagcgccggagccgaccacaccgtgcggaggttggtatttagctcgtccaaggaagatgttttggggcggcatgatggtccggttcgttgcgtggaatactcttatgctgcaggtcaagtcatcaccggcagctgggataaactgtaaaatgctgggatccaagaggagttagtggaccagagcgcacccttgttgggacatatgctcaacctgaacgtgtatattctctttcgttagtagg

SEQ ID NO: 61520 - DNA, 225 bp, Zea mays
cacacacgacgctcaagccgaccccaccgacgtacaccccttccccaaagcctccgacgcccaagccgaccccaccgacgtacacgccttccccaaagcctccgacacccaagccgaccccaccgacgtacactcccacaccgaagccgccggccaccaagccgcccacctacactccgacgccgccggtgtctcacacccccagcccgccgccaccatactact

SEQ ID NO: 61521 - DNA, 267 bp, Zea mays
ttgggcgcagagaatcgccaagcaaacaaacagggtagagggagaggagaggagaggagaggagaggttgggtctgggacaccatggctccgatgaagctgtacggggcggtgatgtcgtggaacgtgacgaggtgcgcaacggcgctggaggaggctggctccgactacgagatcgtgcccatcaacttcgccaccgccgagcacaagagccccgagcacctcgtccgcaacccgtttggtcaggttccagctctgcaggatggtg

SEQ ID NO: 61522 - DNA, 281 bp, Zea mays
cagattgatgatatcgacgtgaggttccagaaagcagccagtggcaccactgggacctaccaagagtggaaggacaaggcccagagtctgtaccaggaactgttgactcaggaaggccaagccagtttccagggactcaaggataacgtgtttgatggcttggtacgagttactcaagaattccatatgatagtcaagcatctgattgactcactcattgattttctgaacttccccagattccagtttccggggaaacctgggatatacactagggagga

SEQ ID NO: 61523 - DNA, 277 bp, Zea mays
ccgcgtcctccgaagcctacggacgcctcatcgccctggtgcccaaggaagatgatactgagatggacgttgatgctgcggctccaacaactcagatttcaatcaaacatggtctccctgagattgaaatatattgctacttgcttgcactgatttttcttattgatcagaagaaatacgatgaggctaaagtatgtgcaagtgtgagcattgctcgcctgaagaatctaaaccggagaactgttgatgtcttggcatctcgtctgtacttttatta

SEQ ID NO: 61524 - DNA, 370 bp, Zea mays
gttttctgaagaagggttttaaggacctttctttattaaataagtccatggacaatgttaaggtttcaattaatggtcatccaatctctgagaaagcccttaagaaggcagagaagaaagctggtcctgttgacccaggtacatattggtacgactaccatgctggtttttggggtgtcattggacgggaatgtattggcattgtccctccatttattagagaatttaattatccgatggccaaaaattgtgccggtggggatacaggtgtttctgtcaatggcagagaactgcatcaaagagatttagatttacttgtaggaagaggactaccacggacatctggcatgtcatattctattgagatgtc

SEQ ID NO: 61525 - DNA, 370 bp, Zea mays
gcctctgcaaggtcatcaaggaggtgctgggcgacaaggtggagaaggtggtggtctccgaccgcgtggtggactccccctgctgcctggtgaccggcgagtacggttggaccgccaacatggagcggatcatgaaagcccaggcgctgagggactccagcatgtctgggtacatgtcctccaagaagacgatggagatcaaccccgagaacgccatcatggaggagctccgcaagcgtgccgaggctgacaagaacgacaagtccgttaaggaccttgtcatgctgctgttcgagacggcgctgctcacttctggctttagcctcgacgatcccaacacctttggcagccgcatccaccgcatgctcaa

SEQ ID NO: 61526 - DNA, 346 bp, Zea mays
ggtccgtctccaactcactagtactcagccgccgcaatcaggggggcaggtagctcgagcgcgcgctccacctgcgccgacgcgatgcgggccaagtggaagaagaagaggatgcggaggctcaagaggaagcgccggaaaatgaggcagagatctaagtaggcgcatcttgtgaccgaggatggcgagcttctcctgcaccatggctgtgacgcgttgggatgattgtctccctttgtagacgtgctttgctgtagacgtaggcgatgtaaaccgtcctttttgattaattctagtatgttctgagactgggtttatattgtaatttgaggataattatatgatg

SEQ ID NO: 61527 - DNA, 359 bp, Zea mays
acgctctctaccgtccgagacgccaagcaccagcgcggcggcgggggcggcggcgaccatggctgtcggaaagaacaagaggatctccaagggaaagaagggtggcaagaaaaagaccgtcgaccctttctctaagaaggattggtatgacatcaaggcaccgtcggtgttcagtgtgcgcaacatcgggaagactctcgtatccaggacacagggtaccaggattgcttctgagggtctgaagcacagagtctttgaggtttgcctagctgatcttcagggcgacgaggatcaagcttacaggaaaatcaggctccgtgctgaagatgtgcagggcaggaatgtgctcacaaactttt

SEQ ID NO: 61528 - DNA, 396 bp, Zea mays
atctgatcatggtagtaagtggaatcggtcgaggccagcaatgacaagagcaggttgccttactgcatcacaaatggcgacttacgatgaggccaaacaggccttaatgaagtggacaccacttgaagaaggttttcagttacatctcatctcgagtttcatagctggaacagctggtactcttgtgaccgcacctgtagacatgatcaaaacacggttaatgctgcaacaggagtccaaaggcgccagagtatacaggaacggattccattgtgcttcccaggttgtggtgacagagggtgtgaagtcactttataaaggtggatttgccacattcgcgagagtaggccctcagacaacgattacctttgtcgtgtgcgagaaactgcgcgaact

SEQ ID NO: 61529 - DNA, 264 bp, Zea mays
acggcatcagcaggcgcaagtgccccggggagacgctcgcgctgcggaccgtcgggctggtgcttgccacgctgctccagtgcttcgactgggacacggttgatggagctcaggttgacatgacggagagcggcgggctgaccatgccccgggccgtcccgttggaggccatgtgcaagcctcgtgcagctatgtgcgatgttcttcgggagctctaatattctggcacatcctaggttctcgctctataggtgaaagtttcat

SEQ ID NO: 61530 - DNA, 366 bp, Zea mays
cttcagccggctcttcgccaagaaggagatgcggatcctcatggtcggcctcgacgccgccggtaaaaccaccatcctctacaagctcaagctcggcgagatcgtcaccaccatccccaccatcggtttcaatgttgaaactgttgagtacaagaacattagcttcactgtctgggatgtcgggggtcaggacaagatcagacctctttgtgaggcattacttccagaacacccagggtcttatttttgttgtggacagcaatgaccgtgaccgtgttgttgaagccagagatgagctccacaggatgctgaacgaggatgagctacgtgatgctgtgctgcttgtctctgccaacaagcaagatc

SEQ ID NO: 61531 - DNA, 359 bp, Zea mays
atggaactgagaaccaccttgttctctgggatctccgcccccttggcttgactggaaacaaggtcgaaaagctatgtgatctttgccacatcacattgaacaagaatgctgtcttcggtgacagcagtgcattgtctccgggtggtgtccgcattggcgcgccacaatgacctcgaggggtctactggagaaggatttcgagcagattggggagttcctccaccaggcagtgaccatctgcctgaacatccagaaggagtacggcaagctcctcaaggacttcaacaagggcctggtgaacaacaaggacatcgagaacctcaaggtccaggtggagaagtttgccgactccttcgaca

SEQ ID NO: 61532 - DNA, 363 bp, Zea mays
  unsure (1)..(363): unsure at all n locations
gtgacatttacagctttggagtcgttctccttgaagcaattaccggaagggatcctgttgactatggacgcccaccaaacgaggtgaatctagttgactggctaaaaatgatggttgccagcaggcggtcagaagaagtagtggatcccaccatagagacacgaccttcgacgagtagctctaaagcgtgcacttttgacagctctgaggtgtgtggatccagattcagagaagagaccgaagatgggtcaagttgtccggatgctggaatcggatgatccaattcctcgaggggacagaagatctaagcaccaccgtggagggagcacagaaatggattcgcaanaggacaacaactccgac

SEQ ID NO: 61533 - DNA, 355 bp, Zea mays
ggaagatctacgacacgctggaggaggacgccttccgccccatcctgcaccactacgacgggcccaagttccggctcgagctctccgtcaccgaagccctcgcgctcgtcgacatcttcgccgacaaggacgacgcctgatccccatcggatctgtcgtcgggccactcgaagctcggatgcacgaatgaatgaaggcacaaacaataataacggatggatgggcatgtatatcgtcatgcgcatgtcccacgacgagacgggagtataccacggtggagtagtattatattaataattaatatagtatgtccacctttgtatgatactactaagggctatgtatttgagcacgc

SEQ ID NO: 61534 - DNA, 258 bp, Zea mays
cacatcgcgtcgcatcccatcccactaccacccatctcgtcgtccgctgattcgatccggttcttccaacccaggggcagtgatggcgacgaagaggagcgtgggcaccctcggcgaggcggatctgaaggggaagaaggtgttcgtgcgcgccgacctcaacgtcccgctcgacgatgcccagaagatcaccgacgacacccgcatccgcgcctccgtcgccaccatcaagttcctcctcgagaagggcgccaaggt

SEQ ID NO: 61535 - DNA, 327 bp, Zea mays
gctggagtggatcatggcggagtagtaaagaacccaggcgtgcaggacaagctttacgaggagatgatggtgaaagccaaagccaccactgacgcttctgctggcgtgctcccgttctcggaggatgacttgcccaagataccctacctgagagcggtggtgctggagggtctccggcgccatccgccggggcaccagatgccgccacgcagggtgagggaggacgtggaggtgggtgactacgtggtgcccaagggctcagcgatcaacttcatgctgtacgacctgggcatggacgacgccacgtgggaccgcccagcagtgttc

SEQ ID NO: 61536 - DNA, 330 bp, Zea mays
ctgtgatgagttgataccagagtatctcaattttatccgtggtgtagttgactctgaggatctgcccctgaacatctcccgagacattgtctagcagagcaaaatcttgaaagtcattcgcaaaaacattgttaagaagtgccttgagctcttctctgagctctcagaagacaaggagaattacaagatattctatgaggcattctctaaaaatctcaagcttggaatccacgaagactccactaaccgccgccgcctgtctgagctgctgcgctatcatacctcccagtctggagatgagatgacatctctgtcagatatgtttctcgc

SEQ ID NO: 61537 - DNA, 259 bp, Zea mays
tggcaagcggcgtgccgcgaggcctgggtggccctgaaccgtctccctctggtgccctcggtcaccagggccgacctccccactagcgcacagctctctgccaggtacaattcggcggtgcgtgatggtgccaagcgcgggaacgccgtggccacctatctcccgctggtgtccactgagcggctcgcccgcgtgttcaggtactccgaggctgacgttgctgcagcaccagagatgcagcccattccttcccagtaga

SEQ ID NO: 61538 - DNA, 256 bp, Zea mays
gtaccttacatcagattcttccaaagcaaaatcagctgcatcttctatatttgcaattgtagatcgaaaatcaaggatagacgcaagtgatgatgcaggggtaactgttgaggcactacaaggaaacatcgtattccagcatgttagcttcaagtatcctaccaggccagatgttcagatattccgggacctttgcttgacaattcatgctggaaagactgttgcactcgttggagagagtggtagtggcaaatca

SEQ ID NO: 61539 - DNA, 259 bp, Zea mays
aagatagagcttcagagagttgttgaatggcccatcaagcatgctgctgcattttctagacttggaataccaccagtccggggggtgctgttgcatggcccaccagggtgctccaagactactcttgccaaggctgcagcgcatgctgcccaagcttctttctattctttgaggttcatcaggaaacaacattttattttacgataataacagttcactatccgttgtgtgaagaacatagaactattagcccacagta

SEQ ID NO: 61540 - DNA, 260 bp, Zea mays
gacgtttcgtgggatcgactcgttggttgacgtcggtggtggccatggtggcgccgccgccaccatcgccgccgccttcccccacctcaagtgcagcgtgcttgacctcccgcacgttgtcgccggtgctccgtctgatggcaacgtgcagttcgtcgcaggcaatatgtttgagagtattccacctgcaaccgctgttttcctcaagaaaactctacatgactggggtgacgatgagtgtgtcaagatattgaagaatt

SEQ ID NO: 61541 - DNA, 372 bp, Zea mays
  unsure (1)..(372): unsure at all n locations
tatgatcttgcgatagngagtcggagatcggctcgagagaatgccctgtgcagaagactatctatccgtggtcctgaaccagttatgtgtgttgcatgagaaaacgccagtaagtgacagagtcaccagatgctgcacagaatccttggtgaacaggcgaccatgcttttcagctctggaagtcgatgttacatacgttcccagagagtttaatgctgaaacattcaccttccatgcagatatatgcacactttctgagaaggagagacaaatcaagaaacaaactgcacttgttgagctcgtgaaacacaagcccaaggcaacaaaagagcaactgaaagctgttatggatgatttcgcagcttttgtaga

SEQ ID NO: 61542 - DNA, 357 bp, Zea mays
  unsure (1)..(357): unsure at all n locations
gttggtgccatgctcccatactggttctcagcgatgacaatgaagagtgttggaagtgcagcactcaagatggttgaggaagtccgcaggcagttcaacaccatccctgggctcatggagggcattaccaagcctgactatgcgacgtgtgttaagatctctactgatgtanctatcaaggagatgatcccacctggtgcacttgtcatgcttacacctcttattgtggggatcttctttggtgttgaaaccctctctggagttcttgctggtgctcttgtttctggtgtccagattgccatctctgcatccaacactggaggtgcctgggacaacgcaaaganatacattgaggct

SEQ ID NO: 61543 - DNA, 354 bp, Zea mays
cttgccagggctgaaagagaaccatcctgtcagccaatcagaaaagcggaatttgactttgagcacaaaagaatgtcaaaggaagagataggagagttgatataccgcgagatactggaatatcacccacaactgctgagtagctacattaatggcacagagaggacaatctttctctacccaaggttttagcttttctgtgtttgcacatgtatgttgctttgcacatgcatgtaattgctcatgtatccattcgtttgaacacttgacggaacagttgctggctacttttatgcagtgctgttgatcaatttaagaagcaattttctcatcttgaagagagtggtggtaacg

SEQ ID NO: 61544 - DNA, 353 bp, Zea mays
gaacaggtgaaactgcacaatcgatcgatgccccaagacattctgtgattcaggggagacgggtagactatgtggaagttcaacatgctttagttgcaacaatatacgagaaatgcaggctcagaaagtcagaggaacacttttgataccatgccgaacagcaatgagaggaagcttcccacttaatgggacgtattttcaagttaatgaggtatttgctgaccattgctcaagtcgaaatccaattgatgtcccacgaagttggatttgggacctcccaagacgaactgtttactttggaacctcagttcctacaatattcagaggtttaacgactgaagagatacacgatg

SEQ ID NO: 61545 - DNA, 251 bp, Zea mays
  unsure (1)..(251): unsure at all n locations
ttggcatccttttatgaacgtgctggtaaggtanaatgtctgggaagtccagacaggaatggcagtgtcacaattgttggagctgtctctcctcctggtggtgatntttcagaccctgttacctccgcaaccctcagtattgttcaggtcttctggggtttagataaaaagctcgctcaaaggaagcatttcccatctgtgaattggctcatttcctattcgaaatactccaaggcccttgagtcttttta

SEQ ID NO: 61546 - DNA, 244 bp, Zea mays
gtcgccgccgccgcagccgccgcagccgcaacaatgccgtcgcacaagaccttccaggatcagagacgaacgtgcgcgaagaccgtgcgccagaagcgccgcatcacctactggatccgcatgcgcactgacaataccatcaggtactacgccaagcgctaacactggtgttgcaccaagctcggcttctgctcgtcgcgatgtgccatctgctgcgtcggaaggctagggtctaagagctatc

SEQ ID NO: 61547 - DNA, 256 bp, Zea mays
caactccttactaaccggagtgtctttgcacacaactactcagttttagttctgggtttcgttgtcctctcttgcttgattgcggtgtctccgaacttcagtccatttcttgtgattggaacaacatccccagtgacgtaccaggtgcttggccaccttaagacatgtctggttctatcatttggctacactctattacatgatcctttcactctaaggaacatattgggcattctaattgccatatgtgggatgg

SEQ ID NO: 61548 - DNA, 364 bp, Zea mays
tgtggagcctgctttgacaatctctaaggttttgctttctatctgctccctgcttactgatcccaacccagacgaccctcttgtccctgagattgctcacatgtacaagacggatcggcctaagtacgaggcgacagctcgcagctggacccagaagtacgccatgggatgaaatgttcggcgttactggctaaatgcagacgattgtggtgttgcccatgaaactgttatcggggacgtatgttcttctgttccttgtgcattctccgatccatctctaggatccgagttctagtccaacattaacctaccattgccttgggtaatgagatgcttgtgcttgctgtggtaactatgctagtgt

SEQ ID NO: 61549 - DNA, 364 bp, Zea mays
  unsure (1)..(364): unsure at all n locations
cttctcaaccggataggtagcaccggagcaggtagaacgctgcacaatccncttcgccgccgccaagatggtgaacgttcctaagaccaagaagacgtactgcaagaacaaagagtgcaagaagcacacactccacaaggtgactcagtataagaagggcaaggatagcctgtctgcccagggaaagcgccgttatgaccgcaagcagtcaggatatggtggtcagaccaagcctgtcttccacaagaaggccaagaccaccaagaagattgttctgaagctgcagtgccagagctagcagcactactcacagcacgccatcaagagatgcaagcattttgagattggtggagacaagagggca

SEQ ID NO: 61550 - DNA, 360 bp, Zea mays
agccaggcgaggctggcgtccaaggcccgcgacatcaaggatgcagcacagcaccgcatcgaccaggcgcaggggtcttgagagaagaaccacactcgagcggaccgcgcgcgcgacctccttgaaccactgccggcgcggcggcatatggcccttaaaggcggtggctgctgctacgtacgctgccgtagagtctcggtcgccgcgatagctctagctagtcgtttatgtgttgtgctttgtgtgtgcatgcttgtgtctgggggcatgcagtgcagtgcagtactatatgctgtatgcgtctctctttgatcggagaggcggatgtacagcatgctcgatatgtctagtttggatgtc

SEQ ID NO: 61551 - DNA, 366 bp, Zea mays
  unsure (1)..(366): unsure at all n locations
atntgatgagctagganaggtanaaatgatcatggccacaaatcgacctgatgttctggacccggcgctcctgcgtcctggacgtttagataggaagattgaaattccgctacccaacgagcaatcaagaatggaagttctaaaaatccatgcagccggtatcgccaagcatggggagattgattatgaagcagtcgtgaaactagctgaaggtttcaatggggctgatcttcggaacgtgtgcaccgaagctggcatggctgcaattcgtgcagagagagattacgtagtccacgaagacttcatgaaggctgtgaggcagctanatgatgcanatagctggaatcgagtgcgcatacagtgcat

SEQ ID NO: 61552 - DNA, 366 bp, Zea mays
cttcatgctctcctcctacgcaccggtgatctcttctgcgaaggccttccacgagcagctgtctgtggcggagatcaccagcagcgcgttcgagccggcttccatgatggtcaagtgcgacccacggcacggcaagtacatggcttgctgcctgatgtaccgcggcgacgtggtgcccaaggacgtgaacgccgcggtggccaccatcaagacgaagcgcaccatccagttcgtggactggtgcccgacggggttcaagtgcggcatcaactaccaggcgccaactgtggtgccgggtgccgacctcgccaaggtgctacgtgccgtgtgcatgatctccaactccaccagcgtcgtcgaggtgtt

SEQ ID NO: 61553 - DNA, 307 bp, Zea mays
ctttcagcgacgagtcggaatcggtcgattgtgtcggacggatgcttcagagtcgagagtgatggggcttgacgcgcgtcgcagatgaagcagggctttgttctgccgaggcactagatggccaacgctgacctgggcaggattatcaactctgacgaggtgcagtctgtggttaagccactcaacaaggaggtgaagcgcatggagaagaggcagaacccgctcacgaacatggctgctgtgctcaagctcaacccctacctcggcactagccggaagatggccaccttgctgaggctgccgagtc

SEQ ID NO: 61554 - DNA, 342 bp, Zea mays
cagagtttcggaatactgggctggagagatcagaggcgctgaaaaatgatctggaatggttcaggcaacagggccacacaattccagaaccatcggctcctggcaccacatacgcttctctactggatgagctgtctgaggaggacccccaggcctttatctgccatttctataacgtgtactttgctcatactgctggaggccgaatgattggcaaaaaggtttccgagaagattctgaacaacaaagagctggagttctacaagtgggagggcaatctctcctagctgctgcagaacgtccgcaacaagcttaaccaagtcgcttcgagctggtctcggg

SEQ ID NO: 61555 - DNA, 363 bp, Zea mays
agcacctccatgacatcaaagttcagccatcgactctgcttccgaaacaaattggtaacatgtatactgcatccctttatgctgcattagcatctgtgctatataacaagcatgatagtctgaatgggcaaagaattgtgatgttctcttacggcagtggtttgacatccactatgttttcattgaggctaaacaatggccagcatcccttcagcctatcaaacattgcttcagttcttgatgtcaccgagaagcttcagtcaagacatgagactttgcctgagaaattcgttgagacactgaagctgatggaacacgatacggcgcaaaggcttcgagacgacagagaccgagctactgcag

SEQ ID NO: 61556 - DNA, 357 bp, Zea mays
ctccgatcctcgtcgccgacgcatccacccgaaccctcctccgcgacctcgccgtcgccgcagccttggccatgtcgatcttcgagtataatgggtccgccgtggtggcgatggtggggaagaactgtttcgcgatcgccagcgaccggcggctgggcgtgcagcttcagaccatcgcgacggacttccagcgggtgttcaaggtccacgacaagctttacatcggcctctctgggctcgccactgacgcccagacgctgtaccagcggttggtgttcaggcacaagctgtatcagctgcgggaggagagggacatgaagctcgacactttgccagcttgtctctgcgctctctacg

SEQ ID NO: 61557 - DNA, 331 bp, Zea mays
ctactacagctcctcatctcaagtgtgtagacgagacagagagacactgagagagcgccatggccagcctccaagtcactcctacttcggcgttcactgagtggaacgagctgaagttcgaaggcctgtacctgttccacacgcccctgggctcaggcgccaaccaagctcgggtcatagacaacaaggcgccgattggcatcggtgccaccgtagttaacaactggacagtgtatgacgggccagggccgaacgcaaagctggttgctcgtgcacagggcttgcatatccaagccggcaactgggtcaactccttcagcctagtgttcgt

SEQ ID NO: 61558 - DNA, 351 bp, Zea mays
  unsure (1)..(351): unsure at all n locations
natagcactgctgggcaagaaaagttcggtggccttagggatggctactacattcatggtcagtgtgccatcattatgtttgatgttcgctctaggctgatatacaagaatgttctaccatggcacagggatctgtgcagggtctgtgagaacatccccattgttctttgtggtaacaaggttgatgtcaagaacaggcaagtcaaggccaagcaagttacattccaccggaagaagaacttgcagtactatgagatttctgccaagagcaattacaactttgagaagccttcctttacctcgtaggagctggcagggtcagaccttcattgttgaagcgttgtctgagca

SEQ ID NO: 61559 - DNA, 341 bp, Zea mays
cagcaccattccccaattatttggcctccgtcagagaggggagaaagacccgttcgaggcggcggcgatgtcggggcgcggcaagggcggcaagggtctgggcaagggtggagccaagcgccaaccggaaggtagctccgcgacaatcatcccagggcatcaccaagccggcgatccgaaggctggctcggaggggcggcgtgaagcgaatctcggggctcatctacgaggagacccgcggcgtgctcaagatcttcctcgagaacgtcatccgcgacgccgtcacctacaccgagcacgcgcgccgcaagaccgtcaccgcatggatgcgtctacgcgtc

SEQ ID NO: 61560 - DNA, 348 bp, Zea mays
  unsure (1)..(348): unsure at all n locations
tgaggcggactttttagatacatagaaaaacgtttgaaggacaatggtcatatggttatcgttgttgctgagggtgctggacagaaacttattgctgaaaccatgcagtcaattggtgaagatgcttcaggcaacgagctgcttcttgatgtaggcctntgggtatctncagagatanatgaacatttcaaganaaacaagatgaccattaatctgaagtacatagatccaacgtacatgatacgtgccatcccaagcaatgcttctgataacgtctattgcacactgctggctcacagcgtggtccatggagccatggctggatatactggttttacattggccagt

SEQ ID NO: 61561 - DNA, 394 bp, Zea mays
agaggtagtagctggattcggtcgatggtggcaggacaagatcaggcccctgctagaggcactactttcagaacacacagggacttatttttgttgtagacagcaacgacacggaacgtgttgttgaggctagagatgagctccacaggatgctgaatgaggatgagctgcgtgacgctgtgctgcttgtatttgcaaacaaacaagatcttcccaatgctatgaatgctgctgaaattactgacaagcttggtctgcattccctgcgacagcggcactggtacatccagagcacatgtgctacatctggtgaagggctgtatgacgggcttgactggctttccagcaacatctccagcaagtcttgacacttttcggcagggctcctagcgag

SEQ ID NO: 61562 - DNA, 356 bp, Zea mays
  unsure (1)..(356): unsure at all n locations
gagacatctttgagacatgctattcagttgctatcacctgccagcgtggtcgcaaagaccaacgggagagaaaagatgtgcaaggctgacctcgaggaagtcagcgggctctatttggatgccaaatcctcggctcgcctgctccaggagcaacaagaaagatacatcacctagacttgcatctcctgctgtggaaggaaaagcctcgaagagaaatgcattctgcaaagtgcgtcgatctgcttcagtatgtcgtagtctacaagtcttggagagagcacgtttctgcggggtcaggaaactgtttgaattttgtagtactgttntgtgttagctccagcgagacttgattcggc

SEQ ID NO: 61563 - DNA, 364 bp, Zea mays
  unsure (1)..(364): unsure at all n locations
tgacgtggtnggccttaccgaatccacgttcgagaaggaggtcggaaaggaccgcggcgccctcgtcgagttctacgccccctggtgtggtcactgcaagaagcttgctcctgagtatgaaagacttggtgcaagttttaagaaagctaaatctgtcttgattgctaaggttgattgtgatgagcacaagagtttgtgcagcaagtatggagtttccgggtatccaacaatccaatggttcccgaaaggatccttggagcccanaaagtatgaaggacaacgcactgcagaagctcttgctgaatttctcanatactgaggaggctacaatgtaaagctggcaaccattcttcaagtgttgtgg

SEQ ID NO: 61564 - DNA, 357 bp, Zea mays
  unsure (1)..(357): unsure at all n locations
cagaaggatcactccaaattcanaagaaagggtgaagatctcttctatgagcacaccttgtctctgaccgaagcactatgtgggttccaatttgttcttacacatctggacaacaggcagcttctcatcaaatcagaccctggtgaagttgttaaacctgaccaattcaaggcgattaatgatgaggggatgccaatttaccagaggcctttcatgaaggggaagctgtacatccatttcacggtggagttccctgactcgttggcaccagagcagtgcaaggctctcgagacagtacttccaccaaggccttcatccaagctgacagacatggagatagatgaatgcgaggagacg

SEQ ID NO: 61565 - DNA, 355 bp, Zea mays
ggaagagccatggcgagcgagcacgcggcggggggcgaggctaagcatgaccagaagcagagcctgatggacaaggcgaaggggttcgttgtggagaagatcgcgcacatccccaagcccgaggcgacgctggacggcgtgacgttcaagggcctgagccgggagtgcatcacgctgcacagcagcgtgaacgtgtccaacccctacgaccaccgcctccccatctgcgaggtgacctacacgctccggtgcgccggcaaggaggtggcgtccggcaccatgccggaccccggctggatcgccgccagcggctccaccgcgctggagatcccgccaaggtgcctacgcgtgctcg

SEQ ID NO: 61566 - DNA, 336 bp, Zea mays
gtcgcttccagccgccgccgccgcgtccgcctcgcccagcgcagagccgccgcagcacatcgctatctcgatctcagccatggcggagatggagcagcaacaggacacgccgaagctgttcaaccgctggaccttcgatgatgtccaggtgaacgacatctcgctgaacgactacctcgctgtgaacgcgacgaagcacgcgatgtacctgccgcacaccgcggggcgttactccaagaagcggttccgcaaggcgtagtgcacgatcgtcgagcgcctcacaaactccctcatgatgcacgggcgcaacaacggcaagcaggtcatggctgtccg

SEQ ID NO: 61567 - DNA, 360 bp, Zea mays
ctcgcaccgtcgccatggacgcgatcgacagcgtggtcggatccctccgcgacttcgccaaggacagcgtccgcctcgtcaagcgctgccacaagcccgaccgcaaggagttcaccaaggtggcggcgcggacggcgatcgggttcgtcgtcatgggcttcgtcggcttcttcgttaagctcatcttcatccccatcaacaacatcatcgtcggttccggctaggcttacaggagtacagggcgactagcatgggagcagtgcaatacttttgggagcaatagataacgaggatcctggtctttcgaatagtattgttaatcgaatttttcgttcggttgtgattctgatgtaacgttgt

SEQ ID NO: 61568 - DNA, 355 bp, Zea mays
ctctaggtccaggcagaggctcaagcggtggcttggggaggctcgtgacaggtgttctcaggaagagtctaaccaatttcagctgaataaactaggtgatgagatttcagtgctggagaagacgctctcggggctccaacagtcagtaggattttgccataacgatctgcaatatgggaatattatgatatatgaagagaccagacaagtcaccttgattgactatgagtatgcgagttttaacccagttgcattcgacattgctaatcacttctgtgagatggctgctgattaccatacagcaacaccacatgtgttggattttacgacatatcctgacactggggagcagaga

SEQ ID NO: 61569 - DNA, 351 bp, Zea mays
caggaatacgatacgccgctcgcctgaatcgagaccaccaccgctcccgctctgcctcacctcgccgactagagtttttgccgccgcggatctcgccgtccccgccatggatacgtcgggctcctccgcagccgccggcgacgccccgaccaccggggagcaccggatggggaccaccattgtcggggtctgctacgagggtggcgtcgtcctcggcgctgattccagaaccagcactggaatgtatgtagccaaccgtgcttcagacaagattacccaattgacagacaatgtgtacgtttgtcgctctggatctgctgctgatacacaagtcatttcggactatatacg

SEQ ID NO: 61570 - DNA, 354 bp, Zea mays
tggacgacggtgctgatctcgcccacaagcatcctggtgctgaacctggtgggcgtggtggctgggttctcggccgcgctcaacagcggctacgagtcctggggcgcgctcttcggtaaggtgttcttcgacatgtgggtgatcatgcacctgtacccgttcctcaagggtctcatgggccgccataaccgcacgccgaccatcgtggtgctctggtccgtcctcctcgcctccgtcttctccctcctgtgggtcaagatcgacccattcgttggaggaaccgagaccgtcaacaccaacaactgcaacacgatcatctgctgattcaccatcggtcagctgctgtcgtgccgc

SEQ ID NO: 61571 - DNA, 339 bp, Zea mays
  unsure (1)..(339): unsure at all n locations
agcaggtgcagctgctggagcggacttcgaggaagagaacaagctggagcctgagcgcaagaccgagctggctcgccgcctgnggatggcgccccgcaggtggccgtgtggttccagaaccgccgcgcgcgttggaagacaaagcagctcgagaccgactatgaccgcctcaaggctgcctacaacgcgctcgtcgctgaccaccagggcctcctggccgacaacgatagccatcgggcacaggtgatctgcctaacagagcagctgctaggctaggagacatcgctgtcggcaaccattgctaccctagaggtcgactagcccagacgacacaccaca

SEQ ID NO: 61572 - DNA, 343 bp, Zea mays
  unsure (1)..(343): unsure at all n locations
tgccagaggcgggtgaggaggaggaggacgcctcagccgccgccgccgcgggggaggaggaggacacgggcgcccaggtggctcncatcgtgcggcttgaggaggtagccgtcaccaccggcgaggaggacgaggacgtcctgctcgacatgaaggcgaactgtaccgattcgacaaagacggtaaccaatggaaggaacggggcacgggcgctgtcaagcttctcaagcacaagcagaccggcaaggtccgcctagtcatgcgccaggctanaacgcttaagatctgcgcgaaccactcgtggcatcatcacgagatgcaggacatgcgggcacgacaatcg

SEQ ID NO: 61573 - DNA, 117 bp, Zea mays
  unsure (1)..(117): unsure at all n locations
gatagaacaatgttctaagactaccatgtatttaagtctgcctgatgcttataattcatgaacgatttntgcagctagctgtaatgtgactatttatcttatctgcttgttcaaccc

SEQ ID NO: 61574 - DNA, 359 bp, Zea mays
gggcgctctcctctcccgacgacagctacacctcacaaccgtgagctcgcgaaggaacgctgttcgcaattccggcgccggcaccatgagtaagctgcagagtgattctctgagggacgcgattgcctcaattaccaatgattcccgtgagaagcagcgcaaatttgttgaaaccattgagctacaaattggactgaagaactatgaccctcaaaaggacaagcgcttcagcggttctgttaagctgcctcacatccctcgacctaagatgaaggtttgcatgcttggtgatgctcagcatgttgaggaggcagagagaatgggtatagacaatatggatgtggaagctctcaagaaga

SEQ ID NO: 61575 - DNA, 349 bp, Zea mays
  unsure (1)..(349): unsure at all n locations
tggcgcagagaatcgccaagcaaacaaacagggtagagggagaggagaggagaggagaggagaggttgggtctgggacaccatggctccgatgaagctgtacggggcggtgatgtcgtggaacgtgacgaggtgcgcaactccgctggaggaggctggctccgactacgagatcgtgcccatcaacttcgccaccgccgagcacaagagccccgagcacctcgtccgcaacccgtttggtcaggttccagctctgcaggatggtgacttgtacctcttcgaatcacgagcaatctgcaagtacgctgctcgcanaaacaagccagagctgttgagggaaggaaactcga

SEQ ID NO: 61576 - DNA, 336 bp, Zea mays
  unsure (1)..(336): unsure at all n locations
cgcttctactcnccccgcatgcttgcttgctccttcctatcttgctgcccgctccacccgagtctgccacacgtctatcggagttcccgctgtcatcagtccccacgtatgaagcccaagcagggtgcaactgcaacacggggtagcttcgcggcgacctgcgaggctgtgactctgccgatcttatcctatggaggaacaggaagatctctggcggggtacttgctggtgccacggccatctggctcctattcgaggtcatggagtaccatctcctcaccttggtgtgccactgtctcatcctctcgctggccatcctcttcctgtggtccaatg

SEQ ID NO: 61577 - DNA, 334 bp, Zea mays
  unsure (1)..(334): unsure at all n locations
gggctacaacgtcagtatgatggctgactccacctcccggtgggctgaggcattgcgtgagatctcagggcgtttggctgaaatgcctgctgatagtggttacccagcttacttggctgcacgtttggcatccttttatgaacgtgctggtaaggtaaaatgtctgngaagtccagacaggaatggcagtgtcacaattgttggagccgtctctcctcctggtggtgatttttcagaccctgttacctccgcaaccctcagtattgttcaggtcttctggggtttagataaaaagctcgctgcaaggaagcatttcccatctgtgaattggctc

SEQ ID NO: 61578 - DNA, 346 bp, Zea mays
cgcgccacaagttcgtcgatgactgcgaggccgccctcaacgagcagatcaacgtggagtacaacgcctcgtatgcataccactccctcttcgcctacttcgaccgcgacaacgtggctctcaaaggatttgccaagttcttcaaggaatccagcgacgaggagagggagcacgctgaaaagctcatggagtaccagaacaaacgtggaggcagggtgaggctccaatcgattgtgacgcctttaaccgagtttgaccaccctgagaaaggagatgctctgtacgctatggagctggctctggcccctggaaagctggtcaatgagaactgcacaactgcatgtgt

SEQ ID NO: 61579 - DNA, 179 bp, Zea mays
ccgccgcagcccgcagtcgcttgcgcgcagagcacttcgcaccgccgccacatcccatcgccgccagcggctgctcgatgcgatagctcccacgaagcaatcgtagaagagcagatagtgcatctccaacaagctgcagctggtgatgaagagcggcaagtacaccctgagctacaaga

SEQ ID NO: 61580 - DNA, 345 bp, Zea mays
gcaaccgattgccttccccctcccaacccaagaccgatggcgcccaaggccgagaagaagcccgcggcgaagaagccggcggaggaggagcccgcggcggagaagacgaccgccgggaagaagcccaaggcggagaagcggatcaccgctggcaagtccgccggcaaggagggcggcgagggcaagcgtggcaagaagaagggcaagaagagcgtggagacgtacaagatctacatcttcaaggtgctgaagcaggtgcactcggacatcggcatctcctccaaggccatgtccatcatgaactccttcatcaacgacatcttcgagtagctggccggcgaggcc

SEQ ID NO: 61581 - DNA, 355 bp, Zea mays
gaggacatcatcctagattttacaaaatcaaagaagcaatcagacatggctgtaatgatcttaagatacttcaatgtgattggatcggacccagaggggcgactaggagaagctccaaggccagagctacgcgagcatggacggatatccggtgcttgctttgatgcggctttgggaatcattccaggctaaaggttcgtggaactgattactccactgcagatggaacttgtattagggactacatcgatgtcacagaccttgtagatgcccatgatcaagctcttggtaaagctcagccaggcaaagttggaatctacaacgtcggaacaggcgaaggtagatcggtgacgaa

SEQ ID NO: 61582 - DNA, 324 bp, Zea mays
tagacgatgcggaggacgccgccgccgcgcgccgacgggccgccataaccgactaccgcaagaagctgctcaactgcagggagctcgagtcgcgcgtcggcaccgtgagagaaagccttaaaaatgcaaagagggattttaccaagactgaagacgacttgaaatctctgagagcgtggggcaaataattggagaggttctccgacctcttgataatgaacgctttattgtgaaggcagcagtggtcccgatatgtggcggttgcgaagtaaagtagcaaggagagttgactctggactcgtgttgtattgacagacgacttga

SEQ ID NO: 61583 - DNA, 342 bp, Zea mays
gcctgccgctgcttcggctacatggtctccaagaagaagtacatctacaccatcgacgacgactgcttcgttgccaaggacccatcaggcaaggatatcaatgctcttgagcagcacatcaagaacctcctcagcccgtccacaccgttcttcttcaacaccctgtacgacccctaccgtagggtgctgactttgtgcgtggataccccttcagcctcagggagggtgcccacactgctgtctcccacggcctgtggctgaacatccctgactatgatgcacccacccagctggtcaagcctaaggagaggaacgaaaggtacgttgatgctgtcatgacaa

SEQ ID NO: 61584 - DNA, 323 bp, Zea mays
gttgaaggcgctggatttgacgacgagaaatcacttcttatgtctcaaatgagcctggagatgagatttggccagtccgcagcgtttgttgcctccactctgatggagtatggtggtgttcctcagtgcgcaactccggagtctcttctgaaagaagctatccatgttataagctgtgctatgaggactagactgaatggggaactgagatcgggtggatctacggtttttgtgacagaagacattctcaccggattcaagatgcaacgcgcgaggctggcggtcgatctactggatgcgcaagcggccagcttctcaggggt

SEQ ID NO: 61585 - DNA, 347 bp, Zea mays
acgggatgcaggagggaaggtaataatcttggacgtggtagttgggtataaacagtcaaacataaagcatcaagagacacaagttatgtttgatttgtatatgatggccgttaacggagttgagcgtgatgagcaagagtggaagaagatcttcactgaagctggattcaaagactacaaaatctacccgtcattggtgacgtatcggtcatcatcgaggtctatccttgaatgctttgtgaacaaaggcctccataataaactgaagaccatgaaggtgttgatagtatattatgaattgttatttgtcctgtacacttgattctttgcgtatctgtaatgacaag

SEQ ID NO: 61586 - DNA, 315 bp, Zea mays
gccgctcgttcccgctgtaccgcttcgtgcgccaggagctcggctgcgtgttcctcaccggcgagaagctcaagtcccccggcgaggagtgcaacaaggtgttcctcggcatcagccagggcaagctcgtcgaccccatgctcgagtgcctcaaggagtgggacggcaagccgctgcccacaacatcaactaaaagacgccaggcgccgccatccatgctgccgtccgcgcatggccggaggaggaggagaggaggaggaggaaaatacatgaaaaataaaacttgtacacgtgtatgtctccagattgtgccgc

SEQ ID NO: 61587 - DNA, 172 bp, Zea mays
cagggagttgatttatccgctgcagccatgagtaagttgcagtctgagtctgtcaaggatgccatctcccagattgttggggatgccaaggagaagaataggaagttcactgagactgtggaacttcagattggtctgaagaattatgatccacagaaggccaagggtttca

SEQ ID NO: 61588 - DNA, 329 bp, Zea mays
ctctatgatgctgatcacggaaagaaggttttgagcatggctcctggccttgagaggctcaacatccttcctttcaaggtggctgcgtatgacacaaagcaaaagaaaatggatttctttgatccatcaaggaaagatgattacctcttcatctctggcacaaagatgcgcactctgccaagaaccgagagagtcccccagatggttttatgtgcccgggtggctggaaggtactcgttgaatactatgacagcttggtgccatctgagggcagcagcaagctgcgtgaaccaattgcagcctaaaatctggaaaatccttcatataag

SEQ ID NO: 61589 - DNA, 324 bp, Zea mays
attcgatccaactcctgagcactttctcctcgtccccgacaagccaatcgaagccgagatacggccatggactccaccggcaccggagcagggggtaaggggaagaagggagcggccgggcgcaaggtcggcgggccaaggaagaagtcggtgtcgaggtccgtgaaggccgggctccagttccccgtcggccgcatcgggcgctacttgaagaagggccgctacgcgcagctgtacggcaccggcgcccccgtctacctcgacgctgtcctcgaatacctcgccgctgaggttctggagctcgctggtaatgctgccagggac

SEQ ID NO: 61590 - DNA, 329 bp, Zea mays
gatggatacaaggctggaaaagacaatggatatgactttgggttcctgcacataaaggccattgatgatgctggtcatgacaaggctgtcaagttgaaagtacggggtctagaagctgttgatcgagctattggtcagcttgcgaggcttctttgggaagctgaaaaggccggcactatcagtactttctttgcgtcactggagaccattctactcctgattgaatatggtgatcatagcttcgaacccgtcccgtttgcaatatgcagactgagagattatgcaggagccattggaggaggataatattatgaatacacagctcgacg

SEQ ID NO: 61591 - DNA, 334 bp, Zea mays
tgaagattgaggaccagctctcccttgggaagaggttgtcactagttgctagcactggcgcgatgcgagcccaaggggacactgcatatggagctaacctggaggcacgcttgaaggacaaagactatccgatagcccagtccctctcaaccttgggtctctctctgatgaagtgcgtcgggaccttgctctgggcgcaaacttgcagtcccagttttccatcggaagggggtcgaagatggcagttcgacttggtctgaacaacaagctgagtgggcagatcaccgtcaggacaagcacctcagagcaggtccagattgcacttctgggtctc

SEQ ID NO: 61592 - DNA, 339 bp, Zea mays
aataactttgatgttcaaggaacacttgctcttcaggttctcaatgatactgatgggttcatctaattgcagattgaaagccaagatattcctgggcttagcttcaaaacacacccaaatatcaacaaggatttgtttaacagtcagcaaattctcgggagcaaaagatccaaacaggcttttccgagtggtcaaaatgaaactcctctggtgaaatggagaatccaggggatggatgagtcatctttacctctgtcagtcaattgctggccgtctgtatctggagatgaaacctatgtgaacactgaatatgaagcttctgagatgtttgatctgcac

SEQ ID NO: 61593 - DNA, 338 bp, Zea mays
tagagttcctccaccaggcagtgaccatctgcctgaacatccagaaggagtacggcaagctcctcaaggacttcaacaagggcctggtgaacaacaaggacatagtgaacctcaaggtccaggtggagaagtttgccgactccttcgacatgcctgggttcacgcttgagagcatgaaatcaaggagtagacatgcctcccatgcgcggcaaggtcctcctgtaccgatgtctttccttgtggtggcgcaggtgccatggcactgcactgccgccacacttataatgatgatggtgggttatggattttgtctacaatgtcagcaggataggctcaca

SEQ ID NO: 61594 - DNA, 342 bp, Zea mays
ggaacatctaaagattgcccgtgtctactatcctggcttgcctagccaccctgaacatcacattgccaagagtcaaatgactggctttggtggtgtggttagttttgaggttgctggagactttgatgccacaaggaaattcatcgattctgttaagataccctatcatgccccttcttcggaggctgtgagagcataattgatcagcctgctatcatgtcctactgggattcaaaggagcagagggacatctatgggatcaaggacaacctgatcaggttcagcattggagtggaggattttgaggaccttaagaatgatcttgttcaggccctcgagaag

SEQ ID NO: 61595 - DNA, 340 bp, Zea mays
ctccgctgccggtcgccgactccgaaactccgacagtccgaccacaaggatccacagaaggatgagtgaagaggataaggctgctgcttctgctgagcagccgaagagggcccctaagctcaatgaaaggatcctctcttctctgtccaggaggtccgtagctgctcatccgtggcatgatcttgagatcggtcctgatgctcctgctgttttcaatgttgttgttgagatcacaaagggaagcaaagttaaatatgagctcgacaagaaaactggactgattaaggttgatcgagtcctgtactcatcagttgtataccctcacaattatggttcgtcc

SEQ ID NO: 61596 - DNA, 311 bp, Zea mays
ccgctgtctccgcgctgcaggaggcggctgaggcctaccttgtcgggctcttcgaggacaccaacctctgcgccatccacgccaagcgcgtcaccatcatgcccaaggacatccagcttgcccgccgcatccgcggggagagggcctaagcgtcatattctctgtcatcagtgccgatcagaagatgtagagatgtgctgggttctgtagtttgggttactgtcgaatcatcgagtagttggttgttcactgctgtaacttaattatcatgatgcatatgaaatggcaatgagctctgttatcacttctcg

SEQ ID NO: 61597 - DNA, 212 bp, Zea mays
aagagtgcccgctgtcgctctgattgctgtgtgaagcacggtggtggcaagcgttgcaggttcgatgggtgtgacaagagcgcacaggggagcactgacttctgcaaggctcatggaggggcaacgtgcgcttggagcaccggctgcgacaagttcgctaggggaaggaggcctatgcgcagcatagaccctgatggcttccaagtatgcac

SEQ ID NO: 61598 - DNA, 313 bp, Zea mays
agcacggctgcgaaggaggaggagcagcagcagcacagctgcgccgagtgagcggcgatctcactcagtgcttggaaggacggctacgggattgaagaagcacttgaagaggctcaatgcgcccaagcattggatgctcgacaagcttggcggagttttgctcccaaggcatcttcggacctcacaagtccagggagtgccttcgtctgatcctcatcatgaggaacaggctcaagtatgctctgaagtaccgtgaggtcatgtctatcctgatgcagcggcatgtacttgttgatggcaaggtcaggactga

SEQ ID NO: 61599 - DNA, 334 bp, Zea mays
gggacaggcattagatttatccgtgctgattctcaggtcttcctttttgccaactcgaaatgcaagcgctacttccacaaccgcctgaaacaagcaaagcttacctggacagcaatgtacaggaagcagcacaagaaggctctccatgctgaagcagtaaagaagaggcgccggccaccaagaagccatactccaggtcaattgtgggtgcttccttggaagtaatccagaagaagagagctgagaagccagaggtccgcgatgctcgctagagaagctgctcttcgtgagatcaaggagcgcatcaagaagaccaaggatgagaagaaagcga

SEQ ID NO: 61600 - DNA, 342 bp, Zea mays
gacgcatcgaggttagcacgcgaagaagcgaccatgagggccaagtggaagaagaagcgcatgaggaggctcaagaggaagcgcagaaagatgaggcagagatccaagtaggcagatcgagatggattgtggacctgatgacatgcgtgggtacatacatttcttcggatgcgttggttgcctgtggagagatgtcaacctgccatggtgtcacggtccgccatcagttgaacgtcttgcctgcacttcagtaggccacttttcatggttctagttgtatttgaatccagcgtttgccactaagataaatcagacagtcgtttctgtgaactattatgatgg

SEQ ID NO: 61601 - DNA, 320 bp, Zea mays
catcgcctgaccgacgcgcccgttttctcctgaaaacagaaggctccggcctccggcatccgccaaaaaggggaaaaaaaggagagagaacacacacacacaaaccccaatcccctgcggcggcgatggacccgtcatcggcgggctccggcggcaactccctcccgtccgtcggcccgacgggcagaagcggcgcgtgtgctacttctacgacccggatgtgggcaactactactacgggcagggccatccgatgaagccgcaccgcatccggatgacgcactcgctgctggcgcgctacgaggtcctcaaccagatgc

SEQ ID NO: 61602 - DNA, 325 bp, Zea mays
atcacctggcggtgtgcgcattggtacacctgctatgacctcaaggggtttggttgagaaggacttcgtgcagattgccgagtaccttcaccgagctgtgaccatctgcttgagcatccaggcggagatggcaagattctcaaggacttcaagaagggcttggtgcaaaaaaggacatagagaacctgagggcggaggtcgagaagttcgccacttcatttgacatgcctggcttcagggtgtctgacatgaagtacacagactagactgctgctgacttgggtgcaaacgttgctcctgttacagtaacctggcatgctggtgc

SEQ ID NO: 61603 - DNA, 327 bp, Zea mays
tcggcgtggtgctgctggagctcatcgccgggcgcaagcgtcggggagttcggcgacggcgtggacatcgtgcactgggtgcggacggtgaccgggtcgagcaaggagggcgtgatgaagatcgccgacccccggctctcgacggtgcctctgtacgagctaacccactcttctacgtcgccatgctgtgcgtggcggagcagagcgtggagcggcccacgatgcgcgaggtcgtgcagatactggccgacatgcccggctcgacatccacgtccatagacgtgccccttgtcatcgagccgaaggaggaggacgaggggccggaga

SEQ ID NO: 61604 - DNA, 280 bp, Zea mays
gcagagacaggcgtcttcgtactcgcctatctccgcgactcaaagctttccccaattcccccccttctcccatttctcaccaccgccgccgctccccccgttcaacaacaccatgagggagtgcatctcgatccacatcggccaggctggtatccaggtcggaaacgcgtctgggagctgtactgcctcgagcatggcttcaggctgatgccagatccggtgcagacattggggtgatatctcacacttctcgtggctggcgctggaccgcccgtctgtt

SEQ ID NO: 61605 - DNA, 205 bp, Zea mays
gccaacgacaccatcaagatcgatctggagaccatacaagatcatggacttcatcaagtttgacgtcggcaacgtggtcatggtgaccggcgggaggaacaccgggcgtgtaggtgtgatcaagaacagggagaagcacaagggcggcttcgataccatccacgtcgaggatccatgggccaccagttcgccacccgcatgggca

SEQ ID NO: 61606 - DNA, 309 bp, Zea mays
gcggtcacctacaccgagcacgctcgccgcaagaccgtcaccgccatggatgttgtgtacgccctcactcgccaggtccgcactctgtacgggttcggtggttgagcgcatctcttccctcgtctgcagcggctgccggtggcgtttcctcagttccctctgccttgttggcttgatgtagagagttatcagattaaaatatctctgatgtgcttcgttattgggtggaatcatgtgtcccagcagtgctgggaaatcaagatcaagatgtatctttctttgcagtaatgagatgttacaatcgaaaaa

SEQ ID NO: 61607 - DNA, 328 bp, Zea mays
gtggggatcagaagcaaaatagaaagaaaaaagagacatccccagaggaatgtgatcaggcattggaaggctgaatttgttactacactgcagcattactggttagggacaaagctactatgggcagatgttagaatctcatcaagattactggtgaaacttgctggtggaaaaagcctttctagaagagagaggcaacagctgacacgcacaacagctgatatcttcaggctggtaccatttgctgtgttcatcgttgttcctttcatggagttcttactgccagtgttcctgaagttatttccaaacatgcttccatcaactttcc

SEQ ID NO: 61608 - DNA, 250 bp, Zea mays
gccggttccataggaggcactgtacccatgggaagacaggtccacctacatccgcaagcctacgtacctggatggcatgtccatgacgccgcctgcagccccgcccacggtgacggacgcctactgcctgctcaaccttggggacagcatcaccacggaccacatctctactcggggaagatcccgatggcaccctgcggccaagtatctgctcgagtatggcgtggaaccaagaatttagtcctatggt

SEQ ID NO: 61609 - DNA, 329 bp, Zea mays
gagcaaaatgacaacaaactaatggaaaacgtaattcatgtcctatcgagaaatttcttaccgctgcaaccaggcacagctgatatagtcttcagtatctgttataatgctgatagatgggatttactctcaaaatacgcggagagatttgttaaggcaggtgtcaaacgcatcgagctgcatttgacatttggatggactttgctgccaaagttggggattctcaatctatttggcacattaatagtctaagaggcaggtctgtcaaacattatacacttgcaacagggtttgcatgtgcagaggggtctctgcttgatcggaagcca

SEQ ID NO: 61610 - DNA, 293 bp, Zea mays
ctcgttcccgcggctgcacttcttcatggtggggttcgccccgctgacgtcgcgcgggtcgcagcagtaccgcgcgctgacggtgccggagctgacgcagcagatgtgggacgccaagaacatgatgtgcgcggcggacccgcggcacgggcggtacctgacggcgtcgccatgttccggggcaagatgagcaccaacgaggtggacgagcagatgatcaacgtgcagaacaagaactcctcctacttcgtggagtggatcctaacaacgtctcgtccagcgtgtgcgacatg

SEQ ID NO: 61611 - DNA, 319 bp, Zea mays
cagtgcctcgcctgatcaagctaggaatgagatgcgccaggcttgttttgattacttgagcctcggaggcgtcttctcgaacgggcctatcgctttactctctggccttaaccctcggccactgagtttagttgcgcacttctttgctgttgctatctacggtgcggccgcttgatgctccctcttccttcacctaaacgaatgtggattggagctagactgatttctggtgcatgcggcatcatcctccctatcatcatagctgaaggcgtgagacagatgttcttccctgctacagtaccgcatattacgggccgca

SEQ ID NO: 61612 - DNA, 270 bp, Zea mays
agatcacataaggatcttgacaaggatgcagctcttcacttccagaaagcagttaaatttaatgatggccttgctaagcagttggtcagtcaaggtcacgtgttagatgtttttgctcctgctctccgatcaggttgggctagctgagatgaaggttgcaattggagaacaggtggccttgttgtcttgtctgaaagttttgggcattccgaattcaaggattctttcaaacgcatttttgatggaggtgaacagtctctagggacttct

SEQ ID NO: 61613 - DNA, 324 bp, Zea mays
gggctacccggccttcgcgctcgtcaacaaggtcaccggcgaggcgctcaagcactccacggggcagggccaccccgtcaagctcgtgccctacaacccggactaccaggacgagtccgtgctctggaccgagagccgcgacgtcggcaactgcttccgctgcgtcgcatggtcaacaacatctacctcaacttcgacgccttccacggcgacaaggcccacggcggcgtccatgacggtaccgagatcgtgctctggaagtggtgcgagggcgacaaccagcgctggaagatcctcccttggtgaacgaacgaaagaaactac

SEQ ID NO: 61614 - DNA, 317 bp, Zea mays
  unsure (1)..(317): unsure at all n locations
cgaccacgccnccttccaggctcncgtctccatgggtctcctctcaaacaggattgggacggagagcctcaaggcgggggatcatatctactcctggagggcggcgtgggtctacgcgcatcacggaatatatgtgggcgatgataaggtgatccatttcacaagaggagaggacatgaggtcggaacaggaactgtcgtcgatattattcttgtgagttccaccccaaaacgaagctacacgccttgctcggtgtgcacgacgaaactagcgacagagcacagagacaacgcgtggtatcctctgtctcagctgct

SEQ ID NO: 61615 - DNA, 336 bp, Zea mays
  unsure (1)..(336): unsure at all n locations
gcggaggcaggaagagagacgacggcggccatggcgacctccttccaggggacgaccaccaagtgcaccgcctgcgacaagactgtgtaccttgtggacaagctcaccgccgacaaccgcatctaccacaaggcctgcttccgctgccaccactgcaagggcaccctcaagctcgccaactacaactccttcgagggagtgctctactgcaggcctcacttcgaccagctgttcaagaggacagggagcttggacaagagcttcgaaggaactcccaaggttgtcaagccagaaagaaacgttgggaatgagaatctactanagctcaagcgcttt

SEQ ID NO: 61616 - DNA, 305 bp, Zea mays
caagaagaagctggcgaagaagatgcgccagattcgccccatcccctactggatccgcatgcgcacggacaacaccatcaggtacaacgccaagcgcacgcactggcgccgcaccaagctcggcttctgagcgtggggatcggccggctcccgcgtcggaattctagggtctctacctttcctttggttttatcgatgtctcttgtgtttctgtaagctagcaaacagttccagaaagcttttgttaagattttgatgacgctaagaggattgatgctactatgctgtaaaaaaaaaagaaccca

SEQ ID NO: 61617 - DNA, 338 bp, Zea mays
atgaggccccaagccataggtggttgaggcaccagcagaagaggaagcaccacagccaaagccagagaatcctcttgacttgctgccaccaagcaagatggtccttgatgactggaagaggctatactcaaacacaaagactaacttccgggaggttgccatcaaaggtttctgggacatgtacgacgcagagggctactctttgtggttctgtgactacaagtacaatgatgagaacaccgtctcctttgtgacgctgaacaaggttggtggattcctgcagcggatggacctgtgccgctagtacgcctttgggaagatgctcgtgataggctctg

SEQ ID NO: 61618 - DNA, 307 bp, Zea mays
cgagcagtacattgtgaagctggagcaaggaggccaaaccgtctgcatcagtgggttcatggcgtatgacgtgccaccgccgcgtggtcctctctggattcttggggacgtcttcatgggagcttaccacacggtgttcgacttcggcaacgacaggattggcttcgcggaatctgcatgagtgtggagagcactctcatctttataaagacgataccctatgtattagggatgtgtagtttattgtctatccactacatgccaacagtacgctgcaaataaatcgggtggccaaattgctgaaaaa

SEQ ID NO: 61619 - DNA, 345 bp, Zea mays
gtgcagcccactgtaggccctgatgggaagataaaggagcctgagagcaatgtacttttagcatcaattgagaacatgcaatatgctgtgacggtggatgttctgcacactgtgttttctgcttttggtgctgttcaaaaaattgccatgtttgagaagaatggtggaatgcaggctctaattcaatatccagatataacaactgcagccgttgctaaacaagctttggagggacactgcatatatgatggtggttactgtaagcttcatctgtcatactctcgtcatactgatctcaatgtaaaggctcatgatgatagaagcagagactacactctttcagac

SEQ ID NO: 61620 - DNA, 316 bp, Zea mays
tggccctcgcatgtgcattgacgatggccgtgttgtcagtaactttgttgctcaggcactgaggaaggagcccttgacggtttatggtgatggaaagcaaaccaggagtttccaatatgtttctgatctggttgagggtctgatgaagctgatggaaggcgagcatgtggggccattcaacctgggtaaccctggcgagttcaccatgcttgagcttgccaaggttgtccaggacaccatcgaccccaacgcacggatcgagttccgcaagaacacccaggacgacccgcacaagcgcaagcccgacatcagccgc

SEQ ID NO: 61621 - DNA, 336 bp, Zea mays
  unsure (1)..(336): unsure at all n locations
ccaagggccaggctaacagctgctcaagctctctcacatccgtgggtaagagaaggaggagaagcatccgatatccccgtcgacatatctgtgttatcaaacatgcgtcagtttgtcaagtacagccgtttcaagcaattcgcgcttcgtgctctggcgagcacccttaacgaggaagagctatcagatctgaaggatcagtttgatgcaattgatatcgataaaagtggatcgattagtatcgagggaatgcgtcatgnccttgcaaaggatcttccctggagattttgagggtcccgtgtgctggagatcatcaaagcatgacagcacactgat

SEQ ID NO: 61622 - DNA, 330 bp, Zea mays
cttgataattgaaagaaaatatgctgaagctgctcagcgctgcccaaagttgttgcgaggatccccttcagcatgggagagatgggtcttccactttgctcatctccgccaacttcctgttttggtcccttatattcctacagaaaatcctcagctgagtgatactgcatatgaggttgcccttgttgctctaactaccaatccttctttccatgaacttctgctgactactgataaaaattgggcaacgacattatactccagcttcaccggtcatatctgccattgagccacagctaatctcatcgatggctgattcattgaaagagc

SEQ ID NO: 61623 - DNA, 334 bp, Zea mays
gttcagctcctggtggtgctacgggggtgactgcgggggcgactgcggctggtggctgttgtcctcatcgaccatctcggcgacgtcctactcgagcgagatctcgctgcagtccctcgagatctggaggagattgacaaggagattgaggacaagaagacagagctggagcccaaggtcgtggaggcctacgaagcatctcctcctgaggtcaaggctctgttcaaggataagaagccagtcaaggtcatcaagaagaactcggctgcagtcaccaagttcctcgatgagctggctaagattggccgcacttgaagacatcttatatcagttt

SEQ ID NO: 61624 - DNA, 343 bp, Zea mays
tacagctcctcatctcaagtgtgtagacgagagagagagactgagagagcgccatggccagcctccaagtgactcctacttcatcgttcactcagtggaacgagctgaagttcgaaggcctgtacctgttccacacacccctgggctcaggcgccaaccaagctcaggtcatagacaacaaggcgccgattggcatcggtgccaccgtagttaacaactgggcagtgtacgacgggccagggccgaacgcaaagctcgttgcccgtgcacagggcttgcatatccaagccggcaactgggtcaactcttcagcctagtgttcgtggatcaaaggttcagtggg

SEQ ID NO: 61625 - DNA, 344 bp, Zea mays
caaggatagcactctgatcatgcaactcctgagggataacttgaccctttggacatccgacctcacggaggatggtgctgatgagggcaaagatgccccgaaaggtgatgcaggcgagggacagtaatcttcggagggggtgcaaagttgttcgagccccaatgttttagatgctctatgctgcgaagctgtgctgtgccattcattgtagctgatttcgtctccattcacttcttttttcttgttagtaggctggtagtggtcgaattaatttgctttgtgttgccgctagtccatgtggactggtattgttcccctggatttatttggcaagcgtgtccgtg

SEQ ID NO: 61626 - DNA, 339 bp, Zea mays
gctgcttttcggacgacacgttgccggacggctacgctgtcaagaaaggggacatggtgaactaccagccgtaccaaatgggcaggatgcggttcctgtggggcgcggacgccgaggagttcaggccggagaggtggctggacgacgccggcgtcttcgtccccgagagccccttcaagttcacggctttccaggcgggccctcgcgtctgcttgggaaaggaattcgcgtacaggcagatgaagatcttcgcggctgtgcttctctacctgttcaggtttgagatgtgggatgccaacgctaccgtgggttaccgggccatctcgacctcaaaatcga

SEQ ID NO: 61627 - DNA, 172 bp, Zea mays
gaccctccggcgaagtcaatcctgcgctccgcaggcagcatcaagcatggcggacacgaaggcctcacccgcggtgacgctccgcacgcgcaagttcatgaccaaccgcctcctctctcgcaagcagttcgtgctcgaggttctccaccccggccgcgccaacgtctctaag

SEQ ID NO: 61628 - DNA, 341 bp, Zea mays
ccaaagggagcagtggtgttcaatgggacaaatgaggatgacttcctatactgcctccctgataacaaagaattatctgtctgccgagagatggctagaagtatggggttcccgaagctcgaagctggattatgtgctatgacgaaggaggatctcgcggacagtcttgcgtataacagcctaaagggcttaatcctaagcaacgcattaagagcacaaaagagtgccgaagatgagagctatgaaattgcgttcaacaaccttcggtcagaagttattaaactgagacacgaagctctggagaaggataaaattttgctcacattggtagacaaggtaaa

SEQ ID NO: 61629 - DNA, 337 bp, Zea mays
gaagaatggaagcaacctagggaaggacagaaatgggtttggtgatgttattctaaatccttctctccagaagagagtgaagcagcttgctaatgccacggccaatacaaaacttcatcaagctcctttcaggaacatgcttttctatgggcctcctggcacagggaaaaccatggcagcacgagaacttgctcgcaattctggattagattatgcactaatgactggtggagatgttgcaccattgggatcacaagcagtcaccaagattcatcagttgtttgactgggcgaagaaatctaacaggggtttgcttctcttcatagatgaagcagat

SEQ ID NO: 61630 - DNA, 334 bp, Zea mays
  unsure (1)..(334): unsure at all n locations
gaatcttttaacacatacccacgaacttatgatcttattcacatgagttatctcttagggccccttacgaaaaggtgccacatcattgaagttgcagctgaaattgacagaatacttagacctggtagatggtttgtgctgcaagacactatagacatgataagaaagatggaccctgttctcaggtctttgcattacaagactacaattgtcaaacatcaatttcttcttgccaccaagggtttctggcgccctggcagtataggttcttagtcatgatgattccggcttccacccanaatggtattggctccatggactcattgtgttgatt

SEQ ID NO: 61631 - DNA, 339 bp, Zea mays
gaagggatgcagcagccgatgcacatgcagccgcagggccaggcgatagccccagctgccggaatcaccacggagcagatccagaagtatctggcagagaataagcagcttattttggctattttggaaaatcagaacctaggaaaattggcagaatgtgctcagtatcaatcacaacttcagaagaacctcttgctatctcgctgcaatcgcagatgcccaaccgcagactgctgtaagccgcactcagatggcgccgcctggtggatctcctggagtagggcagtacatgtcacaggtgcctatgttcccaccgaggacacctctaacacgccagca

SEQ ID NO: 61632 - DNA, 324 bp, Zea mays
gccatacacagaatcagcaattttaggatgtgcagtgtttaccgcgtatggtgccctgaggcatgctgctgaaatgcggcctggtgattcagtagctgtgatcggagttggaggggttgggtcaagctgtttacagatagcaaaagcctttggagcttcccaagtcattgcagtggatgtccttgatgagaagcttcagaacgctacaacacttggagcaacccacactgtaaatgcagccaagatgatgcagttgaaaggataaaggaaattactgatggtaagggtgtagatgtggctatagaggcattggtaaggcgttaa

SEQ ID NO: 61633 - DNA, 277 bp, Zea mays
cgcttgcgtttccttctctccgcttccaagatgtcgaagcgagggcgtggaggttcggctggtaacaagttccggatgtcactgggtctaccagtggcagctactgtgaactgtgccgataacactggagccaagaacctgtacatcatttctgtgaagggaatcaagggtcgccttaacaggcttccttctgctgtgtggtgaatggtatggcacgtgaagaaggaagctgccttagaagagtgtgcactgttatgtagcacgcacatgcgcgaag

SEQ ID NO: 61634 - DNA, 327 bp, Zea mays
  unsure (1)..(327): unsure at all n locations
gtggactatgcagaaatttattgcaattcctccctgtacagggagaacagggttctaattgatgaattggaacaaccagaaccaaatacagatgctctgtattttcctcagggttattggcaaaactttacgatacaatgtgtggcatgtttgtggaagcaaagttgtgcatactggaaaaactcagaacacaatcttgtccggttcattaacacttttgctgtttcaatcatgtttggaattgtattctggaaaattggctcaagcatcaaggatgagcaagacgtattaaacatacttngaatcgtatatggatcggcattgttc

SEQ ID NO: 61635 - DNA, 297 bp, Zea mays
tgcagcgtccgtcgcctccctttccccttccctccctccctctccccgcgggccgccagaggcaatttcgccctcgattcgaccccgattcgtccgcccgcgaccgggattccctccgccaagcgcggatctgaacgctgcgctccgtgtcgccgctcgaatccgccatgaagggggccaaatccaagggcgccgccaaggccgatgccaagctggcggtgaagagcaagggggcggagaagcccggctaaggcaggaaagggaaggccggcaagggacccaacaagcctaagaggg

SEQ ID NO: 61636 - DNA, 334 bp, Zea mays
ggacattgccattgttacaggtgctgaatatcaatccaaagatcttggtctactagttgaggatacaacagtggagcagcttggcatagctcggaaagttacaatctcaagttcctcgacgaccattatagcagatgctgctagcaaagacgatatccaggccagaatcgcgcagtgaagagagagctttctcagacggactcgacgtatgactctgagagttggcagagagaattgcacagctttctggtggagttgctgtggttaaggttggagcatcgaccgaggcagagctagagggacgcaagctccgcatagaggacgcgaagaatgc

SEQ ID NO: 61637 - DNA, 332 bp, Zea mays
  unsure (1)..(332): unsure at all n locations
gcaactgctgctggtattgctgctgcttttatttcagtcttctggtcatttggttacatccgtctctctgaaaggcttagaaaaacatccanagaacctgctaaggctcctccacgtgctgatgttgttaagagccttaaaaatggcatcgtggttaatattcttgggatgggcgctgctgttctcggcatgcaagctactgttggtgctttggtagcaaaagctctcacaacctctgcagtaccctattatcaggctgctggccaaagccctgtcttggctttagatgttttcctagttcaggcttcagcgaacaccatcctgtcgcattt

SEQ ID NO: 61638 - DNA, 255 bp, Zea mays
ggcatccgctgcatcatccgcatggagaactagatttcgctgtctagtttgtgatctggcctgggcttggggttaataaaagaggcaatgctagcctgccctttcgatgaggaggtacatacacgctggcgatggaccgcgcttgtgtgtcgcgttcagtttggcttttgccaagcggtagggtagcttcccgtgtcggtaattatatggtatgaacatcactttgctctacaggtatgaacgagatcaatcact

SEQ ID NO: 61639 - DNA, 332 bp, Zea mays
ctcagatcctaagggatgtttcaatattggacttccatctggaaagtcacttttccaactccaagctgaacggatcttgtgcgttcagaagctggctgctcaatccagtgaaagcccgagtaacactgtgctgatccactggtatataatgacaagccccttcacagatgcttccactcgcaaattcttcgaaacccgtagatactttggcctagaccctgaccaagtgacatttttccaacaaggcacacttgcatgcgtctctgccgatcgtagatttattatggagacaccatatagggtagcgaaggctcctgacggcaacggtggag

SEQ ID NO: 61640 - DNA, 306 bp, Zea mays
gcggctgcggcggagacggaggcgaaggaggaggagcagcagcagcaggcggcgccgaggagcggcatcccactcagtgcttgcaaccatggctaggggattgaagaagcacttgaagaggctcaatgcgcccaagcattggatgctcgacaagcttggcggagcttttgctcccaagccatcttctggacctcacaagtccagggagtgccttcctctgatcctcatcatcaggaacaggctcaagtatgctctgaactaccgtgaggtcatttctatcctgatgcaagccatgtacttggtgat

SEQ ID NO: 61641 - DNA, 305 bp, Zea mays
tatatgtggccttggggattcctcgtcttctcctggagcatctggcagcaaacagtctattagaactgcaaattgaaaggagatgcctacagttgatcctagaggtatatttcatggacatgacagcacggttgaagatgttcagttctgctcttccaatgcgcatgagtattgtagtgtgggtgatgatgcttgtctcattctgagggatgctcgaactggcactgcgccagctgttaaggttgagagagtcacagtggagatgctcattgtgctgattcgaatcccttgatgttaatatatct

SEQ ID NO: 61642 - DNA, 303 bp, Zea mays
gcggaagaaggcacccaccgccgccgccaagaaggatgagaaggccgtcaacgccgcgcgccgcgcggtgcggagatcgataccatgaagaagtacaacgctggtacgaacaaggcggtctccagcggtacatccctcaacaccaagcgcctcgacgacgacaccgaaaacctcgcccatgagcgagttccaagtgatctgaagaagaatctcatgcaagcaaggctcgataagaagctgacacaggcacaacttgctcagatgataaatgagaagccacaggtgattcaggagtatgaatca

SEQ ID NO: 61643 - DNA, 318 bp, Zea mays
gtcttgctctgccttgtttcttctctccttcccagtgccgtccttggccacccatggggtggcttgttcccacagttctatgaccattcgtgccccaaggcgaaggagattgtgcagtccattgtggcacaggctgtggccaaggagaccaggatggcggcatctttagtcagactgcatttccatgactgctttgtcaagggctgcgatgcttcggtgctgttggacaacagcagcagcatagttagtgagaaagggtccaacccgaacaggaactccctcagggggtttgaggtgatcgaccagattaaggctgct

SEQ ID NO: 61644 - DNA, 320 bp, Zea mays
ctcatctccacgcgccgccgccgccgctcgacgcccaccgcgcagccatggcggaacagactgagaaggctttcctcaagcagcctaaggtgttcctcagctcaaagaaatctggcaagggtaagaagccaggcaagggtggcaatcgattttggaagagcattggccttggtttcaagactcccagggaagcaattgaagggacctacattgacaagaaatgtccattcactggaaccgtttctatcagaggcagaattattgctggaacatgccacagtgctaagatgaacagaacatcattgttcgcaggaactatc

SEQ ID NO: 61645 - DNA, 318 bp, Zea mays
gcatatgatcgcaaccaatggtggaagggaaaaattagattttgtctttgggtgtgcatatgatcagcaaggccagcttttatcttcaccagctaagactgatgggatccttggacttagcagtgcggcgataagctttcccagtcagctggctagtcacgggattattgccaacgtttttggccattgtatcactagagagcaaggtggtggaggatatatgtttctgggagatgattatgtacctagatggggagtaacatggacttctattcgaagtggtccagataacttatatcacacacaagcccaccatgt

SEQ ID NO: 61646 - DNA, 324 bp, Zea mays
  unsure (1)..(324): unsure at all n locations
ggctcatggtgacgcccatcatcatcatcctcgtcaacatcatcggctccgccgtggccttcgccaaggtgctggacggcgagtggacgcactggctcaaggtggccggcggcgtcttcttcaacttctgggtgctcttccacctctaccctttcgccaagggcatcctggggaggcacggcaagatccccgtggtggtgctcgtctggtgggccntcacttcgtcatcaccgccgtgctgtacatcaacatcccacacatccacgggcccggcggcaagcacggcggcgcgatcgtgaggcacggcggcgacgcacacaacca

SEQ ID NO: 61647 - DNA, 329 bp, Zea mays
cggcacgaggctagcagcacagcagcagccagagccatcccctctcctcgctacgcttcgcttcctcggcgccgattcctcctcctcctcctccaccctcgtccgtccccttccggcgcacgagctcgcccgagatggcgaacgcgagatcgggtgtcgctgtgaacgatgagtgcatgctgaagtttggcgagctgcagtcgaagaggctgcaccgcttcataactttcaagatggacgacaagttcaaggagatagttgtggaccaggtcggggatcgcgctaccagctacgatgacttcacaaacagcctccctgagaatgactgc

SEQ ID NO: 61648 - DNA, 329 bp, Zea mays
ccgcaatccatccagagcgaatccagctaacccttcgattgagcttggacctgagttcaagaaggttgccaatttccttgctcggttcaagtccatccccagcatcgtcgagcttgacagcttgaaggtttctggtgatgtctggtttggttctggaattacgctcaagggcaaggtgacaatcaccgccaagtctggagtgaagttggaggttccagatggagctgtatttgaaaacaaggatgtcaatggccctgaggatctttaagctagcttgccgtcaccagtttttcccaaggatttgtcaataggagcagccaacccaaatc

SEQ ID NO: 61649 - DNA, 331 bp, Zea mays
ctcagaccgagctgcacgagctcctcggcaagctcaaggaggaggatgtgagcacattgacaattctggtaatggggaaaggcggagtggggaagtcatctactgttaactccatcgtcggggagaggatcgccactgtcagcgctttccagtctgatggtctgagaccgatgatgtggtcgcgcacaagggcagggttcaccttgaacattatcgacactcctgggcttattgaaggtggatacattaatgagcaggctgttgacatcattaagagatttcttctgggcaagactattgatgttctcctgtatgtggatcgtttggatgc

SEQ ID NO: 61650 - DNA, 276 bp, Zea mays
ggggaggtggcatcatgggatccaagtcgcaggccaagacctaggctcgggatatgctgctcgctaaggaggctgcgcacgagatgagctagattgtctagtgatgtgtctggcctgtagtttgacggggaagttctgaactcgtattgtgggtttccgaatctagtctcatatgtttctgtccaccagagcatgtttagaagctttgcaagacagattttacagtgtttatgtgatgcctcagatccatgcagctttgctaccaattggctaaga

SEQ ID NO: 61651 - DNA, 352 bp, Zea mays
  unsure (1)..(352): unsure at all n locations
catgtccgcgtggagcatgtgcagccgtcccgctgcacagaaggagttccgcctgaggaaggtgaagaatgatcagctgaaggcggatgcaaaggagcgcggcgaggtcatcagcaccaagaggcagccgttgggtcccaagcctggcttcatggttgaggggactaccatcgagaccgtcacacncatccgtacgatgtggtcaatgatcttaagggcggatactaggttgtttgtttggtctttctacctgttctacatctgtgttactctagtgcgtacaattttgctcacactgagcagtagtatgaacctattgtgtggtcatgttgaaaattttcccgttctgtgc

SEQ ID NO: 61652 - DNA, 350 bp, Zea mays
agcgtgccaaggtcgaaggaaacctcccagtgtttggtttccacgaccccgcgtccttcgtgagctccatccagaagccccgtgtcgtcatcatgctcgtcaaggctggggcgccggtggaccagaccattgccacgctcgcggcgcaccttgatcagggggactgtatcgtcgatggtggcaacagtggtacgagaacacggagaagagggagaaggcgatggaagagcgcgggctcctatatcttggcatgggcgtctccggaggagaggacggtgcccgcaatggctcgtccttgatgcccgggggctccttcgaggcatacaagtacattgaagatattcttctca

SEQ ID NO: 61653 - DNA, 354 bp, Zea mays
ggttttctgattttagccgccgccgctgctcatctcacatccctcgagaagacgcctgctcctcgccgatcgatacgatggccgtcttctccgacctccacaccgccgacggcctcaagtccctcgaggctcacctcgccggcaaaacctatgtgtctggtgactccattactaaggatgacattaagtcttcgccgcggtgccgtcgaagcctggcgctgagtttcctaatgccgcccgctggtacgagaccgtctctgcggctgtagcctcaagattccctggtacagctgttggtgtaaatctgcctgcgggatcagctcctgcggcagctgctcatgcggatgaggctga

SEQ ID NO: 61654 - DNA, 324 bp, Zea mays
cacaggttccatcagtaccaggtggtgggtcgcgcgctgccgaccccaaccgatgagcaccccaagatctaccgcatgaagctctgggccaccaacgaggttcgcgcaaagtccaagttctggtacttcctgagaaagctcaagaaggtgaagaagagcaatggccagatgcttgccatcaacgagatcctgagcgcaacccgagcaccatcaagaactatggcatctggctgcgctaccagagcaggactgggtaccacaacatgtacaaggagtaccgcgacaccacactgaacggcgcagtggagcagatgtacaacgaga

SEQ ID NO: 61655 - DNA, 356 bp, Zea mays
gtctggtgccccagccctcagcgcgacgaaggtaagatgttcctgcggaggatcctgaccggcgggggcggcctggcggcgctgagggcggcgcgcgccgtgaaggagacgacggggatcgtgggccttgaggtggtgcctaacgcgcgagaggttctggtagggctctacgagcgcacgcagtaagagtcaaggccgtccccgaagacgagggttaccgcatagccgttgaatccttcaccggtcaccggctccagatctgccaggaggaggaggactggaagcgcatcgaggaccgaatcggatgcgggcaggtcgaggagctcatcgaggaggccgatgacgagctcaagctc

SEQ ID NO: 61656 - DNA, 341 bp, Zea mays
ttggctcatttcctattcgaaatactccaaggcccttgagtccttatatgagaagtttgatccagatttcattgatattaggacaaaagcacgtgaggtgttgcagagggaggacgatctaaatgaaattgtgcagcttgttggtaaagatgcgctggcagaatctgacaagattacactggaacagcaaagctactgagagaagattatttggcacaaaatgcatttaccccatatgataagttctgcccattctacaaatccgtttggatgatgcgcaatattattcacttcaacacattggcacatcaggctgtggagcgggcagctggtactgatgg

SEQ ID NO: 61657 - DNA, 352 bp, Zea mays
caacctgatatttgggcgcacttgggttgattctcctggagagatggtcatgacgaacctgacaactggagacaaagttgtgctatatttccagccatgcggctggtttggggctggccgttacgaggtggatgggtatgtgtacagtgcagcggaagaacccaaaatcatgattacagggagtggaacaagtccctgagttgccaaccatgtgaccaagaaggcgatcctcttccaggctacggagctgaaggagatctggagagttgctcctgccccacagggcgacaagtatcagtacacacacttcgcacacaaaataaacagcttcgacacggcacctaagaagctg

SEQ ID NO: 61658 - DNA, 347 bp, Zea mays
tgccttgtctgttgctcaatgtgtatgtctaggccgtgacgagattgtacgaggctctggacagatgcgaggagattcttggcaagcggcgtatatttgtggcgaccagctgactgaggcggacattcgcctgttcgtgactctcattcggttcgatgaggtctacgccgttcacttcaagtgaacaagaagctgctgagggagtacccaaacctgttcaactacaccaaggacatataccagatccccggcatcagcagcaccgtcaacatggaacacatcaggaagcactactacggaagccatccgtccataaacccatacgggattatcccgctggacccaca

SEQ ID NO: 61659 - DNA, 328 bp, Zea mays
gccgcctcctctccccagcacccggagctcgaccgaacgccgctcaccatgatcatccccaagaagaaccgcaatgagatctgcaagtacctcttcaaggagggcgtgctgtatgccaagaaggactacaacctggcggagacccgcagatcgatgtgcccaacctccaggtgatcaagctcatgcaagctttaagtccaaggagtatgttagggagacttctcctggcagtactactactggtatctcaccaacgatggcattgagcacctacgcaactacctgaacctcccgtctgagatcgtgcctgccacgctcaagaagtctg

SEQ ID NO: 61660 - DNA, 342 bp, Zea mays
aagcactgcaggccatcctgttatccagacgagcattacataccgacttatcttcatctgttccatgggccactcaacgccaacaggactatcacatgggttgattggtcaagaggaggcccgcacccagcaagttatggtgccacagacatcacagaagacttcatccaggccatcaggataatggtacgcagtgcttttacaactcgaagcccacctctgtctgctacctcttcgcgaggaagttcgctcctaatgctttgccacggctgatgaacctcactcgaccgtgctggacttctgagccgattctcaccatgcgggcgggcgggcgtcgttgtc

SEQ ID NO: 61661 - DNA, 341 bp, Zea mays
ctactatactatactctaggaagcaaggacaccaccgccatggcagccaagatgcttgcattgttcgctctcctagctctttgtgcaagcgccactagtgcgacccatattccagggcacttgccaccagtcatgccattgggtaccatgaacccatgcatgcagtactgcatgatgcaaataggcttgccagcttgatggcgtgtccgtccctgatgctgcagcaactgttgggcttaccgcttcagacgatgccagtgatgatgccacagatgatgacgctaacatgatgtcacattgatgatgcgagcatgatgtcacaatggtcttgcagacatgat

SEQ ID NO: 61662 - DNA, 337 bp, Zea mays
atcacaacagaagtggatgatatccagagggcagtggcataatcaagtaagaagaccacaatcagttttcaagaattacaccaaaatgaataccgcacgccactacttctagggattggcctacttgtactgccaaatcttagtggaatcaacggtgtactgttttatgcaagtagcatttcaaagctgcaagggttacaaacagcgacttggccacctgttcacttggtgctattcaggtccttgctactggagttacaacatggctgttagacagagctggacgacgcatcttctcattattctactctggcatgctctatgcatcttgctgttc

SEQ ID NO: 61663 - DNA, 334 bp, Zea mays
tgcggactcatgtcgcaaggcaggctgccaagagcatcgtcgccagcggccttgctcgccgcgccatcgtccaggtgtcttacgccatcggcgtgcccgagcctctctccgtgttcgtcgacacgtacggcaccggcgcgatccccgacaaggagatcctcaagattgtcaaggagaactcgatttcaggcctggcatgatcatcatcaaccttgacctcaagaaaggcggcaacgggcgctacctcaagacggcggcctacggccactttggaagggacgatctgacttcacctgggaggtggtgaagcactcaagtcggagaaacttctgct

SEQ ID NO: 61664 - DNA, 346 bp, Zea mays
tgtggagctgacgggctacttgaggctttctcctgttccttagctaagtttcagaagctgaaggatgccattgcaatgcacaacactgctcgttgcagcattggtccacctgttggagttggcgatgttgacttgctggataacgcgagccctcaagagaaacctgcagaagctagcccaggtagattcatgagaatgagctccacctcatccacttctacgtcctgctcattgttttcttcactatagatctcaatgtaatcagttgtggagaacataagtagcctcggttcatgaatcagatgtatggattattgtaacgcattcttgaaaggggaaaacatgt

SEQ ID NO: 61665 - DNA, 334 bp, Zea mays
  unsure (1)..(334): unsure at all n locations
accctcctacctcgncgtcgccgtcgcatctgccatgggggcgtacaagtacgtctcggagttatggagaaggaagcaatccgacgtgatgcggttcgttcaacgcgtgcgctgttaggaatacaagcagcagccggccatcgtccgcctcacaaggcccacccggcccgacaaagcctgcgcctcggcttcaagggcaagcaggggtatgttgtttaccgcgtccgtgtgaggcgtngtngcaggaaagagcctgtgcccgaaggtattgtctatggcaagccccagcacccaggtatcacctagctcaagttccagaggtacagagatctgt

SEQ ID NO: 61666 - DNA, 346 bp, Zea mays
ctcgacagggtcatgacaaacaggacgacagtcatagtcgcacaccgtctgagcactgttcgaaatgctgataccattgctgttattcatcagggaacactggttgaaaaaggtccacacagtgagcttctaagagatccagaaggagcttatagccaactgataaggctacaggaagaaaccagcagaacaatgggaaggttgatgccaatgctcgtccaggcaaacaaatatcaataaacaagtcagctagcaggaggtcgtcccgtgataacagtagccaccattcattctcagtcccattcggtatgcctcatgggattgacattcaggatggttcatctaa

SEQ ID NO: 61667 - DNA, 318 bp, Zea mays
acaagaccgtcctcaagacgctgcgcaactccaatggaaagctgatcatcatcgcaaacaactgccctccacttaggaagtctgagattgagtactacgccatgctggccaaagttagcgtgcaccatttccacggaaacaatgttgatcttggcactgcctgcggcaagtactacaggtgtgctgtctcagtatcatcgacccaggtgactcggacattatcagtaccacccctggcacccagtgagccagcccggactcatttgcagctgcttcgcctttctcaagatgcgatgagatgtagcgctccggccctat

SEQ ID NO: 61668 - DNA, 276 bp, Zea mays
gcttgcaagaactacgatggagatgtgcagagtgatttcttagctcaaggttttggatctttgggtttgatgacatcagtgttggtgtgccctgatggaaaaaccatcgaagctgaagctgcccatggcacggttacccgtcatttccgtgtccaccagaaaggaggcgaaaccagacgaacagcattgcttcgatctttgcatggacaagaggacttgcccacagggcaaagctcgacgacaacgctagactactcgacttcgctctcaaactcg

SEQ ID NO: 61669 - DNA, 342 bp, Zea mays
tgctgttcttatcattgactccaccactggtggttttgaggctggtatctccaaggatggccagacccgtgagcatgctctccttgctttcacagctggtgtgaagcagatgatttgctgctgcaacaagatggatgctactacacccaagtattcaaaggcccgttatgatgagatttgaaggaagtctcttcctacctgaagaaggttggatacaaccctgataagatccagttcgttccaatctctggttttgaaggtgacaacatgcactcagaagcatcagctctagctcctgctctccttgacatgatagaagaaggagatgttcacgacatgctg

SEQ ID NO: 61670 - DNA, 342 bp, Zea mays
cgcttccttcgctagcgccgacgcccaccagacgagatcggcccgaagaaggacaaggcaccgccgccgtcgtcgaagccggccaagtccggtggtggcaagcaaaagaagaagaagtggagcaagggaaagctaaaggagaaggtaaacaacgcggtgctgttcgaccaggctacctacgcaagctgctctcggaggtgcccaagtacaagcaaatcaccccttccatcctctccgagcgtctgaggatcaacggctcccttgctcggagggccatcaaggacttgatggcgcgtggcctcattcggatggtctcggtccactcaagccagcagatctaca

SEQ ID NO: 61671 - DNA, 324 bp, Zea mays
gtgggaggctgcaaaacctatacctgctgttgaacaaactcctatatatgatgaagatttagctgtgtgagtagagaacagattgactagttactgtgttgaatcttgacgcctgtcataaattataatcgaacaatataaccttgcagggagagcatctttgatgctttggaggtattgagccatcaaaactgtttgagcagctacttggcgtcattgtaagttcaataatgccacccccccttttttttgtctaactttttagctagctgaccttatttatcttacgacacatgttatcaccgtactgatttctatttgtga

SEQ ID NO: 61672 - DNA, 341 bp, Zea mays
gagatcttcctaagattgtcgtagccgcgtaccatttgattccctacttcatatttgacgctcaagaaggttctaggagtgcactgtttgcagcatccgatccccaagtcccggagtactgcgagacgctcaagtcggaggactggccagtttgtgcctgcattaactatgactgtagtccgatgaatgcgtctgaagaagcgcacaatctggagacctcgcagctggtctgggagaagacactggagatggtcggccttccgccggatgccctggagaagctcatcgccggagaatcagttcagtgccgttacggacaacaggatacaacttaacttttt

SEQ ID NO: 61673 - DNA, 342 bp, Zea mays
  unsure (1)..(342): unsure at all n locations
caaatatatatgctgatggaagcatctgtttggatatcctacagaaccagtggagtcctatatatgatgttgctgcaattttaacttctatgcagtccctgctgtgtgatccaaacccaaactcccctgcaaactcagaagcagcaagactgttcagcgagaacaagcgggagtacaaccgcaaagtccgtgagatcgtggagcagagctggacagccgactagtgcataaggatgctcgtcgtgnccgataggggcaacaataagaagcgtgaanacacaaaacacacccactccttgtgtttctggttcgccaggcttgtcgaaacattgaagaacccag

SEQ ID NO: 61674 - DNA, 210 bp, Zea mays
gttcgtcctcatggcgccgccgcagccgaagtcgggcctcttcgtgggcatcaacaagggccatgtcgtcaccaagcgcgagctgcctctgcgcccgtcccaccgcaagggaaagcaacgaagagggtgtccatggtcagggcctgatcagaagttctggctttgctcttagagacgtatcacgacttctgaagttgcaagacacgcgct

SEQ ID NO: 61675 - DNA, 338 bp, Zea mays
cagacggatccacagagggtgtgcagccaggttggtctgtgcgtgttcgatggcgctcgatctgtcagcgaggggattgaatctgttgtcgggaaagaaaacctgggctcagatgtcatgtgctcggcctgtcagatggctgtcgtgtggatagagaaccagctccgcgaaaacaaaccaaggagctcatactgcagtacgctaaccagctgtgtgagcgtctgccgagccccaacggagagtcaacagtcagctgccaggagatctccaagatgcccagccttgcgttgcaccatcgcaactagaccttcacgctaacacccgagcagtacattgtg

SEQ ID NO: 61676 - DNA, 346 bp, Zea mays
aaagctattgtagaggcttccaagaagagcccgttgttttctcaattcataaaggacttgtcagttccaaaagcgaccagggtgaaggctatagccgaaatatttgctgacgctgggttttcagatgttacaaagaatttcttggctgtcctggcggacaatggcaggctgaaatatatgaacgcattgcggagagatttgttgatttgactatggaacataagggggagatgaaggttgtggtcaggacagttatttcactcaccaaggaggaggagaaagaactcaaggaaaccttgcaggatatccttggggataacaatactattttgggtgaacagaagat

SEQ ID NO: 61677 - DNA, 338 bp, Zea mays
agccggccaccgtggtcatcaccgacgagtgtcccggcggtgtctgcctcgcagagcaggctcacttcgacatgagctgcacctccatgggcgccatggcgaagctcggcatggccgacaggcttcgcgccgatggcatcctcaagatccagtacaagagggtgccgtgcaagtacagcgggtgaacatcgccttccgggtggaccagggatccaacccgttctacttggaggtgctcatcgagttcgaggacggcgacggcgacctcagcgccgtccacctcatggaggccgggtgcggcacgtggacccccgatgtgcagaactggggcgcgctct

SEQ ID NO: 61678 - DNA, 268 bp, Zea mays
tgccgccgccaccatgtcgctgatcgccggcgatgacttccaacatattctgcgtctgctgaacaccaacgttgatgggaagcagaagatcctgttccgcatgacctccataaagggtgttgggcgccgcttctccaacatcgtctgcaagaaggccgacatcgacatgaacaagagggccggttagcttgacgctgaagagctggagcgcctgatgacggtcgtggccaaccctaggcagttcaaggtgccggactggttcctcaac

SEQ ID NO: 61679 - DNA, 372 bp, Zea mays
cggcaggaaggcggtgatcgtgcgcgtgttcgaggagggcacccgcgaccgcccctacggccactgcctcgtcgccggcctcgccaagtaccccaagaaggtggtccgcagggactcggccaagaagacggcgaagaagtcgcgcgtcaagtgcttcatcaagctcgtcaacttcacccacctcatgcccacccgctacaccctcgacgtcgacttcaaggacgtggccaccggcgggcccgacgcgctctccacccgcgacaagaaggtcgccgcatgcaaggccgccaaggcgcgcctcgaggagaggttcaagaccggcaagaacagtggttctttaacaagctccgcttctagatggtacggcgtccg

SEQ ID NO: 61680 - DNA, 351 bp, Zea mays
agagaccaacctgaggcacagctgtaagcgtataatggacatggtgagcagccagcacccctggtttggaatggaacaggagtatactctcatgggaacagacggccaccctttcggctggccttctaatggcttccctggaccccaaggaccctattactgcggtgtgggagctgacaaggcttatggccgagatatcgtggaggctcactaccgggcctgcttgtatgctggaatcaagatcacagggacaaatgccgaggttatgcctgcccagtgggaattccagataggactctgcgaaaggatccgcatgggagatcatctctgggtagccgttttgacttgcat

SEQ ID NO: 61681 - DNA, 367 bp, Zea mays
caggaagcaggggctagacgcggatcggcgagcatgaggggcggcggcggcggcgggatgatggacgatgaagagagggtgggccatgcggagatcacgaccagtttcggtcccgagctgcgcgcctgcctccgatgccgcctcgtcaagacctacgaccagttcagggagaacggctgcgaaaactgcccgtttctagagatggacagagagcacgacaacgtcgtcaactgcaccacccccaacttcactggaattatctctctgatggaccccagtaggagctgggcagcccgttggttgagaattggcaggttcattcctgggtgctatacacttgctgtctcggaggagcttccagaagagt

SEQ ID NO: 61682 - DNA, 354 bp, Zea mays
tgcaacatcgagcattctgtgattggagtctgctcacgtgtcagctctggatgtgaactcaaggactccgtgatgatgggagcggacacctatgaaactgaagacgaagcttcaaagctactgttagctgggaaggtcccagttggaataggaaggaacacaaagataaggaactgtatcattgacatgaatgctaggattgggaagaacgtggtgatcacaaacagtaagggcatccaagaggctgatcacccggaagaagggtactacataaggtctggaatcgtggtgatcttgaagaatgcaaccatcaacgatgggtctgtcatatagatcggctgcgtttgcgtctac

SEQ ID NO: 61683 - DNA, 362 bp, Zea mays
ctcggttgcttctgcatttgctggttatcaggaagctgtgcaagacagggatcacaaattcttgacaaaagcagtggaagaagcatatcgaggagtcgattgcggtgacggaggtccattcggagcagttgtcgtctgtaatgacgaagtagtagtcagctgccataacatggttctgaagcacactgaccctactgcgcatgctgaagtaactgcaattagagaggcttgcaaaaagcttgggaaaattgagctctcagactgcgacatttacgcgtcctgcgagccatgcccaatgtgctttggtgcagttcatctctcccgaatcgagaggctggtttatggggccaaggcagaggctg

SEQ ID NO: 61684 - DNA, 346 bp, Zea mays
tcgtatcccacatggatacattggacaaggtaatgtattaggcttgccagacacacagaggatagatcgtctatatactggaccaagttcgtgcactagtaaatgggatcgctctacgtttacagccacaagggcttgatgtttccccaaagattcacattgctagtcggctgatcatagatggagtaggtagatcatgcaatcagcgggttgagagagttagtggcacacagcatacttacatattacgagttcacttctgagatgaaaatgggatacttatgaagtggatatcaagattatgatgagaggcgatatctggagacatttgctgaggatgctgctg

SEQ ID NO: 61685 - DNA, 367 bp, Zea mays
tcgttctagcacaacaacgagaccttcaggcaaagattcctgatatagagaagtgtttggatattgtttcaacattacaagctaaaaaggatttgggtgaggcacttatagctgattttgaattatccgaggggatatactcctgtgcgaaaatcgaggatactgactcagtgtgcctgtggttgggtgcaaatgtgatgctggagtactcttgcgatgaggccaatgccctcttgaagaaaaacttggaaaatgctaaggccagcttagaagtccttgttgctgatcttcagttcttgcgagaccagcaaaccatcactcaggttacaattgctcgggtattcaactgtgatggtacacacggaga

SEQ ID NO: 61686 - DNA, 327 bp, Zea mays
ctcctgcaaatcggtaatacattctgcaaacttcctggtggacggttgaagcctggagaaaatgaaatcgagggtttgaaaagaaagttatgcagcaaacttgctgtgaactcgccttcctttccacctaactggcaggttggagagtgcgttgctgtgtggtggaggccgaactttgagactgtgatgtatccttactgtcctccacatatcactaagcccaaggagtgcaagaaacttttcattgttcacctatccgaaagagagtattttgctgttccaaggaatctgaaactgcttgctgttccactgtttgaactctacgac

SEQ ID NO: 61687 - DNA, 316 bp, Zea mays
  unsure (1)..(316): unsure at all n locations
tctcatttctcncgagcgccgccgcgagcctctgttccagcttcgttcatggcttccctcaccggatccgctctctcctttgcgaggcccgtcaaggcaatcagcattaagtctgtctctttctctggtctaaggaaggataatgtagccttccgcttgcagccagtgccacaaagattcgctgtctgctgtcctgctaaaaaggagactgtggatcgggtttgtgatattgtcaagaagcagcttgcacttcctgagggcactgaggtctgtggctcctctaagtttcaagacctcggtgctgattcgttggaca

SEQ ID NO: 61688 - DNA, 296 bp, Zea mays
cttgaagaacagaaaccagaaagggtaaagccttttatgactggagctgctgagcaaattaagcacatccttgctaatttcaataactaccagttttttattggtgaaaacatgaatccagatggcatggttgctctactggactaccgtgaagatggtgtgactccattcatgattttctttaaggatggcttagagatggattaatgttaacaaattggatctatcgcctgtcaccataattggctgctgcttaccatccatacaacaccagtgactgtaggacaaatgggact

SEQ ID NO: 61689 - DNA, 337 bp, Zea mays
caaccgctgccacgacctcaagacgcgccgcatgaaggtcttcgaggacaacttcgtacaggagcgcaagaaggtgatggctcagactggtgagatccggtgcgccatggatcacatcctcgaggccgagaggaagggcgagatcaaccacgacaacgtcctctacatcgtcgagaacatcaacgtcgcagcgatcgagacgacgctgtggtcgatcgagtggggcatcgccgagctggtgaaccacccggccatccagcacaagctccgggaggagctcgactcggtgctaggcgccggcgtacctgtgacggagccggacctcgagcgcctccct

SEQ ID NO: 61690 - DNA, 365 bp, Zea mays
gcttgagagatagatagaatatgcaactatcttggcctttgatgtcaaagtgatgcctgatgcccgcgatctcgcagaagagtccggtgtgaggatctttgtggcagatataatataccatctgtttgatcaatttacagcatacattaagaacctcaaggaagagaagaagaaagaaagcgctgaagaagctgtgttcccttgtgttcttaagattatgccaaactgtgtcttcaacaagaaggacccaatcgttttgggtgttgatgtccttgaaggaatagccaaggtgggaactcctctctgcatacccagtaaagaatttattgatattgggaagattgcctacagttgaatcaaccaca

SEQ ID NO: 61691 - DNA, 349 bp, Zea mays
cctagtcgctacccagatcggcgctcgacgcaaggccgagcaggcgatggccgcagcggcgtcaatggggcaccttacgcgccagccgagctggaccttcctggtttcgtgccgctgaagctgtcccaggtcgagatcctcgtgtcctacctcggcgcctccgtcttcgttttcctcgccgtctggctcgtctccggaagatgtgtcagattatccaagaccgaccgtctgctcatgtgctggtgggcattcacagggttgacccacataatgatcgaggggcactttgtcttcactcctgattcttcaagaaggagaacccaattctttgatgagtctcgaagagtat

SEQ ID NO: 61692 - DNA, 363 bp, Zea mays
gttcttctacttggaagatatcatgggaaaggtgaagcagtccgaaaaggaatgcttcattcacgtggtgaactattacagcatgttgatgctgatggtgcaactaaagtgaccgatttggaaaagcttgaagctcagattcatgcaatggctaagaaagctaagtccagcccagggacatctactagttcatctcagaatctatctgatgttgaagttgctgtttttggttcccgagctcatctagagaagcaggctcttgcgacaaggaaatggtatagaaactttcttatgaaaggtttccatttggtagttttgttgactgctggtcacgggatcaaagatacacagtgtggggttaag

SEQ ID NO: 61693 - DNA, 355 bp, Zea mays
caagctcaccctagagggggaagagggcgaccgaaggcggcgatgggtatcatcatggacttcgcggagaatctgatcctccgtctgatggaggacccggacaagcgcgaccaggttcggcgggagcatgtctacaagatgaaggagcggtgcgagcgcactaaggcggcgtggagcctccctctgcgcccctacggcttctggaccttcgaccgcttcaactcgcagctctcctgggatcgccagatcagccaggccgccggccgtacgggacccctacgacgacctcatcgcacgccactctggctcgccgccgtctatctgaacatcgttacgatctttgcccagaaggtct

SEQ ID NO: 61694 - DNA, 278 bp, Zea mays
cacggccatccaggagctcttcaagcgcatctctgagcaggttacggctatggaccgtcggaagggtttcctccactggtacacgggtgagggcatggacgagatggagttcaccgaaactgagagtaacatgaatgacctcgtctctgagtatcagcagtaccaggacgctaacgcagatgaggaagaggatttcggagatgaggcataagaagaagtctaaggcggaagcctgcgtcaactcaggctggctagtatccttagcgtatttccaactg

SEQ ID NO: 61695 - DNA, 356 bp, Zea mays
  unsure (1)..(356): unsure at all n locations
ttctacttctacgagaagatgaagagccacgttcctgaagagcacagaataggtatcatagcaaagctcggttgcggatcagttgcaggtttgctaggtcagacaataacataccccctagatgttgttaggcgacaaatgcaggttcaagccctttcgtcatccagccttgtgggtagaggaacatttgaaagcctggttatgatagcgaaacagcaaggctggcgacaacttttctcaggattatctatcaactatttaaaggtggtgccatcagtagccataggatttactgtttacgactcaatgaaggtctggctanaagttccgtcgagggagagaactgctgttgctgt

SEQ ID NO: 61696 - DNA, 357 bp, Zea mays
tgtggaccgacgacgagaaggaccatcagtacgaacggtcggtcgaggcactgtctgttctctcccagtccgtcgacgcgaaatggcggcagtccaagtggtgaagatccacgtccccgggcctctgtacatgacagaggaagaggcacaaggcgttgtttcatcgggacattctgtgccgaggccagcgggcacgagattggccgcctcgtacgtcaacttctacatcgccaatggcgggatcatagcgccttccttcggcgacaggtgggacgaggaggcgtacgcggttctccagaaggcgtttcctgatcacgaggtggtgatggtcgaaggcggacgggagatcgcgctggg

SEQ ID NO: 61697 - DNA, 347 bp, Zea mays
ctcagatcctccctaagattgccatggcggaccagctcaccgacgatcagatcgccgagttcaaggaagcattcagcctcttcgacaaggacggcgacggctgcatcaccaccaaggaacttggaactgtgatgcgctcgttggggcagaaccctactgaggctgagcttcaggacatgatcaacgaggttgatgctgatggcaatggaaccatcgacttccctgagtttctcaacctgatggcacgcaagatgaaggacaccgactctgaggaggagctcaaggaggccttccgcgtgttcgacaaggaccagaaggcttcactctgctgctgagttcgacatgtc

SEQ ID NO: 61698 - DNA, 327 bp, Zea mays
  unsure (1)..(327): unsure at all n locations
tgctgcctccggctctcgagtctcgtccacccgtcgtcctcctagctcctctactcgccagtcgncatgggcaagactaagatcggaatcaacgggcttcggaaggatcggcaggctcgtggccatggtcgccctccagagcgaggatgtcgaactcgtcgccgtcaacgaccccttcatcaccacggactacatgacctacatgttcaagtacgacaccgtccacggccactggaagcacagcgacatcacactcgaggactccaagaccttctcttcggtgacaagcggtcacgtctttgcatcggaacctgagaaatccgtggg

SEQ ID NO: 61699 - DNA, 124 bp, Zea mays
gtcagaacaagcttgatcatgtgcttgcgctcaccgctgagaacttcctcgcaaggcggcttcaaacacttgtcttcaaggctggcatggccaagtccattcaccatgctcgtgtcttgatcaa

SEQ ID NO: 61700 - DNA, 362 bp, Zea mays
atatggttgagtacttcggtgagcagctctgcggttctgcgttcactgccaatggctgggtgcagtcttatagggtcaagtgtgcgtcaagcctgccgatcatctactgtaacgtgagccgccccaaccccatgaccgttgtctggtcgtgacggcgcagagcatgacgtctcgcccaatgaatgggatgatgactggctcagtcacagtcctcaactggtcctgcgtgcggaatgaccagccgaggtttgagacttgctgacagatcgctcttgcgatcaagctggaagtcgagtgtctcgacgctggtagtattcaggtgatccaaatcgactaggatgcactgagtagatgagctgcgc

SEQ ID NO: 61701 - DNA, 347 bp, Zea mays
ccacttcctgcactcactgtgctagctgctcaaaccgtagtagtaacagtccatcaccaccaatggctcccaaggttgcgctcttccttgacctgagcctcctgtttgctgccaccgcgcatggctgcgaacccaactgttctggcccagtcgtcccaacgccgccagtcgtgccgactccgtcgtcgcacagccacgggcgctgcccgatcgacgcgctcaagctcaaggtgtgcgccaacgtgctaggcctcgtcaaggtcggcctaccccagtacgagcaatgctgcccgttgctggagggtctggtggacctcgacgccgcattgtgctctgcacgccatcaa

SEQ ID NO: 61702 - DNA, 350 bp, Zea mays
  unsure (1)..(350): unsure at all n locations
cgactgtggacacgggagcttctcaaacaaccccaagctgaacagcgtggtcggacacatactccattcctccattcttgtcgcgtaccacggatggaggattagccacaggacgcaccatcaaaaccacggccacgttgagaaggacgagtcctggcacccgctaccagagaggctgtacaaaagcctggactttatgactaggaaattgcggtttaccatgccgttcgccttgctcgcattcgcggtatacttgttcgcaaggagtccagggaagtcaggatcacacttcaacccaagcagtgnattgttcaacctagacgaaagaggacatcatacatcgcggcatc

SEQ ID NO: 61703 - DNA, 344 bp, Zea mays
gtcaaagactatgcgtacccaagggctatcgcgctaggagtagcccaaatcctgatagcgatcgggcacttcaacttcgccatggcgtggcccgggacaatgtacgtcggcacgctgctcgtgggggtaggctacggcgcgcactgggccatcgtgccagccgcggcctctgagctgttcggggtgaagaacttcggggcgttgtacaacttcctcacggtcgcgaacccggccggctcgctggtgttctcgggggtcatcgccagcggcatctacgacgccgaagcagcgaacaggcccagcagcgcacagccctctaagctgtggcgacgagtggagagtgg

SEQ ID NO: 61704 - DNA, 358 bp, Zea mays
caacaagggtttgtattcaacaaccttcaaagttccagatgtttatggagttttccagttcaaagttgagtaccaaagactgggatatactggtctgtctgttacaaagcagattccagtacgtccttacagacataatgagtatgagagattcataacatcagcgtacccatactacaccgcctcattttcaacaatgggtgctttcttcgtattctcgtttgtgtacctgtaccacaaataaaggactcatgggagcgcacaagtctctggaggctgacgtgaccaagatctgtgggcactgaatgttgtgctataagccaagagttacccggcgccaattgtatggaaccatgtt

SEQ ID NO: 61705 - DNA, 355 bp, Zea mays
  unsure (1)..(355): unsure at all n locations
ccgttatctctactttgtaaattggcttcatggcgatattaggcagtacaacattgaggatcncgcaaagcctttcttggctggacaagtatgggttggtggtcttcttcagaagggcagtgatgtcgtctatgttactgatgatggtcaggaacagcagtacaatgtgcctcaagtcaagggtcatcgacttagaggtgggccacagatgattcagctgagcttggatggcaagaggatatacgtgacaaactcacttttcagccgatgggatgagcagtttttcggtgatgatcttgtcaagaagggctcgcacatgttgcagatcgatgtcgacaccgagaaaggaggctgg

SEQ ID NO: 61706 - DNA, 345 bp, Zea mays
cgatctcacggacacagggctgggcgtgcgctcgaagaggttcgctctcctggtcgacgacctcacggtcaccgtcgcaaacatcgatcgaggcgggcagttcacgatctccggcgctgatgagatcctgaaggcgctttagaagctccgtctcctctagaagccgagcaacgatcggtctatagtctgaactcgcctctgaataacttgtcgttgggcaaggtctagttcggtgttgtgtatggaacggtcgtcactgagtcatgcacgatctggtatcagtgttgtctatgttcaccggtttgaggactctctgatcagcgtgacacaagtgatctgagagac

SEQ ID NO: 61707 - DNA, 341 bp, Zea mays
gatgattcctccgggcgctctggtcatgctgactcccctcatcgttggaaccctctttggcgtcgagactctctccggcgttcttgctggtgccctggtttctggagtgcagatcgccatctctgcttccaacaccggcggtgcatgggacaatgccaagaagtacatcgaggctggtgccagcgagcacgcgaggaccctcggtcccaagggatccgactgccacaaggccgctgtgatcggtgacaccattggtgaccccctgaaggacactccggcactcgctcaacatcctcatcaagtcatggcgtggatcctcgtgtttgcacctctttgccacc

SEQ ID NO: 61708 - DNA, 353 bp, Zea mays
  unsure (1)..(353): unsure at all n locations
cagaggcagcatagcagcagccaactccatccatcctctttcgcctcctcgcttcgcttcctcggcggattcctcctccctcgaccgtcgacgtccccgtccccttccggcgcgcgagctcgcccgagatggcaaacgcgagatcgggtgtcgctgtgaatgacgagtgcatgctcaagttcggcgagctgcagtcgaagaggctgcaccgcttcctaactttcaagatggacgacaagttcaaggagatcgttgtggaccaggtcggggatcgcgctaccagctacgaggacttcacaaacagcctccccgagaatgactgccgatacgcgatctatgatntcgactttgtc

SEQ ID NO: 61709 - DNA, 351 bp, Zea mays
cgaacacaagtgcagcatcttatgcagatagatttgaagggctggggggttggttatgtaccttcatttcagcagcattgcctacttcatatgctggacaatgttgctgggaatggttttcacaaagtgatgagagtcaagtgcttcctaggattcctgttatggtcaacatgactcaatctgtttcttccaagaaaggcagaaaagcacaagagagtactacacaaaccggcattcagatggatccaagcatacattccacagtgcttgacgaggagtctaatgaagaggatgaatctctgatacgtgaatctgaaccagagcatcaaatctgaggatgtgcagatgtag

SEQ ID NO: 61710 - DNA, 351 bp, Zea mays
cgcccgggtttatcttcaggcgctctgtgtgtgtgggtgtaactcacatgtcccgttcccaagtccgcacttccatagaggatctcgccgaggattatcatggggacacttatcatttgattctcaagaactgcaatcatttcacagcagatgtctgcgagcgtttgaccgggaagccagtacctggatgggtgaatcgactcgccagattaggtcccatatcatttcacgatcaatctgttgctccttgatgctgattcattctcaactccttcagccgtcatcgtgttcgaattgcaggttcgatcttcaattgtgtattgctgacagtacaaggatcagcagtcagag

SEQ ID NO: 61711 - DNA, 348 bp, Zea mays
cacaggcgtaggtgtcatgatgaatgatatgaagagcaggttctctgtaaatggaaagcccatttaccatttcatggggacatcgacattcagccagtacactgtggtgcatgatgtcagtgttgcaaagatcaacccacaggcacccttagataaagtctgcctgctcggttgtggtgttcctactggtcttggagcggtgtggaatactgcaaaggttgaatctggctcagttgttgctgtttttggccttggaacagttggacttgcagttgctgagggagcaaaagctgctggtgcttctcgagttattggcattgacatcgacaataaaaagtttgatgttgc

SEQ ID NO: 61712 - DNA, 345 bp, Zea mays
cgcgccgcgtcgtcgtcacatgcggggcagggttcgtcggcagccacctcgtcgaccggctcctagagcagggggacagcgtgatcgtggtcgacaacttcttcaccggcaggaaggagaacgtcgcgcaccacctccggaacccccggttcgagctgcttcgccacgatgtagtcgaaccaatcctcctcgaggtcgaccggatctaccacctcgcatgctccgcgtcgaccgttcattacaagtataacccaatcaagacgatcaagacagatgtcatgggaactttgaatatgtagggtctggcagagcgagttggtgcaggcttgtcgtgactagcacaag

SEQ ID NO: 61713 - DNA, 355 bp, Zea mays
ctatccaagtggaattcccagcagcattgaatgaactggtgcagaagtttcaagtctattacctagggaacgtgcctgtggctagactcgttggggtagatgtgattaatggagcctggagtcagtcgtgtcttccagtagtcgtgagcagtcggacccaagtcacgtcagcgtggcccctgccaccctcaccatctggcaccatcatgcaggagcagtgctggaggagtgtcgagtgcggttcctctccttcctggctgtgggcagagatgtgcacacgttcgcattcatcatggctgacggaccagcctccttctgctgtcacatgtattagtgcgagctcaatgctgccagt

SEQ ID NO: 61714 - DNA, 346 bp, Zea mays
ctactgtgtatggttgttctgatgctacggttgttcttggtgctgttggtaaggtagtaaaagtggagcattgtgaaagagtgcatatcattgcagctgcagaacggatttgtattgccaactgccgggagtgcatcttctacctaggagtaaatcaccaacctcttgtattgggggacaaccataaattacaagttgctccattcaatacatgctacccacaactgcaggatcatatgatgcaagtgggtgttgatcccagtgtcaacaaatgggaccaacctgttgtattgggagttgtggatccacatgattcattatcccatcctgctggggttgcagatgt

SEQ ID NO: 61715 - DNA, 351 bp, Zea mays
agttcacccacttaaagtttctctggaagatctatacaatggcacctcatagaagctctctctttcgcgcaatgtcatctgctccaagtgcaagggcactggctcgaagtctggtgcctcaatgaggtgccctggttgccagggctcaggcatgaaagtcactattcgtcagctgggcccttccatgatacagcagatgcagcagccttgcaatgagtgcaaggggactggagagagcatcaatgagaaggaccgctgtccagggtgcaagggtgagaaggtcattcaagagaagaaggttcttgacgttcatgttgagaagtggatgcaacacaaccagaagatcacttc

SEQ ID NO: 61716 - DNA, 351 bp, Zea mays
gtagaatcggagggagggagaatttcttccactgttcaaaatgtggatgttgctattcaattgcgctgaagaatagtcatgcatgtgttgaaggggcgatgcatcatgactgtccaatctgcttcgagtaattgttcgattcgacaaatgatgtttccgtcctgccttgtggtcataccattcatgtaaagtgcctgaaagaaatggaagagcactgccagtttgcatgccccctttgctccaagtcggtttgtgacatgtcgaaggcatgggcaaggctcgacatggagctggcaactctgtctgactcctgtgatcacaagatggtccgcatattatgcaacgactgcg

SEQ ID NO: 61717 - DNA, 317 bp, Zea mays
ccatcagcgacttcttcaaggtgtaccagttcgagaacctcttcgccaagcgcaacacgcccgtcgcgcacgccgtcgggatctgggactagcaggacctcatcaccgccgcggagctctgcgagcgccaggggtgctgcaccaccggcggcaagcagacgcagatgatggagctctgcgccatcctcggacacgtcggcgccaagacttcatgtgcggtacggcgtggcgacctgcgggccgacggcgtgggggctgtgctacaaccacgagatgagccgtgaccagacctactgcgacaagacgtacacgcagta

SEQ ID NO: 61718 - DNA, 347 bp, Zea mays
  unsure (1)..(347): unsure at all n locations
attggtgacnccctgaaggacacctcgggcccgtccctcaacatcctgatcaagctcatggcggtggagtcccttgtntttgctcccttcttcgccacccacngtggcctgctgttcangtanctgtaagggccacaccaatcatcacagcagaantatacgaccgaccgaccgtggacatntcgaataactcctgccaaatcgccagttcatgtgtattgtgcgctanncgcctagctgcactgctgtttttttggtctcattgttcgtattntctccttggcnctccccctagaggcgttactgttanccttactcttactcctgtagtgcacgtagaagagaat

SEQ ID NO: 61719 - DNA, 346 bp, Zea mays
atttgctgacgctgggttttcagatgttacaaagaatttcttggctgtcctggcggacaatggcaggctgaaatatattgaacgcattgcggagagatttgttgatttgactatggaacataagggggagatgaaggttgtggtcaggacagttatttcactcaccaaggaggaggagacagactcaaggaaaccttgcaggatatccttggggaaaacaagactattttggttgaacagaagattgactacagcatcatgggaggattagtgattgaattcgggcagaaggtgcttgatatctcaatcagggacagggcgagcaaatgggagctgtcttgaggca

SEQ ID NO: 61720 - DNA, 338 bp, Zea mays
  unsure (1)..(338): unsure at all n locations
gcgtggaaagggccatgaggcagagattcaggagttcttgaagatagcttttgcttgcacccagccccgtgtgacggagaggcattcaatgtatcgggtgttccacgctctgaagagcatcggagagggctgcgatgtcacggagcagtttgatgagttcccattggcctataacaaggatgattcagacgctatttagctgatgatgctgattgccaattcgattgtggaaatgtttggtcatgcttattgatgatatatatatttagccttgctatggacagaccggaagcatanatgagtgataagagaacaatatcgaggcaccaaatctagcg

SEQ ID NO: 61721 - DNA, 349 bp, Zea mays
ggatgctactgcaaatgaggaggaagaacaggaagatgacaaggagatgactctggaggaatttgagaaaataagagaggagaagatgtaagcactacttgcattgaaggctgaggagaggaaagttgaagttgacaaggatttgcagtctctgcagccactttcaaacaagaaagacaatgatgaagttttcattaagctgggttctgacaaggataagaagaaggaaaatgctgagcgtgatgagcgtgccaagaagtcggtgagcatcaacgagttcctgaaacctgctgaatgagataggtactatggcggctgtggcgtgagaggggccgtgcggagcgttgtg

SEQ ID NO: 61722 - DNA, 346 bp, Zea mays
tggcggcaaggggcatcgagtgatgacgatgcacgggcctctatgggttgtctgtatacggagacgtggacaagcgcgcgctcgtaagttatcgggacttagccttctgtcagatgtcttgcttccaaggattgttgttctgtcgagaggccgtgtcgttgttgcttcacaatttctgtgtgtaccagatcatacctcgagggcacgagttatgttttgctccgatttcagctgatgtgcatgtgccgtgtgtcgatgaccttgcagatcaggtcgatgatgtgctcgattgtttcagtttgggtactgtcatgtgcttgggtgtcacgctggtggtatgtctcac

SEQ ID NO: 61723 - DNA, 346 bp, Zea mays
aattgttaatatttataatttagaagagtatattactttggtggtggatgctacagttaagtcagggatacagctacaggttgaggcatttagatcagggtttaatcaggtgtttgacatgtcatccctccacatattttcacctcaagaacttgactatctaatatgtggtcgacaagaaatttgggagtcggaatccctggtggatagcataaaatttgatcatggatatactgctagaagtcctgcgatcgtgaatctactcgagattttgtcagaattcacccctgagcagcagcatgcgttctgccagtttgtaaccggtgctcctcggcttccacatggt

SEQ ID NO: 61724 - DNA, 345 bp, Zea mays
  unsure (1)..(345): unsure at all n locations
gctagttggaggccaggccttgtggctggggccaactatggccatgtgtatgcagtattcgagacagctacaaggaacacaggcaaaagtattgccaatgacgaancattgctaacgctactgccacattgctagcaagttgcatgatgctagaccacctcaagctccattcctatgccacctccatccgaaaagctgtcttagcatccatggacaatgaagatatgcataccccagacattggaggccagggcaccacatcccaagccatccaggacatcattcgtcacatccgcatcattaatggacgggctgtggatgcctagctatcgctgcagtttgctc

SEQ ID NO: 61725 - DNA, 317 bp, Zea mays
ataaagagggcatccccctgaccagcagaggctcatcgttgccggcaagcagctggaagatggccgcacgctctctgattacgacatccagaaggagtcaaccctgcacctggtcctccgcctgaggggccgcatgcagatcttcgtgaagaccctgaccggcaagaccatcacgctggaggtggagccagtgacaccatcgagaacgtgaaggccaagatccaggatacagagggctcccacctgacagcagaggtcatcttgccggcagcagctgagatggcgcacctcctgatacaaatcagaagatcacctga

SEQ ID NO: 61726 - DNA, 347 bp, Zea mays
attgaaatcggaattattcgagctgaccgtgagttcaaagttctaagctcatcagagatcaaggatttcttggaagatgtggagtaagttgtctgttgatcgattactgtttcaaacaagaatagcagcatcacttatgagcagccagcctgaagcttgtcttggttttatcactctgtaaactgatttgctccagcgacatgtcttggttttatcactctgtacactgatttgctccagcgacatgtggttcttacatttgaaaccctcctgagcgcatactgtagacaaatgagatacgtaagatggatgttgtatgtgacagtctctgcagtctgtgtatgtga

SEQ ID NO: 61727 - DNA, 316 bp, Zea mays
gtcagttggctgtgaagttgacaatgaaaagatggaactcctgctgtcccaactgagcggtaaggacatcaccgagctcattgccgcgcgcatggagaagtttgcttcagtcccatgtggtggacggggtgtcggtgttgcggagctgcacctgctgctggcgtagttgctctgcaactgaggcatagaagaggagaaggtggaagagagggagaagcgatgatgatatgggctcagctcttcgctagctgacatcatcacagtatgtttggcatgaaccaaggaaacagagtcatttaatttagctgttatgtgg

SEQ ID NO: 61728 - DNA, 345 bp, Zea mays
agttactcctcagcaccgttgctgcattgtggacatgttagctaaagccggcagagtggaggaagcttatgaatttgtgcaggaactgggggaggagggtgacttcgtttctatttggggaacactgctcgcgtcctgcaaagcacaggacaagcaggaattggtgaatttggtgacagagagattgatctgcattgagaagaagtatggccatgctggttacagcgttttgttgtcacatatttttgctgctgagggcaactggagtagtgctgatagcctgaggaaggagatgaggttgagaggattgagcaagatggcaggttctagttggattatagtcca

SEQ ID NO: 61729 - DNA, 344 bp, Zea mays
tcgaccgccgccgtcacagttcgcttcgcgtcaccgagagctcgtcggcctccgtccccgcgagaagcgagagcatggacacccaagtgaagcttgctgttgtggtaaaggtgatgggcaggaccggctccaggggtcaggtgacccaggtcagagtgaagttcttggatgaccagaaccgtctcatcatgaggaacgtcaagggcactgttcgtgagggtgacatcctgaccctgctcgagtctgagagggaggccaggaggctgcgctgaagcccttgttgtcttggatgtaattctgttaattttgttcaatgtatgtcgaacttagcgtgtgacccatac

SEQ ID NO: 61730 - DNA, 337 bp, Zea mays
ggttacttcgaggagtatgcgctttggcggctcaggccctgagggcccacggaccccgtggcgtggccgtactcgtccatggctctggacgcgtgtcctactggtgaggagcaggctactgggctggagaggtagatcatgatagcagcacagaggggactggatccatgcaatatgctacctccacaggcagcttcgtgcaccaaggaagaccccagtctagtcccatccgttagcatcaagagaatagtgggctgcatctgtgaagaggacaactgcactgtcatctggttctggctgcaccaaggcgagatcagcgatgcccaactgtggacac

SEQ ID NO: 61731 - DNA, 347 bp, Zea mays
atattagtttggaagatggataatcgaggatcggcaaggcgagggctgcattttgagggacaactgaagtacaacattggtcgtgttgatgctgaagatcaattagataggggctgaagtggttaatagagaagggccttgcataacctggccatattggtatctatggctggagctacggaggatttctctcagcaatgtgcctcgcaaggtttccagacacagagaagtacttgggtctgcacgcggagcatccggatgcttacgagtacgggtcaataatgtaccacgccaagaacctgataaggaagctgctcctcatccatgggatgattgacgagaacgtg

SEQ ID NO: 61732 - DNA, 300 bp, Zea mays
  unsure (1)..(300): unsure at all n locations
gaaagctattgttcaaaagcacaaggctacccctgaagaggtagaggtacaattgactcggtatcgtcaagatggaatgccggacacaaaaagattgcacggactgaaagctctagccgaagcctctgttattgtgagggaactcacccctgcaacgaaccatttcatgtgtgcttggtttaatgaagtggttcgcttcacatctcgtgatcagctcagttttccatacgttttgtggcggctaaacatgcatggattgagcnatgtttcctgtatgcactcgcagggatcttgtgatag

SEQ ID NO: 61733 - DNA, 301 bp, Zea mays
gacgatttgaataaggcagggaaaaaacatgtcgttgttgaaggggagcttactaaggaggccatcatggaattggcacggaatgaacagttaaaggagcgccacgaaatggagagaaaactgcagaagtttgcaaaaacaatggattatctggaaagggcaaaaaggcaggaagaggcaccactgattgagcaagcttttcaaaaacgtcttgaggaacagaagatccttcacgagcaagagcagcttcgggagattgaactcagcaagcaacaccatgccagcgacttgcaagagcaaa

SEQ ID NO: 61734 - DNA, 303 bp, Zea mays
agtgtgagtacgaccagaagatatccattgatttctacaaggaaggagatcccttgaaaccagctgtgacaggcgtcttagtgttcgtttccactccagatccaattggcaacaagtactatcttggccctgctcctttgcaggatatggcaatgcaaattgctacagccaatggccctactggctataatagggattacctgttctcaatggagaaggcattagccagcattagccacgaagatgattcgatcatagagcttgcaaacgaggtgaggaaggtgctcaacagaacaaaggaga

SEQ ID NO: 61735 - DNA, 298 bp, Zea mays
gttgactacctgctgacagggcaaagggtggaccacttcagcttctcgtctctcgctctgttgttcctcgcgctgtcgtgcttcatcgcgatcggggtcaacctgagccagttcatctgcatcggccgcttctccgccgtgtccttccaggtcctgggccacatgaagaccgtgctcgtcctctccctcggcttcctcttcttcggcaaggaaggcctcagcctccaggtcgtcgtcgggatggccctcgccgtcctcgggatggtgtggtacgggaacgcgtccgctaaaccgggcg

SEQ ID NO: 61736 - DNA, 299 bp, Zea mays
atttcataaaagttgtccctacaatatacactgatattagaggacgcggtattcattcaaaccagttctcggtaacggaacattttagagatggaaatgttcgtccgaaatcccaacctggagtatttttcttctatgatttctcacctataaaggtgatattcacagaagaaaatagatccctactccactacctgacaaacctttgtgctatagtgggagctatgagcatcaagtttagtataggtgtagttaccatttgttaagatatttgctacatctacaatcttcactcttct

SEQ ID NO: 61737 - DNA, 286 bp, Zea mays
ggcggagacagagtggtacaacgaggttgtcctcagcgcgtgggccaggcgactggtggcgcggcctgccgcacccggtgcagtcatggatgcgcaactgcgtcggcggttacctcctctatttcatctctggtttcctctggtgcttcgtcatctactactggaagcgccacgcctacatccccaaagatgccatccccacaaatgaagctatgaagaagcaaatagttgtagcatcgaaggctatgcctttttactgcgctcttccaactttatctgaatatat

SEQ ID NO: 61738 - DNA, 290 bp, Zea mays
caccattagagcgcgcgcgacaagctcgtggtgaggttttcgagatggaggttatcgattagatcctggacgcggcggtggatggtcggacggcgttctcgtttaagtacttccctccttctgcgacatcacctggggcgtcgggggatccaccgctgaccttaccctcgatatcaccaaccgtatgcagaacatggtgtgtgtggaaaccatgatgcacctgacatgtacaaacatgccagtagagaagattgaccatgccttggcaaccatcagatccaatgggattc

SEQ ID NO: 61739 - DNA, 301 bp, Zea mays
aacaaattcctattgctttcatggatagggttaaggaggatttcacaaaaaggtatggtggtgggaaagctgctactgctgcagctaacagcctcaatcgagagtttggatcaaaacttaaagaacacatgcagtattgtgtggatcaccctgaagaggttagcaagctggccaaagtgaaggcgcaggtttcagaagtcaagggtgttatgatggaaaacattgaaaaggttctggatcgtggagagaagattgagctgcttgtcgacaagaccgagaatcttcgctcacaggcacaaga

SEQ ID NO: 61740 - DNA, 301 bp, Zea mays
aaatcactggtgtcaatatccgctgatctgatgcatgacttcaagactggacatcttacattaacatcacctagatcaatgattattgctcaggctattggcactgccatgggctgtgtcattggaccactgacatttttactgttctacaaggcttttgacattggataccctgatgggtactggaaggcaccatatgctctaatctaccgcaatatggcaattcttggtgtccagggcttctctgctctgcccctgcattgtttgcagctgtgctacggattctttcgatttgcagtgg

SEQ ID NO: 61741 - DNA, 277 bp, Zea mays
caaactatgttgcaccagatgtccttgaagatcaaggctacgatggagcaatggctgatctgtggtcatgtggagttatcctgtttgttctgctagcagggtatttgccgtttgaggattctaatctcatgactttgtataagaaaatatcaaatgcagaatttacatttccaccatggacatcttttcctgccaagaggttgttaacaagaatccttgatccagatccaatgacgagaataacaatcccagaaatattagaggatgagtggttcaa

SEQ ID NO: 61742 - DNA, 301 bp, Zea mays
tggagatcttggcatttgtttctaaagtgcaccaagtcgtacttccagaagatgcagttgattatgagactgtaaccttggaacatatagagagcaacatcgttagatgtcctgatccagaatatgcagagaagatgattgctgccattgatacggtacgagttagaggagattcaattggtggggtcgtcacatgcattgcaagaaatgttcctcgtggtcttggctctcctgtttttgacaaacttgaagctgaactggctaaagccatgctttctcttcctgcaagcaagggggttga

SEQ ID NO: 61743 - DNA, 297 bp, Zea mays
gattattacaaaaatggatggtcacgcaaaaggcggtggtgcccttagcgcggtcgcagcaacaaaaagtcctgttatattcattggaactggcgagcacattgacgagtttgaagtttttgatgtgaagccatttgttagtcgcctgttaggaatgggagattgggcaggctttatggacaagattcatgaagtggtacctacggatcaacagcctgagcttctgcagaaactgtctgaaggaagctttactctcaggcttatgtatgagcagttccaaaacattctgaaaatggg

SEQ ID NO: 61744 - DNA, 296 bp, Zea mays
gggtggaatgggactgttgggggccttctccttccgaagatcctaaaaaacgtgactaatcatatgttttcagtatggcatggactgttacaggagactttgacttcgggatgaaagacctctcatgataaaggcttgtgtgatatgaagatacaacccgaaggtaacatggatggacgctgaaactatggctaaaggagctttggcttgatatgatagcaaagatgaaggacgaaaccgacctaagagggaaaatactacttagtccttgacaactcgcttaataattaagagta

SEQ ID NO: 61745 - DNA, 297 bp, Zea mays
gatccatcaggttctgatcgattcttctgccccgatccgcagcggcaagcggagatgaactgcgagacctgtcagctgaaagatctggagctggaactgacggagatcagggatgttctgcgctgtattttgcacaccatattcttccatagaaccctcagcctggttcgccccaaagatgttgactgtgatttcctcgatattacttatgtacaatgtggtctaccggaactagaaaaggaagttgacgaaaagatagaccagttcagtgcatgggtggagaaacacccaaaccgc

SEQ ID NO: 61746 - DNA, 296 bp, Zea mays
attcagtgcaagctttacaggcctggatctgttggttttgtgtctaaatcgggtggcatgtcaaatgagatgtacagcaccattgccagagtgacagatggtatttatgaaggaattgcaattggaggggatgttttccctggatcaactctgtcagaccacattctgcgttttaataacataccacaggttaaaatgatggttgttcttggggagcttggtggaaaagacgagtattcacttgtggaagcattgaaacaaggataggtccagaaaccagttgttgcatgggttag

SEQ ID NO: 61747 - DNA, 276 bp, Zea mays
gcaaaaggcaatacagcaggagttgaggaagaaaaaaatgggacgatgaagtttgtagacaaagatatgagccagaatttggactgctcctgaaatttccaggtcgggtcgtgatttcgctgccggtgctatggaccttgaaactttggctttgtatggctctatgacggcagccaaaaaacatagatataccattacaactttacaagtcagctagctgcctctcattagttcgtgccagtcaactaacaagcgcatcattcagtttcgtcagta

SEQ ID NO: 61748 - DNA, 292 bp, Zea mays
agatggcacagagcatgacccctcgtcccatgaagggaatgttgactggtccggtcacaatcctgaactggtcattcgtcaggaacgaccagcctaggtttgagacatgctaccaaatagctcttgcaatcaaaaaggaggttgaggatcttgaggctgctggtattcaggtgatccagatcgatgaggcagctctaagggagggtctgccactacgcaagtcagagcatgcattctacctggactgggctgtccactctttcaggatcaccaactgcggagtccaggacac

SEQ ID NO: 61749 - DNA, 294 bp, Zea mays
gctagcttcacctcccaggtcatcatcatgaaccaccctggccagattggcaatggctatgccccagttctggactgccacacctcacacattgctgtcaagtttgctgagctcgttaccaagattgataggcgatccggcaaggagctggagaaggagcccaaatttctcaagaacggtgatgctggtatggtgaagatggttcccactaagcccatggtggtggagaccttttctcagtatcctcctcttggtcgatttgctgtccgtgacatgaggcaaacggtggctgtc

SEQ ID NO: 61750 - DNA, 295 bp, Zea mays
ggtttagtcgcgccgccgccgccgccgaaacagcacatcgctctctcgatctcagccatggcggaggtggagcagccccaggacgcggtgaagctcttcaaccgctggaccttcgacgatgtccaggtgaacgatatctcgctgaacgactacctggctgtgactgcggcgaacacgcgacattcctgccgcactccgcggggcgctactccaagaagcggttccgcaaggcgcagtgcgccatcgtcgagcgcctcaccaactcgctcatgatgcacgggcgcaacaacggcaa

SEQ ID NO: 61751 - DNA, 295 bp, Zea mays
cggcgactccgtcaccatctcccgcgagaagaccaaggtcaccgtaacctgcgacgggcccttctccaagaggtatctgaagtacttgaccaagaagtacttgaagaagcacaaggtgcgagattggctccgtgtgattgcagccaacaaggaccacagcgtctatgagctgcggtacttcaacattgctgagaacgagggcgaggaagaagattagactgcattgcacttatatctcagttttgaactcattggatttgatacttgtacccgtagttttgcaaatgcccccatg

SEQ ID NO: 61752 - DNA, 297 bp, Zea mays
  unsure (1)..(297): unsure at all n locations
gatgaccaagcagcagcccaaagagccagggacttccacattggctggtttgttgatccattgataaacggacactatccacagataatgcaagatctcgtgaaggagaggctgcccaggttcactcctgagcaggctaaactggtgaagggctcggcagactacatcggtatcaacgagtacacatccagctacatgaaggggcagaagctggtccagctggcgcccagtagctactctgccgattggcaggttcaatatgtttttgcacgcaatggcanaccgattggaccacag

SEQ ID NO: 61753 - DNA, 292 bp, Zea mays
cgttctctaaccttggctcccgctccctccgcagagcatctcaacaccgccttgaggaccccccaactcgccggctgcagccatggtgaaatattcgacggagccaaccaaccccaccaagtcaaccaaggccatgggccgtgacctacgtgttcacttcaagaacacccgtgagacagcttttgcccttaggaagttgtcactcaccaaggccaaaaggtaccttgaggatgtgattgcccacaagcaggccatcccgttccgcaggtattgtggcggtgttggacgtact

SEQ ID NO: 61754 - DNA, 286 bp, Zea mays
gttctaccaggagaccttccgcgtcactccggccacgcgagctcgccgacatggtcgcccacaggttccatcagtagcaggtggtgggtcgcgcgctgccgaccccaaccgatgagcaccccaagatctaccgcatgaagctctgggccaccaacgaggttcgcgccaagtccaagttctggtacttcctgacaaagctcacgcaggtggcggagatcaatggccagatgcttgacatcaacgagatctttgagcgcatcccgaccaccatcaagaactatggcat

SEQ ID NO: 61755 - DNA, 287 bp, Zea mays
ggagaagtttaagatctgttccacagatcacgcgtgcgcgctcgcgaatcgggggttccacacatagcttgatggctttgaatttgatgtactaatggagtctaagggtggcaagaagtctagcagtagtcgttccatgatgtatgaagctccccttggctacagcattgaattcgttcgacctgccggagggcgaagaagttccagtctgctgcttactccaactgcgcaaagaagccatcctgatatgccttttggcttcctcgttctagtagtttaggatttct

SEQ ID NO: 61756 - DNA, 293 bp, Zea mays
tgccgccgccgccgtttcgcgcaccgtaccctagccctcgtcagcggcggcttcgagctcatccagccatgacgttcaagcggaggaatggcggacgcaacaagcacgggcgcggccacgtcaagtacatccgctgctccaactgcgccaagtgctgccccaaggataaggctatcaagcggttcttggtgaggaacattgttgagcaggctgccgtgagagatgtgcaggaggcctgtgtacatgatggatatgttctacccaaattgtatgcaaaggttcatcactgtgtc

SEQ ID NO: 61757 - DNA, 290 bp, Zea mays
caaggatagcctgtctgcccagggaaagcgccgttatgaccgcaagcagtcaggatatggtggtcagaccaagcctgtcttccacaagaaggccaagaccaccaagaagattgttctgaagctgcagtgccagagctgcaagcactactcacagcacgccatcaagagatgcaagcattttgagattggtggagacaagaagggcaagggcacatctcttttctaagcttctcgtccacctgtctggttgttgagttgaagctgtgggtctactactactgttataaaaa

SEQ ID NO: 61758 - DNA, 288 bp, Zea mays
ctgctatttccctttccatgtattacaccattttgactattcaatgcattattttgtggtgaaggtgatgaaaaatagtttattttgttagggcctcacaacattggggtggcgatggctacaacacatggattagtcgtgccaaacatcaagaaagtgcagtcgctatcaatattggagatcacgaaggaattggcgcgattgcatgagatggcatcacagaacaggctaagcgctgcagatattgaaggtggcactataacacttagtaacataggtgccattggt

SEQ ID NO: 61759 - DNA, 288 bp, Zea mays
tgtgaactctctcatgatcgtactcttcttatctgggatggtggcaatgattatgctccgcaccctttatagagatatctctaggtacaatcagcttgaaactgaagaagaagcccaagaggagacaggatggaagcttgttcatggagacgtattccgccctcctgcaaactccgacttactctgtgtctgtgttgggactggtgttcagttcttcggtatgctactagtaaccatgatctttgctgttctgggtatactttcgccatcaaaccggggaggactgat

SEQ ID NO: 61760 - DNA, 289 bp, Zea mays
gatgctgtaatttctcttgaggtgattgagcatgtcgccaatcctttggagttctgtgaatccctctcggctttgacaattcctaatggtgccactgtgatttccacaatcaaccgatcaatgcgagcatatgccactgcaatagttgctgctgagtatatcctcagatggcttcctagaggcacacatgagtggtccaaactggttaccccggaggagcttgtcctaatgctgcaaaaggcttccgtctccgtcgaagagatggcagggttcgtttacaatccgttga

SEQ ID NO: 61761 - DNA, 294 bp, Zea mays
gttcggagcgggcagcagcacacagccccatcccaatcctagtcgatcttcttcccctcctcaaggaagaaaagaagctgaaccatggggaagagaaagtcagctgctaagccacctcctaagaagcggatggacaagcttgacactgtcttttcctgcccattctgcaaccacgggagtagtgttgagtgccgaattgacatgaagaatctgattggcgaagatcttgtagaatctgtcaggaaaacttcagcacaactgttaatgcactcactgagcctattgatatatata

SEQ ID NO: 61762 - DNA, 355 bp, Zea mays
  unsure (1)..(355): unsure at all n locations
tgtagaaggtgatgnaaatcttgtatctgtaatgggttttgttcagatatcttctgatttgcacggttgcagtcgatttgttttccagcgtgaagattttcccggtgccatttgccacgggataatgccttctactcagctcaacctccaaagcatgatggctctgacaaaccactctgtccaggagctcctgtatgccactggtgtagtacctggacagggtgataaatatgtagtagctgcaagatagctaggtactgttatgagatacatcaggcactgcattggcgtactggtcatagnaatgatagctcgagataatagttcttgcttcagatcagttctgctactgtag

SEQ ID NO: 61763 - DNA, 347 bp, Zea mays
  unsure (1)..(347): unsure at all n locations
aagctcagggcccaaagagccaagtccatgaagttcaaggatggctacatgatctcatctggtcagccagtgaacgagtacattgactcggctgtgagacacgttcttctcagacagggtgttctcggtatcaaggtgaagatcatgcttgactgggactcgaatggcaaggttggcccgatcactcctcttccggacctggtgaccatccacatcccgaaggacgaggacgagccgcgccctccggtcttggcacctcctgaggtgtaaggtccaactgtgtcctgaaatggcatntgatcgggtctagataggttctatctcgataggacatgctaagcagtggt

SEQ ID NO: 61764 - DNA, 333 bp, Zea mays
  unsure (1)..(333): unsure at all n locations
ttgggcttgacttcctactatttcagaacacagttacgaggagtctttaagttggggccaaggttgttgtcgctgaagttgcaaaagggccttgcggcgagctacttcaagtgttgggaaaggcaaagtgtggcttgacccaaatgaagttagtgagatctccatggcaaacatccgccagaatatccggaagtcggttagggatgggtctatcatcaagaagcctcataagatccatctagatccgtgcagaagggacatgacgccagcanagggcgcactcaggtatgtagcgtagggtactaggagctagtccacaagtctgtgatagag

SEQ ID NO: 61765 - DNA, 320 bp, Zea mays
tgttaccattactgcgttctccaagatggttggctatgctctccaggctgcagagatactgtccaaggaaggaatcagtggtgaagtgatcaaccttcgatcgattaagacacttgatagaagtgctattaatgcatctgttaggaaaaacaaccgattggtgactgttgaagaagggtgtcctcaacatgggattggtcgcgagatatgcatgtctgttgtagaagacagctttgagtaccttgatgcccagttgagaggatcgtggagtgatgtactatgcctatgctgcaacttgagagatggcgttcacagtatga

SEQ ID NO: 61766 - DNA, 358 bp, Zea mays
gtggcagaaggcctcctgctagtgggtcgattcaaggtatactggacttggcagaggaggacatcggagatgttgtagattgacacctctgttgcgctcggatgcaagaggatcgacagggacccgaggattaccttacattcttttgccttggcgacagggatgtgaagatggatggtgagtataaaacttcaggtcgtccgcttgtacggacagactacgctcgggcgcagaatgcacgccgcttcatgatctacgttcactctaagatgatgatagtcgacgacgaatacatcatcgttggatctgccaacatcaaccagcgctcatggatggggcagggactcggagatcgcca

SEQ ID NO: 61767 - DNA, 355 bp, Zea mays
  unsure (1)..(355): unsure at all n locations
agggaagagcaccaaggaccttcggcgcacgttcaggatccacatcttctcgagcgagttcttggttgacctcttcccccttcggaccacctccaaggctcttggtgtagcttgccactctcaccaatcaagttttcatgtctgatctcgacattcagatcccaactgccttcgatcccttcgctgaggccattactggggactctggtgcggcacagggtcaaaggactacgttcacgtgcgcatccagcagcgtaatggtcgcaagagcctgactaccgtccagggattgaagaaggagttcagctacagcaagatcctcanatctcnagatagagttctgctgcaatggtac

SEQ ID NO: 61768 - DNA, 332 bp, Zea mays
ctcgaaaaggcaacatcagagttaacaccatatcagcaggccctcttgggagccgagctgctaaggcaattggatttattgagaagatgatagagtactcatatgttaatgcaccattgcagaaggagctgttggctgatgacgtggggaacacagctgcattcctggtttcttcattggcttctgccatcaccggctcgactgtctatgttgacaatgggctcactccaatggggcttgcaattgacagccctaccataacgtcatagatgtggttgtggtagatagacgactttcctgtgcattcggtacatcctgaaagatcatagtag

SEQ ID NO: 61769 - DNA, 161 bp, Zea mays
ctggagtgccgcacagccacaccaagccatatgtgcgctccaagggaagggagttcgagaaggctcgtggcaggaggaacagccgtgggttcaaggtttaagaaagttgtgggccatcagcatagtaatcacttcctaccgagtagtagcacattttgttg

SEQ ID NO: 61770 - DNA, 348 bp, Zea mays
  unsure (1)..(348): unsure at all n locations
cttcgtctttctgctcattatttccatgttctcagtgtcattgtcttatggttgtagttttcatgttcaaatttcagatgtcanaaattaatatgctaaggtcatgcanaggaagtgtttactggatggcacctgaggttattaatcctaaaaagatgtatgggccttcagctgatatatggagccttggctgcaccgtgttggaaatgctaacccggcaaataccatttcctaatgtcgagtggacaaatgctttcttcatgattggaagaggggaacagcctactattcccaactacctgtctaaggaggcacaagatttttggccagtgcgtaagagtgatcctg

SEQ ID NO: 61771 - DNA, 327 bp, Zea mays
gccagctccccacaggagcttctctgaggaagttgctgcacttaaccgctactttggcggcctgaaatctggtggtaatgcttatgtgattggagatccagcaagacctggacagaagtggcacgtcttctacgccactgagtacccagagcaaccaatggttaaccttgagatgtgcatgactggtctggacaagaagaaagcttctgtctttttcaagactaatgctgatgggaacacagcatgtgccaaggaaatgacaaagctctctggcatctctgaaatcatccacgagatggagatctgcgattttgactttgacctgtg

SEQ ID NO: 61772 - DNA, 332 bp, Zea mays
  unsure (1)..(332): unsure at all n locations
ncacccactcgcttcagccgcctccgccgcgcgtacaagcaggtggagacaggatgccggctggccacggcctgcgctcgcggacgcgcgacctcttcgcgcgccccttccgcaagaagggctacatcccgctcaccacctacctccgcacctacaagatcggcgattacggcgatgtgcaggtgaacgccgccgtccacaaggggatgctgcacaagttctaccacggccgcaccggtcgcgtctggaacgtcaccaagcgcgccatcggcgtcgaggtncacaagcaggtccatgggcgcatcatcaggaagcgtatccatccgtgtgga

SEQ ID NO: 61773 - DNA, 350 bp, Zea mays
  unsure (1)..(350): unsure at all n locations
gttcgtggactggtgcacgactggcttcaagtgcggaatcaactaccagcctcccagcgtcgtcnccggcggtgacctggccaaggtgcagcgtgccgtgtgcatgatctctcactccaccagtgttgtggaggtcttctcccgcattgaccacaagttcgacctcatgtacgccaagcgcgccttcgtgcactggtacgtcggtgagggtatggaggagggcgagttctccgaggctcgtgaggatctagctgcgctcgagaaggactacgaggaggtcggtgctgagtttgacgagggtgaggacggcgacgagggtgacgtactagacgctctactggcgcggcgtc

SEQ ID NO: 61774 - DNA, 324 bp, Zea mays
  unsure (1)..(324): unsure at all n locations
gggcctgaaggtgaagagcacgagtttgatgctccagacgacgcctacatccttgacgcagccgagactgccggtgtggagttgccatactcgtgccgtgctggggcttgctccacctgtgccggcaaaatcgagtctggttcggttgaccagtcggatgggtccttccttgatgacgggcagcaggaggaaggttatgtgctgacatgcgtctcctacccanagtccgactgcgtcatccacacccacaaggaaggcgacctgtactagggctagggattttcaatttggcgagggaccaaaatgtctcgagtggtgtgtcaa

SEQ ID NO: 61775 - DNA, 347 bp, Zea mays
  unsure (1)..(347): unsure at all n locations
gaatgttgctgtgaaggatctgaagcgtgggtatgtgggctccaactccaaggatgaccctgccaaggaggctgctagcttcacctcccaggtcatcatcatgaaccaccctggccagattggcaatggctatgccccagttctggactgccacacctcacacattgctgtcaagtttgctgagctcgttaccaagattgataggcgatccggcaaggagctggagaaggagcccanatttgctcagaacggtgatgctggtatggtgaagatggttcccactaagcccatggtggtggagacttttctcagtatcctctctggatcgattgctgtccgtgacatga

SEQ ID NO: 61776 - DNA, 354 bp, Zea mays
  unsure (1)..(354): unsure at all n locations
cgagctccgaggggaagagcaagacggacctgcaggcgcactcaaaggagctgagtctgagctctcgctctccgcgtagcaaggtcaccggcggcgcacccaacaagctctccaagatcaaggtggtgcgcacctctatcgcgcgcgtgctcacagtgatctcgcagaagcagaagtcggcgttgcgggaggcgtacaagaagaagaacctgctacccgctcgacgtccgcctaagaagacccgtgccatccgccgccgtctgaccaagcaccagctttctctgaagaccgnnagaggaaagaagcgtgagaagtacttccctgaggcagtatgctatcaaggcctaggtcaga

SEQ ID NO: 61777 - DNA, 336 bp, Zea mays
cgagaaagaggctgccgagatgaacaagcggtcattcaagtatgcgtgggtgcttgacaagctcaaggctgagcgtgagagaggtattacaattgatattgcgctgtggaagttcgagaccaccaagtactactgcactgttattgatgccccgggacaccgtgacttcatcaagaatatgatcactggcacttcccaagctgactgtgctgttcttatcattgactcaaccactggtggtgttgaggctggtatctccaaggactggcagacccgtgagcatgctctcgttgctttcacacttggtgtgaagcagatgatgctgctgcaacaaga

SEQ ID NO: 61778 - DNA, 279 bp, Zea mays
tgcgaaccaagcagaccacagcaagaagcgtagtcgtcgccggaaggaaaggcgcggacaagatgtcgtggcaagcgtacgtcgatgagcacctgatgtgcgagatcgaaggacaacatctcagcgccgccgccatcgtcggtcacgacggcagcgcttgggcgcagtccgagagcccccccgagttaaagcctgaggaggttgctggtatcataaaggactttgatgaacctggtactcttgcaccaactggtcttttcgttggaggtacacagtaca

SEQ ID NO: 61779 - DNA, 345 bp, Zea mays
ctcagatgattataacaaaccacttagttggaattctcgtgttaagattgcgttgggctctgcacgtgcactagagcatcttcatgaaatttgttctccatctataattcacaagaactttaagtcgtccaatattttactggacaccgagctcaatcctcacatttctgatgctggacattcaagttttgttccagatgctgaattccaggcttcagatcaggggtctgggtatagtgcccctgaggtcgagatgtccggtcagtataccctcaagagtgatgtctacagctttggagtcgtcatgctggactctgacaggccgtaaccatttgacattctagg

SEQ ID NO: 61780 - DNA, 321 bp, Zea mays
  unsure (1)..(321): unsure at all n locations
ccaacatggatttcttcctgccatcctttcactgtcgacgaaatatgttcccactgtacatggcatcctgaagagattagctgacgcgggtcaagaacctgcagcagcccccgagatgcaaagagagatggagctccaaccaaaatccatcatgcacggttccttatacaagcatgtgacatcggcagggtctctagcgtaaccactcggagatcggacctgatatttcagccgagtgtagcatgattctgctgatctntagctttttggctggatacatactctagcagttgagaaaacagggtgcatcagcgtacgaga

SEQ ID NO: 61781 - DNA, 297 bp, Zea mays
gtcgagctcgtcgccgtgaacgaccccttcatcagcaccgactacatgacctacatgttcaagtacgacactgtgcacggacagtggaagcaccatgaagtcaatgtgaaggactccaaaacccttctctttggtgagaaggaggttgctgtgtttggctgcaggaaccctgaggagatcccgtggggttcggttggtgctgaatatgttgttgagtctactggtgttttcactgaccaagagaatgctgcagctcacttgaagggtggtgtcaagaaggttgtcatctctgctcct

SEQ ID NO: 61782 - DNA, 306 bp, Zea mays
cgatatggttgagtacttcggtgagcagctctccggttttgcgttcactgccaatggctgggtgcagtcttatgggtcaaggtgcgtcaagcctccgatcatctacggtgacgtgagccagcccaacctcatgaccgttttctagtcggagaccgcacagagcatgacgtctcgcccaatgaaggggatgctgactggcgcagtcacaatcgtcaactagtccttcgtccggaattgagcagcgaggtctggagactgctacgagatcgctcttgcgatcaagaaggaagtcgaggatcttgaggc

SEQ ID NO: 61783 - DNA, 341 bp, Zea mays
cggctcgagaatcagaagagcggcggcgcgggcggacaaggagcaggcggaggaggagttgtgccaagccacaatgggtatctcgcgtgactcgatgcacaagcgccgagccaccggtggaaagcagaaggcctggaggaagaagcgaaagtatgagcttggtcgccagccagccaacaccaagttgtcaagcaataagacggtgaggagggtccgtgttcggggaggtaatgtgaaatggagggctcttcgccttgatactggtaactactcatggggaagtgaagctgttactcgcaagacccgtatcctcgacgtggtctacaatgcatcaaacaatg

SEQ ID NO: 61784 - DNA, 330 bp, Zea mays
ctttctcatcatttccattcttcagatctaaatcagctcggatagacagttcaacgtcgcaatcatccagtcagagggaagataggttggtgctgaagaacaagtctcctaggtggcacgaacaactgcagtgttggtgcctgaatttccgtgggcgggtcactgttgcctcggttaaaaacttccagttggtggcttctgaggacaatggaccagagagccaagagagtgacaaggtgattctccaattcggaaagatcggaaaagatttgttcaccatggactacggttatccaatatcggcatttcaagcttttgcaatttgtctga

SEQ ID NO: 61785 - DNA, 333 bp, Zea mays
  unsure (1)..(333): unsure at all n locations
ggtcgctatctctttccctggcactatcgtacccaacccttgctgctgtgccccacatgtttatcaatgggtacaagaacgtgcttgctgttgctgtagagactgactactcgtacccacacgccgacaagatcaaggagtacctcaaggacccgagcaagtttgctgttgctgctcctgtagctgctgcggactctagtgctgctgctgcccccaaggaggaagagaaggctccagagcctgccgaggagtcggacgaggacatgggcttcagcctattcgacgactaagccgctcttatcgtccatccgacgcnagttttgcttctgctta

SEQ ID NO: 61786 - DNA, 324 bp, Zea mays
cttcaaggtcatttctgggcctggtgagaagccaatgattgatggccagcacaagggtgaggaggagcagtttgcagctgaagagatctcctctatggttcttatcaagatgcgtgagattgctgaagcttaccttggtagcacgatcaagaatgctgtggtcacagtccctggctacttcaatgactcacagaggcaggccacaaaggatgctggggtgattcctggccttaatgtgctgcgtatcatcaacgagccaacagctgcagctatcgcctatggtcttgacaagaaggctagcagtgtcggtgagaagatgtcctc

SEQ ID NO: 61787 - DNA, 340 bp, Zea mays
gaagctccaccgcatccgtatggcgcactcgctggtggtccactacggcctccaccgcctcctcgagctctcccgcccctacccggcctctgaggccgacatccgccgcttccactccgacgactacgtcgctttcctcgcgtccgccaccggaaacccgggtgtcctcgacccgcgcgccattaagcgctttaacgtcggtgaggactgccccgtgttcgacggtctcttccccttctgccaggcctccgctgggggaagcatcggcgccgccgtcaagcttaaccgcggggacgccgacatcaccgtcaactgggcgggcgtgctccacacgccaaga

SEQ ID NO: 61788 - DNA, 264 bp, Zea mays
  unsure (1)..(264): unsure at all n locations
canaggctgcaggtgcagcggtagaagaagagcttttacaataaaccctaaagccttacaatgctgattttgatagagatgaaatgaatgtgcatgtcactcagacggaggaagctcgcactgaagcgcttaattctcatagggtatcaaaataatttatgtactcctaagagtgtgatggggggtacttcaatgcaataatgagcttcccacagaattacccaaacagcccgccatcagtcagatctacctctgaaatgtggc

SEQ ID NO: 61789 - DNA, 334 bp, Zea mays
gaagcacgttccaagggccctgtttgtcgacttggagcccactgtgattgacgaggtgaagactggggcttaccgccagcttttccatcctgagcagctcatctcacacaaggaagatgcagcgaacaacttcgcccgtggacattacacagttggaagagaagtaatagatctttaccttgatcggatacgaaaattggcagacaactgcactggtcttcaaggttttctggttttcaatgctgttggtggtggaacaggctccggcctgggttcgctacttttagaacgtctatcagtagattatggtaggcagtcaaagctcggtttcacc

SEQ ID NO: 61790 - DNA, 333 bp, Zea mays
  unsure (1)..(333): unsure at all n locations
ctcggttctccctcgctccagatctcccttcgcagccggccagggaccccttcacagcgcgggagatggctgatcaggaggccncagttgcagttgaagcaccaaccccagttattggagagccagtggagttgatgactgcactgcagctggtgatgaagaagtcaagtgctcatgatggacttgtgaagggtcttcgcgaggctgccaaggccattgagaagcatgctgctcagctttgcgttcttgctgaggactgtgaccagccagattatgtcaagctggtgaaggcgctctgtgctgaacacaatgttcaccttgtcactgttcctg

SEQ ID NO: 61791 - DNA, 329 bp, Zea mays
  unsure (1)..(329): unsure at all n locations
ctctcgtatccaggacacagggtaccaggattgcttctgagggtctgaagcacagagtctttgaggtttgcctagctgatcttcagggcgacgaggatcaagcttacaggaaaatcaggctccgtgctgaagatgtgcagggcaggaatgtgctcacaaacttttggggtatgaattttaccactgataaattgaggtccctagtgaagaagtggcagacattaatcgaagcccatgttgatgtcaagacaaccgacaactacatgttgcgtttgttctgcatcggcttcaccaagaggcgcccanacccaggtcagagaacctgctat

SEQ ID NO: 61792 - DNA, 300 bp, Zea mays
  unsure (1)..(300): unsure at all n locations
cggcatgganagatatatgtgacagctgcaaagaagatcatagacaagggctctgactacactaagaaggagactgagaggcttcaccgcatgctggagaagtcaatcagtcattccaaagctgatgaattcatcgttaagaagaacattctttcgatattctcttcgtgaaggtgatgatccacagccacggcctgccagtgacttgaactgatagcgaaccagcactttacagtaaacagaacaaatcggatgatgtaagatgaaagtagtagtgatgtccagtagtgacagagctac

SEQ ID NO: 61793 - DNA, 311 bp, Zea mays
gcgaaactgccccaagcgaggtggcagggcgccggtgccggccaagaagaagacggataaagtgacgaaccctctattcgagaagaggccgaagcagttcggcatcggcggcgcgttgccgccaagaaggacctgcaccggttcgtcaagtggcccaaggtcgtgcgtatccagcggcagcgccgcatcctcaagcacgcctcaaggtacaccggcgctcaaccattcaccgcacctcgtcagaactcgctagaactgtttagatgttctcagtccggctgagacggctgcaagaatgaagctctgagagg

SEQ ID NO: 61794 - DNA, 136 bp, Zea mays
tgaattgttgtggttcctggatctggatttggccaagttcctggaacatggcacgtcagatgcacgatcctgccgcaggaagataaaatccccgcggtgatcacccgcttcaaggctgtccatgaggcgttcatgg

SEQ ID NO: 61795 - DNA, 325 bp, Zea mays
  unsure (1)..(325): unsure at all n locations
cgccaacatggctgaccggctaggtcttgtggctactattaaggaccgagcaaatgaaatctacaagaaagttgaagatctcaaatctatcaggggaagaaatcaagatgccatattagctgcatgcctatatattgcttgtagacaagaagatcggcctagaactgtgaaagaaatatgttcagttgctaatggggccacaaaganagaaattggcagagcaaaagaatttatagtgaaacaactggaagttgagatggggcaatctatggagatgggaacattcacgttcagatntctgagacgttctgctcactcttggatg

SEQ ID NO: 61796 - DNA, 325 bp, Zea mays
attgctttgaaaaggatagtgaaaacaaatgaagggctagatcggttctttgatagagaacttgagatattgggaagtgttaaacatcgctatttggtcaatctccgtggttattgcaactccccttcatcaaaacttttgatatatgattatcttcaaggtggaagtctggatgaagtgcttcatgaaaaatctgaacagttggattgggatgcacgtattaacattatacttggagctgcaaaaggcttgtcttacttgcatcatgactgttcgcctcgaataatacatcgtgatattaagtcgagcaacatcttgcttgatg

SEQ ID NO: 61797 - DNA, 291 bp, Zea mays
cactcccattgatgagagtaatgctcaaaaaattattacagagaaggtgctaaagaaaagaacttttagggttccattgaaggttgtggaaaaaacaactggtgctggaacaattctttcgaaggagttgtattctgaagcaaaaaataggttagaggcacttgataagaaggatgcggaacggaggagaactgctgaacttaagaataccctagagtcatacatatattctatgaaggagagctggaagaaagcgcaatagtgtgactgtctcactgaacaggaagggat

SEQ ID NO: 61798 - DNA, 130 bp, Zea mays
ctaagtatggcctcatctaccatgcatccttaattggcaaggcttctcaaaagcacaagggaaaaatctctcgttctcttgctgcaaaaacagctcttgctatccggtatgatgcccttggtgatggtga

SEQ ID NO: 61799 - DNA, 322 bp, Zea mays
aagcgcctgatactgtcactggagacattgtattcgtcctccagcagaaggatcactccaaattcaaaagacagggtgaagatctcttctatgagcacaccttgtctctgaccgaagcactatgtgggttccaataggttcttacacatctggacaacaggcagcttctcatcaaatcagaccctggtgaagttgttaaacctgaccaattcaaggcgattaacgatgaggggatgccaatttaccagaggcctttcatgaaggggaagctgtacatccatttcacggtggagttcccgactcgctggcaccagagcagtgc

SEQ ID NO: 61800 - DNA, 129 bp, Zea mays
agggcgcagagccgggctgatcttcatcggcgtcagggcctcctcattaacctcatcatcggctcccctaggaaggtgcctgacatgagcaagctcatgttccacaccgccgtcatgcacgatggaatg

SEQ ID NO: 61801 - DNA, 327 bp, Zea mays
gtttcctctcgcccatggtcgaccccgagctcgacccctccgccgccgccgaggggccggcgctgcccacccgggggtctgacgacgttcaagcccttcatcaggcgtctcagcgagttcaagttctggtatgcaatcacaaaagctgctgttgtagcttttgtgatgactttcttctctgtgtttgacgttcctgtcttctggcctatactcctctgctactgggttgttctctttgtccttacaatgaagcgccagattgtgcatatgatcaaatacaaatatgtgcctttcagtatcggagaacagaaatacggtgtgaagaga

SEQ ID NO: 61802 - DNA, 324 bp, Zea mays
agagtactcagccctacagaaagtttcatccatgaactagatgagaagacaagtgcctctctgaagttcacggttttgaacccgaaaggtcgcatctggaccatggtcgctggtggtggtgctagtgtcatttatgctgatacagttggagacttgggatatgcatcagagcttggaaactatgcagagtatagtggtgctcctaatgaggaggaggttctgaattattctagagttgttcttgattgtgcaactgctgatcctgatggccgcaagagagccttctcattggaggtggcatagctaacttcatgatgttgctac

SEQ ID NO: 61803 - DNA, 328 bp, Zea mays
ctctacctctacctactggagtagggagcacgccgcacgagccctttccgccgccgccaaaatggtgaacgttcctaagaccaagaagacctactgcaagaacaaggagtgcaagaagcacactctccacaaggttactcagtacaagaagggtaaggatagcctgtctgcccagggaaagcgccgttatgaccgcaagcagtcaggatatggtggccagaccaagcctgtcttccacaagaaggccaagaccaccaagaaaatcgtattgaagctgcagtgccagagctgcaagcactactcacagcacgcaattaagaggtgcaag

SEQ ID NO: 61804 - DNA, 315 bp, Zea mays
tatcaatcctgatgaggccgttgcctatggtgctgccgtccaggccgctatcctcagtggtgatggcaacgagtaggtgcaggactgcttctgcttgacgtcactcctctctctctgggtctggagactgacggcagagtgatgaccgtccttatcacgaggaacaccatcatcaccaccaagaaggagcaggtgttctccacctactcggacaaccagcctggtgtgttcatccatgtgtacgatggtgagaggactcggatcgcgacaacaacctgcttaggaatatcagtctccggcatcctacggctctcg

SEQ ID NO: 61805 - DNA, 161 bp, Zea mays
ctcggtcttggccaaggttattgtgtcacttggcagtggcccataggatcagctgtttggcggtggaaatgcacccgcttttgcggtggcagccggtgcatctatcatcggtgggctggtggctattctggggcttcctcgggcacgcattgcatcctcgt

SEQ ID NO: 61806 - DNA, 321 bp, Zea mays
tctgcctgtgcccttgggctgggctccatggagcccaggctggtggaagctgtggttttcggctgcatcccggtgatcatcgccgacgacattgtcctgccctttgcggacgccatcccgtgggaggagatcggtgtgtttgtggccgaggaggatgttccgaagctggacagcatcctgacgtccatcccaacagatgttatactgaggaagcagcgtctccttgcaaactcgtcgatgaaacaggccatgctgttcccccagcctgctcaggcgggagatgcattccaccagatcctaaatgggctcgcgcgcaactcc

SEQ ID NO: 61807 - DNA, 295 bp, Zea mays
ccccttcacagatccgttcctccagctagggttagcgttcctctgcagcgatggcgatcaagcggactaaggcggagaagaagatcgcgtacgacaagaagctgtgcagcctgctcgatgagtacaccaaggtgctcatcgccctggccgacaacgtcggttccaagcagctccaggacatccgccggggcctcaggggcgactcggtggtgctcatggggaagaacacgctcatcaggcgttgcatcaaggtgtacgccgagaagaccggtaaccacacctttagaccgctcat

SEQ ID NO: 61808 - DNA, 107 bp, Zea mays
ccccttcacagatccgttcctccagctagggttagcgttcctctgcagcgatggcgatcaagcgaactaaggcggagaagaagatcgcgtacgacaagaagctgtgc

SEQ ID NO: 61809 - DNA, 328 bp, Zea mays
tcgacccttgaatttaactgccatggcatgccctgccttgccactgtgctctttggcacaatacagaagctgaacgggggatcttaaccattcttaaacgatttagggcagtcttcaataaggttggtatcaaggattcgaagtctgtagttgtacggataactggatgccctaatggatgcgctagaccttttttggcagagcttggattcgttggtgatggcccataaagttaccagatctggctgggtggaacaccaaaccagagtagctagcagaatcatctatggacaaggtgaagcttgatgacatcgagaaggtgttggag

SEQ ID NO: 61810 - DNA, 192 bp, Zea mays
attcctcacaacaccatctctacgcgatctccgtagcctccgtcgcgtcgagcatcgatcatgtcggcctactgcggaaagtacaaggatgagctcatcaagaatgctgctgacattggcacccctggcaagggtatcattgctgctgttgagtccactggcaccattggcagccgcctttccagtatcaat

SEQ ID NO: 61811 - DNA, 101 bp, Zea mays
gtctggagctatccgcgttcatgacgacatgcttctggcagcatcggaggctctggcccagcaggtcacagaagaaaattttgagaaggggctgatttatc

SEQ ID NO: 61812 - DNA, 331 bp, Zea mays
ctacaactgcgacggccacaccttcaactacctcgtcgaggacggattcacgtattgtgtagttgctgttgaatcagttgggcgacaaatccccatagctttcctggacagagttaaggaagacttcaccaaaaagtatggaggcgggaacgcagctactgctgcagcgaacattttgaacagggattttggatcaaagcttaaagagcacatgcagtactgtgtggaccaccctgaggaggttagcaagcttgccaaggtgaaggccaagtctccgaagtcaaaggagttatgatggaaaacattgagaaggtctgatcgtggcgagaga

SEQ ID NO: 61813 - DNA, 329 bp, Zea mays
tctcgcatctgcttccagagcccccgccgccgctgcgccctcctctcggtcctgccgtccgtcgaggtaaaacgacagcatggtgagggtcagcgtgctcaatgatgctctcaagtccatgtacaatgctgaaaagatagggaaacgtcaggtcatgatcaggccgtcatccaaggtgatcatcaagttcctgacggtcatgcagcgccatggttacattggcgagttcgagtacgtggatgaccacagggctaggaagatcgtgtggagctgaatggaagactgaataaatgtggtgttatcagccacgttttgatggagttaatgag

SEQ ID NO: 61814 - DNA, 113 bp, Zea mays
cgatgttgccacattagacaacttgcttcagggtggtgaagtagaagaggtgattcttcaggctgaaaaagaactaagtctggcgatgaaaatgttgcagtggacgccctggg

SEQ ID NO: 61815 - DNA, 236 bp, Zea mays
gttgcttgaaagaattttgtctgtcaccaaagctcgttctatattattgaatggtgctgttagaaagggagaacgcttagttccccctgtttcatttgacttgttcatgagagccacatttcctgtttctaatgctcgagtgaaggctacagaaaggtttgaagcagcctacccaataatcaaggagttggctcttgccggtcctcctggaacaaaaactgtgaaacaagcatcaa

SEQ ID NO: 61816 - DNA, 108 bp, Zea mays
  unsure (1)..(108): unsure at all n locations
cgnctgcagtcttgcaaagcaggcttttgacgaggccatctcgtaactggacactctgagcgaggagtcctacaaggacagcatgttgatcatgcagcactttcgtga

SEQ ID NO: 61817 - DNA, 359 bp, Zea mays
ccaagttcctgaacgccagtgttgggttcggtggctcatgcttccagaaggacatcctgaacctggtgtacatctgcgagtgcaacggcctgcccgagggtggccaactactggaagcaggtgatcaagatcaacgactaccagaagagccggttcgtgaaccgcgtcgtggcctccatgttcaacaccgtcgccggcaagaagatcgccgtcctcggctcggccttcaagaaagacaccggtgacaccagggagacccgggaattgacgtctgaaaggcctgctgggcgacaaggccagatcagcatctacgacccccaggtgacggaggaccagatccagcgggacctggccatgaa

SEQ ID NO: 61818 - DNA, 232 bp, Zea mays
atagatcgtcatcatgatcgacaccgtaactatacgcactagcaagttcatgactaaccgactagttcagcggagacaaatggtcattgatgtcttcacccgggaatgcgacagtgcctaagacagaaattcgggaaaaactagccagaatgtacaagaccacaccggatgtcatctttgtatttggattcagaactcattttggtggtggcaagacaactggctttggcat

SEQ ID NO: 61819 - DNA, 193 bp, Zea mays
  unsure (1)..(193): unsure at all n locations
tgtgacgaaggctgctgccaagaagaaatgatctatctgtctggtgctgtgcttgcttgttggttacctcgtggaagcttaaaatatctcgtcttgttgacatccttgcagttgtcgcgtgaacaagtaatctatgatggcaatgtntgcctggtcatgaagtattattactttcgttgaaaccgtgatgcta

SEQ ID NO: 61820 - DNA, 245 bp, Zea mays
  unsure (1)..(245): unsure at all n locations
atccttgggccggcgcagtcgccctatgaaggtggagtttttaagcttgaactctttttacctgaggaatatccaatggctgcaccanagggtaggtttctgacaaagatttatcatcccaacatcgacaagcttggtaggatatgcctcgacattctcaaggacaaatggagcccagcacttcagattcgaacagttcttttgagtatacaggctctactgagtgcgccacatccagacgaccc

SEQ ID NO: 61821 - DNA, 198 bp, Zea mays
ctcgtccagtcgcccaactccttcttcatggatgttaagtgccaggtgtgcttcagcataaccactgttttcagccactcccagactgttgttgtgtgccctggctgccaaactgtcctctgccaacccacaggaggaaaggcatggctcactgagggctgctctttccgcagaagggatactagagcggatgtggtc

SEQ ID NO: 61822 - DNA, 347 bp, Zea mays
tggacgctgggtgatatatgggagactgtatcaaacagtgatcttgttttgctactgatatctgattctgctcaggctgataactacgagaaaattttctcgcacatgaaaccaaacagtattcttggtttgtcacatggatttctccttggacatttgcaatctctgggttatgatttccctaaaagcatcagtgtgattgctgtatgccccaagggaatgggcccatcagtcagaagactttatgttcagggcaaaatcatcaatggtgctggtatcaatgctagctttgctgatcaccaggatgttgatggaagggcaacagatgtagctctagggtggtcagt

SEQ ID NO: 61823 - DNA, 347 bp, Zea mays
atcgacccctactttgccaagctcggtgacgccatggtcacctggatcgaggcctgggatgagctgaacccggctggccccgcggctgggaaagacaaggccaagtagatgggagtacctgggggtgcattcacttccctgctgaagtgaaaagaaagtatgattgggtccagcctaggctcccccatagatatagctctttttgagagggaagagggattaattcagcagcaggttctttttatgaattctttgttgttatgaagcaggcggtacttttgtagttgatgaaggggatttgtcgccactgtcatttacataattcggatgatagattatattgtgta

SEQ ID NO: 61824 - DNA, 346 bp, Zea mays
atgatcttcatcggcctcaatgccgctatcagtgtccgagtctccaacgagcttggctccggccgtccgagggccgcgtggaacgccgtcatggtcgtcgtcggcgaggcgctggtgatcgggattctgtgcatggcactcatcctcatcttcagagacagcttctccatcattttcaccagcgacaccaccctgcagcgagccgtcgccaggatcgccggcctgctcggcctcaccatggtgctcaacagcgtgcagcccgtggtttccagggtcgcggttgggggcggatggcagggcctcgtcgtctacatcaactcggctgctactatatcttcgggctgcc

SEQ ID NO: 61825 - DNA, 332 bp, Zea mays
aatgaattacgcaaggagcttggtgaacactcatcagaagccattaaagacttcctttcagatgcctcgttagtgcgatttcttcgagcaaggaactggaatgtgcagaaagctagtaaaatgatgaaagcagctgtgaagtggcggcttgcattcaaacctgaaaacatctgttgggatgatattgcagaggaagcagagactggaaagatatatagggcggattataaggacaaacatggcagaactgttcttgtattgaggcctggcttagagaacactacctcagcaataggacaaatcaaatatctagtctactctctggagaaagc

SEQ ID NO: 61826 - DNA, 337 bp, Zea mays
ctatctcttccccacgaacgcttgcggcggcggcggaattacgaggcgatggggcactccaacgtctggaactcgcaccccaagaactacgggcccggatcccgcgtctgccgtgtctgtgcgaaccctcatggactgatcaggaagtacgggctgatgtgctgcaggcagtgcttccgcagcaatgccaaggacattggcttcatcaagtaccgctgaaatcaggtgggaatggaccatgtggtagaggcgaggctgtagttttatttccagtaatttagatgttttgttcagaagtctgctagtaaagactgctacgtttatgatgaagacttag

SEQ ID NO: 61827 - DNA, 352 bp, Zea mays
tgtaaaaaaaggtcctagccggttatggagaaacttgttgagcgtcggatgaagatgtgcgtgaagttcgtataatacctgccaagtgctcgacaaattgtcttgttgggactatgcttcgtcgccgaggtcttgtaggaagaagcagcttcggctgaagctgtccgcatgagacgaccgaaggatcctcttcgtgaagcttcggaattacaaaccaacttaaaagtagaatgaccttttagtccataaatgtttgagtcgctgttgtaatcccttataaggggcataattgtaattccccacaggctgtagcatgtgcctataaatagtgaacagtattcctttactgttc

SEQ ID NO: 61828 - DNA, 351 bp, Zea mays
acgttttcgtgctcacacacccaaaccttagtcgcgatcaggccccaaggactcgagatgaagtcgagggcacggtccaccgccggcgactccaggctctcggtgaggaagaccaaggctgagaaggacccaaacaagcccaagaggcctccgagcgcgttcttcgtcttcatggaggagttcaggaaggactacaatgcgaagcaccccaatgtgaagcaagtctccctgattggcaaggctggtggtgacaagtggaagtccctgtctgatgccgagaaggtccctacgtgtctaaggcagagaagctcaaggctgagtacaccaagaagatcgacgcttacaacaaca

SEQ ID NO: 61829 - DNA, 327 bp, Zea mays
gcaaaatcgtgttaaactcgtggtcgtattgcgttgggtgctgtaccagggcatcacttgttgttctatgcccccttacctactagattttcttttctaccctgggcctggagatatgtttctgtcatgactgtcattgtggatctcgcgatattgctatattgaagcttttgtgcttgttcagaaaaagatgtccaagcgcgccggatgaggagtgatggcaagccacaggagtggcgagacagaggacatcttcattgctgacctctcagttggcctgtctacgggccaaatcgagacgggagctccttgccggtctgagcgctg

SEQ ID NO: 61830 - DNA, 342 bp, Zea mays
tctgtctgtcgctctcgctctcagacgactgggccgccgccgcttggtgctgaggctttcgttggtctcttcggcggcgacgagcatccaccagcagttctgtagaaatggctgatggtgaggacatccagccttctgtctgcgacaatggcaccggaatggtcaaggctggttttgctggggacgatgcaccaagggcggttttcgctatgcatgatggccgtcctcgccacactggtgtcatggtagggatgggacagcaggatgcatatgttggcgatgaggcacagtcgcacagaggtattctcacgctcaagtacacgatttatcacggtattgtga

SEQ ID NO: 61831 - DNA, 342 bp, Zea mays
tctgctcaacccgccggcagaactcgagaagctcaagcacaagaaaaagagactcgtccagtcgcccaactccttcttcatggatgttaagtgccaggggtgcttcagcataaccactgttttcagccactcccagactgttgttgtgtgccctggctgccaaactgtcctctgccaacccacaggaggaaaggcaaggctcactgagggctgctctttccgcagaagggagactagagcggatgtggtcttcaagttttgctctatgccagatactagcgtcatgaactgcctttagctgagattttccataagttgttctcgagcagctatgtgttgcat

SEQ ID NO: 61832 - DNA, 349 bp, Zea mays
cggcatatctgctcgcatttccttgcaaccgattgccttcagccgtcccaacccacgaccgatggcgctctacgacgataagaagcccgcggcgcataatccggcagattatgaccccgcggcggtgaacacgaccgccgggaacaagcccaaggcggacaagcggatccccggtgtcaagtccgccggcaaggaccgcggcgatggcaatcgtggcgagacgaagtgctagaagatcgtggagacgtgcaagatctacatcttcaaggtgctgaagcaggtgcagccggacatcggcatctcctccaaggacatgtccatcatggactccttcatcaacgacatcttc

SEQ ID NO: 61833 - DNA, 318 bp, Zea mays
tccatatgttgcatatgggctaccgaacttaaagagtgtcagggagttgctctacaagatgggctatggaaagctgaagaagcagatgatcgctctgtccaacaaccaagtcatcgctgagggcttgggcaagcacaacatcatctgcgtagaggatcttgtacacgagatcatgagtgttggcccacacttcagggaggccaacaacttcctgcggccattcaagttgaatgcgccgatgggagtcctgcagcagaagaggaaccactatgtggagggcggtgattccggtaaccgcgagatctacatcaatgagct

SEQ ID NO: 61834 - DNA, 349 bp, Zea mays
actatattgagttcctgcactgacatgggtggagtaaggctatgggatgtgagaacaggtaaaattgtccaaactcttgaaaccaaggcttctattactagtgcagaagtaagccaggatggcaggttcatcactacagcagatggctcaagtgtaaaattttgggacgcgaatcacttcggccttgtgaaaagctatgatatgccgtgcaatgtggagtcagcttcacttgaacccaagtctgggagtaaatttgtagctggaggagaagatttgtgggttcatgtattcgatttcttcactggtgaagaaatagcttgtaacaaagggcatcatggaccggtccact

SEQ ID NO: 61835 - DNA, 339 bp, Zea mays
tctatctcttcaccacgaacgcttgcggcggcggcggaattaggaggcgatggggcactccaacgtctggaactcgcaccccaagaactacgggcccggatcccgcgtctgccgtgtctgtgcgaaccctcatggactgatcaggaagtacgggctgatgtgctgcaggcagtgcttccgcagcaatgccaaggacattggcttcatcaagtaccgctgaaatcaggtgggaatggaccatgtggtagaggcgaggctgtagttctatttccagtaatttagatgtgttgttcagaagtctgctagtatagactgctacgtttatgatgaagaacttag

SEQ ID NO: 61836 - DNA, 339 bp, Zea mays
aggcgccctcgagtgcaacgcgaacaaccccgcccagatgaacgcgcgcgtcggctactacaagcagtactgccagcagctccgcgtcgacccagggcccaacctcacttgctaggcgacggcgtccacgttgtacccatggctcctgctagtgctagctcgtccacaataaatgctcggcgtcgcaccctcgcgaaaagtaaaccaagagtttactgactagtacgagctagctagcatgcagtaatgataatcatcgtaatgataatgataaaacgactgggctgagcactttgttcgacctgaatgaataatgaagcaactgtatgttcctctgta

SEQ ID NO: 61837 - DNA, 226 bp, Zea mays
  unsure (1)..(226): unsure at all n locations
atcgatgcnaaaagatggtgcttcttggtgctgcgaccgagtctccaacgagcttggctccggccgtccgagggccgcgtggaaagccgtcatggtcgtcgtcggcgaggcgctggtgatcgggattctgtgcatggcactcatcctcatcttcagagacagcttctccatcattttcaccagcgacaccaccctgcagcgagccgtcgccaggatcgccggcctg

SEQ ID NO: 61838 - DNA, 348 bp, Zea mays
  unsure (1)..(348): unsure at all n locations
aacaaactctgaggggttggtcatccacgatggcacatggacgtacaagatccccacggtcgacaccatcccaaagcagttgaacgttgagctgatcaacagcgcccgtgaccagaagcgtgtcctctcttccaaagcatccggcgagcctccgcttcttctagctgcctcggtgcactgcgcaatgagggaggccatcagagctgccaggaaggaattctcggtctgcactggtccagcaaactctgccatcacgttcgagatggacgtgccggcgacgatgcccatcgtcaaggagctctgcggcctggatgttgtggagaggtactggagagcagtccnactgcg

SEQ ID NO: 61839 - DNA, 347 bp, Zea mays
aggagaaagttcgtgtgttaggttctttggcatcatcccctgaccatgatgttgtccgtgaagtattgaatttcatattgtcacctgaggtgaggaatcaggacgcaatatttttgctaagaggggtgagttcaggggcacacgaggtagcatggcaatggctgaaggaaaactgggattacatattgggagcctactctggaactctgctcacctatttcgtcaacataactgtctcgccactggccaccgatgaacatggtgatgaggcggaggagtttttcaagagcagaaccaaggcgaacatcgcgaggactgtgaggcagagcatcgagagggtgaggatc

SEQ ID NO: 61840 - DNA, 336 bp, Zea mays
gagagaaagtccagaagatcatagctcacggaatcaactgtttcatcaacaggcagttaatctataacttccctgaggaactctttgctgacgctggcatacttgcaattgagcatgctgactttgagggcattgaacgtctggctcttgttactggtggtgagatcgcatcaacttttgataatccagattctgttaagcttggtcactgcaaggtaattgaagagatcatgattggggaggacaggttaattcatttctctggggtcgcgatggggcaggcttgcaccattgtcttaaggggggctagtgagcatgtgcttgatgaggcagaga

SEQ ID NO: 61841 - DNA, 336 bp, Zea mays
cgacgccatgggcgaagagatacggtcgacgctcgacacctgcgagaacacgcgcccgctccccggcgagaaggccgcctgcgccacctccctcgagtctctcgccaggatacccgccgtcctcctcgggacacgcaacgtccgcgctttctccggcgacatgcccaccgatcctgccggcacgtcggcgaagcgggggcggtataacgtaacggccgtgcagaagctctccgagtcactgacggcggcggcgtgccatgacctgacgtacccctacgccgtgttctactgccacacgaccaacccggcggccacgtacctggtgaagctggcagc

SEQ ID NO: 61842 - DNA, 348 bp, Zea mays
  unsure (1)..(348): unsure at all n locations
tgcatcgcagctgtttgctgcgaataaaaacaaaccgcctgaggtcgtgaacatactggtcaccaatagaagcaagctacttcggttttttgctggattcaagattgacaaagaggatgaacagtttgaagcagacaaggagcaagtcatanaagaaatatcggcactttgagtatgcttgaggttgtaattagtttttgtgatgaattttcttttgctaagaaagtgcatgtgaaataataaacttctgtgtaatattctgttggaccaagaggaacaatgttactcattgactctagtacttggatactgccagcaaatgtgataattttaatagattttgtggtt

SEQ ID NO: 61843 - DNA, 315 bp, Zea mays
gactggagcacttatgccaaactcactgatgagattggacagaaagtgcatattgtaggagatgatcttctcgttaccaaccccaccagggtcgccaaggccatcaatgagaagacctgcaatgctctcctcttgaaggtgaaccaaatcgggactgtgaccgagattatcgaagctgtcaggatgtccaagcgcgccggatggggagtgatggcaagccacaggagtggcgagacagaggacaccttcattgctgacctctcagttggcctgtctacgggccagatcaagacgggagcaccttgccggtctgag

SEQ ID NO: 61844 - DNA, 312 bp, Zea mays
gacctggttagaagggccgtgccgctcgcgctcgcgccagagaacgacccaagaaaagaggagttcgagcggctccgagagaagaaggaagcgatcgacaggctggcacacaagcaagtccggcgcatcctgtggtccggcctagggttcttcatgtgccaggtcgggctcttcttccgcctcacgttctgggagttctcgtgggacgtgatggagccgatcgccttcttcaccaccgcgtccggcctgctcgtcggctacgcctacttcctcatcacctcgagggacccgacgtaccaggacttcatggag

SEQ ID NO: 61845 - DNA, 336 bp, Zea mays
agcagagtcgtcaacaacagcaggaaacataactgaaagagctagcactacctgatcgagcaccatgggcatccccaaggctttgcttcttgccatcctcggctgcggcgtctgcttgtgcagcgctgctgtccttgcagctcgcgagctggggggcgacgacgagctggccatggtggcgaggcacgagcagtggatggtccagcacgggcgcgtctacaaggatgaaaccgacaaggcacaccggttcctagtgttcaaggccaacgtcaagttcatcgagtcgttcaacgctgccgccgccgccggcaaccgcaagttctggctgggtgtgaa

SEQ ID NO: 61846 - DNA, 323 bp, Zea mays
tggagatcgtgatggcgtttgaggaagaattttcctttgagattcctgacaacgaagcagagaagattgactccatcaagacagcggttgatttcattgcttcgcatcctcaagcaaaataagaggatttcttttttttcgtatttcaaagtgtgttttgcatccagaacttatgcgacacgggactagttttctctagcttgccgcagtagataggaagtcatttctttacctttctgaatccgcgtgtaccagacgattgttgtgttcttgtgacctcattggtacgctaatccataaatccatttggggcttctttctgc

SEQ ID NO: 61847 - DNA, 345 bp, Zea mays
gtcagagcccgatcccgatccagcgaggcggcgaccctccctcctccccttgcttcgctcgtccagccctgaccacccgcatccccgtcagtcatggcagcggcagcaggcggaggcgcggtgcgtgcgctgtcccagaaggagcaggacatacagatgatgctcgccgccgacgtccaccttggcaccaagaactgcgatttccagatggagcgctatgcctttaagcgccgcaccgacggcatctacatcatcaaccttggcaagacatgggagaaactgcagcttgcagcgagggttatcgttgccatcgagaacccgcaggacatcatcgtccagtccgcc

SEQ ID NO: 61848 - DNA, 331 bp, Zea mays
ggcagcttggtgccttacaaacatagcggcacggaaacctgaggaaactaaatccttagttcctgctctaccattgctcattgctcaccttggtgagaagagctctacacttgtcgcggaacaatgtgcatgggccattggtaatgttgctggtgaaggagcagagctgagaaacacattacttgctcaaggtgctttgtggcctcttgcccgtttaatgctgtcaaataagggttccacaacaaggactgctgcttgggcattgtcaaatctcatcaaggggcctgattccaaggctgcgaatgaacttattggtatcgacggcatactg

SEQ ID NO: 61849 - DNA, 327 bp, Zea mays
atcccggccaagacggctctcttcgtcaacgtgtgggccatcgggcgggaccctgctgtgtgggacgcaccggacgagttccgcccggagcggttcgtgggcggcagtccctcggtggacttcagaggtaccgactaccagctcatcccgttcggcgccggccggaggatctgccccggtatcaacttcgcgctgccggtcttggagctcgcgcttgtcagccttctgcaccacttcggatgggagctccccgccggcgtgggaaaggcggactcgacgtgggcgtagcccggggatgacgacgccgggcggattccgctcgtcctt

SEQ ID NO: 61850 - DNA, 335 bp, Zea mays
ggggcggcggcgacaagctcatcctgcccggccttcagttccacggcttccacggcgtcctgcgggaggagaagacgctggggcagaagttcgtcgtcgacatcgacgcctggatggacctcgccgccggcgcgagtccgactgcatcgctgacaccgtcagctacaccgatatctacagatcccctgacaaccagttttgttgtctacccgcctccgcagcattgcgaaggatgtcgtcgagggcacgccacgcaacctcttggagtcggtagcccactcgatcgcagaggccacgctgctcaagttccctcaggtctccgcagtccgggtgaa

SEQ ID NO: 61851 - DNA, 330 bp, Zea mays
cttaatgcacaggatatcagtgttacaggaaggaaaatgacagataagatttactactggcatacagggtatgttggccatttgaaggaaaggaggctcaaggaccagatggagaaagacccaactgaagtgattcgcaaagctgtgctgcgcatgcttccccgcaacaaactgcgtgatgatagggatcgcaagctgcggatattttctggaattgagcatccattccatgaccgccctcttgaagcttttgtgatgccaccacggcaagtacgggagatgcgaccccgtgcaaggcgtgcaatgttaagggcccagaaaaaagagcat

SEQ ID NO: 61852 - DNA, 343 bp, Zea mays
  unsure (1)..(343): unsure at all n locations
ataacattcaggaaaacaaagaaggccttgaactattgaaggcagccatagaaaaggctggctacactggaaaggtggtcattggaatggatgttgctgcttctgaattcttcggtgagaaagacaagacttatgatcttaatttcaaggaggagaacaacgatggctcaaacaaaatttcaggcgacagcctgaaagacctgtacaagtcctttgtttctgagtaccctatcgagtcgatcgaagacccatttgatcaggatgactggagcacttatgccanactcactgatgagattggacagaaagtgcagattgtaggagatgatcttctcgttaccaa

SEQ ID NO: 61853 - DNA, 354 bp, Zea mays
  unsure (1)..(354): unsure at all n locations
tgccgttcctgatcctgtcaggacagctttgcccacctggaatcgagggcacactgtttgctctcttcatgtcaatcaacaaccttggttcaacactaggctcattcctgggggctgctatggcatcagctttgaacctctccacagcacagtttgacaatcttgctctgggtttgggtgtacagatgatttgtactctcttgccgattgggttcctatctctgattccaaaggaagtcacagggctaacatcataggttgaggtacgggcctgatcatacttgttctattcctgccggaaggtaatggtctgtgctcgaacctcanatttctgactcacgtaaagcacgcata

SEQ ID NO: 61854 - DNA, 347 bp, Zea mays
tctcggcagtcggcacgcaggctagcagcacagcagcagccagagccatcccctctcctcgctacgcttcgcttcctcggcgccgattcctcctcctcctcctccaccctcgtccgtcccgttccggcgcgcgagctcgcccgagatggcgaacgcgagatcgggtgtcgctgtgaacgatgagtgcatgctgaagtttggcgagctgcagtcgaagaggctgcaccgcttcataactttcaagatggacgacaagttcaaggagatagttgtggaccaggtcggggatcgcgctaccagctacgatgacttcacaaacagcatcctgagaatgactgcgatacgcg

SEQ ID NO: 61855 - DNA, 349 bp, Zea mays
tgaagtcgtccatgttaagatccctgttgggaagagatgtggttttgttcagttcgttaccagaccttctgctgaacaagcgctgctaatgctgcaaggggccttgattggtgcacagaatgttcgactttcatggggtagaagcctgtcgaacaagcaggctcagcctcagcaggaatccaatcaatggggtgcggctgctggtgctggtggctactatgggggctatggacaaggttatgaggcttatggcagtgggtatgcacaaccccaggatcctaacatgtatggttatggcgcttatggcggttatcccaattaccaacagcaaccagctgcacagcagcaa

SEQ ID NO: 61856 - DNA, 344 bp, Zea mays
gtatcttgatggtagagttgatgaattcttcaagatgtttgaaagcaaaatctatgaactctccgacaaggacttcaagagaaatgtgaaatcactaattgattctaaactggagaagtttaaaaacttatgggaggaatcagatttctactggggagagattcaggcaggaactctgaagtttgatagggtcgagtctgaggtcactatgctaagagagctcaagaaagaagaattcatagagtacttcgaccagtacataaaagtggacgcgcctcaaaggaggacactaagcgtgcaagtcttcggcggcaaccattcggcagaattcaagacggcgatcg

SEQ ID NO: 61857 - DNA, 354 bp, Zea mays
ctccttcgcaagggcaaggctacacttctgaccccagaagtcctcaaggaaatgcagctggagcaggagagaatagaagctgaaaagaagcgggtaaaagaagacgcgcaacaacttgctcgagtttttgaaaccattggcgctttcaaactccctcgcaaaggtggaaaaggaaaacagatctttgggagtgtcacggcacaggatgttgttgacataataaagtcacaacttaatagggatgtcgacaagaagctggtgacggttccagaaatccgtgaaatcggagagtatgttgcagagatcaagcttcacccagacgtgacagcgcgagtaaggctgaatgtctatgcg

SEQ ID NO: 61858 - DNA, 352 bp, Zea mays
tctttgaagttcctataacggcacaaaagcttgggaaatctggaaaatttgatgcaattctgtgcattggagctgtgattagaggtgacacaacccactatgatgccgttgcaaactcagctgcatcaggtgtactcaatgctggattatctgctggtgttccttgtgtatttggtgttctaacctgtgaagacatggatcaggcactgaaccgtgctggtggcaaggctggaaacaaaggagctgaagctgctcttactgccattgagatggcctcgctgttccggcatcacttaggctgacaccttgtgtattctgattttctatacacgaggcggcagcatttcctcct

SEQ ID NO: 61859 - DNA, 350 bp, Zea mays
  unsure (1)..(350): unsure at all n locations
cacaagagaatgcctccagaagcaatagatcttgtttcccgtcttcttcagtattcgccgaatctgcgatgtagtgcacttgaggcgtgtgctcattcattctttgacgaattacgagaatcacatgcaagactccctaacggacgcccatttcctccactattcaactttaagcaggaactagcaaacgcaccaccggagcttgtcagcaggctattaccagagcatgctcgacggcattcaggattcggttccttatttgggagtggaccgtagcccgtaggaaaatctcgttttaatgttgggctgctgtacgccgtcagagggcaatctgcatatcccanatctaa

SEQ ID NO: 61860 - DNA, 334 bp, Zea mays
  unsure (1)..(334): unsure at all n locations
atccaagtgaaccacattatcgcaagaatgcatttgatgctggagaagatggacttggaaaaaatgctcattctcttaagaagggatgcgattgcttgggctacataaaatattttgatgcacatttcacaaacttcactggtggtgtggagacaattgagaactgtgtttgtttgcatgaaaaggatcatgggatcctttggaaacatcaagactggagaactggtttagcagaagtaaggcggtcaaggaggctcactgtttcatttatctgtacagttgcaaactatgagtatggtttttactggcacttctatcaggatggganaataga

SEQ ID NO: 61861 - DNA, 346 bp, Zea mays
  unsure (1)..(346): unsure at all n locations
ctctgcattctccacaatccatgtgacgcccgaggacggtttcagctacgccagttacgaggttatgggcttggatgccactgctctgtcttatggtgaccttgtcaagagggtcctccggtgctttggcccctcagagttttccgttgccgtgaccatcttcggcgggcgtggccatgccgggacatggggaaaggcacttggtgcagaggtctatgactgcaacaacatggtggagcaggagctgcctggaggcgggctcctcgtgtaccagagcttctgtgctgctgaagacgctgttgctacctcgcccanatctgttttccactgctttgacggcgagaac

SEQ ID NO: 61862 - DNA, 349 bp, Zea mays
  unsure (1)..(349): unsure at all n locations
gcgcctccatttcggcctctgtcncttgcaagttcaatctcacctccaaccatgggtaaagagaagtcccacatcaacattgtggttattggccacgttgactctggcaagtcgaccaccacaggacacctgatctacaagcttggaggcactgacaagcgtgtgatcgagaggtttgagaaggaggctgctgaaatgaacaagcggtccttcaagtacgcatgggtgctcgacaagctcaaggctgagcgtgagagaggtatcaccattgatatcgctctgtggaagtttgagaccaccaagtactactgcacggtcattgatgcccctggacaccgtgacttcatca

SEQ ID NO: 61863 - DNA, 285 bp, Zea mays
gggacacgagctgggagctaagcctcatcggaagaagcggggtaggctggcctgggaaggttcttggaggcagcagccctctagagtgtgtagaaaatgttgggattgcaggtgcgctcttctggggccccagggcccctgactctgaaggaggtggaggagctggagcagctgacccagcagctaatgcaggacatggagcatcctcagaggcagaatgtggctgtcaacgaactctgcggccgatgccatcaacccctggccacgggcgcagcagctcgtcct

SEQ ID NO: 61864 - DNA, 349 bp, Zea mays
ctgagactgtggaacttcagattggtctgaagaattatgatccacagaaggacaagcgtttcagtggctctgttaagttgccccatatccctcgtcccaagatgaaggtgtgcatgcttggtgatgcccagcatgttgaggaggccgagaagatgggacttgactacatggatgttgaggctctcaagaaaatgaacaagaacaagaagcttgttaagaggcttgccaagaagtaccatgctttcttggcatcagaggccatcatcaagcagattccccgtctccttggtcctggtctcaacaaggcaggcaagttcccgaccctggttactcaccaggaatccctcga

SEQ ID NO: 61865 - DNA, 88 bp, Zea mays
cagagcatcaacccagacgaggctgtcgcgtacggagctgccgtccaagcgtgatcctcactggcgatggcaatgagaaggttcagga

SEQ ID NO: 61866 - DNA, 351 bp, Zea mays
caaggtcacggcctggcagacggccgaggtcgccaagatcaacaaccgcttcaagagggaggatgtggtcatcaacggctgggagaccgagcaggtggagaaggcctccgcgtggctcaagaagatcgagaggaagctggacgagcaacgcgccaaggcgctggagaagacgcagaacgacatcgccaaggcgcggcgcaaggcggaggagaagcgggcgtcggcggaggccaagcggggcctcaagctggccaaggtgctggagctcgccaacttcatgaaggccgtcggcagggtgcccaccaagcgctccttcttctagccagccgactaccgctaccactccgtctc

SEQ ID NO: 61867 - DNA, 344 bp, Zea mays
gagtaccgcaaggatggtgaatatgttctgacttacgaggacaaggatggagattggatgcttgttggcgatgtaccatgggagatgttcgctgactcttgccgcaggctcaggatcatgaaaggatcagatgcaattggacttgctccaagggcagctgataagtccaagaatcgcaactagaatggttgcttcttacagtccagagcaagagggagatatccagtgactgtagggatctttgtggaagccggaaaacgtctaacagtttcaagaagaattctgccttatggtctgtaccacatgtttttgctgctacgcaagtaaagaataccacgtctgtc

SEQ ID NO: 61868 - DNA, 329 bp, Zea mays
caggttgaaagtatagttctgagcatcatttcaatgctctctagtccgaatgatgagtctccagcaaatattgaagctgccaaggattggagagagaagcgggatgagttcaagaagaaggttaggcaatgtgtccgcaggtctcaggaaatgctgtgaaggaggaacatgggggagttgaatgagtctgcaatcggtgtgctgtatgtcacaaccaattatctcatgtcagcattcttttgctttcccctgtatattttttcaaccgatgtcactcgtatagtggtgttgggtctcctttagacaaactcgggacggttgcttatcct

SEQ ID NO: 61869 - DNA, 341 bp, Zea mays
cgttgttttcctcttttccccaaggcaaccaaaccatctcgattctcgactcgtggggaagtttcgctctcgccggcgtcgacggcctagggttcgaggaacgtccgtccgtccgtccggggaaggagcggtagggaggcggagatgatcgaggtggtgctcaacgaccgcctggggaagaaggtgcgggtcaagtgcaacgaggacgacaccatcggcgacctcaagaagctggtggcggcgcagactgggacgcgccccgagaagatccgcatccagaagtggtacaacatctacaaggaccacatcaccctcaaggactacgaggtccacgacggcat

SEQ ID NO: 61870 - DNA, 344 bp, Zea mays
tatggagtttccgctcagacaccttctgagggtggagcactgcagagtgctcttgtatttggggaaataggtcgacgcctcaaggatgttggacgtgaggtggtaaagacagtaaatgctgtatttgaatggcatatcacgaaaaatgggaatgttgcagccaagtggaccattgacctgaagaacggctctggagaggtttaccaaggccctaccacacgaactgctgacacgaccatcaaaatttctgatgaggatttcatggaagtggtcctgggcaagcttaacccacagaatgccttcttcacaagcagactgaaggcccgaggaaacatcatgctgag

SEQ ID NO: 61871 - DNA, 345 bp, Zea mays
tggtcattcccactgccaggagggtcatctatgcctctcagctcacggccaagccaaggctgctggagccagtctacctggtggagatccaggccccagaaaatgcacttggtggtatctacggtgttctgaaccagaagagaggtcatgtctttgaggagatgcagaggccgggtaccccgctctacaacatcaaggctttcctccctgtcatcgagtcctttggtttctccagccaactgagggccgcaacctctggtcaggcgttcccccagtgtgtctttgaccattgggacatgatgggctcagatcctttggaggccggctcccaggctgctcagctgg

SEQ ID NO: 61872 - DNA, 341 bp, Zea mays
tggacaacctggattatagtggaagaccaaagactgttccccagaagataagcacgccagctgaaacagccccaagaccttcatacccatcttcaaaggcgaaaaaagactgggataaactggaagctgaagtcaaaaaggaggagaaggaagaaaaacttgatggtgatgctgcattgaacaaattcttccgtgacatctacaaggatgctgatgaagatatgcggagggccatgatgaagtcattcgtggaatcaaatggcactgttctctcaaccaattggaaagatgttggagcacagaaggtagaagggagccccctgatggtatggagctcaaga

SEQ ID NO: 61873 - DNA, 340 bp, Zea mays
gaggacggcctcgtccctgtcgtgctgcagaggtacctcgccggcaagatcggatggatcaactaccatgaactccctggcaccggccacttcctgtcgtcggtgcctgggctcggagacaccgtccttaggacccttttcagtgacaaacagtaaacaaacagtcctccctcacgacgtatcgacggcgctaagctttcgagcatggtggtggtggtggcgcattagttcacattattattgtaaaggcccgtggttgtcgctgattagagatgataaaataatggtgatgtagatgcaagaccaagtgaaatactatatcagagatgtaatatacata

SEQ ID NO: 61874 - DNA, 344 bp, Zea mays
tgtcatgttgttcttgatcctaggacaaaagaatcccgtggctttgccttcgtgactatggatactcttgaaggtgcaagatcgtccatcaagtatctgcaccgcactgtacttgaaggtcgcctggtcactgtagagaaggctaaaagaactcgtgaaaggacccctactcctggaaaatactgtggtcgaagaggaggatctcaaaggagcccatcaccttaccgccctcgcagaagggagcgttcgcgctcacgggaacgcagaagggagcgttcgcgttcaagggatcgaagggagcggtctcgctcaagggatcgaagggagcggtctcgctcaaggga

SEQ ID NO: 61875 - DNA, 344 bp, Zea mays
aggcaacacagcttgcagagttccaaagatgcatggttccactcttccgtcagattagccgtagcatgaacagctttcatttccaggtggcagagcgggctctgtttctctggaacaatgaccatattgaaaccctaattaagcaaaactacaaggtgctgttaccgatcatctatccagcactcgagagaaactccagagatcactggaaccaagctgtccgtagcctgacactgaacgtacgcaagatcttctcagaccatgattccacattcttcggggagtgcgtccagaggttcagtgacgaggagctcaagcaggcggaatctgattcaaaacgagac

SEQ ID NO: 61876 - DNA, 338 bp, Zea mays
gggtttccttcctcctccagtgctgtcatcgccgccgccgccccggtttccttcgtaagcccgtcgtcctccgtccgcgactctgcgcgagaagcgagagtatggacacccaagtgaagcttgctgttgtggtgaaggtgatgggaaggaccggctccaggggtcaggttacccaggtcagagtgaagttcttggatgaccagaaccgtctcatcatgaggaacgtcaagggaccggttcgcgagggagacatcctcacactgctcgagtctgagagggaggctaggaggctgcgttgaggcggaatagtgtcttggtagttttcgtatggagttgga

SEQ ID NO: 61877 - DNA, 339 bp, Zea mays
cttatttttgccccaaatgcgggtgtggctgcatatcctagttggatgccaactattgaaatgataaggcagactgggattcctgcaatctttacggacttctgtgaagaagctgcacatctagcatcctgctgcataagctccataactggtcaaccccttaaaattccaatccaggtaaatcctttcaggcagccagttgcagcggaaaacaatgcattatacgtaccatgttattcaaattgctttgtttttgggatgtaaaattgccctgtcaccaggaagtatatttagagattgatttgtcaagaaatggaatgtgaattttcaaagaagaca

SEQ ID NO: 61878 - DNA, 340 bp, Zea mays
ctcctctctgcatacgcagtaaagaatttattgatattgggaagattgcctcagttgaaatcaaccacaagcaagttgatatggctacaaaaggccaaaaggttgctattaagattattgcgaacaattctgatgagcagcagaggagcttcggcagacactttgatatggaagatgagcttgtcagccggatatcaagaagatctattgatattttgaaacagaactacagggaggatttgacaactgaagactggaaacttgttgtaaagttgaaatcaatattgaagatacaatgaaaagccccctcccctaacacacctgcccatgaatttgggag

SEQ ID NO: 61879 - DNA, 332 bp, Zea mays
cattgcaccgtggtggtggtcagataattcccacagcacgtcgtgttgtctactctgcattccttatggctactcctcgccttatggaacctgtgtattatgttgagatccaaacaccaattgattgtgtctctgcaatttatacggtgctatcccggcggcgtggtcatgtaacagctgatgtacccaagccaggcactccaatatacattgttaaggcatttttacctgttatagagtcttttggatttgagacagatctcagataccatacacagggacaagccttttgtctgtcagtattcgatcactgggctatagttcctggtgat

SEQ ID NO: 61880 - DNA, 322 bp, Zea mays
gccgtctcgcttttgcgtgacaaagaaagagagcgagaagcagtcgccatgtctggcatcatccacaagatcgaggagaagctccacatgggggggcgaccacaagaataaggaggaggagcaccacaagaaggccgaggagcaccacaagaaggaggagggggagcaccacaagaaggacggcggggagcacaaggaaggcatcgtggagaagatcaaggacaagatcaccggcgagcacggcgacaagtccggcgaccacaaggagaagaaggacaagaagaagaaggataagaagaagcacggcgagggccacgaccac

SEQ ID NO: 61881 - DNA, 336 bp, Zea mays
aaggttgcgtatgccctgtctcagggactaaaggtcattgcatgtgttggtgagacccttgagcagagggaggctgggtctaccatggatgttgttgctgcacaaacaaaagcaattgctgagaagatcaaggactggagcaacgtagttgttgcctatgaaccagtttgggctattggaactggtaaagttgccaccccagctcaggctcaggaagtgcacgcctccctgagggattggctaaagaccaatgccagccctgaggttgctgaatctactaggatcatctacggaggctctgtaactgctgcgaactgcaaagagctagcagcacag

SEQ ID NO: 61882 - DNA, 340 bp, Zea mays
aaatcaatattctttgtctgatggagataatctttagtcggccatctgaagatagaactattccattaagtgttattgctgagcagactaagctttcaatcagtgatgtggagtatctccttatgaagagcctctcggttcatcttattgagggaataattgatgaagtggacagtacagttcatgtttcgtgggtccagcccagagtgcttggaatcccacaggttaaggctttgcgcgaccgcctggatgcctgggttggaaaggtgcatactacattgctttcagttgaggcagaaacacctgatcttgttgctgcctaatttagcacctgttacac

SEQ ID NO: 61883 - DNA, 329 bp, Zea mays
ggctggggtggacgttcgaccgcgcggaggcgaatcggatgatcgacgcgctctcgcactgcctcaacacgttccggaactacaaggagagctggcgcggcctggaggcgcgcggcatggcgcaggacctcagctgggaccacgccgccgtgctgtatgaggacgtgctcgtcaaggccaagtaccagtggtaagtgagttacgccgacgcccttcatgtcgcgggacagtcctggacgccctgggcactgcgtgctcttctcacgcggctttgctgcgtgcggcgcatttgctcaattggcgcggggcgatggtggttggcctacgtc

SEQ ID NO: 61884 - DNA, 335 bp, Zea mays
  unsure (1)..(335): unsure at all n locations
ttttgggcctcctgggacaggaaaaacactcttggcagaagcccttgcaacagaagctggagcaaattttatcagtataactggttctacactcacatcacagtggtttggagacgcagaagctcacaaaggcacttttctcctttgcgactcgactagctcctgttatcatatntgtggacgaggttgacagcttacttggtgcaagaggtggtgcatttgagcatgaagcaacaagaaggatgcgcaatgaattcatggcagcttgggatggtctcaggtccaaagagaaccaacggatccttattcttggtgcaacaaatcgtccatttgat

SEQ ID NO: 61885 - DNA, 333 bp, Zea mays
  unsure (1)..(333): unsure at all n locations
gctaaaggcttctcatggatcaaacacaaaggcttctgagccaatggtcattgatgcaagctcatctcgaaaatctgtgaatgcttcacattttggtgggaacaatgatattctcatagatggatttgtcnctcctttaaccagtgttgctccaatgtttcccttctttgaaaacactgctgaatgggacgactttggtgaggtcatcaaccctgatgattatatgatgaaacaagaagaaatggataatactctgatgcttggccctggagatggattagatggtaggatcgatgatggctcagcacgcctgcttcttgattcaacgccctc

SEQ ID NO: 61886 - DNA, 185 bp, Zea mays
cagccgtcgctgatcgggatggaagctcccggcatccacgagaccacctacaactcgatcatgaaatgtgacgttgatatcaggaagactgtacgggaacatcgtcctcagtggaggacgacatgttccctggcatcgctgaagatgacaagagattatgctcgccgacacaagatcaagctgcg

SEQ ID NO: 61887 - DNA, 364 bp, Zea mays
gtctgaagcacagagtctttgaggtttgcctagctgatcttcagggcgacgaggatcaagcttacaggaaaatcaggctccgtgctgaagatgtgcagggcaggaatgtgctcacaaacttttggggcatgaattttaccactgataaactcagatccctagtgaagaagtggcagacattaatcgaagcccatgttgatgtcaagacaaccgacaactacatgttgcgtttgttctgcatcggcttcaccaagaggcgcccaaaccaagtcagagaacctgctatgctcaggcatcccagatccgtcagatccgccgtaagatggttgagattatgatcaaccaggcttctacatgtgacctg

SEQ ID NO: 61888 - DNA, 362 bp, Zea mays
  unsure (1)..(362): unsure at all n locations
ccaatgaagaacagcatatccaagcgccaggagaagactatcatgaaactggtagttgatgctgaaactgacaaagtacttggtgcatccatgtgtggaccagacgcacctgaaattatccagggcatcgctattgcggttaaatgtggagccaccaaagcagacttcgacagcactgtcggaatccacccttccgctgctgaagagttcgtgaccatgcgcaccgtgacaaggcgcttgagcccgacatccaagccaaagacgaacttgtaacaagaaattggtgttttgggggaatgttacaccggacaaatacactggtttcatcacgttggtaatttntacgtcattggaactggaac

SEQ ID NO: 61889 - DNA, 359 bp, Zea mays
  unsure (1)..(359): unsure at all n locations
caaaaagtcagaagaagcttgcaagcgtagcaaggcgtgacacatacactttgcttgggcggtcgcgccattttccttacctgactcagtatggtcctggccaacgaggtcatattgagcgtgctgctataaatgcaccagtgcagggaagtgcagcagatgttgctatgtgtgccatgcttgagatcgaaaggaatgtccgccttaaggagcttggttggaggctcttattgcaggtgcctgatgaagtgatactggaagggccttcagagtctgtgacgtggccaggctatagtggtggagtgtatgtcccaactttctacggaaccacatctganggtcgactggctgtcgacgcc

SEQ ID NO: 61890 - DNA, 360 bp, Zea mays
  unsure (1)..(360): unsure at all n locations
gttgaggtcanacgaatccataactgccgcaggttaagccatgaatgcttgacatctatttccgtgaagggcatatattatcaggctgaagttcaaggacaaaagatcacctggctaactccgcatgctcttcagcaagtattaactgatgatgttgatttcaatgtgatgctttcttttctagaattctatgagactcttctaggatttgtgaacttcaaaatctatcattcaataaatgtaaattatcctcctattctggatccacgtctgaagctttagctgttgagctctatgcattgtggcgatacatctctgctggttccagaagaatgattgggaattcacaaactgacgcag

SEQ ID NO: 61891 - DNA, 309 bp, Zea mays
  unsure (1)..(309): unsure at all n locations
gtgatgtgattccttcaagttgcattcaaatgcgcaatgtcattcttagtgcttttccacgtaacatgagactggcagacccttctaaccctaatctatagattgatttgttcgctgacatttcaatagcaccacggatcatgtcggatgttgatggtgctcttaaatccaagcagttgaagactgacgttgatgaatcactcaagaagacggaaagctctaccattttaagtgacctgaactcaacactgctgactgctcagnatgaagctatgttgctacgacacgctacaacgtgtctctgatcaa

SEQ ID NO: 61892 - DNA, 357 bp, Zea mays
tgcgatgtgattccttcaagttgcattcaaatgcgcaatgtcattcttagtgcttttccacgtaacatgagactgccagacccttctacccctaatctaaagattgatttgttggctgaaatttcaatagcaccacgaatcatgtcggatgttgatggtgcccttaaatcaaagcagttgaagactgaggttgatgaatatctcaagatgccggaaggctcttcctttttaagtgacctgaaccacaaattgctgctgcctcagaatgaagcagtgttgctgggacacgctacaacgtgcctctcgacaattcacttgtattctaatgtggcatccagctgtgcacaactgcaactg

SEQ ID NO: 61893 - DNA, 365 bp, Zea mays
  unsure (1)..(365): unsure at all n locations
tatcgtgtactacgacaaagaaaagaagcgtcacattgaagaattgaagaatagaacaagtgctgtgaagcctggacaatcagtaggcactgcagccattggcggtccattcaagcttttgaatcatgatggaaaacctgttactgaaaaggatttcttgggcaaatggacgctgctttattttggatttacacactgtcctgacatttgtccagatgaactccagaaaatggctgcagcgattgacaanattaagganaaggcaagactggatgtgtgccagtatttattacagttgatcctgaaagagatactgttgagcagttcgggactatgttaaagagtccatccagtctagtaggctc

SEQ ID NO: 61894 - DNA, 259 bp, Zea mays
  unsure (1)..(259): unsure at all n locations
tgaaggcgtttaatgtggcagaattctttgggacactgtgtcttgaaagcagactttcccaaaggcaaaaaggaacttgcagtatcattgttccagagcgtggttttgatgttgttcaatgacgcacaaaagttaagcttcattgacatcaaagattccactggtatcgaggataaagaattgagacgaacattgcaatctcttgcatgtggtaaagttcgggttctccataagataccanaagggagatatgtagaag

SEQ ID NO: 61895 - DNA, 302 bp, Zea mays
ccctgagcgagtcggacaaggctccctatgtagccaaggctaacaagctcaagctcgagtacaacaaggccatcgctgcctacaacaagggcgatagcactgcagctaagaaggctcctgccaaggaggaagaggaggaagatgaagacgagtctgacaagtccaagtcggaggtcaatgacgaggatgatgaagagggtagtgaggaggatgaagatgatgacgagtgatggagctcctcgagacaatggaccgtgcttcatccaacaatggacggctacacaacgccccgaggcgatcac

SEQ ID NO: 61896 - DNA, 358 bp, Zea mays
cggcaaacctttgggcactcatcatggacgctggaactggtttctgttctcaagtttacgagctctcaccagtttttctccacaaggactggataatggagcagtgggagaaaagttactacataacagcaattgctggatcaaccaatgggagttcattggttgtcatgtccaaaggaactccttacacacagcaatcatacaaggttagcgaatcgttcccttacaagtggatcaataaaaagtggaaataagggttccatgtaacatcatggccactgctggaaatcgctggggcgtagttatgtcaaggaactcagggttttctactcacgttgtagagttggacttcctgtac

SEQ ID NO: 61897 - DNA, 348 bp, Zea mays
tggacggtccaagggttctgaaagccgtccgtgcagctggtgagcctctggtcgatgattggagctgtctcaagtccacggttcgtacttttgaggcgcaatgtgggtcgttggcgcagtatgggatgaagcacatgcggtccttcgcaaacatctgcaacgctggcatccttcctgaagcagtgtcgaaggtcgctgctcaggcttgcaccagcattccttccaacccctggagttctatcgcacaagggttctagcgcctaagaatcataggtgaggcgacatatttcagccgctccaccgcaacgaactggtttacattaccagtcctcaggggtagtctagttc

SEQ ID NO: 61898 - DNA, 345 bp, Zea mays
  unsure (1)..(345): unsure at all n locations
gttcaagatactcgtccagtcgcccaactccttcttcatggatgttaagtgccaggggtgcttcagcataaccactgttttcagccactcccagactgttgttgtgtgccctggctgccaaactgtcctctgccaacccacaggaggaaaggcaaggctcactgagggctgctctttccgcaggagggagactagagcggatgtggtcttcaagttttcctctatgccagatactagcgtcatgaactgcctttagctaagattttccatagttgttctcgagcagctatgtgttgcatgttggctacttccanacttatatctggtttggtttggattgtgatg

SEQ ID NO: 61899 - DNA, 269 bp, Zea mays
gtgctagaggtgtacgatgcacgcctgaccaagtgcaagtaccttgctggagacttgctcagcctcgccgacctgaaccatgtgtctgtcactctctgcctgtttgctacgccctacgcatctgtgctcgacgcctacccgcatgtgaaggcctggtggtctcgtctgattgagaggccgtctgtccagaatgtcgctgccctgatgaagccatctgcttgaaacggttgcgctgtcaatcggtgaatggaataacgccagtctgttct

SEQ ID NO: 61900 - DNA, 360 bp, Zea mays
atccactcagccagtggtaggacttaccactcaaaatttgcacctccaaagtctccatgagttgatgatgtaactggagagccattgattcaaaggagagatgacaccgctgaggtcttgaagtcaaggcttgaagctttccacagacaaaccgaacctgtgattgattattactccaagaagggcttagtggtgaacctgcctgcagagaaaccaccgaaggaagtgactgctgaggtgcagaaagccctctcgtgatgaaatgtccatcttgaggttaaacatgacatctactcaaacccctttgtttgggtttcttcgaaatttgcactaggccaacatcatgagggtttttatttt

SEQ ID NO: 61901 - DNA, 341 bp, Zea mays
tgaactgaggaggacaagaaggcagctgatgagcgtgctgccgctgccaaggcctcttctaaaaagaaagaaagtggtaaatcctccgtccttatggatgtaaaaccatgggacgatgagactgatatgaagaagctggaggaggctgtccgcagtgtccagatggagggtctgacttggggagcatcaaagcttgtgcctgttggatacggcatcaagaagatgactatcatgttgacaattgtcgacgatcttgtgtccatcgacactctaattgaggaccacttacgcaagagcccatcaatgagtacgtccagagttgcgacatgtggctttcaaca

SEQ ID NO: 61902 - DNA, 356 bp, Zea mays
  unsure (1)..(356): unsure at all n locations
tgttctcaagtcggtgggtaagctaacaaacagcgagctgcatcaggtgttctctgagtggaacaagggtgagctcctcagtttcttgattgagatcacggccgacatctttggtatcaaggatgacaagggtgaaggctacctggtcgacaaggtcctggacaagaccgggatgaagggaactgggaaatggacagtccagcaggctgctgagctttctgtagctgctcctacaatcgaggcgtccttggactccaggttcctcagcggtctaaggacgagcgcgttgaggcttccanaatcttccaaggtgactactccactgagcctacggtgngacaaggcacagctgatcg

SEQ ID NO: 61903 - DNA, 357 bp, Zea mays
cggcagccgggagatcaagatgatgcctttcggcgccgggcggcgcatgtgccccggctactcgctcggcgtccaccacgccgagtacttcgtggcgaggatggtgcgggacttggagtggcgcccgccggtggacggcgtggcggtggaaatggacggacgctggacttcaccgtcgtcatgaagcagccgctccgtgcacgcatcatcgccagatattagctccatgcgtggtattctgctggggataagataagctactattctgttacatcagtatcccttcgtggatgtactactaatctgttggcgatgcttgatgcttccaagagctggagtagaatacatgtagctaca

SEQ ID NO: 61904 - DNA, 353 bp, Zea mays
  unsure (1)..(353): unsure at all n locations
atgccaccaccattccttccttgttccttccccagctccgcaggctgctcatcgccctccctccgcgcccccgatccagatccagatccaggggcttgtcatggcatccaaacgtatcctcaaggaattaaaggacttgcaaaaggaccctccaacatcatgcagtgcaggtcctgctggtgaggatatgttccactggcaggcaaccatcatgggtcctcctgatagtccatatgctggaggtgttttcttggtgaacattcatttccgccagactacnccttcaagcctccataggtatcttttaagacgaggtcttccatccanacatcaatagtaatggcagcatatgt

SEQ ID NO: 61905 - DNA, 350 bp, Zea mays
ctcagggtggggctggagagtttgcccgaagagaagatgcataatgtgctacagattgtgcgcaagaggaacaacaatccggagatgctgggggatgagatcgagcttgatattgatgagatggatgttgagacacagtgggagcttgatcgtttcgtagctaacttcaacaaagcgctcaagaaatctcagcgtgctgtggtgatgaatggtggcgccgctgatgtaaccagtgctgctgtggctgagaatgacactgcacctgtcgcaatgtgcttacgttggttgacaatgatgatgtggagagagagatactgtgaggagcgctacaatggctgagcacgtggatg

SEQ ID NO: 61906 - DNA, 343 bp, Zea mays
  unsure (1)..(343): unsure at all n locations
caaagttttcattggactgattgttggtgccatgctcccatactggttctcancgatgacaatgaagagtgttggaagtgcagcactcaagatggtgaggaagtccgcangcagttcaacaccatccctgggctcatggagggcattaccaagcctgactatgcgacgtgtgttaagatctctactgatgcatctatcaaggagatgatcccactggtgcacttgtcatgctacactctattgtggggatctcttggtgtnnaacctctctggagttcttgctggtgctcttgttctggtgtcagattgcaactctgcatcaaantggagtgctgggacacgc

SEQ ID NO: 61907 - DNA, 236 bp, Zea mays
tgtccgcggtcggctcttcgaccggcgcgagaatgccgttcaagaggttcgtggagatccggcgcgtggcactggtgaactacggcaaagactatggccgactcgtcgtcatcgtcgatgtggtcgaccagaacaaggcacttgttgacgcccctgatattgtcaagtgccagattaacttcaaacgggtctcacttactgacatccagattgacatcaaacgcgttcccaagaag

SEQ ID NO: 61908 - DNA, 343 bp, Zea mays
cacgatgatgccttcagcaccttcttcagccagactggtgctgggaagcacgttccccgtgcaatcttcgttgatctagaacccactgtgatcgatgaggtgcgcactggcacgtaccgccagctcttccaccctgagcagctcatcagtggcaaggaggatgccgctaacaatttcgcccgtggccactacacaattggcaaggagattgttgatctgtgccttgaccgtatccgcaagcttgctgacaactgcaccggcctccagggttcgtggtcttcaatgccgttggtggtggcactggctctggccttggatctctctacttgagcgctgtctgtgg

SEQ ID NO: 61909 - DNA, 335 bp, Zea mays
tgacattagcaacatgaacctggccgactccatgaccagggccaaggtgctggatattgacctgcagaagcagctcaggccctacatggagtccatggtgccacttcccggtatctatgatccggacttcatcgcggctaaccagggctctcgcgccaacagtgtcatcaagggcaccaagacagaacaggtggagcagatcatcaaggatatcagggagtttaaggagaagaacatagtggacaagatagttgtgttgtggactgcaaacctgacaggtacagcaatgtgtgcgctggtctcaacgacacgatggagaatctgctggcatctgt

SEQ ID NO: 61910 - DNA, 354 bp, Zea mays
catgggaccgaagtacccaagaatcagcactactggaagaaacaagcttgatcagtaccaaatcctcaagtaccccctcaccacagaatctgcaatgaagaagattgaagataacaacactctggtctttattgttgacctcaaggcagacaagaaaaagatcaaggctgcagtcaagaagatgtatgacattcaagcaaagaaggtcaacaccctgatcaggcctgatgggaagaagaaggcttatgtgaaactgacacacgactacgatgccttgatgtggccaacaaaattggcatcatctaagttaataggcaactggattcgacatctatgtcctactagttctgagca

SEQ ID NO: 61911 - DNA, 335 bp, Zea mays
atactgcaaaggttgaatctggctcagttgttgctgtttttggccttggaacagttggacttgcagttgctgagggagcaaaagctgctggtgcttctcgagttattggcattgacatcgacaataaaaagtttgatgttgcaaagaactttggagttacagaatttgttaacccataagagcatgacaaaccgatacagcaggtcctggtcgatcttacagatggcggcgtggattacagctttgagtgcattggacatgtttcgatatgagggctgcactggaatgctgccacaagggctgggcgacctccgtcatcgtcggcgttgccgctc

SEQ ID NO: 61912 - DNA, 347 bp, Zea mays
atttggttttgctatttggcttattctctacttgttttcccttccttttcactttgtttgcccaggaaacaagaatggacttctattgccacatactacaaccgaccaagagcttcagcatctgaggaattgcttgcctgatcaagtggtggttcagcgcattgatgagaggttatctgcccttggcaattgcatagcctgcaatgaccatgttgcacttacgcaccctgaccttgacaaggagactgaggagttcattgcagatggcttggggtcgaggtgtttaggcagactattgctggaaatatccttgtggggagttactgcgccttctctaacaggggtgg

SEQ ID NO: 61913 - DNA, 327 bp, Zea mays
ctcgcccgtcaagttccagtacggccacgccaagaaagacctgcaggtccagagccacgacgccgtgttccaggtgaagaagggcgagatgctgttcggctaccagccgtgcgccaccaaggacccccgcgtgttcggcgccacggccaaggagttcgtgcccggccggttcctcggcgaagagggcagcaagctgctgcagtacgtctactggtccaacggccgcgagaccgagaaccccaccgtcgacaacaagcagtgcaccggaagaactttgtggtgctcgttggcaggctcttcctcgtcgagctcttactccgttacgac

SEQ ID NO: 61914 - DNA, 228 bp, Zea mays
ctgctatgtactttggtctcatgggtgatggccagcccatcggtcgctacgacgacatgtcggcaagatggtgtgtgaaagtcatctgcgatcacctgatcctgggagtcaagactggcctgccatacatctggcacagcaaggctagcaaccccttcgttaacttggagaagggataccaggggctcttccggcaagaggacatcatccccttcttccagaacgtga

SEQ ID NO: 61915 - DNA, 354 bp, Zea mays
  unsure (1)..(354): unsure at all n locations
ccaccattcctcctccggatttcgcagtcagcggtggtgaaggtagcgggcgccgaaggagatggggctcgcggtcgggaagctcttcagccggctcttcgccaagaaggagatgcggattcttatggtcggtctcgacgccgccggtaaaaccaccatcctctacaagctcaagctcggcgagatcgtcacaaccatccccaccatcggtttcaatgttcgaactgttgagtacaagaacattagcttcacggtctgggatgtcggggtcaggacaagatcagacctctctggaggcattacttccagnacacacaggtcttatctntggtgtggatagcaatgaccgtgacg

SEQ ID NO: 61916 - DNA, 285 bp, Zea mays
ccaaacatctgtacctgtcagatctgaagctacggcgatcgcgattaccagactgccaaagtgcacttgagatgtgcgcgtaggcagttcacttccgtaatcggattcgcaagctttcggacgcctaccggaacctgtggagatttccaggaaggagattgccactcaactaactctcacacagtcctagaggtgacatgcattggagctccaagatgcgtcgtacgccatctctcccgagagctttggactacagcactgtcgacgtgacgatacggtggctgt

SEQ ID NO: 61917 - DNA, 347 bp, Zea mays
gcaagagttcgaatctcttagcaaccacccttcaaggccgtgcaccagcaggagcacctgagattgtccggtacagtattcgagtggatgcaatggattggatgtccgaccggggtaaatggaaggatgctgatgtactgatcttcaacactgggcactggtggaacaatgagaaaacaatcagggggggtgcctactttcaagtaggcgatgaggtccaaatgggcatgagtgttgctgaggcttacagaagatcgatagaacattgtccgattggcttcgcagagaagtcaacacgagctagacccatgtcatctaccgcacatatgctcctgtgcatttcagag

SEQ ID NO: 61918 - DNA, 316 bp, Zea mays
  unsure (1)..(316): unsure at all n locations
cgcactacaggtattgtgctcgattctggtgatggtgtgacccacaccgtgccaatctacgagggatacgcgctccctcatgccattcttaggctggatcttgctggccgtgatctgactgactgcctaatgaagatcctcacggaaaggggttattccttcaccacgacggcagaacgggaaatcgtgagagacataaaggagaagctggcctttgtggccctagactacgagcaggagctggagaccgctaagagcagctctccgtncgagagagctacgagctgccccgatggcaggtcatcacgatcggcgc

SEQ ID NO: 61919 - DNA, 354 bp, Zea mays
cgttaagcagcatcttttcagcaatttaatcaaacacccaaagttcatcactgataccaaggccgctattgctgaaacttacaaccgcacagattcagaatttctgaaagctgatagcactcaaactcgatatgctggctcaactgcctcaacagctattattgtaggtgatcgtttgcttgttgcaaatgttggagattctagagctgttattactaaaggaggcaggcgattgcggtttcaagggatcacaaacctgatcagacagatgagaggcaaagaattgaggatgcagggggctttgttatgtgggctgggacatggagagtgggtggcgttctcgctgtctctcga

SEQ ID NO: 61920 - DNA, 262 bp, Zea mays
tggaaactcacctcctgatggacatcggcatgatgaccatgacaaaaggacggcagagagatgaaaaagaatggagcgagctcttcaccaaagcagggttcagcgaatacaagatcctgaaggaatttggagctcgtgttgccttcgaagtctatccgtgagattgcacctggactatacatatatatttacatacatatatgtatgtgtgtgggtgccttgcgtggcttggcgtgatgatgtcataaataaagaggttggt

SEQ ID NO: 61921 - DNA, 356 bp, Zea mays
cctaccccacacagaagcggcggcggcggacaaacgcaggcgaaggcgagggtgtgagggaaggagcaccagccatggtgcacgtcaacttctaccgcaactatggtaagacgttcaagaaaccaaggcgtccttatgagaaggagcgtcttgatgctgaactgaagctggtcggtgagtatgggctgaggtgcaagcgtgagctttggagggtccagtatgcactgagcaggatccgtaatgctgcaaggcacttgctcacccttgacgagaagaacccccgtcgtatctttgagggtgaggcgcttcttcgccgcatgaaccgctatgggctgcttgctgagggtcagaacaag

SEQ ID NO: 61922 - DNA, 182 bp, Zea mays
ggcgttgtgaagaccatcaacgtgaacaagatggtcagcgccgggtgcaaggtgaaaatttggatcgccgactggttcgcgcagtcaacaacaagatgggaggcgacctgaagaagatccagacggtagggcgctacatgatcgagatttggaaagcggctgggatgaaccttgacggtgtg

SEQ ID NO: 61923 - DNA, 355 bp, Zea mays
cgcttccagccgccgccgcgtccgcctcgccaagcgcagagccgccgcagcacatcgctctcttgatctcagccatggcggaggtggagcagcaacaggacacgccgaagctcttcaaccgctggaccttcgatgatgtccaggtgaacgacatctcgctgaacgactacctcgctgtgaacgcgacgaagcacgcgatgtacctgccgcacaccgcggggcgctactccaagaagcggttccgcaagcgcagtgcccgatccttgaccgcttacaaactcctcatatgtgcacgggcgcaacaacggcaagaaggtcatggctgtccgcatcatcaagcataccctggagatca

SEQ ID NO: 61924 - DNA, 183 bp, Zea mays
gtgggaggaatcggcgtgttcgtcgcggaggaggacgtccccaggctcgacaccatcctcacgtccatctccaccgacgtcgtcctgcggaagcagcgcctcctcgccaacccgtccatgaagcaggccatgctgttcgcgcagcccgctcacgcgggagacgcgttccaccagatcctcaac

SEQ ID NO: 61925 - DNA, 358 bp, Zea mays
ggcaactacaacctccccaagcactgcgacaacaacgaggtgctcaaggcgctctgcaacgaggccggctggaccgtcgagcccgacggcaccacctaccgcaagggatgtaaacctctggcaacagagcgtccagatccaattgggaggtctgcatcaccaagcccctgctcttcatatcaaccaagtccgcgagcctcatacaactcaagcgcggcatcctcctcgttcccaagctctgggtcctcctcccacattactcttggcgggagcaacttcatgggaggcgtcgagggcagctcccttatcccgtggctaaagaacctctcgtcgagctcctcgttcgtctcctcctcca

SEQ ID NO: 61926 - DNA, 358 bp, Zea mays
tgggacgcgtacgaggccaccaagggcgcccacgggctgtgcatcctgaccgagtgggacgagttcaagaccctggactaccagaagatcttcgacaacatgcagaagcccgccttcgtcttcgacggccgcaacatcgtcgactccgagaagctgagggagatcggcttcatcgtctactccatcggcaagccgctcgacgcctggctcaaggacatgcccgcggtcgcctaatcccacccccctcacccatggattggattccgggaaggaagaggagagaagctggttgaccgttctttattacagtttgtttttgcaggctacgctaccgattttctcttgtgtcaggcataaa

SEQ ID NO: 61927 - DNA, 351 bp, Zea mays
ctactaggtgaccgtcgcgaccgtcctacgccacgtgctcgatccagcctcgtcggcttcttcgcacccgtcaccggcggtcagcacccaccaggttcataaatggcagagacggtgttcaccccctctttggaaggtatgaagcatgtgaaggcagagaacggagtcattctcaccaagcccttccttgatgtctgcaagcaaatcttgcctgtcctggataaatttggagctgctatggcaattgtaaagaatgatatcagcggcaatatcacaaggctaggaaacaagtattcttcagatccatcaaagtatggacacttgtacagcatggttcaggaaagagttcaa

SEQ ID NO: 61928 - DNA, 343 bp, Zea mays
  unsure (1)..(343): unsure at all n locations
ttttgctgctctccgacgccgagctccgaatgccgcagcatcaggcgcggcccccctcgcgtgtgaccgagatggcgctgccgaatcaggggaccgttgattaccccagcttcaagctcgtcatcgtcggcgatggtggaactggtaaaactacatttgtgaagaggcatctcactggagagtttgagaagaaatatgaaccaaccattggtgtggaagttcatccgttggatttcaccactaactgtggtaagatcaggttctactgctgggataccgcaggcaagagaatntggtggctcagggaggatctatatcatggcagtgtgcgacatcatgttga

SEQ ID NO: 61929 - DNA, 211 bp, Zea mays
taggctgcttgcaaatacgagcctgacagtactgaagccaagagggcggcagagttgctatacgaggctgcgctgatctccagtgggtatactcctgacagtccagcggagctggacggaaagatctacgagatgatgaccatggcgctcggcgggagatgggggaggttggagacagaggaggctgaagtcatcgccagcatcgacgacg

SEQ ID NO: 61930 - DNA, 182 bp, Zea mays
gacgaggaatcgttacaaagcattttagacatgacttttgattggacaaaggaggaaagagagatgctaagacggaaggtaccatcgactggtttgaagacgccgtttcgtgatggatatgtaagagatttagctgaggaagttctaaaactggccaagaatggactggaaagaagagggta

SEQ ID NO: 61931 - DNA, 167 bp, Zea mays
ggcatccgcagagagtttgttccgtccaggcaaccaaaaagcgttgccccgccgcgcagaggaagaagagagcagaggaggatggctcgtacgaagcaccgcccgcaagtccacgggaggcaaggctccacgcaagcagctcgccaccaaggcggcgaggaagtcgg

SEQ ID NO: 61932 - DNA, 352 bp, Zea mays
gtcgggacctcacagactccctcatgaaaattctcactgagaggggttactccttcacaacctcagccgagcgagaaattgtaagggacatcaaggagaagctagcatatatagcccttgactatgagcaagagttggaaactgccaagaacagctcttcagttgaaaagagctatgagctacctgatggacaagtaatcaccattggtgcagagagattcaggtgccctgaggtcctcttccagccgtcgatgattggtatggaggctgctggaatccatgagacaacatacaattcaatcatgaagtgtgacgtggatatcaggaaggacctctatggtaacattgtgct

SEQ ID NO: 61933 - DNA, 343 bp, Zea mays
caaggatcttctggtgttcgatgtatctttcaatgagatatcttctttgactggtctgtccaaggtttccatcaaattgaaggaactttatgtttcaaaaaatgaagttgcaaagatggaagagcttgaacatttctatgcgctggaaattcttgaacttggtagcaacagattacgggtaatggaaaatcttgaaaccttgacaaatctacaagaactgtggttgggaagaaatcgaattcgagctgtcaacttgtgtggtttgaagctaattaagagaataagtttgcaaagcaacagactgacttcaatgcatgggtttcaggaatgtgctgcattagag

SEQ ID NO: 61934 - DNA, 177 bp, Zea mays
ggagaagcttgttgacaccaacggcgcaggtgatgctttcgttggaggcttcctctcacagttggttctaggcaagggcattgaagactgcgtgagggcaggttgctatgccgcaaacgttatcatccagcgcccgggctgtacttacccggagaagcctgacttcaactagtgcaa

SEQ ID NO: 61935 - DNA, 333 bp, Zea mays
  unsure (1)..(333): unsure at all n locations
cgtaaaagtccctcagctgcagaatcggctcgagctcttggagtgggagagggctgctgtacctgcacgagcagtgtgaccccaagatcatacacagggacgtcaaatcagccaacgtcctgctagatgactgctgcgaggccatcgttggtgactttgggctcgcgaagtcctggaccaccgggactcgcatgtcaccactgcggtgcgaggcaccgtcggtnacatcgcgcacgagtacctctccactggccagtcgtctgacaagaccgacgtcttctggtttggcatcctgctgctggagctggtcactggtcagaccgcgctggagtt

SEQ ID NO: 61936 - DNA, 173 bp, Zea mays
gatcaagagaggtgccttatctgttgaaggtgttgaggctagaatatggcaggtcgctgaaattctctctgaagaagtgcttcgaaagatgggcgcgcccactaagcccgacgtgcctgtcatcacaccgcagatacttgcagaggctgacggtatcctctctgggtatccga

SEQ ID NO: 61937 - DNA, 246 bp, Zea mays
  unsure (1)..(246): unsure at all n locations
taaganaactggcatgtccttgattatcggtatctatgatgagccaatgactccagggcaatgcaatatggtggtggagaggctcggcgattacctgatcgaacagggcttctaagtttgtcataatgctattttggtcattgggcacttaagtttgcacctcatttggttctgtaatatgtgggcttgtgcatgtgcttggcgtattgcatgcagtgaataatttatcttcgcgttgggttggtg

SEQ ID NO: 61938 - DNA, 345 bp, Zea mays
atcaaatacaatggtggccttgacactgaggaatcttacccttaccaaggtgtcaatggaatctgcaagtttaagaatgagaatgttggagtcaaggttttggactcggttaacatcaccctgggtgctgaggatgaactgaaggatgctgttggtctggttcgcccagttagtgttgccttcgaggtgatcactggtttcaggctgtacaagagcggagtttacactagcgaccattgtggaactacaccgatggatgtgaaccacgctgtcctggttgtaggtacgtgtcgaagatggtgtaccctactggctcatcaagaactcatggggcgctgactgggg

SEQ ID NO: 61939 - DNA, 246 bp, Zea mays
gagcaactacatgcgctacaactactgcgacgacggctggcggttcccccagggcctcccgcccgagtgcagccgcagctaagctagctgattccgccggttttcgtacgctcggcggcgtccgctgacgacacacgccttgttggtttgttcttgctggacatcatacatctctatatgcatgattcttgttctgttattgttaaatcgtgattacaatacttgtaattgtaaagaagtgtgtgg

SEQ ID NO: 61940 - DNA, 345 bp, Zea mays
gatgaagtggagaaagcttcacttccaggcttcaaggttctaccgctccgccaatttgggacctggggaccagttatgacagacgagtttaatcctcaaaaggacacttatgttctgtgccaccatggcatgcgctcaatgcaggtggctaaatggttgcagtcacagggtttcaaaaaagtttacaatgttgcgggtggaattcatgcctatgcggttaaagccgactcctccatcccaacgtattagaggatcctcatggtgacactttagcacggctgggaacttctcatatatcttaggcattggcgttgatcaatgcttgaattcagagctcaattttat

SEQ ID NO: 61941 - DNA, 344 bp, Zea mays
acccagtgacgatcaggacgctgaagatgaagaggagccagaccgcccagagcttcaaccgtcacatcgagacgatctccaggctcaggcaccagaacctggtcagcgctctgggacactgcttcgagtacaatctcgacgagtccactgtcacccagctgtacatcgtgttcgagtacgtgcagaatgggaacctgaggagcaggatctcgcaagggaccgaagggtgcaggctgacgtggtcgcagaggatctcggccgccatcggcgtcgccaagggcatccagttcctgcacggggggatcatacctggcctggtcggaaacgatctgcggatcacgaac

SEQ ID NO: 61942 - DNA, 341 bp, Zea mays
caagggtttcttcctggaattgctttgaagatcttccttatagtgcttccaactatactgatgtttatgtctaaatttgaaggactgatatcgcagtcatctctggagaggcgatctgcatctaagtattacatattcttgttcttcaatgtatttttggggagcgtaattgcaggatctgctctggagcagcttaaaacttatctccatacatcagcaaacgacataccaaggatcattggtgactccatcccaatgaaggcgacttttttcataacatatgtgatggttgatggttggactggaatagctggtgaaatattgagactgaagccgcttat

SEQ ID NO: 61943 - DNA, 281 bp, Zea mays
atcctccctaagattgccatggcggaccagctcaccgacgaccagatcgccgagttcaaggaagcattcagcctcttcgacaaggacggcgacggctgcatcaccaccaaggaacttggaactgtgatgcgctcgttggggcagaaccctactgaggctgagcttcaggacatgatcaacgaggttgatgctgatggcaatggaaccatcgacttccctgagtttctcaacctgatggcacgcaagatgaaggacacagactctgaggaggagctcaagga

SEQ ID NO: 61944 - DNA, 340 bp, Zea mays
caaagcttaaagagcacatgcagtactgtgtggaccaccctgaggaggttagcaagcttgccaaggtgaaggcccaagtctccgaagtcaaaggagttatgatggaaaacattgagaaggttcttgaccgtggcgagaagattgaactgcttgtcgacaaaactgaaaatctgcgttctcaggcacaagatttcaggcagcagggcaccaaggtgcggcggaagatgtggctccaaaacatgaagatcaagctgatcgtgctgggcatcatcatcgcgctcatcctcatcatcatcctgtcggtgtgccatggcttcaagtgcggcacaagtgaggaggg

SEQ ID NO: 61945 - DNA, 338 bp, Zea mays
ggcggcgcggacggacaaggagcaggcggaagaggagttgtgccaaggcacaatgggtatctcgcgtgactcgatgcacaagcgccgagccaccggtggaaagcagaaggcctggaggaagaagcgaaagtatgagcttggtcgccagccagccaacaccaagttgtcaagcaataagacagttaggagggtccgtgttcgtggaggtaatgtgaaatggagggctcttcgccttgatactggtaactactcatggggaagtgaagctgttacccgcaagacccgtatcctcgacgtggtctacaatgcgtcaaacaatgagcttgtgaggacacaaa

SEQ ID NO: 61946 - DNA, 339 bp, Zea mays
  unsure (1)..(339): unsure at all n locations
gcctcttcttcatcgccctcttcatgtccatcttcgccacgggcatcctggagatgcggtggagcggggtgagcatcgaggagtggtggaggaacgagcagttctgggtcatcggcggcgtgtccgcgcacctcttcgccgtcgtgcagggcctgctcaaggtcctggccgggatcgataccaacttcaccgtcacatccaaggccaccggcgacgaggacgactagttcgccgagctctacgcgttcaagtggaccacgctcctcatcgcgcccaccacgctgctcatcatcaacatcatcggcgtcgtggccggcatctnncgaggccatcaacaac

SEQ ID NO: 61947 - DNA, 334 bp, Zea mays
caccacttcagagtctcggcggactggtagtgacgggatcactgtggaagaaagcaaggaagctgatacaacaactaaagaggctactcatagaatctcccgtggaatccatgacaagggacattccctgacaaggaaactgaattcggatgggaaggttgacaccacacagacactgcacgacctgaatgaagatgaactagctggattggagcaatcatggaaggggaatgctggacattacttgcctgactggaaccacaatgctggtgcacctaatagcgataattctggtgaccgtagctccaatggacgtgaccggcgatcggcctca

SEQ ID NO: 61948 - DNA, 237 bp, Zea mays
ataccatagaagctgaagatacacggacgatgacctgccttgcatggcgcaatcggtgaaaatattgtgcaatgatggcgtcaacttgtacgtcaccattcgtggcaatacggccgttcttgctcgtgaagaccccgacgacaagatgcaggaatggttcaaggactactccagggtaagcagtgtgacggatgacaacggtcagagggtgttcgcgctggtaaacaaggagacgca

SEQ ID NO: 61949 - DNA, 238 bp, Zea mays
atcttaccagggaacaacatgaatgagggaaaactggttgatccggtcagcggtgctgatgtggtcactacttacgaagacaaggatggcgactggatgctcgttggcgacgtctcgtgggagatgtatgtcgagtcatgcaggcgtctgaggatcatgaagagctctgaagccataggtcttggttagtgtctccagataaaattatcttccatagttccattataagatttacatg

SEQ ID NO: 61950 - DNA, 336 bp, Zea mays
gcagaagtggcacgtctactatgccaccactgagcacccctaaggagcttgttgttactcttgagatgtgcatgactaggctggacaagaagagagcttatgtcttcttcaagacctctattgatggttacacatcttgtgctaaggatatgaccaagccttcagtggcatcgtcaaggagtgcgtcgtgaccagtggtgctagcagcaaggccatggcactcagggtccatgggtcgtgggtatggcttgttcagcgcctactattcgcgggagtcggcgaggtgcctgctgaacttggtggaagtggagtacaattatgatgctgacatcgact

SEQ ID NO: 61951 - DNA, 338 bp, Zea mays
  unsure (1)..(338): unsure at all n locations
ganaatcggatccttttgccattgtatatgtgcgaccattaccagacaaaatgaagagaagtaaaacaattaacaacgatctgaaccctatctggaatgaacactttgagtttactgttgaagatgctgatactcagagtgtaaccgtgaagatttatgatgatgatggcattcaagaatctgaattgattggctgtgctcaagtcaggctgaaggatctacagccaggcaaagtgaaggatgtctggttaaaacttgtaaaagatctggagattcaaagggacaggaaagatcggggtcaggtgcaccttgagctgctatactgtccatttgacatg

SEQ ID NO: 61952 - DNA, 337 bp, Zea mays
ctgggctacaatgaagtatttctcaaatttgcgcaagacattgggtcctggaattgatggctgggaaatatctttggaaggaatgatgagcatagtggtacttcttggacttgcatctattggggagtgagcaagtttgttttgaatgatccttcattgtcaaagtcttatcgtaagaagaaaaagatgtcgatccacccgtcaagaacaaggtgcagcggagatctttctcctcgtcgctgcttccttgccatccggagatggttgccgccgcctaatatcacagcggcgggaagccatctcctctagttctgcctgctcgccagcacgacgcgac

SEQ ID NO: 61953 - DNA, 341 bp, Zea mays
ggcgccgccgcctgatcgctccagcgccctcgccgtcggcagctcggccgccgtactcccgctaccgagctaggaggcatcaccgtcgccgatccaacatgggtaagacacgtggtatgggagctgggcgcaagctcaagacccacagaaggaaccagaggtgggctgacaaagcctacaagaagagccatctcggcaacgagtggaagaaaccctttgctgggtcatctcacgcaaagggaatcgtccttgagaagatcggcattgaggctaagcagcctaactctgctatccgtaagtgcgctcgtgtccagctggtgaagaacgggaagaagatgctg

SEQ ID NO: 61954 - DNA, 338 bp, Zea mays
tgtcgttcacggcagaagatttatcctgggaaaggcattagatttatccgtgctgattctcaggtcttcctttttgccaactcgaaatgcaagcgctacttccacaaccgcctgaagcctgcaaagcttacctggacagcaatgtacaggaagcagcacaagaaggatatccatgctgaagcggtaaagaagaggcgccgcgccaccaagaagccatactccaggtcaattgtgggtgcttccttggaagtaatccagaagaagagagctgagaagccagaggtccgcgatgctgctagagaagctgctcttcgtgagatcaaggagcgcatcaagaa

SEQ ID NO: 61955 - DNA, 341 bp, Zea mays
  unsure (1)..(341): unsure at all n locations
atctgtattggaagttggtgatggtgtgtttgaggtgctttccacatctggtgacacacaccttggtggtgatgacttcgataagagaatagtagattggcttgctagcaacttcaagaaagatgaacgtattgatcttctgaaggataaacaagcccttcagaggcttactgaggcagcagagaaagctaagatggaactgtcaacgctgacacaggcaaatattagcctaccattcattactgctactgctgatgggccagaacacatcgaggcaaccctctcgagagccaaattcgaggaactatgttcagaccttatagacaggtcganaactcctg

SEQ ID NO: 61956 - DNA, 335 bp, Zea mays
  unsure (1)..(335): unsure at all n locations
ggcgagactgatgggacggcgtcacagcggcggcggcggcggcggaagaggaagagggcgagggcgtgggcgagatgaggaagaagatcttcctctgcacaaggccgcaagtctggtgatcggcacagtggagtcggtgtgcgagtccaaccctctcgccgtcaattcaagggatcgcctctcacgcacaccactccacctggctgcatgggctgggcatgttgatgttgtgagatgcctttgcaagcacaaagctgatgtgggagctgcagcaatggacgacactgcagcacttcattttgcttcccagaaaggccatgtagaagtggcncgtg

SEQ ID NO: 61957 - DNA, 335 bp, Zea mays
caaatcgaaagctcggcgttgccctgcctcgagctcgaaggactttgtccctttacgtcgttgtccagctcctcgcatattgtggcctggtgcagattggagatccgcccggacttggatcgagtcctcctgtctttggacattcattggagtgctccattcattgaggcagcatgcctaagataaagacaagccgtgtcaagtatcctgaaggatgggagcttattgaaccaacaatccgtgagttggatgccaaaatgagagaagctgaaaatgatccacatgatgggaagagaaagtgtgaagctctctggcctattttccgcatttctcat

SEQ ID NO: 61958 - DNA, 339 bp, Zea mays
  unsure (1)..(339): unsure at all n locations
ganaccaattgttgtgaagtatggccttaaccatgtgacttacctcattgagcagaacaaggctcagcttgttgtcatcgctcatgacgtggatccgattgaactggttgtgtggcttccagccctgtgcaggaagatggaggtcccttactgcattgttaaaggaaaggctcgccttggatcgattgttcacaagaagaatgcatcagtcttgtgtctcaccactgtcaagaacgaggataagcttgagttcagcaagatcttggaggctattaaggcaaacttcaacgacaagttcgatgaggtcaggaagaagtggggaggtggcatcatgggatc

SEQ ID NO: 61959 - DNA, 337 bp, Zea mays
ttggtcgccagccagccaacaccaagttgtcaagcaataagacagtgaggagggtccgtgttcgtggaggtaatgtgaaatggagggctcttcgccttgatactggtaactactcatggggaagtgaagctgttacccgcaagacccgtatcctcgacgtggtctacaatgcatcaaacaatgagcttgtgaggacacaaacccttgtgaagagtgccattgtgcaagttgatgctgccccattcaagcagtggtacctcactcactatggagttgacattggtaggaagaagaaaacccctgctgcaaagaaggataatgctgagggacaagaggt

SEQ ID NO: 61960 - DNA, 341 bp, Zea mays
cgtgcttcagatgctcatgggaggaggagggtccttctctgctggtgggcctggaaagggaatgcattctcgattgtatctccgtgtcttgaccaacttccaacagattgaatcattctctgctttcaatagcgtctataacaattcgggcctttttggaatttatgcagtcactagcccagacttttcatcgaaggctgtggatttggcagcaggggaactcctggagattgcgacacctggaaaagttacacaagaacaacttgatcgtgctaaagaggcaaccaaatctgcagttctgatgaacttggaatcaaggtctatagcatctgaagatattg

SEQ ID NO: 61961 - DNA, 325 bp, Zea mays
  unsure (1)..(325): unsure at all n locations
cgaggcttccgccgctacaccatacgagctgcagcgacgcctcgtcgctccgcctccgtgccgactcagcctacggcgtccagtcgtccttctccatggtcacccccagctccgccgtgttccaggagctcgtcggtgctgtcggtngtggtgcaatgatggtgagcggaggtggcggcggcggtgctgctgcatctggtggtgctgctgccgaggctcccaaggaggagaagaaggaagaggagaaggaagagagcgacgacgacatgggattctccctgttcgactagagttgtgtgtgtcatctggatctcagaagtggtgg

SEQ ID NO: 61962 - DNA, 337 bp, Zea mays
cttgtctatgcggcagtgacaccatttatgctcccttttgtattggtattctttgggtttgcgtacgttgtataccgccaccagataataaatgtgtataatcaagaatacgagagtgcagcagcattttggccaagtgttcatggacgcataatcacagcgttgattgtatcacagctgcttctccttgggttacttagcacaaaaggcgctggccagtcaacacctgtgctccttgttcttcctgtagtgaccttctatttccacaagtactgcaacaaccgctacaaaccgacttttgtgaaatgcccattgcaggaggcgatgaagaaggata

SEQ ID NO: 61963 - DNA, 337 bp, Zea mays
aaaggtcattgcatgtgttggtgagacccttgagcagagggaggctgggtctaccatggatgttgttgctgcacaaacaaaagcaattgctgagaagatcaaggactggagcaacgtagttgttgcctatgaaccagtttgggctattggaactggtaaagttgccaccccagctcaggctcaggaagtgcacgcctccctgagggattggctaaagaccaatgccagccctgaggttgctgaatctactaggatcatctacggaggctctgtaactgctgcgaactgcaaagagctagcagcacagcctgatgtcgatggttttcttgtcggtgga

SEQ ID NO: 61964 - DNA, 334 bp, Zea mays
gttcaatcctgattcctggactgttctttgtgcctgaatccccaaggtggttggcataaatggggacgatggaggattttgaatattcattgcaagttctgagaggatttcagacagatatcacagcagaagtaaatgaaattaagagatcattagcatcatcgaggaggaggacaaccataaggttcgctgatatcaaacagaagagatacagtgttccccttgtgataggaatcggtctccgtgtcctgcagcagctaagtggtgtcaatggcattctattatatgctgcgagcatcgtcaaagctgctggtattacgaacagtaatctagc

SEQ ID NO: 61965 - DNA, 336 bp, Zea mays
tggcccacctcgaccgctacaagtgccttaagccaagctggcgcaggccaaagggtattgactcccgtgtcaggaggaagttcaagggatgcaccttgatgcccaacattggttatggttctgacaagtcgaccaggcactacctccccaacaagttcaagaagtttgtggtccacaacgtttctgagctggagttgctcatgatgcacaacaggacctactgcgctgaaattgctcacaacgtgtccactaagaagcgcaaggagatcgtggagcgtgctgcgcagctcgacattgtggtcacgaacaagcttgctaagctccgcagccaggagg

SEQ ID NO: 61966 - DNA, 336 bp, Zea mays
cagattttccacaagcggatgcctccagaagctatagatctcgcttcacgcttgctccagtattcaccaaatctaagatgcactgctcttgaagcgtgtgcacatccattctttgacgatttgcgagaaccacatgcgaggttgccacatggacggccatttcctccactgttcaactttaaacaggaactagcaaatgcctccccagagctcatcaacaggttgatcccagaccatgctaggcggcatcttgggctcacattattgcccgctactggaccataggcgaaggctctatggtggtgcttcgttgtgcggaaggcaacctgcattcaa

SEQ ID NO: 61967 - DNA, 333 bp, Zea mays
cgagctctacagccaggccatcgacgccgggcccgccaccgccgacctctatgccgaccgcgcccaggcgcacatcaagctcggcaactacactgaggctgtggcggatgctaacaaagcaattgagcttgatcctatgatgcataaagcttactaccggaaaggtgctgcatgcattaagcttgaagaataccacactgcaaaggctgctcttgagttgggttcttcttatgcatcaggcgattcaaggtttgctcgtctattgaaggaatgtgatgagcgcatcgctgaggaatctagccaggcaccagtaaagaatgttgaggctactgt

SEQ ID NO: 61968 - DNA, 339 bp, Zea mays
ttcgaatcccttagctctcaccaggatggtgtgtgaaggtcatctgcgaccacctgagcctgggagtcaagactggcctgccatacatctggcacagcaaggctagcaaccccttcgttaacttgaagaaggaatacaagggcatcttctggcaggaggacatcatccccttcttccagaacgtgaccatccccaaggactgcgacaccgtccaaaagtgctacatctacctctctggacaagtgaaggagaagctgggcacgattgacacctactttgtcaagctcggtgacgccatggtcacctggatcgaggcctgggatgagctgaaccgtcgac

SEQ ID NO: 61969 - DNA, 332 bp, Zea mays
gttttgaggggtgttcttctgatatgatgagctctgctggttgtgctgatttttattgccatgaatgttgggaaggctacattagcgctgcaattggtgatggtccaggatgtttgtcattgcgatgccctgatccatcttgtagtgctatggttcttcaagggatgattaatgaattagctaaagatgcggatagaaaaaaatatgcacgatttctcttacgcgcatatgttgaaggtagcaagaagactaaatggtgtccagctcctgactgcacatgtgctgtggagttccttggtgatgaaaactatgatgtttcatgcaattgcatg

SEQ ID NO: 61970 - DNA, 323 bp, Zea mays
cgtgagcacacgcgtctgagtacggtcagcgcagggcaaacccgaaaatagagaactggggagacaccaggactcacccttgccccccacggcccccgaccagcttttcctcctggaggaggtgcgagagcgaaagttcgatggctttgcccgaaccatccagaaggcctggcggcgccacgtggctgtccggaagtacgaggagatgcgggaggaagcttccaacatcctgctgaacaagaaggagcggaggcgcaacagcatcaatcggaacttcgtcggggactacctggggctagaggaacggccgagctgcgtcagtt

SEQ ID NO: 61971 - DNA, 327 bp, Zea mays
gttgaacgttaccctcgcctgtcttggccgtatgggggccaccattgtgctgcagatggtctgcctggtgaacgctgagctgtaccctacattcatcaggaatcttgggatgatggtatgctctgccctgtgtgacctgggtgggatcttcacccccttcatggtgttcaggctgatggaagtttggcaagccctgcccctcattttgtttggggttttgggcctgactgctggggccatgactcttcttctcccagagaccaagggtgtggctttgcctgagactattgaagaagcagagaacctggggaggaggactcaaaggcc

SEQ ID NO: 61972 - DNA, 335 bp, Zea mays
  unsure (1)..(335): unsure at all n locations
gtttaacagcgcccctgacaagaagcgtgtcctatcttccaaagcgtcgggcgagccgccgctggttctcgcagcctcggtgcactgcgcgatgagggaggccatcagggcggcgaggaaggagttctcggtcagcaccagccccgcgaaatccgccgtcacattccagatggacgtgccggcgacgatgcccgtcgtcaaggagctctgcggcctcgacgtcgtggagaggtacctcgagaacgtatctgccgccagtgccggcgcaaacacagcgagagcatagatccagcaggactcacggtgncatcggcgcactgccagagatgatgtgt

SEQ ID NO: 61973 - DNA, 335 bp, Zea mays
gctgagggttgttgtctccaacttcaggaacgcctgggaaaatatggacccagatagtgagcgtgtcgatgagtatggactcggggttagagaaagtttggctgaggctgtcaatgctgtcattaatatccttggaatgcagccgtgtgagggcactgaggttgtaccgaaaaatgcaagatcgcacacctgccttctatctggtgtatttattggcaacatgaaggtcctagttaggttgtcatttggactgagcgggcccaacgaagtgacaatgaaattagctgtgagatcagatgaccctgaagtcagtgataagattcatgagattgtcg

SEQ ID NO: 61974 - DNA, 319 bp, Zea mays
cgattgtgatgggccttgaggagcacttcgacattagcgtggaggagtccagcgcgcagacaattgccaccgttgaagacgccgctgacctcattgacaagcttgttgctgtgaaggcataggccgcatctcttctatcattgtcttaccactctaggtttctatggtctgaagacttgtgattttctccgcactgctgttgctattcccgtgtcgtaataatacgagatgttttaagcggctgaaaaaaaatcaaagcggaactaggacacgtgcgcggggtactccatgttcgtggtcaacagggacggccaaggtg

SEQ ID NO: 61975 - DNA, 330 bp, Zea mays
cactgcgttgcgtcttgggggagagagagaagtgggagacccgcgagaggctgccgtgtagggactagggaccgtagagtaagcgacacgaaggagggagagggggatggccgggatcgggccgatcagacaggactgggagccggtggttgtgcggaagaaggcacccaccgccgctgccaagaaggatgagaaggccgtcaacgccgcgcgccgctccggcgcggagatcgagaccatgaagaagtacaacgctggtatgaacaaggcggcgtccagcggcacatccctcaacaccaagcgcctcgacgatgacacagagaactcgcc

SEQ ID NO: 61976 - DNA, 327 bp, Zea mays
ctatagatctgaatgacaaagtaaacgttgaggctagcaaaataagtgtgggggtcaggtccatattctgtatcgtagaaaaagctgaagccaaatggtggaagaaactcgttcgagatgatcaaagggcacctcactttgtgaaagttgattgggacaaatgggttgatgaagatgatgatggtgctgatatcaacatggatgggatggacttctcgaatttcggtggcatgggtggtatgggcggcatgggtggcatgggtgatatggctggtatgggtggtcttggtggcatgggtggtatgggtggtcttggtagcatgggcg

SEQ ID NO: 61977 - DNA, 331 bp, Zea mays
accatttacatatatgcccttgccccggttcctttccccggccccaactccattatttgcttgatccttgacgagcgggagagagagagagaggaagacgagaggcagcgacggacacagtagttcttcagttaggcaggagggcacaggaggaggaagatggcgtcgaagaggatccagaaggagctcaaggatcttcagaaggaccctcccacctcgtgcagtgcaggtcctgttggtgaagatatattccactggcaggcaacaataatgggtccatctgatagcccatattctggtggagttgtcctagttacaatccattttcctc

SEQ ID NO: 61978 - DNA, 332 bp, Zea mays
gtcgcgttgcagcagggagaggctatggcatccgttgctgtttcttcactagaagctgagctcaaccggacgaaacaagagatagaatctgtcaggtccaaggaggcagaggcccaagaaaagatggtggagcttcccatggttttacagcaagcgactcaggaggccgaggacgccagggtagcagctcacgcggcccacgaggagctgaggaaggcgaaggaggcattcgagcaaaccaaggctgccgcagctgcagcagaggccaggttatctgctgttgtgaaagaaacagaagcatccgtagcatcagagaggctagcacgcgaggc

SEQ ID NO: 61979 - DNA, 312 bp, Zea mays
catcaccgtgctcttctcgctgccggtcacgtacccggtcaccaaggacacgctcaactacacccccgtcgccgtcggggcctcctcttcctacgtcctcgcgtcctggctgctcagcgccaggcactggttcaagggccctgtcaccaatctggacggatgaatatgtataattggacatgtatagtatcgaggctggcagagacggaagagttgttgccaacgacatgttgtaactactttgttccaaaaattaactagcaaggaaaccgacaaaaaaaaggatgatccgcgaaaaaaaacaggggcgcc

SEQ ID NO: 61980 - DNA, 336 bp, Zea mays
ctgaaatcgagtggtatcctgggaaaaacctaacacagaagattctaaaaaagaaacctaaaaaaggttcaaagaatacgaagcctatcactaaaaccgaggactgtgagagttgcttcaactttttcaatcccccgcaggtccctgaagatgatgatgacatcgatgaagacactgctgatgagctgcagagtcaaatggagcatgattatgacattgggaccaccataagggataagattatccctcacgcagtttcctggtttactggtgaggctgtgcaaggtgaggattttggtgagttgggcgatgatgatgaagatgatgatgatgaag

SEQ ID NO: 61981 - DNA, 332 bp, Zea mays
caacaacatggtggagcaggagctgcctggaggcgggctcctcgtataccagagcttctgcgctgctgaagacgctgttgctacctcgcccaaatctgttttccactgctttgacggcgagaacgtggagagtgctcctcctcctatgaagaaggactacaaactagctaatcttctctgctgggaggaggaagcggatgccatggaggagaaggcgggagtgcttgatgagtaagacgggcttctggtgtcgatttgcttctgagttgtttattttatatcgtcgcaatttcgtggttgtcgtttggttattctgtgaagcagccaagcca

SEQ ID NO: 61982 - DNA, 338 bp, Zea mays
cctccctacctcgccgtcgccgtcgcatctgccatgggggcgtacaagtacgtctcggagttatggagaaggaagcaatccgacgtgatgcggttcgttcaacgcgtgcgctgttgggagtacaggcagcagccggccatcgtccgcctcacaaggcccacccgccccgacaaggcccgccgcctcggcttcaaggccaagcctgcggtatgttgtttaccgcgtccgtgtgaggcgtggtagcaggaagaggcctgtgccgaagggtattgtctatggcaagcccaagcaccagggtatcacccagctcaagttccagaggaacaagagatctgttg

SEQ ID NO: 61983 - DNA, 314 bp, Zea mays
ggttcgtaggaccttggcagagcacacttatttattccttggtgctggggaggctggcactggtattgcagaactcattgctcttgagatttcagaacagacgtcggctccaattgaagagtgccgcaagaagatttggttggtggactcaaagggtatgattgttgactctcgtaaaaactccgttcaatcattcataaaaccttgggcacatgagcatgagcccttgacaaccttgtacgatgctgatcagtccatcaaacctacagttctgattgggacgtctggagttggaagagcattcacaaaagaag

SEQ ID NO: 61984 - DNA, 330 bp, Zea mays
gcttccaaagggaacatcccgtactttgagacgtctgctaaggacggaacgaacgtggaagacgccttccagtgtatcgtgaagaacgctctgaagaatgagccagaggaagaactgtatgtgccagataccgtggacgtggtgggtggcaaccgggcccagagatcatctggttgctgttaaggcacgaggcatcacgaggcgttgtgaccatcatcgtcggttatgcagtgaccaaacaataccttagcattgctgggtctccgtggttatctacgtatccgtattccatttgttacctttccagtctcactgctatgtacccaaggg

SEQ ID NO: 61985 - DNA, 305 bp, Zea mays
cctctcctctcgaggtattagcagtcgaccggttcctcggagcacgatgaagtttgttgctgcctacctgcttgctgtcctcgctgggaacgccagcccctccgctgacgatttgactgccattctggagtcagttcgctgtgaagttgacaatgacaagatggaactcctgctgtgccaactgagcggtaaggacatcaccgagctcattgccgcgggcagggagaagtttgcttcagtcgcatgtggtggcggcggtgtcgctgttgcggcagtagcacctgctgctggcggacttcttctgc

SEQ ID NO: 61986 - DNA, 351 bp, Zea mays
gttctggctgatcggcggcacgagcgcgcacctggcggccgtgctgcagggcctgctgaaggtggtggcgggcatcgagatctccttcacgctgacgtccaagtcgggcggcgacgacgtggacgacgagttcgcggacctgtacatcgtcaagtggacgtcgctgatgatcccgcccatcgtgatcatgatggtgaacctgatcggcatcgcggtcgggttcagccgcaccatctacagcgagatcccgcagtggagcaagctgctgggcggcgtcttcttcagcttctgggtgctggcgcacctgtacccgttcgccaagggcctgatggggcggaggccgcacgcgac

SEQ ID NO: 61987 - DNA, 309 bp, Zea mays
gtgagggtatggaggagggcgagttctccgaggctcgtgaggatctggctgcgctcgagaaggactacgaggaggtcggtgctgagtttgacgagggtgaggacggcgacgagggtgacgagtactagacgctctactggcgcggcgtcgtcgggcttgtgtgccactgctatcctgtgatctgccctgagtggctcctatcgtgttatgtttctgtcggttcttatctatctgtcgttgtgtggtttacaacttacgttgtaagactttattcccccgctttgctactgggttattaagtttggcgtt

SEQ ID NO: 61988 - DNA, 354 bp, Zea mays
agctgatcaaaccttttgcatttgggatttagatggtaaggaagtagattgctggaaagggcagagatcggcaacaacatctgattttgctgtagcaaaagatggaaatcttataataagcttgagtagggacaatgcaattcttctatttgatagggagacaaaacatgagagaataattgaagagggtagtacaattacttcattttctctatcagaagatggtgatttcctgcttgtaaatcttgtaagtgaagagattcatctgtggaacataagaaatgatcctgttcgagtcaaccgatacaatggccataagcacagccggtttgtgataggtcttgttgtggcgga

SEQ ID NO: 61989 - DNA, 356 bp, Zea mays
atcagacgtgtccccaagaagacagccctgatcaaggcgatggaggaagctgatgtgaagaccaagtgggagaacagctcatggggcaagaagctgattgtccagaagaggagagcatcgctcaatgactttgataggttcaaagtcatgctggcgaagattaagaggggcggtgctatcaggcaagagctcgccaagctgaagaaggcgtccacggcttaaggagtctctttccgtgaatgtcatgttagagtttttggttatgagttggatcagcaattcgattgagcgttgtcaaagccagaattaccaatatgttccctgtaaacccatttcaactttatcaagcacgggcg

SEQ ID NO: 61990 - DNA, 355 bp, Zea mays
cggagtcattctcaccaagcccttccttgatgtctgcaagcaaatattgcctgtcctcgataaatttggaggtgctatggcaattgtaaagagtgatatcggcggcaatatcacaagactggaaaacaagtatacttcagaaccatcaaagtatgaacacttgtacagcatggttcaggaagaagttcaaaacaagaccgcaaaaggttcctcaagctgcacaaatgggcttctgtggctgacgagggccatggacttccttgttgagttgtttcgtaacctgcttgagcatccagactggaccatgggtcaatcttgcactgattcatacaccagactttgaagaaattcatgg

SEQ ID NO: 61991 - DNA, 351 bp, Zea mays
gttttctgttctccaggaacacaatatgcccagcagtcctacaaagtaagtgatacatttcctttcaaatggataaacaaaaaatggaaggagggcttctatgtcactgctatggcaacagctggaagccgatgggcagttgtcatgtcccgcaatgctggtttcacttctcaggtagtggagcttgatttcttatatccaagtgagggcatccacatgcgttgggacaatggctatcgcattacggcaacggctgccacatgggaccaggcggcctttatcttgagcataccaaggagaaagcctactgatgaaacacaggagaccctgagaactctgcttttcctagcc

SEQ ID NO: 61992 - DNA, 353 bp, Zea mays
  unsure (1)..(353): unsure at all n locations
aaaggtttctgggacatgtatgacccagagggctactccctgtggttctgtgactacaagtacaatgacgagaacacagtgtcgtttgtgactatgaacaaggttggtggcttcctgcagcggatggatctgtgccgcaaatacgcctttggcaagatgcttgtggttggctctgagccccctttcaaggtcaaggggctctggctcttccgtggccccgaaatccccaagtttgtcatggatgaggtctatgacatggagctctatgagtggaccaaggtcgacctctctgatgaggcncagaaggagcgggtcaatgccatgatcgaggaccggagccttttgagggcgag

SEQ ID NO: 61993 - DNA, 349 bp, Zea mays
agaagttctatatgctctatagcttcttctttgtgaggagagttgtagcgccgacggctgcctgtattctctacaatgtcatcatccccatctcagtcacaatcccggagctttacctaccagtgtggggtgttgcctatattcccatggtgcttaccgtggtcacagctataagacatccaaaaaatctacacatactgccattttggattttgtttgagagtgtgatgacattgcatcggatgagggctgcgatgactggactgctggagctagaaggattcaaccagtggattgtgacaaagaaggtggggaatgatctcgaggacactgaagtcctttgcttcag

SEQ ID NO: 61994 - DNA, 353 bp, Zea mays
  unsure (1)..(353): unsure at all n locations
cgncgccgccgccgccgcatcaagcacccgccccgccgtcgcctgaggtagacaccaatccgccgccatggggcgtatgcacagccgcgggaagggtatctcatcgtcggcgctgccgtacaagaggacgcctcctacctggctcaagaccgctgcctccgacgtggaggagatgatcacaaaggcagcgaagaagggacagatgccgtcgcagatcggcgtcctgctccgtgaccagcacggtatcccccttgtcaagagcgtcaccggcagcaagatcctccgcatcctcaaggcccatgggctggcaccagaaatccccgaggacctgtacttctcatcaagaaggcggt

SEQ ID NO: 61995 - DNA, 354 bp, Zea mays
  unsure (1)..(354): unsure at all n locations
tacagaggtcactagcaagcttgcagccttaaagggactcgatgcaaggcttagggagatccgaagctatttggatcttgtaattgacgggaagctcccactgaatcacgaaattttgtaccatttgcaggatgtctttaatctccttccaaatctgaacgtaaatgagctaattaaagcctttgcagtgaaaactaacgacatgatgttggtgatatacctgtcttctctgatccggagcgtcattgcgcttcacaatttaatcaacaataagatgctaaacaaggagcacgagaaggccgaggattcgaaaccaaccgccattcctactgctgccggagctanacgtgcttt

SEQ ID NO: 61996 - DNA, 339 bp, Zea mays
ggggcatatcccgagttcactcggatctttggccacgaggctggaggtatcatagagagtgttggagagggtgtgactgacgtagctccggacgaccatgtccttcctgtgttcactggggagtgcaaggagtgtgcccactgcaagtcggcagagagcaacatgtgtgatctgctcaggatcaacaccgaccgcggtgtgatgattgccgatggcaagtcgcggtattcaatcaatgggaagcctatctaccactttgttgggacttccaccttcagcgagtacaccgtcatgcatgtgggttgtgttgcacagatcaaccctcaggctcccttgata

SEQ ID NO: 61997 - DNA, 346 bp, Zea mays
ctcaacatcaaatccctcccatctcttcccctccgccgccgtctctgctctccaagatcgcgatggcgtcagaaaagaagcagtcgaacccgatgcgggagatcaaggtgcagaagctcgtgctcaatatctccgttggagagagtggagatcgactcacccgcgccgccaaggtgttggagcagttgagtgggcagtctccggttttctccaaggcaaggtatactgtgaggtctttcggtattcgtcgtaatgagaagattgcatgctacgttacggtcaggggtgagaaggcaatgcagcttcttgagagtggctcaaggtgaaggagtatacttctgaggag

SEQ ID NO: 61998 - DNA, 336 bp, Zea mays
ggcaccttcctcagatcttcccgcagctcaagtggtactacattttagtagcctacgtcgtggcacctgtgctggccttctgcaatgcttatggaagtggcctcactgactggtctctcgcctccacctacggcaagctcgctatcttcgtgttcggtgcatgggctggcctctcacacggtggcgtgctcgttgggctcgcagcttgtggtgtcatgatgagcatcgtgtcgaccgcctcagacctgatgcaagacttcaagaccgggtacctgacgctggcgtcaccgaggtctatgttcatcagccaggtgattggcaccggaatgggtgtgt

SEQ ID NO: 61999 - DNA, 353 bp, Zea mays
caggacaccacccagatccacacccacatgtgctactccaacttcaacgacatcatccactccatcatcgacatggatgccgatgtgatcacgatcgagaactcccggtctgacgagaagctactgtccgtcttccgtgagggtgtgaagtacggagctggcattggccctggtgtctacgacatccactctcctaggattccctccaccgaggagatcgcagaccgcgtcgagaagatgctcgccgtgctcgacaccaacatcctctgggtgaaccctgactgtggtctcaagacacgcaagtacacggaggtcaagcccgccctgaccaacaggtctcggccaccaagctc

SEQ ID NO: 62000 - DNA, 344 bp, Zea mays
  unsure (1)..(344): unsure at all n locations
gttgcaagagaggtanaaaaaaaaaaaaaagggcggccgctcgcgatctagaactggccacattgacggggaccatctgacgcttctgaatgtataccatgcatacaaacaaaacaatgaagatccccagtggtgttacgagaactttgtcaattcaagagcacttaagtctgcagacaatgtcagacaacagcttgttcgacacatgactagattcaacctcaagatgtgcagcacggatttcaatagccgtgagtactatgtcaatatcaggaaagccatgcttgcggggtatttcatgcaggtcgctcacctggaacgaactggacattcctgactgtaaa

SEQ ID NO: 62001 - DNA, 348 bp, Zea mays
ccaggttgatctctctttcctcagtgaagggaaatctacatgggtgaatctgacatcacaagacacggagcggcctgatcttgcaaatgcacccgtagtagtcaccggaggcagaggtttaaaaagtgctgaaaattttaaattgttggagcagcttgctgagaaacttggcgcacagtgggtgcgactcgggctgctgttgatgcaggttatgttccaaatgaccttcaggttggtcagacggggaaaatcgttgcgccggatctttatatggcttttggagtatccggagcaatacaacacttggcaggaatgagagactcgaaggcattgtggctgttaataaag

SEQ ID NO: 62002 - DNA, 351 bp, Zea mays
  unsure (1)..(351): unsure at all n locations
aattcatgaaaggtggctccgagtcagagaagccaaaacaggagggagatggtaaaggtgttgatactgtggcccctagagttgaatctctgactataaatgaagatgtaaaagaaaacgagccagaagatgacgagggccttccgatttacctgtatgaacgtctgaaaaccacagctgctgatcctgttactgaaattgatatcacgaggcgagagacctacttatcttcaactgagttcaaagagaagtttgggatgacaaaggaagcatttagcaagcttccgaagtggaagcagaacaggctanaaattgctcttcaacttttttacctgatcatcaacacttcca

SEQ ID NO: 62003 - DNA, 347 bp, Zea mays
ctccttctaccacaacaacctggccaagatcgtcaccttccactccgactggacgctgctcacgcacaaggaggcgttcggccacgtcgtggagtacgccgagaacgccacgctatgggacgaggacttctcggactcgctgctcaagctcagcaagctgcccatgccgaaaggaagcaagggagagatcaggaagaagtgcagcgtcgttaaccaccgcttatactaagcctgccagatgccgtggaaatcgaagaaagaggtcgtgccagcacaacacatatatatcaaccatcggagatcagaaagccataaggttgcgcttttttgttcatccattcttttga

SEQ ID NO: 62004 - DNA, 344 bp, Zea mays
tgcagattgtatgcatgagataggacagcgtcttgtatccaagttggcaacactgaaggataccttgacaacgatgaaactcgacggtcttgaagtctcggactctcttcttgaagccattggtgaaagctgtaacaaattggttgagattggacttagcaaatgcagtggtgttacagatgaaggcatctcatctcttgtagctcagtgtagtgacctaagaacaattgatctcacatgctgcaacctcagtaccagcaatgctcttgattcaatagctggcaactgtaagatgcttgaatgtttgcggttggaatcctgctctgtgataatgagaagggact

SEQ ID NO: 62005 - DNA, 349 bp, Zea mays
  unsure (1)..(349): unsure at all n locations
canaaggccgcgacgagccgaccagctctactgcccccttccggccttcggcgaccgtgacgagcaacgacgaccacggcgacgatggccgcttcctccctctgccacgggcacttgctcctgtttctcctcgtgtccgtcacatcggcctgcctcggtaccgcggcagcgcatcaagccgggtctggagagggttacacgatcgccggccgcgtcaagatcgatggcatgagtgagaagggctatggtcttccagccaagacatcaaacacaaaagtgatacttaatggcggccaaagggttacatttgccaggccagacggctactttcattccacaacgtgccagc

SEQ ID NO: 62006 - DNA, 348 bp, Zea mays
ataaccttacccttgatgaggtgcagagccatttgggagaacccctacacagcatgaaccttgaggagctgctgaagagtgtctttcctgatgacctggaccctgatggtggcactaccagccaatatgagcagagttcgggcctcttgcgacagggaagtatcacaatgccgcctgagctcagcaggagaactgtggacgaggtgtggaaggacatccaggatgcaccaaacagaaatgttggggagagtggtcggcggaagcgggagcggcagccaacgcttggagagatgacgcttgaggatttcttggtgaaagctggggttgtgccgaaggatatctgaaagg

SEQ ID NO: 62007 - DNA, 349 bp, Zea mays
tcgatccgccgtgtgaaccagacctatgtcattgctacatcaaccaaagttgacatctcaggtgttgatgtcgccaagtttgatgacaagtactttgccagggagaagaagcagaaggtgaagaagaccgagggcgagctttttgagacagaaaaggaggcatccaagtcactgcctgacttcaagaaggatgatcagaaggctgtggattctgctctgatcaaggctatcgaggctgtcccggagctgaaaacctatcttggcgcccggttctctctcagggatggtgacaagccccatgagatggtcttctaagctcttagttttggattcggaggaagctgttttg

SEQ ID NO: 62008 - DNA, 349 bp, Zea mays
cgctgacgctgtgcctgctggcggtgctggagatcaagtcgtcggggatcagtctggaggagtggtggcggaacgagcagttctggctgatcggaggcacgagcgcgcacctggcggccgtgctgcagggactgctgaaggtggtggcgggcatcgagatctcgcttcacgctgacgtcgcaagtcgggcggcgacgacgttgacgacgagttcgctgacctgtacatcgtcaagtggacgtcgctgatgatcccgcacatcgtgatcatgatggtgaacctgatcggcatcgcggtcgggttcagcacgcaccatctacagcgagatcccagtggagcaagctgctgg

SEQ ID NO: 62009 - DNA, 353 bp, Zea mays
gtcagttccaaaagcgaccagggtgaaggctatagccgaaatatttgctgacgctgggttttcagatgttacaaagaatttcttggctgtcctggcggacaatggcaggctgaaatatattgaacgcattgcggagagatttgttgatttgactatggaacataagggggagatgaaggttgtggtcaggacagttatttcactcaccaaggaggaggagaaagaactcaaggaaaccttgcaggatatccttggggaaaacaaaactattttggttgaacagaagattgactacagcatccatgggaggattagtgattgaattcgggcagaagggcttgatatctcaatca

SEQ ID NO: 62010 - DNA, 347 bp, Zea mays
taactttgcagagctttctgaagcattgtacgtggcagagcagaaggcgagggaggcagtgcagatgcgctccaaggttcagagggaacttatgctgaaggagaaggagagaaaggagcaaccgcgtgaaccacgggaatcacgtgagcagcgcagggagtctagagaagagagggaaggaaggattgagcgtgatagaatccgtgaggagcgcagacgcgagagggagagggagaggaggcttgaagccaaggatgctgcaatgggcaagaagagtaagatcacaagggacagggatcgtgatatcagtgagaagattgctcttggtatgcatgcactggtggtgc

SEQ ID NO: 62011 - DNA, 349 bp, Zea mays
gtctacgacaacgtgtcccgcccattgtacagcgggctcaagtgctccttcatcttccccgaggtggcctgtgacaagtatggcaggaaggatgccatgtaccagcactggagatggcagcctcatggtcatggatgcgacctcccaagatttgatgccatcaagctgcttgaaaatctgagaaacaagagaatggtgtttgtgggcgactcagtcaacaggaaccaatgggtctctctcgtgtgcatggtggaggcctcaatacctgacgacaggctcaagatacgcaccttcaatggctcactcatctccttcaaggcattggaatacacgcaacgatagatttcta

SEQ ID NO: 62012 - DNA, 348 bp, Zea mays
cgtctgcgacgctccttactttctcggaggcgacagctcgaactcgaatccctcatccagcctgtcgctggcgtcgccggtcgccgtcgctcgattgcctccgcctgaatatcccttgccccataaggcctgaccttgaaagcctcgccacttgatcacggcggcggtggaggggagcgcgatgccgaagcggacgacacacacctactcgagcgaggacgcactgccggagggacacgagtccgaccttttcgtatactactgcaagcactgcgcctcacatgtcctcatcaccgatacccaattgcagacaatgcccaagcgaaagatgacagagcacatgtttta

SEQ ID NO: 62013 - DNA, 333 bp, Zea mays
gcctcgcggtctcggatatacagcgacggagaggagagcggcgggcggagagaagtggatgaagaagacgaagatggtcacctatttcacgctcaacaccggggctcgcatcccctcggtagggctcggcacctacaaggccggacccggcgtcgtcgacgacgcgatcaacgtcgccgtcaaggccgggtaccggcacatcgactacgcgccgctatacaagaacgagaaggagctctgtgatgacggcgtcgtcaagcgagaagaccttgtcatcgactcacagatatggtgcagctatctcgcacatggcgacgtgccgttggcgtcgac

SEQ ID NO: 62014 - DNA, 341 bp, Zea mays
ctgccatggacagctctagcagaaatgctggcgatatgcttgatcgtctcacgcttacttacaacaggacacgccaagcatccatcaccacagagcttactgagattatatctggtgcatcagcccttgaaggataggtgaagagactatgtggacttttccctttttccccatttgcgttcctctcacatgaaggcttcttttcttccggaggctcagtttcaacccttctcgtttcacttttccttgataaacgtattcttatgctttattgcaataattaggccaacgacagtgatgatgccgtgcgcctttgcatattgcaaaaaaatgttctacaa

SEQ ID NO: 62015 - DNA, 346 bp, Zea mays
  unsure (1)..(346): unsure at all n locations
tgacgccggaggagctggacatgtacattgacctccacccgttcaccaacaccacgccgtacaccgtcgtggagaccatgtcggtggccaaggccgtggtgctcttccgcacctgcgcgctccggcacatgcttatcatcccaaagttccaagggcctgagatagctccaatcgtggggatcctaacgaggcaggacctgagggcacacaacatccttggtgcattccctcatttggcaaacaaaaggaaagtacactaagctctgtcgcgccatttttggtaaatttaatgttctctgcatccaaagaaaagcggcccatgnnttgttcccatgttctatttttc

SEQ ID NO: 62016 - DNA, 348 bp, Zea mays
caaattgaagcgaacaagcctacactagagacgaatgccaaggaaatcaaccctacaaaggatagtcaaattgcaactcctacagtagaggaagatgtaaaagagagtcaggcagagtgtcaggcaggacttcctatatacccatatgacagcttgaggacatcttccaccaatatccccacagacattgatgttaccaagcgagagatatatctgtcttcatcggagttcagagaaaagtttgggatgacaaaggaggcatttgggaagctaccaaggtggaagcagaacaggctcaagattgcacttcagctattctgaaaacttgtactgtcaaacagactgctt

SEQ ID NO: 62017 - DNA, 344 bp, Zea mays
ggatggtaagaatggttggagggttgagctgtcaaccaaagatggtggtggccgtggccgagaccgtaatggttctgatatgaagtgctatgagtgtggtgaagttggccactttgcacgtgaatgtcgcttacggattggttcgggagggctgggtagtggaaggcgtcgcagccgaagtcctagatatcgcagccggagccgaagtcgcagccggagcccaagacatcgaaggagcccaagctatggcagaaggagctacagcccacgagatcgttctcctaggaggcgaagttacagcaggtcgccgccactgccaccaccgctcctagagataacagcat

SEQ ID NO: 62018 - DNA, 345 bp, Zea mays
ggtcgccaaggtttccgacttcgggctgtccaagacgggtcccaacaacgtcgacaacacccacgtgagcacggtcgtgaagggcagcttcgggtacctcgacccggagtacttccggcggcagcagctgacggagaagtcggacgtctactcgttcggggtcgtgctgttggaggtcctgtgcgcgcggcccgccctgagcccctcgctccccaaggagcaggtgagcctggccgactgggcgctgcactgccagaggaagggcgtgctcgggcagatcatcgacccgcacctgcaggggcaggtctccccgcagtgcttcctcagttcgcggagaccgcggag

SEQ ID NO: 62019 - DNA, 342 bp, Zea mays
tgctgctgctatagcaatgctcattggtcctaatgctccgatttccttcgagagcaaatatagagcttctcatatggctcatgtttatgatttctacaaacctgatcttgcaagtgaatatccggttgttgatggtaaattatcccaaacatgctacctgatggctcttgactcatgctacagacagttctgcaacaagtatgagaagattgctggtaaacaattctcaatttcagatgcagaatattctgtgttccattctccatacaacgagctcgttcagaagagttttgctcgactttactacaatgacttcatgcgctactcagctatgttgatgat

SEQ ID NO: 62020 - DNA, 347 bp, Zea mays
gtcactcggcagtcggcacgcaggctagcagcacagcagcagccagagccatcccctctcctcgctacgcttcgcttcctcggcgccgattcctcctcctcctcctccaccctcgtccgtcccgttccggcgcgcgagctcgcccgagatggcgaacgcgagatcgggtgtcgctgtgaacgatgagtgcatgctgaagtttggcgagctgcagtcgaagaggctgcaccgcttcataactttcaagatggacgacaagttcaaggagatagttgtggaccaggtcggggatcgcgctaccagctacgatgacttcacaaacagcctcctgagaatgactgccgata

SEQ ID NO: 62021 - DNA, 343 bp, Zea mays
agaagctaatagattttatgatgctgtcagttgtctgatgtcttatatgaatgataatggtggttttgcgacttatgaactcacaagatcctatgcctggctggagctgatcaatcctgctgagacctttggggatattgtgattgattacccgtatgttgaatgtacatcagcagcaattcaggccctgacatcattcagaaaactataccctgggcaccgcaggaaagaggtggacagctgtatcagcaaagctgctaatttcattgagagcattcagaaaagtgacggttcatggtatggctcttgggctgtttgtttcactacggcacttggtttggtg

SEQ ID NO: 62022 - DNA, 322 bp, Zea mays
cgccgaggctggccgcctgggccaagcgctgcgccgagcgccccagcgtcgccaagaacctctacccgcccgagaaggtctacgacttcgtctgcgggatgaagaagaggctgggcatcgagtagagagcatccatcggtcggccggtggctggccgggagtaataatgacgaaccaattatctagttttggtttgagtgtgctcagcagagcagttcgtcgtcgttgtattttctattgtcagcggtggcagcgccgtacgtgttgcctcgtgcaccacatccgaataaatggttatgaatttcttgttgtcttcacaaaa

SEQ ID NO: 62023 - DNA, 344 bp, Zea mays
gtggacaaggggctgaggagcaggtacgacgggatcgagatggaggagatggtgcaggtggcgttgctgtgcacgcagtacctccccggccaccggccgaagatgtcggaggtggtccggatgctggaaggtgacgggctcgcagagcggtggcaggcttcgcagcgcgcggactcgcacaagtccttcaaagtgcccgacttcactttcagccgctgctactccgaccttaccgacgactcgtcattgctggcgcaggccgtcgagctgtccggcccaagatgacaccaaccaccaccaccgtcagtttgcacttgtacagcataggaccgagaatcatgtgt

SEQ ID NO: 62024 - DNA, 341 bp, Zea mays
aatcatttgagaagcctgcaccagttcaaaagccaactcctccatcctctgcagagagactaaaagatatcgctgctggtattcaaagtagtaaatcaaacaattacaaaagatctgaaggccagaactgtggaaatttccttacggaccgtccgtcgaccaaggtgcaagcagctccaggtggcgactcttcactcggttatctttttagtggcagcaaagatggcaagtgatgtacacctgctgttagtgttcgccatgatcatgggagaaggtttctgcttaacataggaaaaagggaaaagaatcttgtattcccatgagtaatatcaaactgctca

SEQ ID NO: 62025 - DNA, 331 bp, Zea mays
tgccgtactccatctgatcgagtaagtgcactccttagagctgacccttccaaggggatcaccgccaccaacgcgaggttctcgaaactcttgattaatggaccatacggtgctccagcgcaagactatcaggaatatgatgcgctcatgctcattggactgggcattcgagacacactcattgattagcattgtgaaggatgtacttaaccacatccagcttagaggatctcttgcaggcacggagcctgatggcagtggcaaggccaagaagacgccattcatgacaaagatgcgctacttctactgggtgaccatggcaaagggtctt

SEQ ID NO: 62026 - DNA, 341 bp, Zea mays
cgccgtccgaagctccgcaccccaatctaatcgacacctcaccgagatgggccgcaagttcttcgtcggtggcaactggaaatgcaatggaaccacagatcaggtcgagaagattgtcaaaaccctgaatgaaggacaggttcccccttcagatgttgtggaggtcgttgtcagccctccttatgtcttccttcctgtggtcaagagccagctgcgccaagagttccatgttgctgctcagaactgctgggtgaagaagggaggtgctttcactggtgaagtcagtgctgagatgctcgtcaaccttggtgttccctgggtcatcttggacactctgaaag

SEQ ID NO: 62027 - DNA, 338 bp, Zea mays
cggaggttcctcgacgagcagaaggcgccggggcaggaggaggagttggagcctgcgtcgccgccgctccccaattggaggatctctggcccgggtgacgatccagaagaagtgaaggcgaggttgaagtattgggctcaagctgttgcatgcactgtcaagctctgcagctaaactaaaggtcggatagaggctgaagaatctggttatatggttttgggatacagggagcggaagggggtgcttctgctctctggcatggaagcgacatgagtgatctcatctgcttctacaaaaaaacttgggaagggggaggaactgatacggaacagcgacag

SEQ ID NO: 62028 - DNA, 342 bp, Zea mays
caactctgcaggctgctcgtcgccctccctccacgccggacgcgccccgatccagatccaggggcgtaacatggcatcaaaacgtatcctcaaggaattaaaggaccttcaaaaggaccctccaacgtcatgcagtgctggtcctgctggtgaggatatgttccactggcaggcaaccatcatgggtcctcctgatagtccatatgctggaggtgttttcttagtgaacattcatttccccccggactaccctttcaagcctccaaaggtatcttttaagacgaaggtcttccatccaaacatcaatagtaatggaagcatattctcgacattcttaaggag

SEQ ID NO: 62029 - DNA, 342 bp, Zea mays
  unsure (1)..(342): unsure at all n locations
gtccgctactccgctccccctcagtcctcagttcctcacctagcggtagcgtgcgcgcgggagacgtagatggcggcttcggaggcggcagctgcggcggcaacaccggtgacgccgacagaggggacggtgatcgcgatccacagcctggaggagtggagcatccagatcgaggaggccaacagcgccaagaagctggtggtgattgacttcactgcaacatggtgtcctccgtgccgcgccatggctccaatatttgctgatatggccaagaagtccccanatgttgttttcctgaaagttgatgtggatgaaatgaagacattgctgagcattcagcgt

SEQ ID NO: 62030 - DNA, 365 bp, Zea mays
  unsure (1)..(365): unsure at all n locations
tcgggttgcataggccattgttgagaggtgatttggcctaagaatgggggctccanaacaaaggtggacttctgaggaagaggctgctcttagagctggaatagcaaggcatggagttggaaaatggcgcacaatattgaaagatccagaatttagttccaccttatgctaccgctcanatgttgatctcaaggacaagtggcganacatgaatgtgattgtcagtacatcgagttctcgtgacaaggcgaagtctgcattgaagagaatacgaactattcncaagaataatgagcacaccatggcaattaccagagtttacttctgatatgatgatgagatgttgacgaaagctatagtatcat

SEQ ID NO: 62031 - DNA, 296 bp, Zea mays
  unsure (1)..(296): unsure at all n locations
gcgcacgatgaccagagtctgcagacagcagtagcanaccagcctgtcagtgtcgcaattgaggctgctgagcacagcatttcagctctacagctcgggtatcttcactggaagctgtggaacagcgctggaccatggtgtcacggccgtcggctacggcacagagaacggcaaggactactggatcgtgaagaactcatggggcagcagctggggcgagtccgggtacgtgacgatggagcgcaacatcaacgcgtccagcggctagtgcggtatcgcggttgagccgtcatacc

SEQ ID NO: 62032 - DNA, 363 bp, Zea mays
  unsure (1)..(363): unsure at all n locations
cggagacnctgatgagctacttcgaggagaacaaggacgtcgatggggccgagcggtacgtgggggctctgaagaaggtgcagaaggatctgggcgcaccggtgttcgagccgctggtgcggacgtacgctgccgccgggaagaagttccccgggatgcggcacgcaccgtagatcgagaacgtggaggtcggggaggggacggcccagctgcttgactctatctgcgccgatcaatagcccaagcacgtcctagaggaggtggcagcgttggtggcggctgctatgcgatgggggcaccactccgttgatgtatcgtctggtgcngctctgcgagtgactctgnagcgagggcgagataact

SEQ ID NO: 62033 - DNA, 374 bp, Zea mays
agctccgatccccaattcctccttcggatctcgcattcagcgcagcgcaggtgtgaaggaagggggacgcggaggaagatggggctcgcgttcgggaagctcttcagccggctcttcgccaagaaggagatgcggatcctcatggtcggcctcgacgccgccggtaaaaccaccatcctctacaagctcaagctcggcgagatcgtcaccaccatccccaccatcggtttcaatgttgaaactgttgagtacaagaacattagcttcactgtctgggatgtcgggggtcaggacaagatcagacctctttggaggcattacttccagaacacccagggtcttatctttgttgtggacagcaatgacgtgacgtg

SEQ ID NO: 62034 - DNA, 246 bp, Zea mays
  unsure (1)..(246): unsure at all n locations
cttntgctcggaacgcacacatcgcccgtcgccgatctccgaacgcctcgtcgatccaaagatgcagatcttcgtcaagaccctcactggatagactatcaccctcgaggtggagtcttctgacaccattgacaacgtcaaggccaagacccaggacaaggagggcatccctccggaccagcagcggctcatctttgctggcaagcagctcgatgacgggcgcacacttgccgactacaacatcca

SEQ ID NO: 62035 - DNA, 328 bp, Zea mays
tggcaactacaagctgcccaagcactgcgacaacaacgaggtgctcaaggcgctgtgccgcgagcggggtgggtcgtcgaggacgacggcaccacctaccgaaagatccggtcggagctttggatgacctcacacgtgcgcttcttgcgtcgtcttggcagggatgcaagccgccgacggggatgatgagcccgtgctcgtcctcgcagctgctgagcgcgccgtcctcgagctcacgctcggcgtcggcgccaagtgagtgaaaagcggcgacggccgtcgtcgcgctcacagcaagctcgggatctttgagctcccgtactgcaat

SEQ ID NO: 62036 - DNA, 365 bp, Zea mays
  unsure (1)..(365): unsure at all n locations
tgcttcataggccatccagaagttgaacaataaagatctaaagggaaagaagataagagtttcttcctcacaggctanaaacaggctatttatcgggaacataccctataactggacagagaatgaatttaaaaaagcagcagaggaagttggccctggagttttaaaagttaatctcgtgaaggcaccacattcagatacgaacaagggttatggatttattgaatactacaaccaggcttgcgcagagtatgctaagaagatgatgtctaccccagaattcanactagataaaaatgcccctaatgtcagttgggcagatactaagaatggtggtgaatctgcctctactgcacagggtaatt

SEQ ID NO: 62037 - DNA, 338 bp, Zea mays
caaccctatctaaaccgcggcggactcttcgtccagcaaggtttcgcatccagatccggccacgccacttgctcctcttctccgccacaccgatggtgtacgtggattcctgggacgagttcgtggagcggtccgtgcagctcttccgcggcgaccccaacgccacccgctacgtgatgaagtaccggcactgcgaggggaagctcgtgctcaaggtcaccgacgaccgcgagtgcttgaagttcaagacagatcaagctcaagacgcaaagaagatggagaagctcaacaacatcttttttgctctcatgacacgtgggcctgatgttgatatcagt

SEQ ID NO: 62038 - DNA, 360 bp, Zea mays
  unsure (1)..(360): unsure at all n locations
gttatctggatcactcgatctgtttagcaaccggttcctgaagtctggtgttcanaaggctgatagcanaacaagatatgagagagctggaaacgagcaatttgtggcagagataagcanatgggttttccatgagaggggacatctaaaggctgttaatgttaggcatcacaaggttggggagaccaatgaaccaggcatgtaccgcattaatgatgacctggaatactctgttgagatctatgaatggtccggaacaagctggaagccgtatgttgctgatgatgtgcagcttcaatttttcatgatgagcccttacgtctgaaaatatgtcnctgacaacaaggtttgtattcacaa

SEQ ID NO: 62039 - DNA, 352 bp, Zea mays
  unsure (1)..(352): unsure at all n locations
ggacaagatcagacctctctggaggcattacttccagaacacacagggtcttatctttgttgtggatagcaatgaccgtgaccgtgttgttgaagccagagatgagctgcacaggatgctgaacgaggatgagctacgtgatgctgtgctgcttgttttcgccaacaagcaagatcttcctaatgccatgaatgctgctgagatcactgacaagcttggattacactccctgcggcagcgacactggtacatccagagcacttgtgccacaactggcgagggtctgtacgagggcctggactggctgtccagcacattgcgagcaagcttgaatatcnatgcgactgactag

SEQ ID NO: 62040 - DNA, 345 bp, Zea mays
  unsure (1)..(345): unsure at all n locations
ctggggagacgactaatgtatcatttggaacagctatctctacaaagaaagatgattcagagtttttaatgctaaagcaattgggtgacatacttggtttaactcgcaaagaagctcaagatgttcacattaagtttgcagagaaagcttttgtgcaacaggcggaagtaattcttgctgatgggaaattaacagaggctaaggctgaccagcttgctaagattcanaagcaggtcggtttgcctactgaacatgcacagaaaatcattaagggtattacaacgacaaagttatcttctgcaattgaagcatctgtgctcggggtcagatcggtatacagcaggt

SEQ ID NO: 62041 - DNA, 359 bp, Zea mays
  unsure (1)..(359): unsure at all n locations
ggaggagcagcagcagcaggcggcgccgaggagcgagcatccactcagtgcttgcaaccatggctaggggattgaagaagcacttgaagaggctcaatgcgcccaagcattggatgctcgacaagcttggcggacttttgctcccaagccatcttctggacctcacaagtccagggagtgccttcctctgatcctcatcatcaggaacaggctcaagtatgctctgaactaccgtgaggtcatttctatcctgatgcaaacgcatgtacttgtagatggcaaggtcaggactgacaagaccctacctgctgagatcatggatgtcatttccatccctaagacaatggnagactacaggc

SEQ ID NO: 62042 - DNA, 274 bp, Zea mays
gtgaattccacaatgctgctagaaaagttataaatggttcaatgtcagatgcacgggtcaaagctgttaccgtgtacttcaagaaagtgaagggtcaaagaatgaccaacaagcaggcatgtgaaatccacttgacagctgaggagtacaaacaaagtgaagtggactggctcactgctcatcctgaagcttgggtcaagctatgcgagtactgggcctcagatgagtacaaagtaattttcagatagaatcgtttgaaccggggagagcaacc

SEQ ID NO: 62043 - DNA, 372 bp, Zea mays
agatgagaagcgacatgaaactgcgtacaccaagatcgtggagaagttgtttgagatcgaccctgatggtacagtggttgctctggctgacatgatgaagaagaagatctcaatgcctgcccacctgatgtttgacggtcaggacgacaagctgtttgagcacttctccatggtcgcgcagaggcttggcgtttacactgccagggactacgccgacattcttgagttccttgttgacaggtggaaggtggcggacctgactggtctgtcgggatgagggaacaaggcgcaggactacctctgcacgcttgcttcaaggatccggtagctagacgagatggcccagagcagagccaagaaagctagcacgct

SEQ ID NO: 62044 - DNA, 349 bp, Zea mays
  unsure (1)..(349): unsure at all n locations
tgcctgtctggcttggatttggtgcagcgataaagcacatcatgcagaaggacatcaggaacatccatatactgagagatatgtacaatgagtggccattcttcagggtcacccttgatttgcttgagatggttttcgcgaagggagacacgggaatcgcagctgtgtacgacaaattgctagtggctgatgatttgcaatccttcggcgagcaactgaggaagaactatgaggagacnaaagagctactccttcaggttgctggtcacaaggacgtccttgaaggtgatccttatctgaagcagcgtctgcggctgcgtgagtcctacatcaccactctgaacgtgtg

SEQ ID NO: 62045 - DNA, 353 bp, Zea mays
agacgattcttgtgctcccgcagtctgcgagggatggtgcagtagcacagaacaatctgccctctgctccaagaaatgagaggccatacccaagcccacttcttcctccaccaccagcatctaagaggcctgtttataccgaggcaagcagtgttgactatcttagtggtgactcctacaagtcagagaaggtttcagatgatttcatcaacccaactgctccagctaacatatccacatcatcccattcaaaggcagaagcacatccaccgccaagttatggtggcaggccagacagagtatctgacgacttcataaaccaactgcacctacttctcggcgcttctcgtcct

SEQ ID NO: 62046 - DNA, 350 bp, Zea mays
  unsure (1)..(350): unsure at all n locations
caaccctgacaagattgcctttgtccctatctctggttttgagggtgacaacatgattgagaggtccaccaaccttgactggtacaagggtccaaccctgcttgaggctcttgaccagatcaccgagcccaagaggccttcagacaagctcctgcgtctgcccctccaggatgtgtacaagattggtggtattggaactgttccggttggtcgtgtggagactggtgtcatcaagcctggaatggttgtcaccntcggtccaactggcctgaccactgaggtgaagtctgttgagatgcaccacgaggctctccaggagagccttctggtgacaacgtggctacatgtga

SEQ ID NO: 62047 - DNA, 360 bp, Zea mays
  unsure (1)..(360): unsure at all n locations
ganatagtttctgctgattatatgttgaaggtgggagtatctaacttccgaaatgcctgggaaaacatggatccagagactgagcgagtcgatgagtatgggcttggagtaagggagagcttggctgaggctgtaagtgctgttataagcatccttggcatgcagccttgtgagggaactgacgtggtcccaagcaattcaaggtcgcacacttgtctgctctctggtgtgtttcttggcaacgtgaaagtcttggttagactttcatttggaatcagtgcaccgaaggaggtggccatgaagctggcagttagatctgatgatccagagatcagtgacaagatccacganattgtcgct

SEQ ID NO: 62048 - DNA, 337 bp, Zea mays
tagatggcaaagctaagatagaacgtgggggtacagatgttaccattactgcattctccaagatggttggctatgctctccaggctgcagagatactgtccaaggaaggaatcagtgctgaggtgatcaaccttcgatcgatcagaccacttgatagagctgctattaatgcatctgtcaggaaaaccaaccgattggtgactgttgaagaagggttccctcaacatgggattggtgccgagatatgcatgtctgttgtagaagaaagctttgagtacccttgatgcccagttgagaggatcgctggagctgatgtaccctatgcctatgctgccac

SEQ ID NO: 62049 - DNA, 357 bp, Zea mays
  unsure (1)..(357): unsure at all n locations
acattccagacctgatccttgtggcgctgtccacataactatcggcgacgtgggaacgtgaaggctggccgcagtaccgtaacncgaagccagcgtggtcggtcttcagggaagcgagctttgggcacggcgagctaaagatcgtgaactccacccatgcccactggacctggcacagaaacgacgacgaagagccggtgagaaccgatgacgtgtggataaactctcttgctggttcagggtgcatccaggagggcagccgtgaccgtgagtcgaggaagatcctgatgtctccttgatgcttagcagtatatgcttgggctgcgatgtactgtgtatatcatgcgtgctacttga

SEQ ID NO: 62050 - DNA, 325 bp, Zea mays
cttgtgttagaagcaatgagcaccagggaattgggtttctcaatgagccgcgcaggttaaacgttgcgttaactcgtgcacgttatggcatagttattcttggtaatccaaaagtactaagcaagcagccactttggaatagcttgttgacacattacaaggagcatgagtgcttggtagaaggacctctgaacaacttaaagcagagcatggtgcagtttcagaagcccaaaaagatatataatgatcggagattgttactgggcggtgctcaaggcatgcatggagctaacttcggggctggggcctcaagccaagcagcaga

SEQ ID NO: 62051 - DNA, 349 bp, Zea mays
ctgctaagggtgctgtccaaagagttcagcaagcagttcaggagcatgagaagatgtcccaaaatactgggaagcaaaagcaagacatggaagaactaaagaaagaagttagggaagctcggaggatcaaaatgttgcatcagccaagcaaggcaatggatctggaaaatgaaatacgaattttacgtaacacatttgctgagaagtctaaggattgtgttagtcttttgaaagagttggaaacgcataaaaggttacaagacaatggtaccatcccttcattcgatctggagggtctccaatgcttaggatcaatgctacgtatagttggtctgagtggtactcacat

SEQ ID NO: 62052 - DNA, 354 bp, Zea mays
  unsure (1)..(354): unsure at all n locations
aaaggcttaagataggagaagaccagggagaatcaggatttattcttgatggttttccccgtacagtaaaacaagcgganattcttgatggtgttacagacattgatatggtggttaatctgaaactaagagaagatgttatagtagagaagtgccttggcagaaggatttgcggccaatgtggaaagaacttcaatttggcctgcattgatgttaagggtgaaaatggactcccaccaatctacatggcaccactgttgccgcccaaacaactgcatgtcgaagcttattacccgagctgatgataccgaagaggtggtcagaatcggcttcagatatataatgacatgagtc

SEQ ID NO: 62053 - DNA, 360 bp, Zea mays
tgggttttcgcgccgccgccgccgcttcgtcgtctccgccgcagcgatgccgtcgcacaagaccttccggatcaagaagaagctggcgaagaagatgcgccagatccgccccatcccctactggatccgcatgcgcacggacaacaccatcaggtacaacgccaagcgcaggcactggcgccgcaccaagctcggcttctgagcgtggggatcggccggctcccgcgtcggaatactagggtctctacctttcctttggttttatcgatgtctcttgtgtttctgtaagctagcaaacagttccagatagcttttgttaagattctgatgacgctaagaggatgatgctacctgctgtac

SEQ ID NO: 62054 - DNA, 358 bp, Zea mays
  unsure (1)..(358): unsure at all n locations
ggaagaaccagcagcaaaattccaatgcagcacttaggcaggtgaaagcttggactgagcttttgaatgctttttgcacgagtggcagactcgaactggaacttatacacaaagttcagacacagtgctatgaggatgctaagctgatgaagctgtttccggaaatcataagaacactgtatgaccaagatgtcctagctgaagatactatagtcctttggttccgtaaaggttcaaacccgaaggcaggcaatcttttgtgaaagctctggagccgtttgtcanatggctcgaggaggctgaggaggaagaataactcttgatttggagattggcgatgtgacgattatggttctcg

SEQ ID NO: 62055 - DNA, 360 bp, Zea mays
gaagggcctatccgtttggttagatgtgcccttggatgctcttgctaggcgcattgctaaagtgggaaccgcttctcgtcctcttctggaccaaacgtccggtgatccatacacaatggccttttctaagctcagcatgcttgcagagcaaaggggtgatgcttatgcaaatgcggatgtaagggtttctctggaagagattgcatctaaacaaggtcatggcgatgtctctaagctgatgccgactgatatcgcaattgagtcacttcataagatcgagagtttcgtcatcgagcacgctgctgataatccagctagcgactcgcaagctgagtcacagatccaaggatacagacttgt

SEQ ID NO: 62056 - DNA, 363 bp, Zea mays
aagcagagaagcatccagatgctgattccctttacgtggaggagattgatgttggagaggacacaccaagaacagtggtcagtggcctcgtcaaattcatacccctcgaagaaatgcagaaccggaaagtttgcgtactctgcaatctgaaacctgtggcaatgcgtggtataaaatcacatgcaatggttttggctgcatcgaatgaggaccacacgaaggttgagttggtggaagcaaccgaatctgctgccgtgggcgagcgtgttacctttgctgggtactcgggggagcctgaggcttccctcagtggcaagagcaagacgtgggagaagctggccgccgagctgcacagtaacggtg

SEQ ID NO: 62057 - DNA, 353 bp, Zea mays
ctgactcagtgtgcctgtggttgggtgcaaatgtgatgctggagtactcttgcgatgaggccaatgccctcttgaagaaaaacttggaaaatgctaaggccagcttagaagtccttgttgctgatcttcagttcttgcgagaccagcaaaccatcactcaggttacaattgctcgggtattcaactgggatgtacaccaccggagaagcaaacaggctgtaaaggaaccttaatgagttagatcacgaggtcaaccaatgtgattgggacaattttttcgtaccttttggtacctctggcagattagtccatcatagcgagctctttgtttgttgatgggttctttgctgtgt

SEQ ID NO: 62058 - DNA, 316 bp, Zea mays
cggtcgagtctcttcggcgtcccggcgcttcacccgacctgcagcaaccagcatgtgccaggcttcatcacacaggctgagcagctcaaagcaaagggtgtagacgagatcctgcttatcagcgttaacgaccccttcgtcatgaaggcgtgggcgaagactaccccgagaacaagcacgtgaagttcctcgccgacggatctggagcgtacaccaaggcgctcgacctcgagctcgatctcacggacaaagggctgggcgtgcgctcgaagaggttcgctctcctggccgatcgactcacggtcaccgtcgcaaa

SEQ ID NO: 62059 - DNA, 363 bp, Zea mays
attgcaacttccctcatttttcagcgattttgacccttgagctgctgcagctaacctcccttcaggtgtacaagcataccttgctggtcttacatttgcattggcagcatcaccttgcagcacacctgttcttgctacccttctgggatatgtcgccacttcaagagacccaattattggaggaagtttattgttgacatacacaacgggctatgttgcgcctcttcttattgcagcttcatttgctggagcactgcagagtttgttgtcattcagaagatattcggcatggataaacccaatcagtggtgcatttttacttggtggaggtgtttatacccctactggacagggtgttccagc

SEQ ID NO: 62060 - DNA, 364 bp, Zea mays
gttcctctctggaggtcgtcagattccttataccatgatgaagtttgcttcctttgagaccatcgttgagcttatctacaagcatgctgtgcctgttccgaagtctgagtgcagcaagactacccagttgggtattagctttgctggtggttacattgccggtgtcttctgtgctattgtttctcacccggctgacaaccttgtgtctttcctgaacaatgccaagggagctacagtgggagatgctgttaagaagcttggtctctggggtctcttcactagaggacttcctcttcgtatcgtcatgattggtacccttactggtgctcagtggggaattacgatgcattcaaagtgatggttg

SEQ ID NO: 62061 - DNA, 332 bp, Zea mays
ctgctgctgtgcctgctgttgtcttcctctccggtggacagagcgaggaggaggccaccctgaatctcaatgccatgaacaagctcagcaccaagaagccatgggccctgtccttctccttcggccgtgccctccaggcgagcaccctcaaggcctgggctggcaaggtggagaacgtggagaaggctagagcggccttcctcgccaggtgcaaggccaactccgaggctaccctcggcacctacaagggtgatgctgccgccgacaccgagagccttcacgtcaaggactacaagtactgagttgcttctctttgcgatcccgtgttttgg

SEQ ID NO: 62062 - DNA, 363 bp, Zea mays
  unsure (1)..(363): unsure at all n locations
gttatgtgacattaggacagcgtgttcttgctaacccgctgaaagtgagaatgcactatggtcatccagatgtttatgatagaatgtttcatataacaaggggtggaattagtaaggcctctcgcagcatcaatatcagtgaggatatatatgcaggattcaactcaactctgcgtcaaggatgcataactcatcatgaatatattcaggttggcanaggtagggatgttggacttaatcagattgcactatttgaagggaaagttgctggtggaaatggtgaacaagttcttagccgagacatatatagactcggacaactttttgactttttcaggatgtacactttctacgtggacactg

SEQ ID NO: 62063 - DNA, 360 bp, Zea mays
  unsure (1)..(360): unsure at all n locations
ctacaaagctgctcaggatattgctcttgttgatctggccccaacccgacccatcaggctcgggcttgctctcaacttctcagtgttctactacgagatcctcaactcccctgaccgtgcttgcaaccttgcaaagcaggcctttgatgaggcaatctccgaactagacagcctgggagaggagtcctacaaggacagcactctgatcatgcagctcctgcgtgacaacttgaccctatggacttccgacaccaacgaggacgccggagatgagatcaaggaagcagctgctgcccccanagaatccgctctcgagggccagtaagacggatccgatctccgactgatgcgtgtctgctg

SEQ ID NO: 62064 - DNA, 169 bp, Zea mays
cttacagtccactaggcagagggttttttgtagtggagcaaaactagttgactcactgtcagagcaggacttcccgcagcatatgcctagacttcaaccagagaatattgtcaagaatgctaagatattcgagcatgtgaatgcaatggcagctaaaaaaggatgcaca

SEQ ID NO: 62065 - DNA, 265 bp, Zea mays
  unsure (1)..(265): unsure at all n locations
aggccttanactaggattgtattggagctattgatggtacacatgtaagagccactgttcctagagatatggagcatgcctttcgtggtaggaagtcctatgcgactcaaaatgtaatggcggctgtagatttagatctacgcttcacttatgtgttggctggttgggagggaacaactccatgatgctaatgtattacgagatgcttagaacatgtgaatggccttcgcgatccacaaggtaatagtntcacttatgtgcttgt

SEQ ID NO: 62066 - DNA, 336 bp, Zea mays
  unsure (1)..(336): unsure at all n locations
ctcnctaagattgccatggcggaccagctcaccgacgaccagatcgccgagttcaaggaagcattcagcctcttcgacaaggacggcgacggctgcatcaccaccaaggaacttggaactgtgatgcgctcgttggggcagaaccctactgaggctgagcttcaggacatgatcaacgaggttgatgctgatggcaatggaaccatcgacttccctgagtttctcaacctgatggcacgcaagatgaaggacaccgactctgaggaggagctcaaggaggccttccgcatgttcgacaaggaccagaacggcttcatctctgctgctgagcttcga

SEQ ID NO: 62067 - DNA, 290 bp, Zea mays
  unsure (1)..(290): unsure at all n locations
cattaagagaatanagataagttgcttcacaggacggtcttcagagctagagagactagcacacgaattctggcgagaagctgaaattcgttcatagcttcatcatccaaatgttgtggcatcttatggtgttgtgaaagatgggccaggtggtacattggcaactgtgactgagttcatggttaatggttctcttcgacatgttttgcagcgctaggacanatatctcgatcgtcgtaagcggcttatcatagcaatggatgctgcatttggcctggaatatctgcact

SEQ ID NO: 62068 - DNA, 271 bp, Zea mays
ggctcatcgtgatggacaagcacggcggggagggcgccagcaagcagcagatgattgactgctacatccagaccctcgccaaggtccttggaaacgaggaggaggcgaagacgaagatctacaacgtctcgtgcgagcgctacttcgggttagggtgcgagatcgatgatgaaacatctcataagctcgaagggctccctggagttctctatgtgctcccggattcgtatgttgatgctgattacaatgactacggagctgacatcttcgt

SEQ ID NO: 62069 - DNA, 253 bp, Zea mays
gcgaagatcagccctcatgctccccttgatgaagtttgcgtccttagctgtggtatttctaccggtctttgtgcatcaattaatgttgcagaacctccgaagggttcgacagtggctgctttcggtttaggagccgttggtacttgccgctgcagaaggtgcaatgattgctggagcgtcaaggatcattggtgtcgtactgaaccccagcaggttcgaagaagctaggcagttcggattcactgaatttgtg

SEQ ID NO: 62070 - DNA, 267 bp, Zea mays
attgacgatggccgtgttgttagcaacttcattgctcaggctgtgcgtggcgaaccccttactgtccagaagccaggaacacagactaggagcttctgctatgtcgccgatatggttgatggtcttattaggctgatgaacggaaacaacactggaccgattaacttggggaacccaggtgaattcaccatgctggaacttgctgagaatgtgaaggagttgattaacccagatataacagtgacgatgaccgagaacactcctgat

SEQ ID NO: 62071 - DNA, 263 bp, Zea mays
cattaagagaataaagaaaagttgcttcacaggacggtcttcagagctagaaagactagcacacgaattctggcgagaagctgaaattctttcaaagcttcatcatccaaatgttgtggcattttatggtgttgtgaaagatgggccaggtggtacattggcaactgtgactgagttcatggttaatggttctcttcgacatgttttgcagcgcaaggacaaatatctcgatcgtcgtaagcggcttatcatagcaatggatg

SEQ ID NO: 62072 - DNA, 267 bp, Zea mays
gcaaaatccttcgcatcctcaaagctcacggacttgcgcctgaaattccagaggatctgtaccatttgattaagaaggcagtttcaattaggaagcatcttgagaggaacaggaaggacaaggactccaagttcaggttgattcttgttgagagcagaatccaccgacttgctcgctattacaagaagactaagaagctcccaccagtctggaagtacgaatcaacaactgctagcactctggttgcttagagaatgtatcaacttt

SEQ ID NO: 62073 - DNA, 225 bp, Zea mays
gtcatagatgatgacctgaatccggaatggaatgaaacatttgacttgattgtcgaagacaaagaaacccaatctgttatttttgaggtttacgacgaagacaaacttcagcaagacaagagactaggtgtggcaaaactagcagtaaacactcttgaatctgagattacccaagacgccactctgaagctgctacattcactggatccaattaaaaataaggac

SEQ ID NO: 62074 - DNA, 268 bp, Zea mays
tggctacaaggctggcatgactcacattgtccgtgaggttgataagccaggatccaaactccataagaaggaaacttgtgaggctgttaccatcattgaaacccctcctcttgtcattgttgggctcgtggcatatgtgaagactcctcgtggcctccgcacactcaactctgtttgggcccaacatcttagcgaagaagtgaggagaaggttctacaagaactggtgcaagagcaagaagaaggctttcacaaagtatgctctcaaa

SEQ ID NO: 62075 - DNA, 221 bp, Zea mays
gttcaatatcctagtataccttaataaataatttaagatactatgatgagagcacggttcccattactgttgctgggacttgtttacctggcttcagtttctgtctcatttggcattgcttactgggaaaaagagacccccaaacacaacaagtgtctccagagttgcaatagcgagagagactcgtacaggaaccaagcatgccacgctcgttgcaacct

SEQ ID NO: 62076 - DNA, 268 bp, Zea mays
gcagatttgtgatgcggttcaggcaagggcagaaaaagacaagaaccatggggttgttcttattcctgagggtcttgtggagagtattcctgaactatatgctctgcttcaggaaatccatggcctccatggcaaaggtgtttctgttgagaatatctcttctcagctttcaccctgggcatctgcactctttgagtttttgcccccttttatcaggaagcagctacttctccatcctgaatctgatgattcagctcaactttctcag

SEQ ID NO: 62077 - DNA, 265 bp, Zea mays
ggacgagaagaagaggaaggaggagctgaaggagaagtttgaggggctgtgcaaggtcatcaaggaggttctgggtgacaaagttgagaaggtggtggtgtctgatcgcgttgtggactcaccgtgctgccttgtgactggcgagtatggctggaccgccaacatggagaggatcatgaaggcacaggccctgagggactcgagcatggcgggctacatgtcgagcaaaaagacaatggagatcaacccagagaaccctatcatg

SEQ ID NO: 62078 - DNA, 265 bp, Zea mays
acggggtcctgctctccgtggtgatctcgacctcgtcggagctcttcgggctgaagcacttcgggaagatatacaacttcatcacgctggcgaacccggtcggcgcgtacctgttcaacaccctcgcggggtacgtctacgacctcgaggtggagaggcagcacgcagcagcagggtcggacgtcgtcgcgtgccacggccctagctgcttcaggctcacgttctgcgtcctcgccggcgcggcctgcctgggcacgctgctgag

SEQ ID NO: 62079 - DNA, 264 bp, Zea mays; identical to SEQ ID NO: 2460

SEQ ID NO: 62080 - DNA, 207 bp, Zea mays
gcaaagcaagtgaaggccaatgctgttgcaattggaaactatctcatgagcaagggctacaagatggtgactgatggaactgagaaccaccttgttctctgggatctccgcccccttggcttgactggaaacaaggtcgaaaagctatgtgatctttgccacatcacattgaacaagaatgctgtcttcggtgacagcagtgcattg

SEQ ID NO: 62081 - DNA, 259 bp, Zea mays
gtgccagttggtcgtgtggagactggtgtcatcaagcctggtagggttgtcacctttggtccaactggcctgactactgaggtgaagtctgttgagatgcaccatgaggctcttcaggaggatcttcctggtgacaatgttggcttcaacgtgaagaacgtcgctgtgaaggatatcaagcgtggttatgtggcctccaactccaaggatgaccctgccaaggaggctgccagcttcacctcccaggtcatcatcatga

SEQ ID NO: 62082 - DNA, 258 bp, Zea mays
cgcggtcaacatcgagcgcctctggtcgatggtgcccgccgacaaggcgacggaggccggcctcgacaaggccccgcagatcgacgtcacgcagttcggctacttcaaggtgctcgggaagggggtgctgccgcccaagcgcattgtcgtcaaggccaagctcatctccaaggtcgccgagaagaagatcaaggcagcaggcggggccgtcgtgctcaccgcctaggtttcagtccttgttcgcctcctggttttgaa

SEQ ID NO: 62083 - DNA, 266 bp, Zea mays
gatgccactccattcacggatgtgactgtggataacatcagcaaagctcttcataaatgtaattatcaaatgcgtggatttgagacaatgtacaatggtcacactggaagaaaactgactgcgatgattttcctgggccccacatattaccaaagactcaagcacatggtggatgacaagatacattcgagaggacgtggtcctgtgcagatactcacccggcaaccagcagaggggcggtctcgtgatggtggtctccgctttgg

SEQ ID NO: 62084 - DNA, 263 bp, Zea mays
acgtcattgagtggtgtgactgcttacggttttgatcttatccgtggagccaagacccttgatcttatcaggagcagcttcccctctgggaagtacctcttcgctggtgttgtggatggacgcaacatttgggctgatgatcttgctgcatctcttagcactcttcagtctcttgaggccgttgctggcaaggacaaacttgtggtgtcacctcctgctcactgatgcacaccgctgttgatcttgtcatgaaactaagctgg

SEQ ID NO: 62085 - DNA, 268 bp, Zea mays
gcttgttgacaagtacatgaaaaaggaaattaaggtggacgagtacattacgcacaacatgaacctggctgacatcaacgacgccttccacctgctgcacgaaggtggctgtctgcgttgtgtgctggcaatgcagatttgaaattcctaagctaagcagtttttgttttggaactagaactcctttttgcctcgttaggcctggacccgctgtataatgctatgttgtgttggatggctgacgatggttactgctgtgttgctagca

SEQ ID NO: 62086 - DNA, 265 bp, Zea mays
ctccagagctcgtcgccaccggccaccgccaccctcgatcacgccgtccgtcgaggtaaggtcagcatggtgagggtcagtgtgctcaacgatgcgctcaagtccatgtacaacgctgagaagattggcaagaggcaggtcatgatcaggccgtcatccaaggtcatcatcaagttcctgacggtcatgcagcgccatggctacattggagagttcgagtacgttgatgaccaccgatcgggcaagattgtggtcgaactcaacg

SEQ ID NO: 62087 - DNA, 261 bp, Zea mays
ggcttatgggatccgtggcatccgagtagatggcaatgatgctcttgctgtgtacagcgcaatccatgctgcccgagaaatggctgtaactgaaggaagaccaattttagttgaggcactgacttaccgagtcggccatcactcgacatccgatgattcgaccaagtacaggccagttgatgagattgagcattggcgaacagcgagggatccgatttccagatacagaaaatgggttcagggtaatgactggtggtctga

SEQ ID NO: 62088 - DNA, 259 bp, Zea mays
caaattcctattctgacaatgcctaatgatgatatcacacacccaactccggaccttactggatacattactgagggacagagatacattgataggcagctccataacagacagatttatccacctatcaatgtcctgccatctctatctcgattgatgaagagtgctattggtgagggcatgacacgtagagaccattcggatgtgtctaatcagctttatgccaactacgcaattggaaaggatgttcaggccatga

SEQ ID NO: 62089 - DNA, 256 bp, Zea mays
  unsure (1)..(256): unsure at all n locations
cggctcgagctccgaattagttatcttgagaaacattattcccattgctatgttctatggctagcatgaaggttacatgggtggttgtgatcatgtgcatggccgtggtgggtgcaccgatgatggcgcaagcantgacatgcaatgatgtgacggtgaacatggcacagtgcctatcctacctgatgcagggaggaacaccttcaacactttgctgcagcggagtcaagaacattcttggctctgctgtcaccac

SEQ ID NO: 62090 - DNA, 260 bp, Zea mays
ctcgagccggtcttccatagccccccaaatatgaagatcaccatcttctttgctctcttactcttttgtgccgtcatcacctcatacctaccttcagccatcgctgatttacgtgctcgataatgaaggtaaccctcttgaaaatggtggcacatattcatatcttgtgagacataacagcatttggtggaataagagcatccccaacgggaaatgacagatgtcctctcactgtggtgcaatctcgcaatgagctcgac

SEQ ID NO: 62091 - DNA, 262 bp, Zea mays
ctccagagctcgtcgccatgggccaccgacagactcgatcacgcagtccgtcgacgtaaggtcagcatggtgagggtcagtgtgctcaacgatgcgcacaagtgcatgtacaacgctgagaagattggcaagaggcaggacatgatcaggcgagcatcgaaggtcatcatcaagttcctgacggtcatgcagcgccatggctacattggagatttcgagtacgttggtgactaccgatcgggctagattgtggtcgaactcg

SEQ ID NO: 62092 - DNA, 258 bp, Zea mays
gcgttcacaaggaaaaaggactttggtagggaggagagggagctgaagtgggcacatgcacagaggaccctccatgggctacaggcacctgatgccaagatgttcccagagaaggctgggtacaatgagctgaaccagatggctgaagaggcgaagaggagggccgagattgcaaggctgcgggagcttcacacactcaaggggcatgtggagtctgttgtgaagctgaagggactcgacatcgagaccatccagcag

SEQ ID NO: 62093 - DNA, 256 bp, Zea mays
ggcttgaccccaacgaggtctacgagatctcgatggctaactcgcgtcagaacattcgtaagctggtgaaggatggattcataattaagaagccacagaaaatccactcaaggtcccgggcaaggagggcccatgaggccaagcagaaggggaggcactctggttacggtaagcgcaggggtaccagggaggctaggctccccaccaagatcctttggatgcgcaggatgcgtgtcctcaggcgtctgctgcgcaa

SEQ ID NO: 62094 - DNA, 261 bp, Zea mays
gagtctaacagcgacaaccccatcatccaccgggtggagtacaggatcataagggcagacaggatcgagaagcacgccagcgtgtggagggacgccgacgtcatcgtcttcaactcttacctgtggtggaggaagcagaaggatgacatgaggatgaaggtcatgtacggttcatttgaagatggtgatgcaaagctagacgagatggaaatggtggatggtttcgagatagctatcaagaaactgacggaatggcttgca

SEQ ID NO: 62095 - DNA, 257 bp, Zea mays
ccctgatgcagcagttgcctatggtgctgcagtgcaaggaagcatttcgcatggagagggtggtgaagaaaccaaagatatccttatcttggacacagatcccctcaccctttgaattgaaacttatggtggtgtgatgacgaagttgattcccagaaacactgttatccctaccaagaaatctcaggtgttcaccacctaccaggatcagcagactaccgtctccattcaggtttttgaaggtgagaggagtctca

SEQ ID NO: 62096 - DNA, 255 bp, Zea mays
cccagccgcacgaaaccctaacgccgccgccgcttcacaggtaagccgccgtcatggtctccggttccggcgtatgcgcgaagcgatcgtggtggacgcgcgccaccacatgctgggccgcctgtcgtcgattatcgccaaggaactgctcaatgggcagaaggtggtcgtcgtccgctgcgaggagatctgtatgtcgggtggactcgtacgccagaagatgaagtacctccgctttctccgcaagcggatgaa

SEQ ID NO: 62097 - DNA, 254 bp, Zea mays
gtcaaagttctgtttgagcttgctaggcatcatgcaccatccacaatattccttgatgaaatagatgctatcatcagccagcgtggtgaagctcgcagtgagcatgaagctagtcgtcgcttgaagactgagctacttattcagatggatggtttgacaaagacaaacgacttggtatttgtacttgcagctacaaatcttccctgggaattggatgcagccatgctccgccggcttgagaagcggattcttgt

SEQ ID NO: 62098 - DNA, 254 bp, Zea mays
ccgttgccgtgaccatcttcggcgggcgtggccatgccgggacatggggtcaggcacttggtgcagaggtctatgactgcaacaacatggtggagcaggagctgcctggaggcgggctcctcgtgtaccagagcttctgtgctgctgaagacgctgttgctacctcgcccaaatctgttttccactgctttgacggcgagaacgtggagagtgctcctcctcctatgaagaaggactacaagctggctaatctt

SEQ ID NO: 62099 - DNA, 257 bp, Zea mays
atctgccatgaccatgaagagtgttggaagtgccgccctaaagatggtggaggaggtccgcagacagttcaacaccattcctgggttgatggagggaactgccaagcctgactatgcaacctgtgtgaagatctccactgatgcttccatcaaggagatgattcctcctggtgctctggtcatgctcactcccctcattgttggaaccctcttcggtgttgagactctctctggtgttcttgctggtgccctggttt

SEQ ID NO: 62100 - DNA, 258 bp, Zea mays
gcggcgcacagcatcgccaccaccgtccaaagatggtgaagttcctcaagcccggcaaggccgttatcctcctccagggccggttcgccggccggaaggccgtgatcgtgcgcgttttcgaggagggcacccgtgatcgtccctacgggcactgcctcgtcgcgggcctcgccaagtaccccaagaaggtgatccgcaaggactccgccaagaagacggccaagaagtcccgcgtcaagtgcttcatcaagctcgtca

SEQ ID NO: 62101 - DNA, 253 bp, Zea mays
ggtcatcgttgggatctccatacgccggatctgctaaaatacgcttgatccatatgggcctcctcgaccacttgtgggacgacaccgtcgccggcccaaggcggaaaacggtctcggcaagctccgaaaacaccacaccttcactttccgacctagctccggcaaggaaacggagggcgggagcgtgagatcgtacggagacgaatcgtcggaggaagcgacgagagtgacgcgtagtatcatgatcgtgaaa

SEQ ID NO: 62102 - DNA, 253 bp, Zea mays
ccaacgctccccacaacttcagaatttccgagactaccgcattttggagttcaactccagacccaacaccctccttctccccaagcatgctgatcctgattacctcatcgttatccttaacgggactgccattctttgcttggtgaacaacgacgacagagactcctagagacttcgatctcgtgatgccctgagagtcccctcaggaaccacatactatgtcgtcaaccctgacaacaacgaaaatctcaga

SEQ ID NO: 62103 - DNA, 269 bp, Zea mays
cttcctctccgactccgccgccggcgataccccaaccggcgaggacggggaacatcttcgtgaagaagcccaagattaccgaagtggacagggccatcctcaccctcaagacgcagcgccgcaagctcgcccagttccagcagcagcttgagaaggtaattgaagcagaaaaggaagctgcacggcagttggttcaacagaagaagagagacagagctttgattgcactgaagaagaagaaagctcaggaagagctgttgaaacaagtt

SEQ ID NO: 62104 - DNA, 364 bp, Zea mays
  unsure (1)..(364): unsure at all n locations
ctcctcctcgcctcctctcnctagcctccacgacgcaagggagagtgacggaaagcgacgcggcgcgagcgaggagggccaaggggaagaggggaagcaccgcaccaggaccctagttcgccgccgccgcctctgatctccgcgaggttgtcaggattcaatatgtcgaccagcacattcgctacttcctgcagctgttgggcaatgttagaacaacgcaggcctcccagacagcggtgaagagcccttcgtctctaagcttcttcagccaagttacgaaggttccaagcctgaagacctccaagagactggatgtctccgccatggctgtatacaaggtgaagcttgtcgggcctgaaggtga

SEQ ID NO: 62105 - DNA, 317 bp, Zea mays
  unsure (1)..(317): unsure at all n locations
ctcggtcttgttatctctggagccatccgtgtccacgaggacatgcttcttgccgcctcggaagcactagctgctcaggccacacaggagaacttcgacaagggatcaatcttcgcgcccttcaccaacattagaaagatctctgcgcgcattgccgcagccgtggctgcaaaagcttatgaactcggtttgcgacccgtctgcctcccccaagggacctggtgaaatatgcacagagctgcatgtacactcctgtctaccgtaactaccgatagtgctgctgggatcaattctgcagtaatanaatatgtcgacgc

SEQ ID NO: 62106 - DNA, 241 bp, Zea mays
caaggtggacgcctggttcggcacccgccgcaccatggccgccatccgcaccgccatctcccacgtccagaacctcatcaagggggtcaccaagggctaccgctacaagatgaggttcgtctacgcccacttccccatcaacgcctccatcaccaacagcaacaccgccatcgagatcagaaacttcctcgcgagaagaaggtcaggaaggtggacatgcttgatggcgtgacgatcctcc

SEQ ID NO: 62107 - DNA, 355 bp, Zea mays
tccccagccgcacgaaaccctaacgctgccgccgcttcacaggtaagccgccgccatggtgtccggttccggcgtatgcgcgaagcgatcgtggtggacgcgcgccaccacatgctgggccgcctgtcgtcgattatcgccaaggaactgctcaatgggcagaaggtggtcgtcgtccgctgcgaggaatctgtatgtcgggtgggctcgtacgccagaagatgaagtacctccgctttctccgcaagcggatgaacaccaagccatcccatggacccatccacttccgcgccccgtccaagatcctgtggcgcaccatccgcgggatgattccgcacaagaccaagagggggga

SEQ ID NO: 62108 - DNA, 165 bp, Zea mays
cgggactaatttttagtcgctatattttattctattttagttccaaaattgtaaaatatagaaactaaaactttttttatgtcacttagtgggtgtttggtttctagggactaatgtatagtaccatataaattcaagctatacacattatctctattacttatt

SEQ ID NO: 62109 - DNA, 121 bp, Zea mays
ctccgccgccgccgccgcatctaacgcagttccctccgccgcagcccgaggcaagatggttctccataacgacattgatctgctcaacccgccggcagaactcgagtagctcaagcacaag

SEQ ID NO: 62110 - DNA, 332 bp, Zea mays
  unsure (1)..(332): unsure at all n locations
acaagttagctgagaatatcaaatccaagggtggtaagatcacccgcgaacctggtcctgtcaagggaggatccactgttattgccttcgcacaggatcctgatggctacatgtttgagcttatccagagggctgacacacctgagcctctttgccaggtcatgcttcgtgttggtgaccttgagcgtctatcaagttttatgagaaggcnctagggatgaagctcctaaggaagaaggatgtacctgattacaagtataccattgccatgttgggctatgctgatgaggacaagacaactgttctggagctgacgtacaactatggagtca

SEQ ID NO: 62111 - DNA, 360 bp, Zea mays
gcgcttaaagggattcctgcaagcaggttgctactggtctaagttttactgtgattcttacaagggatggacaagtatatacttgtggaagcaatacacatggccaacttggtcacggtgacaccatagacagggccactccaaagcttatagaattgtttgaaggccccactcaggtggtgcagattcagccggcgcaagctacacttttgctgtaacagatgatgggactgttcattcgtttgggtcttgcactaatttctgccttggacatggggatcagcatgacgaacttcttcctcgtgcaatccaatcatttaagacgaggaacattcatgtagtccgtgtttctgctggaga

SEQ ID NO: 62112 - DNA, 314 bp, Zea mays
gctctgtctatctatccatttcatcgctggaaattcccatgccctttcatagtacgcctgtgaaatgctcgctgcttttctattggtttgtgcgcagttcatgctctgcaaggtgaggtctgttcagtttggccagataggtatcccctacctgaacacctaagatgatcgcaccatccgctatcccgaccgctcatcaaggctaacgacatcatcaggatcgatctagatcccaacaagatcatggacctcatgcagcttgacgtcggtaacgtggtcatggtgaccggcgcgaggcacaccgggcgtgtagg

SEQ ID NO: 62113 - DNA, 348 bp, Zea mays
ctctccctcgctagagcaaaaaccttgccacgaatcgccgacactccaacccggaagaggcaacgaggtgactccgcgcctcggtcatgggtgacagccaatactccttctcgcttaccactttcagcccgtcgggaaagcttgtgcagatagagcacgcgctcacggctgtcggatccgggcagaccccctagggatcaaagctgccaacggtgtagtgattgccactgagaagaaactgccttctattttggtggatgaaacatctgtgcaaaagattcaggcactaacaccaaatattggagttgtctatagtgggatgggtccagattttcgtgttctggtgag

SEQ ID NO: 62114 - DNA, 346 bp, Zea mays
ggaacaccgggcgtgtaggtgtgatcaagaacagggagaagcacaagggcggcttcgataccatccacgtcgaggactccatgggccaccagttcgccacccgcatgggcaacgtgttcaccattggcaagggcaacaagccgtgggtgagcctgcccaagggcaagggtatcaagctcagcatcatcaggagcagaggaggcgcgactttgctgcccaggctgctgccaaggcataagttctctgaatgtgctgcttggagctttttgctatgtctagttttatttttatctgcaaggatatagagctaccttcccaagacgttttatcatcatgttttgttgct

SEQ ID NO: 62115 - DNA, 338 bp, Zea mays
cggccctctctatctctctctgactacctccgtatgacgcagcttgtgctcgttcgagactgagacaccccaacacgcctccctcagcgcagatctcgccgccgccgagatgctccgccgcggcgtgcttcttctcgcggccatcctcatcgccgtcgcacactcgaccctcgcgtactcctcgaggccgagcacaagtatactacagaagaacctgttaagctatgggtaaacaaggttgggccttactataaccctcaagatacctacaactattacagtctctcgttttgtcaaccatctgagaaccctgcacatacatggggtggtctcggaga

SEQ ID NO: 62116 - DNA, 346 bp, Zea mays
cgttgttctcacaggccacccctgcaaccaacgcattgtctgatgaagacatcaaggctctcaccaagaggacacaggatggtggaactgaagttgtcgaggcaaaggctgggaagggctctgcaaccttgtccatggcgtatgctggtgctgtttttgcagatgcatgcttgaagggtctcaatgagttccggatattgttgagtgctcttttgttcaatcaactgtaacagagcttccattctttgcatctaaggtaaggcttgggaagaatggagttgagcgaatgcttggattaggtgagctgtcggactttgagaaagaaggttggagaactcaagacgag

SEQ ID NO: 62117 - DNA, 360 bp, Zea mays
ctccgccgccgccgccgcatctaacgcagttccctccgccgcaacccgaggcaagatggttctccagaacgacattgatctgctcaacccgccggcagaactcgagaagctcaagcacaagaaaaagagactcgtccagtcgcccaactccttcttcatggatgttaagtgccaggggtgcttcagcataccactgttttcagccactcccagactgttgttgtgtgccctggctgccaaactgtcctctgccaacccacaggaggaaaggcaaggctcactgagggctgctctttccgcagaagggagactagagcggatgtggtcttcaagttttgctctatgccagatactagcgtc

SEQ ID NO: 62118 - DNA, 345 bp, Zea mays
gttcgccatgacctcaatcaagggtgtcgggcgccgcttctccaacatcgtctgcaagaaggccgacatcgacatgaacaagagggccggcgagctgacgcctgatgagctggagcgcctgatgacggtcgtggccaaccctaggcaattcaaggtgccggactggttcctcaacaggaagaaggatacaaggacggcaggttctcgcaggtcgtctccaacgcccttgatatgaagctcagggacgaccttgagaggctcaagaagatcaggaaccaccgtggtctgcgtcactactggggcctccgcgtccgtggccagcacaccaagactactggcaggcgt

SEQ ID NO: 62119 - DNA, 346 bp, Zea mays
  unsure (1)..(346): unsure at all n locations
tggaacaccgggcgtgtaggtgtgatcaagaacagggagaagcacaagggcggcttcgataccatccacgtcgaggactccatgggccaccagttcgccacccgcatgggcaacgtgttcaccattggcaagggcaacaagccgtgggtgagcctgcccaagggcaagggtatcaagctcagcatcacgaggagcagaggaggcgcgactttgctgcccaggctgctgccaaggcataagttctctgaatgtgctgcttggagctttttgctatgtctagttttatttctatctgcaaggatatagagctaccttcncaagacgtnttatcatcatgtnttgttgc

SEQ ID NO: 62120 - DNA, 350 bp, Zea mays
ctccgccgccgccgccgcatctaacgcagttccctccgccgcagacccgaggcaagatggttctccagaacgacattgatctgctcaacccgccggcagaactcgagaagctcaagcacaagaaaaagagactcgtccagtcgcccaactccttcttcatggatgttaagtgccaggggtgcttagcataaccactgttttcagccactcccagactgttgttgtgtgccctggctgccaaactgtcctctgccaacccacaggaggaaaggcaaggctcactgagggctgctctttccgcaggaagggagactagagcggatgtggtcttcaagtgttgctctatgcca

SEQ ID NO: 62121 - DNA, 365 bp, Zea mays
  unsure (1)..(365): unsure at all n locations
catgtagtcgcacgcacgcgaacgngngcattcggctcgatcgccagtatcgccaaaccctagctcccgatctcgatggcgaaccctcgcgtcttcttcgacatgaccgtcggcggcgctccggcgggccggatcgtgatggagctgtacgccaacgatgtgcccaagaccgcggataacttccgcgcgctgtgcacgggcgagaagggcgtgggcaattccggaagccgctccactacaagggctccaccttccaccgcgtcatccccgagttcatgtgccagagcggcgacttcacacgcggcaacggcaccggcggcgtgtccatctactgctagaagttccccgacgagaagttcgtgcgc

SEQ ID NO: 62122 - DNA, 347 bp, Zea mays
aatggtctattctccttattgatcagtcgaatcgcagtggttccatggaatttgttgtttcccccagctgatccgtcatcatttttccccatctctgttggattttctgcatcgagtactttcagtgatctgaaggttactggaatccttcctctgaaggaaggcaaccctccgaagttttcccacgggctcgtttgctcacagctaactatcaagttgtttaatggttgtaccgttgtccgagtgttgatccacttaaatatattcgaatagcatatttttgtgacatggtatgctactggcatgaactcttgcaagtcatgggatggaagatcatttggggtttg

SEQ ID NO: 62123 - DNA, 345 bp, Zea mays
cggaaacccacccatctacatcactgagaacgggatgggtgacgttgaccatggcgatctacccatggaagttgccttggatgaccacaaaagagtacattacctccagcgccacatcgcaactcttaaggagtcaagagacttgggagcgaatgtgcagggctacttcgcttggtctctattgacaacttcgaatggttctccggctacacggaacgttacggcatcgtctatgttgaccgcaacgatggctgcaaacgctacatgaagcggtcagccaagtggttcaaagagttcaatgctgcgaagaaagcggctgccaagaagattcttacgccagcttag

SEQ ID NO: 62124 - DNA, 348 bp, Zea mays
ggcatgccgcacaagttctaccacggccgcaccgggagcgtctggaacgtcaccaagcgcgccattggcgtcgagatcaacaagcaggttaacggtcgcatcatctggaagcggatccatgtccgcgtggagcatgtgcagccctcccgttgcacagaggagttccgcctgaggaaagctaagaagaccagctcaaggcggatgccaaggcccgcggtgaggtgatcagcaccaagaggcagcctgtgggacccaaacctggcttcatggtcgagggtgctacactcgagacagtcactcctattccttatgatgtggtcaacgatctcgagggcggttactagagag

SEQ ID NO: 62125 - DNA, 345 bp, Zea mays
  unsure (1)..(345): unsure at all n locations
tgagtatgtcacctgccatgatggagcctatataagcagcttgaagagcctggatacatctaggcatgatgatcttgaaagtatttgacctccatgggagaagcggttgttttgtgtggtgacccctccaaatgactacaagataccaataagatggccaacaagccgagactacgtattggcgagtaatgtcaaccattcacatcttgctgaggtcanaggaggacagaactgggtgcatgagaagggcaaactttggtggtttcctggaggtggcactcacttcgaacatggtgcatcagaatacatagagaggctaggagatatgacgacacatagtactgg

SEQ ID NO: 62126 - DNA, 345 bp, Zea mays
gatattcaatgataaggaactgtatgttggaagagcacagaagaagtctgaaagagagatggagttgaaggagaaatttgaaaagaatgttcaagaggtagctgagaagttccaaaacacaaacttgtatttgaagaacttagaggagaacattgatgatgagaaattgcgtgaactctttgctgagtatggcaatattacttcctgcaaggttatgcgggattcgaatggtgtcagcagaggttctggatttgttgctttcaaatctgctgaagatgctaaccgagctcttacggagatgaatggcaaaatggttggaagcaagccctttatgtagtcttgcgc

SEQ ID NO: 62127 - DNA, 337 bp, Zea mays
ctcaactacaaggattactggagagtgaaaatcactatcacaaacttcaacttccgcatgtcttacacgcatggaacttagtagcccagcatccaaactttgataatatcactcagttgttcagcttcaactacaaaccacttactccatatggtggtggcataaatgatacggctatgtctggggtgtaaaattctacaatgatctgctgatgcaagccggcaaacttgggaatgtgcaatcagagctgcttctccgcaaggactcccggactttcactttcgaaaagggatgggccttcccacgccgagtttacttcaatggtgataattgtgtc

SEQ ID NO: 62128 - DNA, 344 bp, Zea mays
cgaagtcatccatgttaagatccctgttgggaagagatgtggttttgttcactttgttaccagaccttctgctgagcaggcgctgctaatgttgctaggggccttgattggtgcacagaatgttcggcattcgtggggtagaagcctgtcgaacaagcagactcagcctcatcaggaatcatgcaatggggtgcgggtgcgcctgctggtgttggtgattactatggtggctatggacaaggttatgaggcttatggcagtgggtatgcacaaccccaggagcctaacatgtatggttatggcgcttatgttggttatcgcaattaccaacagcaaccagctgc

SEQ ID NO: 62129 - DNA, 290 bp, Zea mays
cacggttccaatctatgaaggatacacacttcctcatgctattctccgtttggatcttgcggggcgtgacctcaccgaccacctaatgaagatcctcacagagagagggtactccctcactacgagcgctgagcgggagattgtcaggacataaggagaagcttgcctacgttcctgatatgacaggagctggaatgcagagagtctctgcgagagacacgaatgctgatgcagtatacatggtcaaagttagtgccgagtgtgtccacatcctgtgcatgacgctgcgc

SEQ ID NO: 62130 - DNA, 307 bp, Zea mays
tgagagggagctacgtctcacagtttgagcacacaatcttactccggccaacttgcaaagaggtcatttccagaggcgatgactactgattgcggctggaggaggctccttgtaccaggttgtgtgtgtggagcgccatccgtttatggatcacactcggataaatggtttggtcctccgagttcaggatgttgtatgagttttatcataactcgctagagattgtggatgtacaagtagcagtaatacgttttctgggaacatggacattgttaggctatttccagcggggatttcgtccgaaaaa

SEQ ID NO: 62131 - DNA, 345 bp, Zea mays
gttcaatcagatcctgctggacgtctggttatcacaggggatccagagcagcctgataatccttgggggatcactccgttcaagaaggtggtcaacttgccatcaagaatcaatcctcaccaaacatccgctgttgtcacgcttcatggtcagctgtttgtgcgtgcaccatttgggtctcctgatatgtagatatgacatcatttttagttcagttttgttgactgtggcacctcttcaccggtgatattccttgatatcactagggtttatgtcagttctgttgaggaaataggatttcatttgagcagatacatgatgtcaagctgacttagcagaaccctt

SEQ ID NO: 62132 - DNA, 339 bp, Zea mays
  unsure (1)..(339): unsure at all n locations
ttttccactgctttgacggcgagaacgtggagagtgctcctcctcctatgaagaaggactacaaactggctaatcttctatgctgggaggaggaagcggatgccatggaggagaaggcgggagtgcttgatgagtaagacgggcttctggggtcgatttgcttctgagttgtttatttatatcgtcgcaatttcgtggttgtcgtttggttattctgtgaagcagccaagccaagctattgttatgaaaattgtcgtctgtaagcatgtgaacttccgacgttgccacatgctggatcagtctgaataagtaagtatgcagctctaggtngtcagctgc

SEQ ID NO: 62133 - DNA, 348 bp, Zea mays
gcaaactatcgatgataatactgagtttttaattctagcaagtgatggcttgtggaaggtgatgtccaaccaggaggctgtcgacgagatcaaggattgcaaggacgcgcaggcagctgccaagcacctgacggagcaggccgtgaatcggaagagcaaagacgacatttcagttatcgagtcaagttcatgtgctagcacatcgtcaggttaaatggtctcccgattgtataccgtgttaaattatcttttaagtcttgtgctcgctggtgtcggacattttgtttaccttctttggtattgggaccccacaaagagggtcaaggcttgtaacatattgttgtttgt

SEQ ID NO: 62134 - DNA, 338 bp, Zea mays
cttcgacatgaccgtcggcggcgcccggcgggccggatcgtgatggagctgtacgccaacgaggtgcccaagaccgcggagaacttccgcgcgctgtgcacgggcgagaagggcgtgggcaagtccgggaagccgctccactacaagggctccaccttccaccgcgtcatccccgattcatgtgccaggagcggcgacttcacccgcggcaacggcaccggcggcgagtccatctccggcgagaagttccccgacgagaagttcgtgcgcaagacaccgcccccggtgtgctctccatggccaacgccgggcccaacaccaacggctcccagttcttc

SEQ ID NO: 62135 - DNA, 340 bp, Zea mays
  unsure (1)..(340): unsure at all n locations
ggcgtgtcgtgatgccactagaggtactgcttactagctacaagaggcttgttgtgaaggactccgctgtgaatgctatctgctatggtgctaagcttatgattcctgggttgctccgatttgagaatgatattgagaccggggaggaagtggttctcatgacgacgaaaggggagctatcgcgattggtatagctgaaatgactactgctgtgatggcgacctgtgaccatggtgcagtttcaaagatcaagagggtagtgatggacagagatacatacccaaggaaatggggacttggaccggtggcactcaagaaganaaaactggttgctgagggt

SEQ ID NO: 62136 - DNA, 332 bp, Zea mays
ggccacaagaatacaagattacggatggataatgctgaatcaatggagttgagataacatgggacgtagctcaagaattgcttcgccctcctcctaaggtcccatccattgttattgttgatggccatgagtttgaggaatatgaggagccacctatacttggaaggaagacttatttgtagcagataaatcaggtttgaaccatcaatgggtccagtgtgaagattgttccaaatggagaaaacttccaatagatgccctgttgccctccaaatggacctgctttgacaataaatgggattcagaaaggtcttcttgcgaacctgcacagg

SEQ ID NO: 62137 - DNA, 387 bp, Zea mays
tctctctctcgtggagacgactgggccgctgtcgttgctgccctacgcggctacacctacgtcttcttcgggctcatagccgcgacgagcgccaccagggagtagagatgttaaccttctggttggaaacgatgtacttcgaaggctatggcttccgtggaagtactttcgagcagacatatcgctgctatcctgcgtctttcatcgacatgccatattggatgatgcaaaatcttcttttgcaagagggagatatggtgttcataaaaaatgcctacctccccaagggcacatatgtgaagttgcagcctcatacaacagactttctagatatgtgaacgcccaaagcaatcttgagagataactttgcggaacttatcttgtcta

SEQ ID NO: 62138 - DNA, 375 bp, Zea mays
attgatacaggatcttttcaacgtacggcaagatccccaaaggtgggctgtctctggtggcatgattagggaacttctcatttctttctggagggcgactgtgaaaaaacccaagaggatcatattctacagggatggtgtcagtgagggacagttctaccaagttctgttgtacgaacttgatgccattagaaaggcctgtgcatcattggagtctgattaccagcctccagttacctttgtcgtggtccagaagcgtcatcacaccaggttgtttgttaataatcacaatgatcagcgtgctgccgatagaagtggcaacatactgccgggcactgtggctggactcgaagatttgccatccaaccgagtttg

SEQ ID NO: 62139 - DNA, 366 bp, Zea mays
ctcgttgagaacgcagacgagtgcatggtgctcgacaacgaggctctctatgacatctgcttccgcacgctcaagcttgccacaccaacctttggtgatctaaccaccttatctctgcaaccatgagtggtgttacgtgctgccttcgcttccctggtcagctgaattctgacctccggaagcttgcagtgaacctgatccccttcccacgtctgcacttcttcatggttggatttgctccactgacctcgcggggctcccagcagtaccgcgctctcaccgtgccagagctgacccagcagatgtgggactccaagaacatgatgtgtgctgctgacctcgtcatggccgctacctcaggcatct

SEQ ID NO: 62140 - DNA, 325 bp, Zea mays
cagcgagacccgctacaggtgcatctggggcaaggtcacccgcccgcacggcaactcgggcgtcgtccgcgccaagttcaagtccaacctcccgcctgagtcatggggcgcaaggtcagagtgttcatgtacccgagcagcatctaaggttaggtttttgttggagtaaaggtggactctaaatggccatgcttagttcttctctctgagcttaaaatgccatgtgttggcaacttagattgttcatgtactgaactgttgaagtctacaaattgttgtcgacggctgacagttgtcctatgtagctaaacagagcttattcccc

SEQ ID NO: 62141 - DNA, 337 bp, Zea mays
gttcacgacgcaccaaccgaggccacaggcgactaccattccttccttgttccttccccagctccgcagctgctcatcgccctccctccgcgcccccgatccagatccagatccaggggcttgtcatggcatccaaacgtatcctcaaggaattaaaggacttgcaaaaggaccctccaacatcatgcagtgcaggtcctgctggtgaggatatgttccactggcaggcaaccatcatgggtcctcctgatagtccatatgctggaggtgttttcttggtgaacattcatttcccgccagactacccttcaagcctccaaggtacttttaagacgag

SEQ ID NO: 62142 - DNA, 377 bp, Zea mays
tgtgaaggtacgtgtgcagacacaacctggatttgctcgtggattgagtgatgggctccccaaatttgtccgatctgagggtgttcttgggctctacaagggattgttcctctctggggtcgtcagattccttataccatgatgaagtttgcttcctttgagaccatcgttgagcttatctacaagcatgctgtgcctgttccgaagtctgagtgcagcaagactacccagttgggtattagctttgctggtggttacgttgccggtgtcttctgtgctattgtttctcacccggctgacaaccttgtgtctttcctgaacaatgccaagggagctacagctgggagatgctgttaagaagcttggtctctggggtc

SEQ ID NO: 62143 - DNA, 372 bp, Zea mays
cccgttcacagttcaccccacttgctctctttctccccagtagcaacgaccgcgcgtcctccgccgccgcactaaaccctactccatgtacccaggtctgcgtcgggcccttgccggcgatgagaacccgtcagttccaaagatggctcgtcgtggattgatggaacaggacttaagcaaactggatgtgacgaagcttcaccccctgtcacctgaagttatctcacgccaagcaacaatcaatatgggtaccattggccatgtggctcatggaaagtccactgttgttaaagctatatctggtgttcagactgttcggttcaagaatgagctggaacgtaacattactataaagctgggttacgctaatgc

SEQ ID NO: 62144 - DNA, 368 bp, Zea mays
ctcaacacctgggctaagtgggttgattccaatgtgaaccccaagaaaaccactgtgtttttcagaggctactctgcatcccatttcagtgggggtcaatgaattcgggcggcagttgtgacagggaaacagagccaataacggatgaccagtacctcacgccatacccaacaaagatgagcattttggaggaggtgctccgggggatgaaaactcccgttgtgtacctgaacataacaaggatgactgactacaggaaggaggcccacccttcagtctaccgcaagcagaagttgaccgaagaggagaggaatcgcctgagctataccaggactgcagccactggtgccttcctggagtaccggact

SEQ ID NO: 62145 - DNA, 366 bp, Zea mays
gtggtgcaccgagcgctgcctcgactggggcgaggcgggcggccccgacctcatcgtcgacgaaggcggcgacgcatcgctgctcatccacgagggtgtcaaggaccgaggaggattacgagaagaccggcaagatccccgacccggagtccaccgacaacgctgagttcaagatcgtgctcaccatcatccgcgacgggctcaaggctgacaccaagaagtatcgcaagatgaaggagaggcttgtcggcgtctctgaggagaccaccacgggtgtcaagaggctctaccagatgcaggagaccggcgccctcctcttccctgccattaacgtcaacgattccgtcaccaagagcaagtttgaca

SEQ ID NO: 62146 - DNA, 352 bp, Zea mays
gtgtacagcgcgctgaagcactttgggctgacgaccccgggcctccgtggctgcatcctggagcgcaacgacgtccgctaccgcttcgtcgtcgacgtacccggtagcaacgtcgagacggaggcggcggcggcggatgcggccagcaactgatggcaccgcgtcgtcgagtcgaaccacgtctgtgcgccgcgtgcaacgttcgttcgggtcgagtctgcgagcaacgttctgcttcctatactagttgttgtctttccgccttcttgccgttctgttctgggctttgagatgagacgatggatggtcagtttttaatgtcagactgaataactagtattagtactgtagt

SEQ ID NO: 62147 - DNA, 378 bp, Zea mays
ccgaggtgaagtctgttgagatgcaccacgaggcgcttcaggaggctcttcctggtgacaatgttggcttcaacgtgaagaacgttgctgtcaaggatctcagcgtgggtttgtggcctccaactccaaggatgaccctgccaaggaggctgccagcttcacctcccaggtcatcatcatgaaccaccctgggcagattggcaacggctatgccccagtgctggactgccacacctcccacattgctgtcaagtttgctgagctcattaccaagatcgacaggcggtctggcaaggagcttgagaaggagccacagttcctgaagaacggtgatgctggtatggtgaagatgataccgaccaagcccatggtggtgga

SEQ ID NO: 62148 - DNA, 371 bp, Zea mays
catggatatgttggtgctgatcttgctgccctttgcactgaggctgctcttcagtgcattcgtgagaagatggacatcatagatcttgaggatgagacatcgatgcagagatattgaactcaatggctgttacaaatgaccatttcaagactgcgcttggaacaagcaacccatctgctcttcgtgaaactgttgtcgaagtcccaaatgtctcttgggaggatattggtgggctggagaatgtcaagagggagctccaggagactgttcaatatcctgtggagcatccggagaagttcgagaagtttggcatgtctccatccaaaggagttttgttctatggtcctcctggttgcggtaagaccttgttg

SEQ ID NO: 62149 - DNA, 365 bp, Zea mays
cgccgacaaaaccagaccaccaaacaagtgccagcgccctctcgcagtcgccgcaatggagagcaccttcatcatgatcaagcctgacggcgtccagatgggcctcattggtgagatcatcagctgttttgagaagaagggcttctacctcaaggccttgaagcttgtcaacgtggagaggtcgtttgccgagaagcactacgccgatctcgcctccaagcccttcttccagggcctcgtggactacatcatctctggccctgtggtggccatggtctgggagggcaagagcgtcgtcacaactggccgcaagatcattggcgccaccaaccccctggcttctgagcacggcaccatccgtggcg

SEQ ID NO: 62150 - DNA, 336 bp, Zea mays
ccatgaagttcaaggatggctacatgatctcatctggtcagccagtgaatgagtacatcgactcagctgtgagacacgtcctcctcagacagggtgtctgggtatcaaggtgaagatcatgcttgactgggacccgaaggcaaggttggcccgatcacccctcttccggacctggtgaccatccataccccgaaggaggaggacgagctgcgccctacctgtcttggcagctgaggtctaaggtcccaacagcgtcctcgaaatggcagtttgatcgggtcctagctaggtttgatcttatgataagggcagtgctaagacagttcgttccgtgtc

SEQ ID NO: 62151 - DNA, 359 bp, Zea mays
tgctatacatgatataaaaagcagggatcgggagaaggatgaaccagttccgaagctacctgtggagaagcttcggcttaacagcaaaaaatggaaccgacctaaaggggaaaaggttgtctagtccttgatagattatccctaggtcaatagtaaatgtcaagggcatgaatgtaattttacacaggctgcgtcttgtgcctataaatagatgaacagtagcactgtattgttcacgttgacttgtattcgcttgcacgtcactctcgagccttttaccttctgtcaagatgaaggtataaatgtaattcgatattgttcatattcattcatgatattataataacaatgtcctgata

SEQ ID NO: 62152 - DNA, 367 bp, Zea mays
tcgtcgccaaggccggtctcaagcccaccgacaccgtcctggagatcgggccgggcacaggaaacctcaccaagcgcctcctcgaggctggtgtcaagccgtcgtcgccgtcgagctcgacccgcgcatggtgctcgagctcaaccggcggttccaggggcacccgctctcctcgcgcctcaaggttatccaaggagatgtcctcaaatgtgatctcccatactttgatatttgtgtggcaaacatcccgtaccagatctcatctccccttactttcaagcttctgtcacaccgtccaatctttaggtgtgctgtgattatgtctcaacgtgaatctgccatgagacttgtggcacaaccgggagat

SEQ ID NO: 62153 - DNA, 373 bp, Zea mays
cgccgacaaaaccagaccaccaaacaagtgccagcgccctctcgcagtcgccgcaatggagagcaccttcatcatgatcaagcctgacggcgtccagaggggcctcattggtgagatcatcagctgttttgagaagaagggcttctacctcaaggccttgaagcttgtcaacgtggagaggtcgtttgccgagaagcactacgccgatctcgcctccaagcccttcttccagggcctcgtggactacatcatctctggccctgtggtggccatggtctgggagggcaagagcgtcgtcacaactggccgcaagatcattggcgccaccaaccccctggcttctgagcgcggcaccatccgtggcgactttgct

SEQ ID NO: 62154 - DNA, 383 bp, Zea mays
aaagagcatgcagagaccattacagccgaaggtgttgggctattgggtttggcctgaatttcagagtcattgctctttctcctggcttcagaaagctttcttcggagcactttgtttcttcttataacagggcttctagaagggcaatatttctcgactacgacggcacacttgtgccccagtcgtcaatcaacaaggctccaagtgaagaagtcatctccattcttaacaccttgtgtaatgatccaaagaacgttgtgtttatcgtaagtggacgaggacgtgattccctcgacgagtggttttctccatgcgagaagctccgtctagccgcagaacatggctattttatcaggtggagcaaggaagctgcatgggagtcg

SEQ ID NO: 62155 - DNA, 379 bp, Zea mays
gatacttttgtgctgcattcggagcaagaaagggtacctttatgacattctgacaaaagcatctgtagttaagataaggatccctgtgcttatattctgaacaagacggataaagttaccgcccactcgaaggaattcatcaagaaacagttggagaaagaattgaacaagcttcgggaatcgaggaacgccatatcttcagctgacatctccgatgaagtccagctcggggtccctggagaggcattcaacttcagccagtgccagaacaaggtggctgttgcggagggtgccggttcaactggtaatgttttggccgtggagcaattcatccgtgaacatgtgagggcgtaggtcgttcttattgttctcagggctc

SEQ ID NO: 62156 - DNA, 377 bp, Zea mays
gtccttccaggtcaccgccagcgacggccgcaccgtcaccagcaacggcgtcgctccggcaggctggcagttcggccagaccttcgagggcgcccagttctagctactactactccatcgacgagtatgactgtgagcaagagagaaggagaaaccttcttcgctgtagtaaagaagaggctcccgccataccgaggctgcttattattagcacccgcttaggcatttccttctcttattattaccataggattgagctgtttattttctgcaccagtgattgtagcaatgggttaagcaaaacaataacctgctaagctatttattgtagggctgcaggggagtggtgtcgtgcaacttattgtgttgttacgctg

SEQ ID NO: 62157 - DNA, 348 bp, Zea mays
agcagctagggttccgtcctcgatccgatccgccgagtgcacaccacctttccgcactccgatcgaatcgatggccgctgagggcgagaagctgatgatcaccctcaaaagctccgatggcgaggagttcgatatggaagatgcggtggcgatggagtcgcagaccatccgccacatgatcgacgattactgcgtcgacaacggcatagcctcttcctaacgtgaactcgatgatcgtatccacggtactcgagtactgcaacaagcacgtacatggcgccgcagccgcagctgacgtctcgacagccggttccgatgacgtgggtgacgagtccggcaacagcaccg

SEQ ID NO: 62158 - DNA, 343 bp, Zea mays
tgtgccagttggtcgtgtggagactggtgtcatcaagcctggtatggttgtcacctttggtccaactggcctagactactgaggtgaagtctgttgagtgcacgatgaggctcttcaggaggcccgtcctagtgacaatgttggcttcaacgtgaagaacgtcgctgtgaaggatatcaagcgtggttatgtggcctccaactccaaggatgaccctgccacggaggctgccagcttcagctcccaggtcatcatcatgaaccaccctgggcagatcggtaacggttatgccccagtgctggactgccacacctcccatattgctgtcaagtgtgctgagctc

SEQ ID NO: 62159 - DNA, 299 bp, Zea mays
gaaggactcacctgatgatcgcgtggatcgaaaggccgatcatctacgacgtccgcgcccgacccaacctcgtcgagagcacctccggaagcccgacctccagatggtgagaattggtcttcgtgtccttactcgacccatgccagaccagctacctaaaatctacaggaacttgggggagaacttcaatgagagagttctgccttcaatcattcttgaaacactcaaagctgtggttgctcaatacaatgccagccagctgatcacccagagagaggctgtgagcagggagattagga

SEQ ID NO: 62160 - DNA, 336 bp, Zea mays
gcggtgtgatcctcttcgaggagaccctgtaccagaagaccaaggatggcaagccttttgttgatgtcctcaaggagggaggcgtctccctggcatcaggttgacaagggcaccattgaggttgttggcactgataaggagaccaccacccaaggccatgacgaccttggcaagcgttgcgccaagtactacgaggcaggtgcccgctttgccaagtggcgcgctgttctcaagattggccctaatgagccatcacagcttgccatcgacctgaacgctcagggtctggctcgctatgccatcatctgccaggagatggtctggtgcttattgttg

SEQ ID NO: 62161 - DNA, 346 bp, Zea mays
agcttggggagatgtggcaaaagatgtcaggcgaagagaaacagccttacatccagcaggcccaggtcgacaagaaacgttatgaaaaagaaccgctgtctatcgcggtgaagctacagtcgatgtggattctgggaacgagtctgactagagatccaagctcttgggctggcatggtggcacgggatgaaagtctagtgccatgtgtgctattgttatgtcagcaaccgttgcctccaacattgctgacagtaaagagagtttctctcgcagcttacctctgcagggcaaaagaatgtacgagtgtagtctagtgattttgtgctaaacaaccaactacgtggtt

SEQ ID NO: 62162 - DNA, 339 bp, Zea mays
gggtagagaagcctcggaatgacacgccaatcagccagaatgagatcagaatcactactcaggggaggatgaggaactatatcagctatgggatgtcgctgcttgaggaaaatggacatgatgagattagtatcaaggccatgggacgggccataaataagacagttatggttgttgaattgatcaagagaagggttggaggtcttcatcagaacactgctactgaatctgttgatatcacagacacatgggaacctttggaagaaggccatctcccactagagacaactcgccatgtgtcgatgatcactgtgacactgtcaaagaacctctggatac

SEQ ID NO: 62163 - DNA, 357 bp, Zea mays
tggtgatcacacctatgtcccagtcactcagaagggatactggcagtttaacatgggtgatgtcctggttgatggaaagtccactgggttttgtgctggtggttgtgcagcaatagcagattctggaacttccttgcttgctggccccacagccattattactgaaatcaacgaaaagattggtgctgctggtgtagtcagccaggagtgcaagactgttgtttctcaatacggacaacagatcctagatcttctgctagctgagacgcaactgcgaagatctgttctcaggttggcctgtgcacttttgatggcactcacggtgttagcgctggaattcgtagcgtagtggatgac

SEQ ID NO: 62164 - DNA, 159 bp, Zea mays
ggaaattggattaaacagtgctctggcgaggggacatgaactgggagttcttgtttccttgccttatgtcgattaaggccccgtttcaatctcacgggataaactttagcttcctgctaaactttagctatatgaattgaagtgctaaagtttagtttc

SEQ ID NO: 62165 - DNA, 360 bp, Zea mays
gccgaggaagttctaaaactggccaagaatggattggaaagaagaggatacaaggaggtcggtttccttagagaggttgacgaagtggtgaggaaggagtgacacctgccgagagacttctgcatctgtacgagacgaagtggcaacgcaacgtagaccatgttttcgagcacttgctatactgatgttgtagatgtaccctagtacaaaaatctcatctttgattcattcaacgccttgagtgggagggcacaggaacacagcttttggttaagttgctgaccgggggaacagctacccggtgctgcgtgcggtgcctacaaataacttcgctcgggacggatcactactctctaggga

SEQ ID NO: 62166 - DNA, 353 bp, Zea mays
gttcaggatccacatcttcccgagcgagttcttggttgacctcttcctcttcggaccacctccaaggctcttggtgtagcttgccactctcaccaatcaagttttcatgtctgatctcgacattcagatcccaactgccttcgatcccttcgctgaggccaatgctggggactctggtgcggcagcagggtcaaaggactacgtacacgtgcgcatccagcagcgtaatggtcgcaagagcctgactaccgtccagggattgaagaaggagttcagctacagcaagatcctcaaagatctcaagaaagagttctgctgcaatggtacagtggtccaggacccagaacttggac

SEQ ID NO: 62167 - DNA, 354 bp, Zea mays
  unsure (1)..(354): unsure at all n locations
accactctgggcacgaactgaatcaggtattttccgctcagtgctgagagctgaccccaattttgaagactcaccatggcaatcagtactcctgaagccanagattttgtcaaaagacttcttaacaaggattacagaaaaagaatgactgctgcacaggcactttctcacccctggctgcgagatgagcaacaacaaatacctctggatatgctagtattcaagttggttaaagcataccttgtttctacgcctctcaaacgggcggcattgaaggccttgtcaagagcaataacacaagatgagcttatctacatccgggcacaatataacttgttagaaccaacagtgcag

SEQ ID NO: 62168 - DNA, 354 bp, Zea mays
tctgcaggctgccttcggctacgcgagcctcagctggaaggatcacgtggtcattgacaagaagtacttccggcctgcagaagtcgacagctcaaggcggacgcaccaaggcgaagaaggtgctcaagtggaagcccaaggttaggttccaggagctcgtggagatgatggtcgatcacgacattgagctcgccaagaaggagaaggtcctggtggatgctgggtaccgtgatcccaagcaacagccatagaaacatcacagttgcttcttgctctgttggggctcggattcagattgttcccctcatacatggtggttctctagggtagaggttgaccgaagttactatcgat

SEQ ID NO: 62169 - DNA, 333 bp, Zea mays
gctaggcaaagacgcggttggcaaggccaaagcattcgatgagaagcatggcttcacatccacagccggtgctacagtggcctcaattgacagaagattgggctgactgataagatcacgacaggcacttccttggttagcgggaaggtgaaggagatggaccagaagttccaggtctccgacaagaccaagtctgcactcgctgccgccgagcagaaggtgagcagtgccgggtctaccatcatgaagaacaggtacgtcttcaccggcgcgtcatgggtcaccagcgcgttcaacaaggtcgccaagacgccacggacgtcgggacgatga

SEQ ID NO: 62170 - DNA, 189 bp, Zea mays
  unsure (1)..(189): unsure at all n locations
gnnngaacgatggagcagaccttnntnatgatcaagcacgacggcntccagcggngcctgatcggggacatcatcantcgcttcnagaagaaagggttctacctcaaggggatgaagttcatgaacgtggagaggtccttcgcgcanagnactacgctgacctttccgacaagccttcttccccgggtt

SEQ ID NO: 62171 - DNA, 355 bp, Zea mays
cttgccttgatatcctcaaggagcaatggagccctgcactgaccatatcaaaggtcctcctctccatcagctcgctcctcaccgaccccaacccggacgacccccttgtccctgagatcgcccacatgtacaaaaaccagaggcagcgctacaaggaaactgcacgggcctggacccagaagtacgcaatgggctgattctgtcccactggacagtacttcccctgcaaagatcgtcacggtgttgtaagaatcaagttgcaccgttttcctgtcgtgtgatagtattaagagcccagatggctgtgtcaattgtactcgcttctcagaacaaagtctctctgtgtgtacagtgc

SEQ ID NO: 62172 - DNA, 357 bp, Zea mays
caaggtcacggcctggcagacggccgaggtcgccaagatcaacaaccgcttcaagagggaggatgtggtcatcaacggctgggagaccgagcaggtggagaaggcctccgcgtggctcaagaagatcgaggtaccgaccacaccgacgccctcttctttgctccctcttcgtcaatttatatatatcttgctcaaaccacgagttgagttcttgttccgcagaggaagctggacgagcaacgcgccaaggcgctggagaagacgcagaacgacatcgccaaggcgcggcgcaaggcggaggagaagcgggcgtcggcggatgccaagcggggcctcaagctggccaaggtgctggag

SEQ ID NO: 62173 - DNA, 358 bp, Zea mays
aagcgcctttccagcatcaatgtcgagaacgtggaggagaaccggcgggctctccgtgagctcctgttctgctgccctggtgccctccagtacatcagcggtgtgatcctcttcgaggagaccctctaccagaagaccaaggatggcaagccttttgtcgatgtcctcaaggagggaggcgtcctccctggcatcaaggtcgacaagggcaccattgaggttgttggcaccgacaaggagaccaccacccagggccacgatgacctcggcaagcgctgcgctaagtactacgaggccggtgcccgctttgccaagtggcgtgctgttctcaagattggccccaacgagccgtcacagc

SEQ ID NO: 62174 - DNA, 361 bp, Zea mays
atattgtcacgcgatttccctcaatctcccccaaaagggttcttcttgactaaaattttccatcctaacatagctactagtggtgagatatgtgtaaacacactgaagaaggattggaatcctggccttggattaagacatgttcttctggttgtgagatgccttctgattgaaccatttcctgaatctgcacttaatgaacaagctgggaagatgttacttgaaaattatgaggaatatgcacgacatgcaaggttatacactggcatccatgcccttaaacctaagaatacgtccaagaccggagctatatctgagtcaaccacagctctgaatgtcgacaagtcaagtactgcctcta

SEQ ID NO: 62175 - DNA, 358 bp, Zea mays
aggccggccaggttggtatttatggttacactgcctactcagcgagcaagtttgctcttcgtggattgggtgaggcgttgcagcacgaggtcgtcggggacaacattaatgtctcgttgatattccctcctgacactgaaactccaggattggaagaggagcataagaggaggccagaattgacaaacatcatagcaggattgtctggtggaatgaaggccgacgatgttgccaagaaggctcttgatggtatcaaatctgcaaaattcattgtcccatgcaatttcgagggcacaatgttagctgtagccactgctggtttatccccacagagctctgcattaatggcattcataga

SEQ ID NO: 62176 - DNA, 365 bp, Zea mays
agtcgagaacatcaacgtcgcagcgatcgagacgacgctgtggtcgatcgagtggggcatcgccgagctggtgaaccacccggccatccagcacaagctccgggatgagtacgcctcggtgctgggcgccggcgtgcctgtgacggagccggacctcgagcgcctcccctaccttcaggccatcgtcaaggagacgctccgcctgacgcatggccatcccgctgctggtcccccacatgaacctcaaactacggcaagctcgccggcttcgacatccccgccgagtccaagatcctcgtcaatgcctggttcctcggcaacgaccccaaagagtgggtgcgcccgacgagttccgggccgagcgc

SEQ ID NO: 62177 - DNA, 357 bp, Zea mays
tgctagagacaatcgctgcgtaaacggatccatcgccatggcgtctcgtctcgatgcggacggagactcctcgaccaccttctcctgatggtcatgcctggctcgtctaatctcttgccgtgccttcacggtagaggagacagccatggtacctgagcaagttcgtgaccggaagcttgaacccagtatggaatcatactttgaattgtatcgttgaagatggcttacatgacatgcttatgttggaagtatatgatcatgacactttccgtagagattacatggggcggtgcatcctgaccttgacaatagttttgctggaggaagagtacaaggtaagcttcaacctggagggag

SEQ ID NO: 62178 - DNA, 179 bp, Zea mays
atccgcattagcgcgccagcagtgacctcgagtggtctactggagacggatttcgagcagattggggagttcctccaccaggcagtgtccatctgcctgaacatccagacggagtacggcaagttcctcaaggacttcatgacgggcctgctgaacaacaaggacatcgagaacctcaa

SEQ ID NO: 62179 - DNA, 355 bp, Zea mays
  unsure (1)..(355): unsure at all n locations
cgccgccgcagccaaagtcgggcctcttcgttggcatcaacaagggtcatgtcgtcaccaagcgcgactgcctccccgcccgtgccaccgcaaggagaaatcaacgaagagggtgtctatggtcaggggcctgatcagagaggttgctgggtttgctccttatgagaagcgtatcactgagcttctgaaggntggcaaggacaagcgtgcccagaagcttgctaagagaaagcttggaactcacaagagggcagagaagaagatagaggagatggctggcgtcctcagtaagatgaggtcggctggtacgcacactgacataaagaaatagagagcatttcaagttcatggagct

SEQ ID NO: 62180 - DNA, 360 bp, Zea mays
ggagtccgttgcttcgctcggtttatagccgagattgagaatctgcaggggacaaatagattcactattcatactggtgctggaaagatcgttcctgaaatacaaagtgatgggcaggtaaaggttgatatgggcgagcctatcctttctggactagacatccccacaaaactgctagctaccaagaacaaagctgttgttcaagctgaattggcagttgagggcttaacatggcatgtcacatgtgttagcatgggaaaccctcactgtgtcacatttggtgcaaatgagttaaaggtcgacgatttaaaacttagcgagattgggcctaaatttgagcatcatgaaatgtttcctgct

SEQ ID NO: 62181 - DNA, 176 bp, Zea mays
gagaaggaagggctctctgctttccctatgggaaaaattgatcaaacacgtatgtggaaggtgggtgaaagggtccgttcaaccaggccacaaggtgatcttggcccactgcatcccttcactgctggagtgtatgttgcactaatgatggctcagattgaggtccttaggaagaa

SEQ ID NO: 62182 - DNA, 351 bp, Zea mays
cagccttccatccatccatcccgtagctgctctctattacgccagcgatcgagagaccaagaggagcaggagcgatggcgaggagcacgttcaagctggagcaccccttcgaaaggaggcaagctgaggctaaccgtatcagggagaagtaccccgatagaattcctgtcactgttgagaaggccgagaggagtgacatcccagacatcgacaagaaaaagtaccttgtccccgccgacctcacagtgggacagtttgtgtacgtggtgcggaacgcatcaagctcagcgccgagaaggcgatcttcatcttcgtgaagaacacctcccaccaacagctgccctgatgtct

SEQ ID NO: 62183 - DNA, 355 bp, Zea mays
tggcaagtgtggcttgacccaaatgaagttagtgagatctccatggcaaactcccgccagaatatccggaagttggttaaggatgggtatatcatcaagaagcctcataagatccactctagatcccgtgcaagaagggcacatgacgccaagcaaaagggacgccactcaggatatggtaagcgtacgggtaccatggaggctaggctacccaccaaggttctgtggatgacgaggatgcgtgtgctgaggcgccttctccgcaagtatcgtgaggccaagatgattgacaagcacatgtatcatgacatgtacatgaaggtcaaaggtaacgccttcaagaacaagagggtgc

SEQ ID NO: 62184 - DNA, 344 bp, Zea mays
gttgaagcagagctggatgatgtctttaagagtaataaaggcgaatctaaaaataaaactaaggcaaacgatgatacgaagaaacagcaaagaccatttctcatgcaattcttctcaccaattttcataaaggcattttctattacattctttggtgagtggggtgacaagagccagattgctactattggcttggctgctgatgaaaacccatttggtgttgtcctgggtggaatcatagcgcaacactctgcactactgctgctgttcttggtggaaagagcctagcctcccagatatccgagaagatggtcgaactgtcaagcggagtgctcttcctgctg

SEQ ID NO: 62185 - DNA, 352 bp, Zea mays
  unsure (1)..(352): unsure at all n locations
cttcgaccgtttccgcggggtgctcncggagaccgtcggcgacggcacccatttcctcgacgccctggctgcagaagcccttcatcttcgacatccgcacgcgcccgcacaacttctcctccaactcggggaccaaggacctgcagatggtcaacctcacgctccgtctcctctcccgccccgacgtccagcacctccccaccatcttcacctccctcggactcgagtacgacgacaaagtgctcccctccatcggcaacgaggtgctcaaggccgtcgtcgcccagttcaatgccgaccagctcctcaccgaccgcccccacgtctccgccctcgtccgcgacgctctcat

SEQ ID NO: 62186 - DNA, 350 bp, Zea mays
  unsure (1)..(350): unsure at all n locations
ccgctcccctacctctccagcatctcccgtctccgtcgtctcgtctctgctcctcacctcgccgccagccatgggcaagatcaagatcggaatcaacggtttcggaaggatcggcatgctcgtggccagggtcgccctgcagagcgaggatgtcgagctcgtcgccgtcaacgaccccttcatcaccacggattacatgacctacatgttcaagtacgacaccgtgcacggccaatggaagcacagcgacatcaccctcaaggactccaagacgcttctcttcggcgagaagccggtcaccgtctttggcatcaggaaccccgaggagatcccgntgggtgatgctggtg

SEQ ID NO: 62187 - DNA, 203 bp, Zea mays
ctcttcaagagagaatagggacattatcatacgaggagttctttcagtaacagtgatatctggggaggatctgacttcgaaggatatgtatgggaaatctgacccatatgtcatactttctctcaagaagacaaaggcaaagtacaagacaagggttgtgaccgaaagcttgaacccagtatggaatcaaacttttgattttg

SEQ ID NO: 62188 - DNA, 343 bp, Zea mays
  unsure (1)..(343): unsure at all n locations
cagcagccacgaccacccgcgcagcaggacttggggagcaagcaagggaacggcctgccatggattccttctcgtcctcgccgtcgtcgtcaggtcncggcgctaacccggacgttgttatggaacagatcaagacgcagctcgcacaggcttacgcgcaggagtttctcgagaccgtcgggaacaagtgctttgaaaagtgcgtgaccaagccaggatcaagcttgagtggaagcgagagcagctgcatatcacgttgtgttgaccgctacattgaggccactggtattgtcagccgcgcattgttcacttcccagcgctaagatcacatgaataaggagat

SEQ ID NO: 62189 - DNA, 324 bp, Zea mays
tgagagagctggaaacgagcaatttgtggcagagataagcaaatgggttttccatgagaggggacatctaaaggctgttaatgttaggcatcacaaggttggggagaccaatgaaccaggcatgtaccgcataaatgatgacctggaatactctgttgagatctaagaatggtccggaacaagctggaagccgtatgttgctgatgatgtgcagcttcaatttttcatgatgagcccttacgttctgaaaactatgtcgactgacaacaagggtttgtattcaacaccttcagagttccagatgtgtatggagttgtccagttc

SEQ ID NO: 62190 - DNA, 352 bp, Zea mays
caagcaagcgccaaccatcgagcagaaagaagatcgtcgagatcgagcataagccatggcggcctctgtttctgcctcttgccttattggcctgtcgtcgttggcggtggtgctggtggcgctggcgtcggcggcgtcggcgcagctgtcgtcgacgatctacgacaggtcatgccccaacgcgctgtccaccatcaggagcggcgtgaactccgcggtgaggcaggagcctcgcgtgggggcgtcgctgctcaggctccatttccacgactgctttgtccggggctgcgacgcgtcccttctgctgaacgacacgtcaggggagcagagccagggctcgaatctaactctg

SEQ ID NO: 62191 - DNA, 347 bp, Zea mays
aaacgacgaggggatgccgatttaccagaggcccttcatgaaggggaagctctacattcatttcacggtggagttccccgattcgctggcaccagagcagtgcaaggctctcgagtcggtacttccgccagagccttcgtccaagctgacagacatggagatcgatgaatgcgacgagacaaccatgcatgatgtgaacaacatcgaggaagagatgcgcaggaagcaggctcatgctgctcaggaggcgtacgaggaggacgatgagatgcctggtggagcccaaagagtgcagtgcgctcaacagtaagcagactaccataatgggattcaaggcactttggttg

SEQ ID NO: 62192 - DNA, 345 bp, Zea mays
cttttggagactgttattggaaaaattgcagatttgaagttaaggctgaccgtttttctgtgataaaggaagctatgacaaaggagtatgagaatttcaagtttcggcagccataccaacaagtcctatattattgttcgctaatactggaggaccaaacatggccatgggatgaggaattttctgcactttctcaccttgaagctagtgatctgggaatttttttgccccatttgctatcaaaaaccttcatcgagtgttattttgcaggtaatattgaacccaatgaagcaaacaatatcgttcaacatgttgaagatgtcttattcaatgcaccaattagtg

SEQ ID NO: 62193 - DNA, 342 bp, Zea mays
agatgggaacattcatgctggagattttctgaggcgtttctgttcaactcttggaatgaccaatcaagctgttaacgcagccaaggaggcagttcagcgctcagaggagcttgatataaggaggagcccaatctcaattgcagccgccgtcatttacatgataacccaactctcagaggacaagaagccacttaaagatatatccttggctactggtgtggcagaaggcaccatcagaaattcgtacaaggatctgtatccctacgcctcaaggctcatcccgaatacttacgccaaggaagaagacctgaagaatctgtgcacaccttaggaagctttact

SEQ ID NO: 62194 - DNA, 345 bp, Zea mays
gcgcctccatttcggcctctgtcccttgcaagttcaatctcacctccaaccatgggtaaagagaagtcccacatcaacattgtggttattggccacgttgactctggcaagtcgaccaccacaggacacctgatctacaagcttggaggcattgacaagcgtgtgatcgagaggtttgagaaggaggctgctgaaatgaacaagcggtccttcaagtacgcatgggtgctcgacaagctcaaggctgagcgtgagagaggtatcaccattgatatcgctctgtggaagtttgagaccaccaagtactactgcacggtcattgatgccctggacaccgtgacttca

SEQ ID NO: 62195 - DNA, 345 bp, Zea mays
cttgttctctgggatctccgcccccttggcttgactggaaacacggtcgaaaagctatgtgatctttgccacatcacattgaacaagaatgctgtcttcggtgacagcagtgcattgtctccgggtggtcgtcgcattggcgcgccagcaatgacctcgaggggtctactggagaaggatttcgagcagattggggagttcctccaccaggcagtgaccatctgcctgaacatccagaaggagtacggcaagctcctcaaggacttcaacaagggcctggtgaacaacaaggacatcgagaacctcaaggtccaggtggagaagtttgccgactccttcgacatg

SEQ ID NO: 62196 - DNA, 345 bp, Zea mays
ccgatgccaaccccatccaggtcgtcgtcgacgcgatcatcaacagtggaccccgtgaggatgccacccgtattggttccgctggtgttgtgaggaggcaggccgtggatatctcacccctgaggagggtgaaccaggccatctacctcctcaccactggtgccagggagagtgctttccggaacatcagaaccattgccgagtgccttgcagatgagctgatcaacgctgccaagggctcatccaacagttacgccatcaagaagaaggacgagattgagcgtctagccaaggccaaccgttgaacggagcttgtatcctggtgcactctgcgctggaaacttt

SEQ ID NO: 62197 - DNA, 127 bp, Zea mays
  unsure (1)..(127): unsure at all n locations
gtgaaccaagggttgcagctgctgaacatatctcgcagtttaacgaggaagcacgatcaccttttgtaaagaagtacaagactatagttcatcctggtgaagttaacagnatcagggagcttccaca

SEQ ID NO: 62198 - DNA, 205 bp, Zea mays
  unsure (1)..(205): unsure at all n locations
cagcttgttatctctggagcaatccgtgtccacgaggatattggtcttgccgnctcggaagcactagctgctcatggtatacaggagaacttcgacaagcgatcaatctgcgcggatctcaccagcatgagaaagatctctgcgcgcatttcagcagccgtgcctgagagagcttatgaactcggtttggagacccgtctgcctc

SEQ ID NO: 62199 - DNA, 275 bp, Zea mays
tgcggcgacgtggtgcccaaggacgtgaacgccgcggtggccaccatcaagacgaagcgcaccatccagttcgtggactggtgcccgacggggatcaagtgcggcatcaactaccaggcgccgacagtagtgccgggtgccgacctcgtcaaggtgcagcgcgcggtgtgcatgatctccaactccaccactcatcgtcgaggtgttctcccgcatcaacagcaagtgcgacctcatgtacgccaagcgcgcgttcgtgcactggtacgtcggcg

SEQ ID NO: 62200 - DNA, 132 bp, Zea mays
  unsure (1)..(132): unsure at all n locations
ccgtggaganctacaagatctacatcttcaaggtcctgaagcaggtggacgaccacatcggcgtctcctccaaggacgtgtccatcatgagctccgtcatcaacgacatcttcggaaagctcgccgcggagg

SEQ ID NO: 62201 - DNA, 344 bp, Zea mays
ggagatgcttgagaattacaagccagggctcggcgatcaccggtggccactcgtcacacactttgtcgggtgcaagccgtgtggcaaatttggagactaccctgtcgagcgatgcctcaagaatatggaccgtgcattcaattttggggataaccagatcttgcagatgtatgggttcacacacaagtcactagcaagcaggagagtgaagaggatcaggaacgagaccagcaacccacttgagacaaaggatgagcttgggttgcttcatccagcattcaaggctgtgaagacttccacatgataattagagtacaattcaacttgttattttcttggttcgt

SEQ ID NO: 62202 - DNA, 347 bp, Zea mays
  unsure (1)..(347): unsure at all n locations
tgtgtgacttcagatggattgactgtatttattgaaaatanacttggagggaagcatcaccgtttcaaacgagggtacaagaatgtaatagacgaggctattcgtctgaactctattggtgaggagtcacatttggccatgganacaagtgggcatggagcgctgaaagagaaccactggcttgatgatggagcataccttatggtcanacttttgaataaacttgctgctgctagaacactgggttcaagtattggtagtaaagttttgactgatttggttgagggccttgaagaagctgatgtgacagttgaaataaggttaaagattgatcagaatcatgcaga

SEQ ID NO: 62203 - DNA, 331 bp, Zea mays
ggaaggaacgatggagcagaccttcatcatgatcaagcccgacggcgtccagcgggggcctgatcggggacatcatcagtcgcttcgagaagaaagggttctactcaaggggatgaattcatgaacgtggagaggtcttcgcgagaaccactacgctgactttccgacaagctttcttcccggttgtgagtacatcatttccggcccctggtggcgatggtgtgggaggggaaggacgtcgtgttgatggccgcagatcattggggccaccaggcttgggaggcagcccccggtaccatcgtggggatacgccgtggaagtcggcagaatg

SEQ ID NO: 62204 - DNA, 357 bp, Zea mays
  unsure (1)..(357): unsure at all n locations
ggaaggaacgatggagcagaccttcatcatgatcaagcccgacggcgtccagcggggcctgatcggggacatcatcagtcgcttcgagaagaaagggttctacctcaaggggatgaagttcatgaacgtggagaggtcttcgcgcagaaannanacgctgacctttccgacaagcctttcttccccgggttggtggagtacatcatttccggccccgtggtggcgatggtgtgggagggaaggacgtcgtgttgactggccgcaggatcatggggccacaggcttgggaggcagccccggtaccattcgtggggactacgccgtggaatcggcangaatgtcatccatggaagcgat

SEQ ID NO: 62205 - DNA, 331 bp, Zea mays
tcggctcgagaggaggcggacaaggtaagcagcaatcgcaggaaccctagcgccgccgcaccgcagaatgcgttacgagctcgtcgccggtgggaggaataagaagaccaagcgcactgcgcccaagtctgacgatgtctacctcaagctcctcgtcaagctctaccgtttcttggtcaggaggaccaagagcaatttcaacgctgtcattctcaagaggcttttcatgagtaaaaccaacgaccaccaatctccatgcgccgccttgtcaagtttatggaaggaaaggagaagaacattgctgtcattgttggcaacagtcacagatgac

SEQ ID NO: 62206 - DNA, 309 bp, Zea mays
cagcagcaatgcttcctgccttctgcagagcataaaataatacgtacgtcttgcattatcatcaacagcgcattagctggtgaagaggcagagaaggttccaatcagtttctttgagcgcgatggcaaatatatcgagtgccttctgtcagtgaacagatgagtgaatgcagatggcgtcgtcaccggagtgttctgtttcattcatgttcctagtgatgacctccagcagcgctacatgtgcagcaagcctctgagcagacagcactgagaaggctgaaggcttgctcgtacatgcgacatgccatcg

SEQ ID NO: 62207 - DNA, 279 bp, Zea mays
attagcttggctagatgagtcactatgacaatgaccgggtccagtgatgtgctggtctaatcgggatcgtccggcaagaaaagaaatgaaatcaggtgcattgaacctgagcttgtcatatacccaccacatctcaaatataaacatatatcatcatcatctacgatgcaattgtatgacgttatattagtgggtgttgtatggatatattaccagttaggtagtcaaagtgtcgatatatatcgggagtatatccaacaacaccctattacatcatct

SEQ ID NO: 62208 - DNA, 346 bp, Zea mays
  unsure (1)..(346): unsure at all n locations
ccgcctacttgactcctcccgaacttccacatctctgctctgccatccagtctcccatccctgaaaacctcacaaaaccctcgtttgctccccaccaccccgccgcgccgccgcctgtaccagctgcgtcaagatgagtcggcaccctgaggtgaagtgggctcagaggatcgacaaggtttacatcactgtacagttacctgacgcaaaggatgctaaggtcaatttgatccagatggtgtcttcacattctctggcagcgctggtacaaacttgtatgaattgaaactagatctgaatgacaaagtaaacgttgaggctagcanaataagtgtgggggtcaggt

SEQ ID NO: 62209 - DNA, 321 bp, Zea mays
ctcgctcaaaggaagcatttcccatctgtgaattggctcatttcctttcgaaatactccaaggcccttgagtctttttacgagaaattcgatccagatttcattgatattaggacaaaagcacgtgaggtgttgcagagggaggacgatctgaatgaaattgtgcagcttgttggtaaagatgcgctggcagaatctgacaagattacgctggagacagcaaagctttgagagaagattatttggcacaaaatgcattcaccccatatgataagttctgcccattctacaaatccgtttggatgatgcgcaacattatcac

SEQ ID NO: 62210 - DNA, 331 bp, Zea mays
attcctccccaaaacacatcctgcgatcctcgaagcctccgccgacatcgatcatgtcggcctactgcggcaagtacgcggatgagctcatcaagaatgctgcctacatcggcacccctggcaagggtatccttgctgctgatgagtcaactggcaccattggcaagcgcctttccagcatcaatgtcgagaacgtggaggagaaccggcgggctctccgtgagctctgttctgctgccctggtgccctccagtacatcagcggtgtgatcctcttcgaggagaccctctaccagaagaccaaggatggcaagccttttgtcgatgtcctc

SEQ ID NO: 62211 - DNA, 340 bp, Zea mays
  unsure (1)..(340): unsure at all n locations
gctgcctgcctgcctgcctgcctgcaaaaaggagtttgtcatggctctaagcgcatcctcaaggagctgaaggacctgcagaaggacccccccacatcatgcagtgcaggtcctgctggtgaggacatgtttcattggcaagcaacaattatgggaccacctgacagtccctatgctggtggtgtctttttagtgaacattcatttcccgccagattaccccttcaacctccanaggtttctttcaagacaaggtcttccatcctaatatcaacagcaatggaagtatatgccttgacattctcaaagagcagtggagccctgctattgacatttctaag

SEQ ID NO: 62212 - DNA, 342 bp, Zea mays
  unsure (1)..(342): unsure at all n locations
aaagctggtcctctccactgcaacctggcttggggggaagaacgatttcttggctttgcataccttatagttggtgggctctgcattttcctggcatttgcattcaccttgctgtacttcgtaaaaccaaggaaactgggagaccacaactacttatcctggaacagacgctaggatgtttcggaacaccaagtgtccgtactactcgaaatgtagcttgtatgaatgaaatgctctgaaccagaaatgtcgatgggcataagcaagcatggttcagganagaacttcatgtatattctttacgaaggggtctaggtggctacgttatttttgtttcttgtg

SEQ ID NO: 62213 - DNA, 343 bp, Zea mays
tgattagagagctcagggagtccattgagttaccacttatgaatcctaactctttcttcgggtgggaattaagcctcctaagggtgttctactctacggtcctccaggaactgggaagaccctattggcaagggctatcgcaagtaacatcgatgccaactttttgaagattgtttcaagtgctattatcgacaaatacattggagaaagtgctcgtttgattagagaaatgtttggctatgcacgtgaccaccaaccatgcatcatcttcatggatgaaattgatgctattggtggtcgaaatttagtgagggactagtgctgatcgtgagattcacggacg

SEQ ID NO: 62214 - DNA, 265 bp, Zea mays
cgtctttggctgcacccctggcaccgcgtggaccgtcgtcaactcttccacttcgcgatcacataccactttttccattggaagaaaggaacaccttttgctgatgaccagggaatgtacaacacattgacttggtgggaacaaatggacaatggcaaacagcttactcgtaataggaagttcctcattgttgttcctgttgtcctgtatctgatagctttgcacccacagactaccaacaacctatgctcttcctacataccct

SEQ ID NO: 62215 - DNA, 345 bp, Zea mays
tggagatccagcaagacctggacagaagtggcacgtcttctacgcactgagtacccagagcaaccaatggttaaccttgagatgtgcatgactggtctggacaagaagaaagcttgtgtctttttcaagactaatgctgatgggaacacaacatgtgccaaggaaatgacaaagctctctggcatctctgaaatcatcatgcagatggagatctgcgattttgactcgaaccctgtggctactccatgaatgcgatccatggctctgcattctccacaatccatgtgacgcccgaggacggtttcagctacgccagttacgaggttatgggcttggatgccactg

SEQ ID NO: 62216 - DNA, 327 bp, Zea mays
catgtatacacgtctgctgcaagggtatgatagtatggatcctgatcaaaagtcggcctcttcttacgctgcaaagcatctgaggttaatgatgtgtggatcatcagctcttccttccccacttatgaagaggtgggaggaagtgacaggccatcgtcttttggaacgctatggtatgactgagtttgtcatggcactgtctaatccattgcatggtatccgaaagaaggtacagttggtaaacctcttccacgcattgaggccaagatcattatggaggacggggctgaaactacaactggagttggcgagctctgcattagaagt

SEQ ID NO: 62217 - DNA, 262 bp, Zea mays
gcacaatagtgtaccaacaatggcagccaaaatattttgcttcttatgctccttggtgtttctgcaagtgttgctaccgcaaccattttcccacaatgctcacaagctcctatagcttcccttcttcccccatacctctcaccagcggtgtcttcaatgtgtgaaaacccaattgttgaaccctacaggatccaacaggcaatcgcaacaggcatcttaccatatcacccttgttcctccaacaaccgtcagccctattaca

SEQ ID NO: 62218 - DNA, 307 bp, Zea mays
  unsure (1)..(307): unsure at all n locations
aagcgccttgccgcgagctacctcaagtgtgggaaaggcaagtgtggcttgacccaaatgaagttagtgagatctccatggcaaactcncgccagaatatccggaagttggttaaggatgggtttatcatcaagaagcctcataagatccactctagatcccgtgcaagaagggcacatgacgccaagcanaagggacgccactcaggatatggtaagcgtagggtaccagggaggctaggctacccaccaaggttctgtggatgaggaggatgcgtgtgctgaggcgccttctccgcaagtatcgt

SEQ ID NO: 62219 - DNA, 337 bp, Zea mays
  unsure (1)..(337): unsure at all n locations
ganaattcgaagacgaggagcagctacactgcggacggacttgggcatggagggccagttccaggttggcaaggaggaggtcatccaagcatggtacatggacgacagtgaagaggaccagaggcttcctcatcatcgcgagcccaaagaattcatccctctcgacaaactttccgaactaggaatattaagctggcgcctaaatgctgatgattgggagaagatgagaacctcaagataattcgtgaagccaggggttactcttacatggtttgctaataagtttatttttgggcacttgttgttttgttactctaccttgagtagcaggtcaata

SEQ ID NO: 62220 - DNA, 341 bp, Zea mays
cgctcatcgagatcctctccaagcactcctccgacgaggtgtcctcggccagcgcgacgagcctgagcgctggacgtcggacgccagggcgctggacgcgttcagaaggttcggaagccggctggtggagatcgatgaagcggatcaggacgatgaacgacagcccgacgttgaagaaccggaaggggccggtggagatgccgtacatgctgctgtaccccaaacgtcggatgtcaccggcgagaagggcgaggggctcactgccatgggcattcccaacagcatctccatatgagcctcctcactgcctgagcggatggtttgtagatgttctgttacgc

SEQ ID NO: 62221 - DNA, 339 bp, Zea mays
  unsure (1)..(339): unsure at all n locations
atccagggcatctctgacggtattgaggcactgattgctgaggggctgtggagatgattgtgcctggtgttatgcccactggctgcttcccagtgtacttgaacatgcttgatgagcccaaagagggatatggctcccgcagtgggtgtgtccgccggtacaacacattctcctgggtgcacaatgcacatctnaaggccatgcttaagaagctccgggctaacatcccaatgtgaggatcatatatggcgattactacactccagttgtccagttcatgcttcagcctgagaagtttggttttgccanacaactgcctagggcatgttgtggggctcc

SEQ ID NO: 62222 - DNA, 349 bp, Zea mays
cagacttctgctgcagcgcctccgccgccgccgccgcatctacgcagtcgatccgccgcagcccgaggcaagatggttctccagaacgacattgatctgctcaacccgccggcagaactcgagaagctcaagcacaagaaaaagagactcgtccagtcgcccaactccttcttcatggatgttaagtgccaggggtgcttcagcataaccactgttttcagccactcccagactgttgttgtgtgccctggctgccaaactgtcctctgccaacccacaggaggaaaggcaaggctcactgagggctgctctttccgcagaagggagactagagcggatgtggtcttca

SEQ ID NO: 62223 - DNA, 254 bp, Zea mays
cgctcatcgagatcctctccaagtactcctccgacgaggtgacctcggccagcgcgacgagcctgagcgctggacgtcggacgccagggcgctggacgcgttcagaaggttcggaagccggctggtggagatcgagaagcggatcaggacgatgaacgacagcccgacgttgaagaaccggaaggtgccggtggagatgccgtacatgctgctgtaccccaacagtcggatgtcaccggcgagaagggcgaggg

SEQ ID NO: 62224 - DNA, 342 bp, Zea mays
  unsure (1)..(342): unsure at all n locations
ggctcggagaacgccgcggcgaccgccaagtccgacgtctacagcttcggcgtcgtgctgttcgagctggtcacgggcaagaaaccgctgggcgacgagtaccctggggcgcagaaggaggcgagcctggtgagctgggccagggcgatggtgaaggcgagcctcgcgccgagcatcatcgaccccaagatccgcgacaccggaccggaacggcagatggaggagcgctcaggatcgcctacctgtgcaccgcggagctgccgtccaagaggctcgccatgcagcagatcgtcggccttctcaaggacatcgagccgaagtgngaagatcgaggggactgaa

SEQ ID NO: 62225 - DNA, 316 bp, Zea mays
  unsure (1)..(316): unsure at all n locations
tgganatgaggggtcagatggaatgggatttggcccattatgttgactgagggtgagagatccttagttgagcgtgtccggcaggagctaaagcatgagcttaagcaggggtacagagacaaacttgtggatattcgggaagagatattgcggaagcgaagagctgggaaactccctggcgacactgcttctaccttaaaagcctggtggcaagctcanctaagtggccgtacccaaccgaggaagacaaggctcgactggtgcaggaaacagggctacaactgaagcagatcaataactggtttatcaaccagcg

SEQ ID NO: 62226 - DNA, 338 bp, Zea mays
gggaaatcgtgagagacataaaggagaagctggcctttgcgccctagactacgagcaggagctggagaccgctaagagcagctcctccgtcgagaagagctacgagctgcccgatgggcaggtcatcacgatcggcgcggagaggttcagatgcccagaggtgcttttccagccgtcgctgatcgggatggaagctcccggcatccacgagaccacctacactcaatcatgaaatgtgacgttgatatcaggaaggacctttacgggaatatcgtcctcagtggagggacgaccatgttccctggcatcgctgacaggatgagcaaggagattactgc

SEQ ID NO: 62227 - DNA, 331 bp, Zea mays
cggctcgagcttggggacaatggagccagctggtctcaatactggaaactcttccccttcctaatataaaatggatatgccccactgcaccttcaagacccgtgtcagtgtttggcgggttcccctccacagcatggtttgatgttgctgatctttctgaggatgctcctgatgacattgagggaatcgatgcctcagcagcacatgttgcgaatttgtgtcaactgaacctgctgacatcaaacttggtgttggcggctttagtatgggtgctgctactgctctgtactctgcaacttgctttgcccatggaaaatatgggacatggcaa

SEQ ID NO: 62228 - DNA, 342 bp, Zea mays
gcggggtggatgtactacgccactggcaacagcagctacatcaccttcgccaccgacccgcggctgcccaagaacgccaaggccttcttcagcatcctcgacttctccgtgttcagctgggacaacaagctcccgggcgcccagctgctgctgtcgcgcctgcgcatgttcctcaaccccggctacccgtacgaggagtcgctagccggctaccacaacgccacagcctcaacatgtgcatgtacttcccgcgcttcgccgccttcaacttcaccaagggcgggatggcgctcttcaaccacggcagggggcagccgctgcagtacgtcgtcgccaactcct

SEQ ID NO: 62229 - DNA, 338 bp, Zea mays
  unsure (1)..(338): unsure at all n locations
gtggttttgcacctaacattcaggaaaacaaagaaggccttaactattgaaggcagccatagaaaaggctggctacactggaaaggtggtcattggaatggatgttgctgcttctgaattcttcggtgagaaagacaagacttatgatcttaatttcaaggaggagaacaacgatggctcaaacaaaatttcaggcgacagctgnatagacctgtacaagtccttgtttctgagtaccctatcgagtcgatcgaagacccatttgatcaggatgactggagcacttatgccaaactcactgatgagattggacagaaagtgcagattgtaggagatga

SEQ ID NO: 62230 - DNA, 340 bp, Zea mays
gatgggaacatccatcaccttaccttcgttgaaaccagcttttgacaagcctaaccccaaacaaggcattggtatgctgtcatggagcagcgacagcactatttcttcaccaggaatgacaacatgccaactgttctttggatatgggatatatgccgccttgagcttgccgctgtgctcgtgcagaaagatccaatccgtgttgaagcatgggaccctacctgacacgccttgttttatgcacagagagccctcacttgtacatgtggacgccatccggtgcctgctgtgtcaacatccccttctgaacttccgaatcgttgatttgaagtggagctcg

SEQ ID NO: 62231 - DNA, 305 bp, Zea mays
gtgctgtcggtggtggtgcaatgatggtgagcggaggtgcggcgtgggtgctgctgcatctggtggtgctgctgccgaggctcccaaggaggagaagaaggaagaggagaaggaagagagcgacgacgacatgggattctccctgttcgactagagttgtgtgtgtcatctggatctcagaagtggtggtttggtcctgttgccgtagttaattttgctgtctgtctgtgaacctgaagaactcttggtaattgttacaagcgacctgttccagtttatgtgagatttgatatgtgtttggaatc

SEQ ID NO: 62232 - DNA, 341 bp, Zea mays
gaagctgcttccaatgctggaccgctacgtcttaagagcaaggtgcagagcgcgcttgggtacatggctccagagtttgcgtgcaggaccgtgaagatcacggagaaatgcgacgtgtacgggttcggcgtccttatcctcgagatcctgacagggaggacgcccgtggagtacatggaggacgacgtggtcgtgctctgcgatgtggtgagggcggctctggacgaaggcaaggtggaagagtgcgtcgacgagaggctctgcggcaagtttccgctggaggaggccgttccgatcatgaagctcggtctggtctgcacttcccaggttccgtctaacag

SEQ ID NO: 62233 - DNA, 331 bp, Zea mays
ttcaactctgcttctgatttgcaacaacaacaactccattcagccagctacctgttgcctacccccagcaatttcttccattcaaccaactggcagcattgaactctcctgcttatttacagcagcaacaactactaccattcagccagctagctggtgtgagccctgctaccttcttgacacaaccacagttgttgccgttctaccagcacgctgcgcctaacgctggcaccctcttacaactgcaacaattgctgccattcaagcaacttgctttgacaaacctagcagtgttctagcttcaacgcatcattggtggtgcctctgttag

SEQ ID NO: 62234 - DNA, 322 bp, Zea mays
tgcacatgcaagaagtcaggctgccttaagaagtatgcgactgctaccagggaggggcaggatgctccatcaactgtaaatgcgatgattgtagaaacccatttgggagaaaagtcggcgttattttggacggtaaaagcagtcttactgcacctatactgcacgaaagaaacgggactgaagttgactcaagcgacgaggaagacgacttctacagaatcgacagctctccccaatacctccgtctccggtgtctagggagtcttcgttccaacaggagactctagtcggcgtcgaggtccagaccatgaacgggcactgt

SEQ ID NO: 62235 - DNA, 244 bp, Zea mays
  unsure (1)..(244): unsure at all n locations
tgtccgagacnccaagcaccagcgcggcggcgcggcggcggcgaccatggcagtcgggaagaacaagaggatctccaagggaaagaagggtggcaagaaaaagaccgtcgaccctttctctaagaaggattggtatgacatcaaggcaccgtcggtgttcagtgtgcgcaacatcgggaagactctcgtatccaggacacagggtaccaggattcttctgagggtctgaagcacagagtctttg

SEQ ID NO: 62236 - DNA, 331 bp, Zea mays
ctcttccatacgaccatacactaactccaaatcccaattgtcaacctctcctcagagttcgagtgaccatgtcggggcgcggaaagggcgggaaggggctgggaaagggcggcgcgaagctcaccgcaaggtcctccgcgacaacatccagggcattacgaagccggcgatccggaggctggcgataaggggcggcgtgaagcgcatctccgggctcatctacgaggagacccgcggcgtgctcaagatcttcctcgagaacgtcattcgcgacgctgtcacctacacggagcacgctcgccgtaagaccgtcaccgccatggacgtcgtc

SEQ ID NO: 62237 - DNA, 294 bp, Zea mays
gttatactgttcccgttctttcacagggggcatggactcgaataagtgagccggtcggtggccgcttgtcctacaaacctccaatctatgacataaacgcaccagatctgtacatccctttcatggcatttggaagcttcatcatcctttcagggtttacattgggtttcatgggaaagtttactccagcagctataaatctgcagtttacaaggcgctcatcggctggggcttccagctcatggtcctgaaaggtctgctctactcgatgggtggtggcgaagtgccatgctc

SEQ ID NO: 62238 - DNA, 348 bp, Zea mays
cgtgatggtaacttgattgttaatggagtagttcaggaggaagaatttgtgttggaaccagccgactacgaaatggatccgctgactgtgcctgaaggctatgtctttgtactgggggataacagaaacaacagctttgattcacataactggggtccacttccagttaagaacatcctcgggagatctgtgctccgatactggccaccatctaggataacagatacaatatatcagcatgacatggtgcagcacacagctgttgcatcctgataatacattgtggcaataccacgtggtgcacgccaatttctcctttccctgcatagctttattgacaattgatat

SEQ ID NO: 62239 - DNA, 350 bp, Zea mays
ttgagattgcgatgaaggagcttatagcgcgcaagatacccttcacgatcagacggtacctacctgatggaagttatgaagactggggagtagacgagctcattgtggaggactcctggaaacgccaggttggtggagactgaagatgctgatctacttggcatggaaaggatgtgtagttacaggtcttcgttgcctcttgagtggatgctgaacagtgaatgaaccaagacgaaacgatgctatgctagatgttaccttgacgtctgtggttgccttggaactctggaaccgtgatggctggtggttgagttatgcttgttcgtttcagtttcagacatgctgtgcag

SEQ ID NO: 62240 - DNA, 351 bp, Zea mays
tctggaggccggcaagatcgagaacgtccccgccccggccatcgccatcgactactggcgcctccccgctaccgccacgctcaaggacgtagtcaccgtcgtccgcgccgacgaggctcaccaccgcgacgttgaccactttgcatcggacatccattgccagggaatgcagctgaagcagtcccctgcgccgatcggataccactgaggatgtttgtgctcttcttaattttgcatcgctaataagcaattgtctttaagggaaggaaaggatgcttattgagttacgagtactgctacggcgattaggatatgttccaaccagttgtctgagagtgagactattatatg

SEQ ID NO: 62241 - DNA, 350 bp, Zea mays
gaaacaatcaaccagcaacactcttctcgtataacataatacagcgaaggtaactcacatggcaacttccatgggttgtctcgtcttgctctgccttgtttcttctctccttcccagtgccgtcctcggccacccatggggtggcttgttcccacagttctatgaccattcgtgccccaaggcgaaggagattgtgcagtccattgtggcacaggctgtggccaaggagaccaggatggcggcatctttggtcagactgcatttccatgactgctttgtcgagggctgcgatgcttcggtgctgttggacaacacagcacatagttagtgagataggtccacccgaacag

SEQ ID NO: 62242 - DNA, 291 bp, Zea mays
atcgttcaaggcctcccgatcgttgagctctcaaggaagaagatggatgccactgcccaagagctctcggaagagaagtcgcttgcttactcatgcctcgagtaaattataccacacacccagagagctattgctaccccctgtgttttgaataaaagaaactccagctccgtccatagattctcactcagaactgctgcacgtcgctgtgcaggcgtgttgctggcttcgcccagcgtgtacgagactacgaggagttgtagccctatttggcctgatgacttgcgagac

SEQ ID NO: 62243 - DNA, 351 bp, Zea mays
ggcaaccgtcaagttccagctcaagaaggtcctttgcatgggtgtcgccgtcggcaacttggcgatggaggagaagcagatccagcagaacatccagatgagcgtcaacttccttgtgtcccttctgaagaagaactggcagaatgtgagatgcctgtacgtcaagagcaccatggggaagccatacagggtgttctaagtatgctcttttgtgaagtctgctaggttctggcagcgaggttttattgaattaaactcttgttaaggatatgtttttggacgatcctatatttcgtcctggcgctactatgtttcagaatggtggtactactataagtatcctagcgctat

SEQ ID NO: 62244 - DNA, 352 bp, Zea mays
acgtgaagttcctcgccgacggatctggagcgtacaccaaggcgctcgacctcgagctcgatctcacggacaaagggctgggcgtgcgctcgaagaggttcgctctcctggccgacgacctcacggtcaccgtcgcaaacatcgaggaaggcgggcagttcacgatctccggcgctgaggagatcctgaaggcgctttagaagctccgtctcctctagaagccgcagcaacgatcggtctatagtttgaactcgcctttgaataacttgtcgttgggcaaggtctagttcggtgttgtgtatggaacggtcgtcactgagtcatgcacgatttggtatccgtgttgtttatg

SEQ ID NO: 62245 - DNA, 326 bp, Zea mays
agaagaagtttgagacagctctcggcgtccttaaaaaggaaaagatcactattgatccagatgacccagcggcagtttctcaatatgctcaagtcatgaagactgtaagggagaaggcggatcttctttctgattctcaaaggattaaatataccattgagaccttcaccaagggcatccctgatgcacggacttacttgaatactcttcaacagctcagaataaagagtggtcttatagatcatattggagtcgaacctttgatgatggaagctcttgagaagattgagaaggatattaagaaaccacttttaaggagtgacaag

SEQ ID NO: 62246 - DNA, 347 bp, Zea mays
gcaagcgccaaccatcgagcagaaagaagatcgtcgagatcgagcataagccatggcggcctctgtttctgcctcttgccttattggcctgtcgtcgttggcggtggtgctggtggcgctggcgtcggcggcgtcggcgcagctgtcgtcgacgttctacgacaggtcatgccccaacgcgctgtccaccatcaggagcggcgtgaactccgcggtgaggcaggagcctcgcgtgggggcgtcgctgctcaggctccatttccacgactgctttgtccggggctgcgacgcgtcccttctgctgaacgacacgtcaggggagcagagccagggcccgaatctaactc

SEQ ID NO: 62247 - DNA, 349 bp, Zea mays
gcacatcttggagggcagctcctacatgatgcttgccaagaagctcggcgagctcgatcccttgatgaagcccaatcaggaccggtacgcgctccgcacgtcgtcgcagtggcttggcccccagattgaggttatccgcgccgccaccaagtccattgagcgcgagatcaattccgtcaacgacaacccgctcatcgatgtcgcccgaagcaaggctcttcacggtggcaacgtccagggcacgcccatcggggtgtccatggacaacacccgtctcgccatcgcagccatcggcaagctcatgtttgcgcagttctctgagctcgtcaacgactactacaacaacggc

SEQ ID NO: 62248 - DNA, 258 bp, Zea mays
ctcgtatgaacctggcagccggggacacaaggaagccgacgaattgagcgcgagagttggatacatgcagacccacggttacatatgggtaccgccgacccttgcatagaagagaatacgaattgtttgtacctaggaagatccgagtgtctcacaataaagctgctgtgcgtatatgctcattttcgctatatcgcctggcgttgtaataactaataatgttgtgctggatatggaatacaattgcgtgttccattc

SEQ ID NO: 62249 - DNA, 358 bp, Zea mays
  unsure (1)..(358): unsure at all n locations
ggtgattgtgagtgganagctcagggcccaaagagccaagtccatgaagttcaaggatggctacatgatctcatctggtcagccagtgaacgagtacattgactcggctgtgagacacgttcttctcagacagggtgttctcggtatcaaggtgaagatcatgcttgactgggacccgaaggcaaggttggcccgatcactcctcttccggacctggtgaccatccacaccccgaaggacgaggacgagccgcgccctccggtcttggcacctcctgaggtgtaaggtcccaactgtgtccttgaaatggcagtttgatcgggtcctagataggtttctatcttacgataaggacaat

SEQ ID NO: 62250 - DNA, 304 bp, Zea mays
gtttactgttgtacaagctacggatagctgaccagttctttgtgcagtggccccagctgcagcataagtatcctcgagcatgctacgcaggtcgtttgatgtgaagattccaccataactaaggggttcagatacaatgacaatatatgtatacttcgacaaatacaaatgtggctgccttaaaagaagctttacaacaacacgcttcatattgggctggaatgtattagctatagtgttggttgggattacatctagtggatgtcagtaatcaactcatgtggatatcgtcctctaacaaaaa

SEQ ID NO: 62251 - DNA, 355 bp, Zea mays
cacggatcttgaccaagaccttcacgtctgatttccctcatgtcgagaggtatttctggaccatggttaaccagcctaacttcaagaaggtcattggtgaggtcaagcaggcagagtctgcacctcctattccgaaaaaggctgctccttctaaggagccaaaggcaaaggatgtcaagaaggaggctccaaaggaggcccccaagccaaaggtggttgaggcaccagcagaagaggaagcaccaaagccaaagccaaagaatcctcttgacttgctgccaccaagcaagatggtccttgatgactggaagaggctatactcaaacacaaagactaacttccgggaggttccatc

SEQ ID NO: 62252 - DNA, 251 bp, Zea mays
gcctcaggagccaatagtgactctctgtggccacctcttctgctggccgtgcctttaccggtggctgcacattcacgcacactcgccagaggcccagtgtgcaggcctcgtggggaggacaagctcgccccttatgggcgggcaggacgcgtcgaccgaggtcgagacatgccgaggcgagatctcacgctcacggcagtgctgctaagccacggccatctacacacttgcatgcatgcatgcatcatgtc

SEQ ID NO: 62253 - DNA, 351 bp, Zea mays
tctgaaggctcttgaaatgggtgctgtcgagaccctgattgtgtgggaaaatctggatatcaacagatatgtgatcaagaacagtactactggggaaattattataaaacatctgaacaaagagcaggaagctgaccagagcaatttccgtgacccatctaccaatactgatctcgaagttcaggaaaaaatgtctctcctggaatggtttgccaatgaatacaagaagtttggttgctcgctggagtttgtgaccaacaagtctcaggagggatcccagttctgtagaggatttggtggcattggtggcatgttgcgctaccagctggatatccgttcttttgatgagct

SEQ ID NO: 62254 - DNA, 180 bp, Zea mays
cggggaattctgtgggcctaccgtcaacagactggtgaagaggatgctcagcttactccgctcttgcgccttggagctggagcatgtgctggtatcatagctatgtctgctacttacccgatggatatggttaggggaaggatcactgttcagacagacaatctcctacagtacgtggta

SEQ ID NO: 62255 - DNA, 332 bp, Zea mays
agatcctcttcctcgagttctcctcaaccaaattcaaggtcacagcggcgaacctctcggctatcatgtcaggccgcggcaagggcgggaagggtctgggcaagggcggcgccaagcgccaccgcaaggtgctgcgcgacaacatccagggcatcaccaagccggcgattcgcaggttggcgaggaggggcggcgtcaagcgcatctccgggctcatctacgaggagacccgcggcgtgctcaagatcttcctcgagaacgtcatccgcgacgccgtcacctacaccgagcacgcccgccgcaagactgtcaccgccatggacgttgtctac

SEQ ID NO: 62256 - DNA, 345 bp, Zea mays
cacttgtgcaacatttgctcaagatgtcattgaaggtagagcaagcgtttcacaagctcacgagcacaaacaccagcccctgatctttggacctgcaagtattgttggtggtggtctaaccagtgaaagggaaagaatgacagcgcaagtttttcagcctagctacaggatgccaacaatgagcattgaagaagctggtttgcgcgagatgaaaatgatggagaaatggcaagataggaccgctgagctgatgaaagaatcaacctccgcgtggcacaaggatggcagcagctcggcccaagaggatgaggacgccgaggaggaaaaagcaagagcgtgggacga

SEQ ID NO: 62257 - DNA, 348 bp, Zea mays
gcctcgggtcaaaccctaagcagggagttgatttatccgctgcagccatgagtaagttgcagtctgagtctgtcaaggatgccatctcccagattgttggggatgccaaggagaagaataggaagttcactgagactgtggaacttcagattggtctgaagaattatgatccacagaaggacaagcgtttcagtggctctgttaagttgccccatatccctcgtcccaagatgaaggtgtgcatgcttggtgatgcccagcatgttgaggaggccgagaagatgggacttgactacatggatgttgaggctctcaagagaatgaacaagaacaagaagcttgttaaga

SEQ ID NO: 62258 - DNA, 266 bp, Zea mays
ccgcgacttcgtgctcgtcctcaacaaggcgctcgccgccgacgaccgcgtcgagatctgccagctccccgtcggcagatcgcgacgttaggaagtccgcatcctcattccaatcataatagacgacccgcagcattaattatccaccggctttttttttggctctttcttgcccctgtaatcttactcctcctcttcctacttaggaattgtcgtcgccgtttcgatacgtaaatcacgagatcggtaatacagtaatgctcctc

SEQ ID NO: 62259 - DNA, 350 bp, Zea mays
cgccgctcgaaaccggcagaagtttagaagaacggggagggaagcacgcccccaaacgttccgaggtttcgcctctcggagcgcaccaacgccacccggagcgactcgccaccggcgcggagaaggagggcggaggctaggcgatggcggacgagaatgaggctgggaagaaagaggaagaggaatttagcacaggccctctgtcagtactaatgatgagtgttaagacaacacccaggttctcatcaattgccgcaacaacaagaactgcttggccgggtacgtgctattgatcgccactgtaacatggtgctcgagaacgtgcgggagatgtggacagaggtccccaa

SEQ ID NO: 62260 - DNA, 263 bp, Zea mays
accaacctggttccttacccgaggatccacttcatgctctcctcctacgcaccggtgatctcttctgcgaaggccttccacgagcagctgtctgtggcggagatcaccagcagcgcgttcgagccggcttccatgatggtcaagtgcgacccacggcacggcaagtacatggcttgctgcctgatgtaccgcggcgacgtggtgcccaaggacgtgaacgccgcggtggccaccatcaagacgagcgcaccatcagttcgtga

SEQ ID NO: 62261 - DNA, 342 bp, Zea mays
ctccactttgtaaagagataccagaggtatgagaagaggcactccaacattcctgctcacatctctccatgcttccgtgtgaaggaaggtgaccatgtcatcattggccagtgcaggcccctgtcaaaaactgtgaggttcaatgtcgttaaagtcattccagctggatccgcagctgctggaaagaaggccttcacagcagcctgagtttatagactatgttccatgagtagtctatagaatgatgtctttttgaattcaaagagatctctcttctaggctggtgcttttcgactatagatttggagattgttccaatgtccgtgcaatcatctgaacatg

SEQ ID NO: 62262 - DNA, 343 bp, Zea mays
ctactggtgttatatgcaatggagtgaagagcgtaatcaaggaaggccacaagagctttcccactggacacagttcatggtcttttgctggtctaggcttccttgcatggtacttagctgggaatctcacagcctttgaccgcaaagggcatattgcgaactatgcattgtgttcctgcctctccttactgccgcacttgtggctgtttctcgagtggacgactactggcatcattggcaagatgtatttgcagggggtcttataggtcttacagttgcttcgttttgctacctacagtttttcccatatcctttcgatggcgatgctttgtggcctcacgca

SEQ ID NO: 62263 - DNA, 346 bp, Zea mays
gatcagtataatcaggctgactttgcggaaacatactcagacgctaaattcttcattattaaatcttacagtgaagatgatgttcacaagagcgttaagtacaatgtgtgggctagcactcccaatggtaataagaaacttgatgctgcctatcaagaggctaaagaaaaatcaagcgaaactcctgtttttcttctattctctgtgaatgcaagtggccagtttgtcggccttgctgaaatggtgggtcgtgttgattttgaaaaaacagtagagcattggcaacaggacaaatggactggttgtttcctgtcaagtggcacattgtgaaggatgttcgaacagc

SEQ ID NO: 62264 - DNA, 347 bp, Zea mays
gacctgcacatattcccaatttcttgctcagaagactccatcctgctgtgtatctctctcatcattttataatgacacaattgtgaactgcccgacatgctcatgtggctgccagaacccaagtgggtcaaactgtgtgaacgaggattcacctaatctacaagccgcaattgatggtcctggtaaatggactggccagcctcttgtacaatgcacttctcacatgtgcccaataagaatccactggcatgtgaagctcaactacaaggaatactggagagtgaaaatcactatcacgaacttcaacttccgcatgaattacacacagtggaacttagttgctcagc

SEQ ID NO: 62265 - DNA, 289 bp, Zea mays
caccctaccacctctgctgcctctccgcgatgccgacgcgctcccgttctccaccgggcgcttcgccgacatcctcgccatgttcgcgccgacgagatccgacgccatatcgcaatatatacggtcgacgctcgacacctgcgagaacacgcgcacgctccccggcgagaaggccgcctgcgccagctccctcgagtctctcgccacgatacccgccgtgctcctcgggacacgcaacgtccgcgctttctccggcgacatgcccaccgatcctgccggcacgtcggcg

SEQ ID NO: 62266 - DNA, 322 bp, Zea mays
cattggggggagaattctggaaagccaacttcaacgtataggagttcttagtgctggtgatacaataagtaaacatccagcctttgatacaaactacaaaattttgtgggccaatcatggagatgcaataagcattcagtactctggaactcctgctctgaagggagattttgttcggtacgggaagcgaactactcagggaattctaaacgatttgaggaatgcacttgctagatactacttgaataacttcgttgatgggactaagcaggatgccatggatctacttcaaggacatgacatgacatctgttagtcgagac

SEQ ID NO: 62267 - DNA, 343 bp, Zea mays
gttacattaggtgatctggttgtgaaggatcaggaatttattgaagctacaaaggagccatggcttatcttcatggttgcaaaatttgatggcattcttgggctaggctttcaagaaatctctgttgggaatgcaacaccagtgtggtataacatggtgaaacaaggtctcatcagcgaccctgttttctctagtctggtttaacggacatgctgatgaaggagaaggtggtgagattgtgtgtggtggaatggattctagccactacaagggcgatcacacgtttgtcccagtcactcggaagggatactagcagttcaacatggatgatgtcctggttgat

SEQ ID NO: 62268 - DNA, 332 bp, Zea mays
aacacaggctcctgttggtgttcttgcaactgatgcagcagggggcacaggggcagcaggttgggccagagttgcaggcacaccaacacaggctcctgttgccacagctgaaacggcacctccaagtgcccaacctcaggctgctccagctgctacggttgctgctcctgatgatgctgatgtgtacagtcaggcagcttcaaaccttgtatctggcaacagtctagaacagactatccaacaaattcttgacatgggtggtggtacatgggaacgtgatacagttgttcgtgctctacgtgctgcatacgataaccctgagagagctatag

SEQ ID NO: 62269 - DNA, 276 bp, Zea mays
aatggaagcatatgtctcgacattcttaaggtgcagtggagccctgctttgacaatctctaaggttttgctttctatctgctccctgcttactgatcccaacccagacgatcctcttgtccctgagattgctcacatgtacaagacggatcggcctaagtacgaggcaacagcccgcagctggacccagaaatatgccatgggatgaaaatgaaatgaagtcgaaactccatattcggcattactgcttaaatgcagacgattgtggtgttgcccc

SEQ ID NO: 62270 - DNA, 276 bp, Zea mays
gcgtggcgtcgatgggtgtgatgcggccggagctcgtcatgaagtccatcgtgcccgtggtcatggctggtgtgctcggtatctacgggctcatcatcgccgtcatcatcagcactgggatcaaccccaaggccaagccctactacctttttgatggctacgctcacctttcgtccgggcttgcctgtggccttgctgggcttgcagctggcatggccatcggcattgttggtgatgctggagtcagggcgaatgcacaacagccgaagctttttg

SEQ ID NO: 62271 - DNA, 279 bp, Zea mays
accgccgtcacgccatctcgccgggggcggaaccccgaccgcgagtatggggaacatcttcgtgaagaagcccaagatcactgacgtcgatagggccatcctcaccctcaagacgcagcgccgcaagctcgcccagtttcaacagcagcttgagaaggtaatcgaagcagaaaaggaagctgcacggcagttggttcaacagaagaagagagacagagctttgattgctctgaagaagaagaaagctcaggaagagctgttgaaacaagttgacacatg

SEQ ID NO: 62272 - DNA, 277 bp, Zea mays
aatggaagcatatgtctcgacattcttaaggtgcagtggagccctgctttgacaatctctaaggttttgctttctatctgctccctgcttactgatcccaacccagacgatcctcttgtccctgagattgctcacatgtacaagacggatcggcctaagtacgaggcaacagcccgcagctggacccagaaatatgccatgggatgaaaatgaaatgaagtcgaaactccatattcggcattactgcttaaatgcagacgattgtggtgttgcccca

SEQ ID NO: 62273 - DNA, 276 bp, Zea mays
ccacaagctccgcaacaagttctactgccccgcggtcaacatcgagcgcctctggtcgatggtgcccgccgaaaaggcggcggaagccggcggcgacaaggccccgcagatcgacgtcacgcagttcggctacttcaaggtgctcgggaagggggtgctgccgcccaagcccatcgtcgtcaaggccaagctcatctccaaggtcgccgagaagaagatcaaggccgccggcggcgccgtcgtgctcaccgcctagttttcagtccttattcgcct

SEQ ID NO: 62274 - DNA, 279 bp, Zea mays
gcccgatgatgctaaagatgcaaccttgtcagaatgtgctcagaaaggcattgcagtgagaccacggaaaggtgacgccctccttttcttcaaccttaacccagacggcaccaccgactcggtgagcctccatggtggttgcccggtcataaaaggcgagaaatggtcggctacgaagtggatccgtgtggcctcgttcgataaggtccatcacccacagggcaactgcaccgacgagaacgagagctgcgcgaaatgggcggccctaggggagtgcat

SEQ ID NO: 62275 - DNA, 271 bp, Zea mays
tcctgcttcaagttcaagctctgcaaggtgaggtctgttcagtttggccagaaaggcatcccctacctgaacacctacgacggccgcaccatccgctaccccgacccgctcaaggccaacgacaccatcaagatcgatctagagaccaacaagatcatggacttcttcaagtttgacgtcagcaacgtggtcatggtgaccgacgggaggaacaccgggcgtgtaggagtgatcaagaactgggagaagcacaagggcagcttcgaggtca

SEQ ID NO: 62276 - DNA, 271 bp, Zea mays
ctccagcgcctccaccttcctcgccgcctcactccctctgaggtcgcagatccgtccggttagacgaagccgcccgcacccatggcctccggtgagctcgcctgcacctacgccgccctcatcctcagcgacgacggcatcgccatcaccgccgagaagatcgccaccatcgtgaaggcggccaacatcaaggtcgagtcctactggccggcgctcttcgctaagctcctggagaagcgcatatagaggatctaacctctccgtgggatct

SEQ ID NO: 62277 - DNA, 269 bp, Zea mays
agaataatggccttctcacagcaaggcccaagggcagtgtgcatcatttcagcaactggagctatttctacagcaacccttcaccaggattcagactctggtggtgtggttacatatgagggccgatttgagatcctgtgcctttctgggtcatacttggtggtagaggatggtggcacacggtcccgaagcggaggtctttgcatagctttgtgtggtcctgaccacagggttattggtgggactgtaggcggagtcctgacagcagc

SEQ ID NO: 62278 - DNA, 272 bp, Zea mays
cgcagttccccgggaggaccgtcacgctcgagcaccagcccggagcgacttgctggggagttgcttacagaataaaggaggaagatcaggagatagctttggagtatcttgaggtcagggagaagcaatatgatgagaaggtttaccttgacttgtatactgattcatcgcccaaagtaccagctgtcgaaaatgtgatggtatacttcgccaccagtaacaaggagaacaatcaaaactatcttggtcctgcacctctggaagaaatgacc

SEQ ID NO: 62279 - DNA, 273 bp, Zea mays
caaggagtaggcttctttacaaacgaggagtacacaacaaactctgaggggttggtcatccacgatggcacatggacgtacaagatccccacggtcgacaccatcccaaagcagttgaacgttgagctgatcaacagcgcccgtgaccagaagcgtgtcctctcttccaaagcatccggcgagcctccgcttcttctagctgcctcggtgcactgcgcaatgagggaggccatcagagctgccaggaaggaattctcggtctgcactggtcca

SEQ ID NO: 62280 - DNA, 273 bp, Zea mays
catcactgcccaaatcatatctgctagtatagcgggtgatatggttcttgcttctgcctactcgcatgagttgccacgatatggtcttgaagttggtctgaccaactatgcagctgcctactgcactggccttctgttggctcgccgtgtgctcaagatccgtggtttggatcaggagtacgagggcaatgttgaggccactggtgaggacttctctgttgagccagttgatgagaggaggcctttccgtgctctcttggatgttggccttat

SEQ ID NO: 62281 - DNA, 219 bp, Zea mays
tggactggctgtcgtgcgagtgatttggttcctcccaagataattggaggctaaatatagaatacagtacaagagtattgtgcttctacgatgtctaggattgatagattgatggcaactactgagtggcatgagctctatcgagcgactaatttgcaggcaatgtgtaccatgagttcggaccactgtccgttattaatgcaaggtcattcttcttgt

SEQ ID NO: 62282 - DNA, 271 bp, Zea mays
  unsure (1)..(271): unsure at all n locations
ctccagcgcctccaccttcctcgccgcctcactccctctgaggtcgcagatccgtccggttagacgaagccgcccgcacccatggcctccggtgagctcgcctgcacccacgccgccctcatcctcagcgacgacggcatcgccatcaccgccgagaagatcgccaccatcgtgaaggcggccaacatcaaggtcgagtcctactggccggcgctcttcgctaagctcctggagaagcgcactnatgaggatctaatcctctccgtgggat

SEQ ID NO: 62283 - DNA, 274 bp, Zea mays
gttcctcaagcccggcaaggccgtgatcctcctgcagggccggttcgccggcaggaaggcggtgatcgtgcgcgtgttcgaggagggcacccgcgaccgcccctacggccactgcctcgtcgccggcctcgccaagtacccagcagaaggtggtccgcagggactcggccaagaagacggcgaagaagtcgcgcgtcaagtgcttcatcaagctcgtcaacttcacccacctcatgcccacccgctacaccctcgacgtcgacttcaaggacgt

SEQ ID NO: 62284 - DNA, 269 bp, Zea mays
ggaaaagatatcacctcaatgatctcccttcccgtatggatttttgagccgatgtctttccttcaaattatttgtgaaccaatgcaatttgaagaattgctacgacaggcaagcaccaacgaagactccgctctccgtcttgcttatttggcttcctttgcgattgccggatataattgtgccattagaacaaaaaaaccattcaatccactacttggagaaacatttgaatttttgtcacctgaaggaaaatataaatattttgcaga

SEQ ID NO: 62285 - DNA, 270 bp, Zea mays
tccgccctcaggttgacaagcttagtaattacctcaagtaccaaaatgactacaaggtgataaacatggatcagtggatgggatttatgcggttctgtaatgagataaacttcccatcactttccaattatgattcagaccttgcttggcctttgattctagacaattttgtttagtggctaagagaaaataaaagctagatcttctattcatgtggtggtgaagttgtcattcaaaatgtaatattcaagaattttctgcaccctggag

SEQ ID NO: 62286 - DNA, 272 bp, Zea mays
gctgcttctgagggcccactcaagggtattatgggctacgtggaggaggatctggtttccaccgacttcaccggtgacagcaggtcgagcatcttcgacgccaaggccgggattgccctgaacgaccacttcatcaagctcgtctcttggtacgacaacgagtggggctacagcaaccgcgtcgtcgacctgatccgccacatgttcaagacccagtagagagagatatttctgcctccctatcgtgggtcgtccccaatggcctttggtcg

SEQ ID NO: 62287 - DNA, 265 bp, Zea mays
aggctgaagcctatcaaggagagtctcgaagctaagtccaacacagtggaatggagtgccttgattgctcaggcaagcatggcgagtgtgaacctatcagcacaggcgtactggactcctgatccatctttcaagagctacttgaactacggagctggcaccagtgaggtggaagttgatatcctaacaggagcaaccacaattctgcgaacgacctggtgtatgactgcgggcagagcctaaaccctgctgtagacttgggcca

SEQ ID NO: 62288 - DNA, 266 bp, Zea mays
gctgcttctgagggcccactcaagggtattatgggctacgtggaggaggatctggtttccaccgacttcaccggtgacagcaggtcgagcatcttcgacgccaaggccgggattgccctgaacgaccacttcatcaagctcgtctcttggtacgacaacgagtggggctacagcaaccgcgtcgtcgacctgatccgccacatgttcaagacccagtagagagagatatttctgcctccctatcgtgggtcgtccccatggctttg

SEQ ID NO: 62289 - DNA, 269 bp, Zea mays
gagagtacaaccacttcaccctttctctcagttgatccagcgctgccttcaaagcatgggctttcagtagatcaattaaggggccttcttctcaatgagcaagagagcatgtaccaacgttatgcagctctttttgcgcttaggaatgatggtggagatgctgctgtttctgctattgttgcagctctgagcgtcaatagtgctcttctacgtcatgaggttgcttatgtgttaggtcagctgcaaaacaaagccgcttcagatgcgct

SEQ ID NO: 62290 - DNA, 266 bp, Zea mays
cttctggtggcacacatgatcagatcaagtacctcctatgcccagggttgcattaagccactctgtgatctgcttgtttgcccggatcccagaattgtaacagtttgcttggagggtcttgagaacatcctgaaagttggcgaggcagagaaaaatcttggtgcaggcgatgtcaatgtttacgcacagatgattgatgatgctgagggcctggacaagattgagaacctacagagccatgacaacactgagatatatgagaaggc

SEQ ID NO: 62291 - DNA, 267 bp, Zea mays
gtgttccttctggactcatttattcattcccagtaacatgcagtggtggtgaatggaaaatcgttcaaggcctcccgattgatgagttctcaaggaagaagatggatgccactgcccaagagctgacggaggagaagacgcttgcttactcatgcctcgagtaaattctaccacacccagagagcaattgccaccccaatgttttgaataaaaaaagaaactccaactcgattcatagattctcactcagaactgctgcacgtcgca

SEQ ID NO: 62292 - DNA, 265 bp, Zea mays
cacatggatttgttgtcggccacatatgccctgaagcacaggaaggtggcccaattggccttgtccatagtggtgatgtaatcaccatcgatgtaagtaagagggtaatcgacgttgaccttaccgagcagcagctcgaagaaagacggaggaaatggaccccaccgccatacaagtcgacctgtggagctctttggaagtacatcaagcttgtggctccagcgtctagaggatgcgtcactgatgagtaggatgtgttacattc

SEQ ID NO: 62293 - DNA, 262 bp, Zea mays
cccgtcctgtccttcccttacccggcggcttaaaccctagttctcactcccatcgccgcttcagctccgccgcagcagatggagttctggggtctcgaggtcaagcctggttccactgttaagtgtgagtctggatatggctttgtgctgcacctttcccaggctgctcttggggaatcgaagaagagtgataatgccttgatgtatgtcaaaattgatgatcagaaacttgccattggaaccctctctgttgacaagaacc

SEQ ID NO: 62294 - DNA, 267 bp, Zea mays
gaacaacctcaacatctcgggcgtaggggccgcgggcgttgccggggcggaagggcacaagaagaatcgcatccaggtctccaacactaagaagcccctcttcttctatgtcaacctcgccaagaggtacatgcagctgcacaacgaagtagagctgtcggccctcggcatggccattgcgacggtggtgacagtagcagaaattctgaaaaataacgggcttgctgtcgcgaagagtatcatgacatctactgttgatatcaagga

SEQ ID NO: 62295 - DNA, 270 bp, Zea mays
aaaaggatgcacaccatcacagctagcattggcatgggttcaccatcagggaaacgatgtttgccccatacctggaacaacaaaaatcgagaacttcaaccagaacgtgggggcgctttctgtgaagttgacaccagatgagatggccgaactcgagtcctgtgctgctgcaggtgaaatcttgggtgaccgttatcctcaaatggccaacacctggaaggactctgagaccccgccattgtcttcttggaaatctgagtagccaatctg

SEQ ID NO: 62296 - DNA, 273 bp, Zea mays
caatctagaagcacccctctccctctctctctcttcgccgtccgaagctccgcaccccaatctaatcgacacctcaccgagatgggccgcaagttcttcgtcggtggcaactggaaatgcaatggaaccacagatcaggtcgagaagattgtcaaaaccctgaatgaaggacaggttcccccttcagatgttgtggaggtcgttgtcagccctccttatgtcttccttcctgtggtcaagagccagctgcgccaagagttccatgttgctgcc

SEQ ID NO: 62297 - DNA, 264 bp, Zea mays
cgcacgcgtcggcacgggcgcccccgtctacctggccgccgtcctcgagtacctggccgccgaggtgctggagctggccggcaacgctgccaaggacaacaagaagacccgcatcatcccgcgccacgtgctccttgccatccgcaacgacgaggagctcggcaagctgctgtccggcgtcaccatcgcccacggcggcgtcctccccaacatcaacccggtgctcctgcccaagaagaccgctgagaaggcggcggccaagga

SEQ ID NO: 62298 - DNA, 264 bp, Zea mays
caaacatgagccttggaaaggtggcagtgtcatttacacatactataaaggccatggaacctttcttctcagttctcctttcagcaattttccttggggagttgccgacgccatgggttgtgttgtctcttcttccgattgttggtggtgtagctttggcatcccttactgaggcctcctttaactgggctggattttggagtgcaatggcttcaaatgtaaccttccagtcaaggaatgtgctaagcaagaaacttatggtga

SEQ ID NO: 62299 - DNA, 267 bp, Zea mays
ccgttcttggcaccctacaagaccaagattattgatgttatcgagaagggagagaaacagcccaacatcactattggcattttggtctccgttgtcatcgtgttcgttaccgttctcttcaagctcctgtttggtggcaagaaaccagtggcacctgtgaaacctgcagctgaggcgaagaagcccaaggccgcggagacggacggtgctggaagcagtggtgacaaggatgagaaagaggatgaaaaggaggagacaggcccacgt

SEQ ID NO: 62300 - DNA, 261 bp, Zea mays
gccactcggctagctctcacgctgtgctagagaagagatgcattgggctccagagatgcgtcgtcgccatctcccccgacaacttcggaggagacccctgcccgagcgtgaccaagagggtggcggtcgaggcggtgtgctctcccgccgcttaggcttagcctgcccgcccgcccctacttctccgactcaccgagcaacggatttgaaggccgaaagcgatgtgtgtggagagtggaactgtaagtatcgacttgcatt

SEQ ID NO: 62301 - DNA, 263 bp, Zea mays
gcagcagcagcaaggaggttcccaaagccagaaaggaaagcaacaagaagaagaaaacgaaggaagcaatatattgagtggcttcgcccctgaattcttgaaagaagcgttcggcgtgaacatgcagatagtgagaaacctacaaggtgagaacgaagaggaggatagtggagccattgtgacagtgaaaggaggtctaagagtcacagctccagccatgaggaagccacagcaagaagaagatgatgatgatgaggaagagc

SEQ ID NO: 62302 - DNA, 262 bp, Zea mays
tgatgatattaggaaaaagcactatagaggagttaggcagagaccatggggcaaatgggcagcagaaataagagaccctaagaaagcagctagagtgtggcttggcacctttgacacggcagaggctgcagctatggcttatgatgctgctgcattgaggttcaaaggaaacaaagccaaactcaattttcctgaacgtgttgttatgccaatacaaccacaaacaaataacaataattccacttcttcatcagctcctact

SEQ ID NO: 62303 - DNA, 335 bp, Zea mays
  unsure (1)..(335): unsure at all n locations
attttggtatttggtgctgataaggagagcccattcccctaccagggggctagagttgcatctgccattgaatcctttgcattggagcagttggaagccaattctggcacggctgaagtttctgagttgactggcccggatgtcatggaagagaagtgcgcttctgctgccatttgttttgtatcaaatccttccagacatccttgattcaaaggcagaaggaagaaacaagtaccttgagctcctgctctctgtagctgagaagtttanaaagagtccatacagttttgtctggacagctgctggcaagcaagctaatctcgagaaccaggtgg

SEQ ID NO: 62304 - DNA, 331 bp, Zea mays
gaaaactaacataattagggactatttggaggacataaatgagataccacagtcccgcatcttctggcctcgagagatatggagtaaatatgcagataaacttgaggacttcaaatatgaggagaactccaaaaaagcagtacaatgcttgaacaatatgctgactgatgcactgattcatgctgaagagtgccttcagtacatgtcagccttgaaggatcctgccattttccgtttttgtgcaataccccagataatggcaattggaacatgtgctctttgctacaataacgtgcatgtcttcagaggagttgtgaagatgagacgtggt

SEQ ID NO: 62305 - DNA, 138 bp, Zea mays
ggaggttgaggatcttgaggctgctggtattcaggtgatccagattgatgaggcagctctaagggagagtctgccactgcgcaagtcagagcatgcattctacctggactgacgtgtccactctttcagaatcaccaa

SEQ ID NO: 62306 - DNA, 136 bp, Zea mays
ggctgtcataagtgctggtattatcgctccttgggtgcaactgcttcaaggagcagagtttgatatcaagaaggaggctgcttgggccatctcaaacgctacctctggtggttcccatgatcaaatcaagtacttg

SEQ ID NO: 62307 - DNA, 132 bp, Zea mays
ctcatatgccctgtaatatctgctgagaaggcctaccatgagcagctctctgtgcctgaactcaccaatgctgtatttgagcccttcagcatgatggccaagtgtgacccaaggcacggaaagtacatggct

SEQ ID NO: 62308 - DNA, 245 bp, Zea mays
aatgagtccaacgggatcagacttggctacgctgttcccaactcatctgtcggtggtgctggctcgtcctctcaggctggtggctgctgcagttgagtggtggcagcaagtcatacaaatgcacaaggttctccctgcaatatctggatgtttgctcaagctggacccggattatttggtctttcagccacaatggttcatccataagcaatcatcttcagtggttactgtcttttgcaatcacg

SEQ ID NO: 62309 - DNA, 281 bp, Zea mays
ctccgctgtgctgctcatcgtgttgcacaacattatggcttagagactatagtagcagatagtttagtagaaggctcagttagcaggattgttgcaagaaaaacagcagaaagcaggtatcctgcaatttttttatcagaagttcctagcaatcaagcaagaaatgatcatgaaacagctgagaagcttaagtttgtcatttatcaaaggcccaaagcattccaaaatggaagcgctgattctagaaacaagagtggtgtaccaaaactgttgatgagaga

SEQ ID NO: 62310 - DNA, 318 bp, Zea mays
gtagctcggttccaggatcaaggaggtgtcatgacagctgaaactggaacatacagatggatggcacctgaggttataaaccatcaaccctatgataactaagcagatgttttcagctttgctattgtcatctgggagctgataacgtctaacatcccgtatgaaagcatgacccctctccaagcggctgtaggtgtgagacagggattgcgcccaggactcccaaagaagacgcatccaaaggtatgggcttgatgcacagagtcttgggaagcagacccatctgcacggcctgctttcccagacattttagccgaa

SEQ ID NO: 62311 - DNA, 318 bp, Zea mays
gccaatccgaaatctcgagctttcgcgccggcgaccacagcaaagaggaggccactacacgacagcgccccagggatcctactctcgtcgcagcggcacagtgaggggaagatgtcgtcggtgttcagcggcgatgagaccgcccccttcttcggcttccttggcggccgcgccgctctcgttttctcatgcatgggggcggcgtacgggacggccaagagtggcgtcggcgtggcgtccatgggtgtcatgcgcccagagctcgtcatgaagtccatcgtgcccgtggtcatggctggtgtgctcggtatctacggc

SEQ ID NO: 62312 - DNA, 254 bp, Zea mays
ctcgcgcacggctgtcagctcctgtcagacgtcgctcgggatctgagctgctaatggtgaagtcattgccactgagatcaagctgtcgtcaaaatcagtagatgaaacatctgtgcaaaagatctcaggcactaacacctaatattggagttgtctatagtgggatgggtccagattccgtgttctagtgagagaaagtcgaaagcaggcacaacaatattatcggttgtacaaggaacatatacctgtaacac

SEQ ID NO: 62313 - DNA, 277 bp, Zea mays
gtggctccatcctggcctcactgtccaccttccagcagatctggtcctcaagcacgagtctgtcgagtcaggcccctccattctccaccgctaatgcttctcgatggactgagcaggtgccaggcatctgctgcatcagctgattctgacctatcgccctgccctggcaaagtacacacctcatgctagctcatgaaactggaataagcctttgaacagcaatttgtccttgacgcttttatctgatatcagcactggctcgtagaacttgttgctg

SEQ ID NO: 62314 - DNA, 331 bp, Zea mays
  unsure (1)..(331): unsure at all n locations
cgggacaggggtccttcgagtggttccgcggcgtgatggacgaggtggcggagacggacaggaagggcgtcatcgagctgcacaactactgcaccagcgtgtacgaggacggggacgcccggtccgcgctcatcgccatgctccagtcgctcaaccacgccaagcacggcgcgacgtggtgtccggcacccgcgtcaagacccacttcgccagacncaactggcgcaacgtctactagcgcatcgcgctcaacccacagatacagcgcgtcggagtgttctactgcggcgcccggtgctgaccaggactgcgcgactggcgcaggactctc

SEQ ID NO: 62315 - DNA, 314 bp, Zea mays
cgaattctagggtggtgctgctctccgaccccgagctccgaaggccgcagcatcaggcgcccccccctcgcgtgtgaccgagatggcgctgccgaatcaggggaccgttgattaccccagcttcaagctcgtcatcgtcggcgatggtggaactggtaaaactacatttgtaagaggcatctcactggagagtttgagaagaaatatgaaccaaccattggtgtggaagttcatccgttggatttcaacactaactgtggtaagatcaggtctactgctgggatacgcaggcaagagaagtatggtggctcagg

SEQ ID NO: 62316 - DNA, 308 bp, Zea mays
  unsure (1)..(308): unsure at all n locations
agtacgctcccgaagtggtgaaagcangcggcggctgaggcaccggcaccggcaccgcctaggaaaggaaaccgaggaaactacagccatggtggtacgcatccgtctggcgcggttcgggtgccggaatcggcccttctaccgggtgatggccgccgatagccgtcccctcgagacggcaagcacctcgaggtcctcggctactataacccgctcccagggaaggatggaggcaagaggatgggcctgaaattcgaccgggtgaagtattggctgtcatatggggacacagccatcagatcctgtgc

SEQ ID NO: 62317 - DNA, 323 bp, Zea mays
gttcctccaccaggcagtgaccatctgcctgaacatccagaaggagtacggcaagctcctcaaggacttcaacaagggcctggtgaacaacaaggacatcgagaacctcaaggtccaggtggagaagtttgccgactccttcgacatgcctgggttcacgcttgagagatgaaatacaaggagtagatatgcctctttcatgcgcggcaaggtcctcctgtaccgatgtctttccatgtggtggcgcaggtgccatggcactgcattgccgccacacttacgatgatgatgatgggttatggattttgtctacaatgtcagca

SEQ ID NO: 62318 - DNA, 300 bp, Zea mays
  unsure (1)..(300): unsure at all n locations
tgtcgccgaagttcgcgcaccgcgtcgtcggctacctggaggaggaggccatccactcgtacaccgagtaactcaaggatctggaggccggcaagatcgagaacgtccccgccccggccatcgccatcgactactggcgcctccccgctaacgccacgctcaaggcgtagtcaccgtcgtccgcgccgacgaggctcaccaccgcgacgtcaaccactttgcatcggacatccattgccagggaatgcagctgaagcagtcccctgcgccgatcggataccgactgagatgtntgtgctc

SEQ ID NO: 62319 - DNA, 311 bp, Zea mays
  unsure (1)..(311): unsure at all n locations
gacctgctcgcgcagggcggccttgccgaggtcgagaagaagaacgcgcgcaaggccggcgccctctacgacaccatcgacgccagcggagggtactacgtctgccccgtcgacaagtccgtgcgctcgcctatgaacgtgcccttcaccctggccaagggcncgacttcgagaagcagttcatcgctcaggcggccaaggagggcatggtgcagctcaaggggcacaggtctgtcggcggcgtccgcgcctccatctacaatgccatgccgctccccggcgtcgagangctcgtcgccttcatgaaggac

SEQ ID NO: 62320 - DNA, 328 bp, Zea mays
ggttgccaacagacgttctgaacaagtggtggacccaaaccttgagagaaggccttcgacaaaggagctgaaacgtgcccttttgactgctctgaggtgtatcgatttgaatgctgagaagaggcctagcatggacctcgtggtccggatgttggattctaacgaactcatacctcaagaggaaaggagacaccgaccaatccgaatccctgagagttcagaaaccgagccactgcggggcaagaataacagtggcaggagtgatgctcctgagcatgaagcgaggccaccacgacctaagagccgaacattttcgtccaaatgaaag

SEQ ID NO: 62321 - DNA, 344 bp, Zea mays
ggagtctcgttcatgcagtttgccaacaagaactcgatgaggaacatctatatcatcggactctcgttgttccttggcatctcggtccctcaatacttcaacggatacacttcttcagctggcggccacggacctgcccggacaaatgctggatggttcaacgacattataaacaccgtgtttgcttccgggccgacggtggcgctaattgtcgcttctgtcctggacaacacgctggagttcaggggctacgaggccgaccgggggctctcgtggttccagccgttcctgcgccgccataagggatactcggaccccagaaacgaggagttctacagcttccc

SEQ ID NO: 62322 - DNA, 343 bp, Zea mays
gaagagctgcgggcgggcggacaaggagcaggcggaggaggagttgtgccaagccacaatgggtatctcgcgtgactcgatgcacaagcgccgagccaccggtggaaagcagaaggcctggaggaagaagcgaaagtatgagcttggtcgccagccagccaacaccaagttgtcaagcaataagacagtgaggagggtccgtgttcgtggaggtaatgtgaaatggagggctcttcgccttgatactggtaactactcatggggaagtgaagctgttacccgcaagaccgtacaatcgacgtggtctacaatgcatcaaacaatgagcttgtgaggacacaaa

SEQ ID NO: 62323 - DNA, 347 bp, Zea mays
ggaacatatacctgtaacacagcttgtacgagagactgctgctgtcatgcaggagttcacacagtcaggtggtgtgagaccatttggagtatcactgttgattgctgggtatgatgacaatggcccgcagttgtatcaggttgatccctcaggatcatacttctcctggaaggcatcagccatgggaaaaaatgtgtccaatgcaaagacgtttcttgaaaagagatacacagaagatatggagcttgatgatgccatccacactgcaattttgactttgaaagaaggatatgaggggcaatttcctccaacaacattgaaatcggaattattcgagctgatcgtga

SEQ ID NO: 62324 - DNA, 344 bp, Zea mays
  unsure (1)..(344): unsure at all n locations
ctgctcaggaggaacttcagcgacaccggctgcttcgggttcggcatccaagagcacatcgaccttggtctcaagtatgatccatcaacaggtctctatgggatggacttctacgtcgtgctcgagcgtgctggctaccgcgtcgcgcgccgcaggaggtgcaagtcccgtgttgggattcagcatagggtgaccaaggaggactccatgaagtggttccaggtcaagtatgaaggtgtcatcctcaacaaggctcaggccagcacgagttaaacctcacctgtggnggcaaaacagctctcgcttcatctccatgtgaacgctagatcaccttccaaggtttt

SEQ ID NO: 62325 - DNA, 344 bp, Zea mays
  unsure (1)..(344): unsure at all n locations
ttggagacgacaacgacaaatctcatgccatgtctgaaatgaatggtgtatattgctctacgaggccaattcgtataggacctgcgactcncagaagatcttcaggtgattctggctcctcgactcctggtcattcagatggtgattcttctaacagaacggtatatgttggtgggcttgaccccaatgtcagtgaagatgaactgagaaaagcctttgccaaatatgatcttgcctctgtgaaaattcctctaggaaagcaatgtggctttgttcaatttgttagcagaactgatgctgaagaagcactacaaggattacatggatcactcattggaaagcag

SEQ ID NO: 62326 - DNA, 242 bp, Zea mays
gtttcttcacattggcattgactcttcgggcaacaggttcttcagctatggaccttcgaaatatgcaaacttacagaactgggaactgatggcgccatggacaggagcaaatgtgcaagttccaaccaagttcatcgttggggacggtgacctggcgtaccatcaccctggagtgaagaggtatatccacaagggcgggttcaagagggacgtgcccatgcttgatgaggtggtagtcatca

SEQ ID NO: 62327 - DNA, 338 bp, Zea mays
gtcattgtagggggctcttctgagtacaagatcaataacatcgttgtcccgctacatgactacagtgaagagttagagaagttgggcatgctcatcagagctcgtaacttcctcgtcttccagggtgcagtggaatctattgccatgaagaaccccaaggagaggacagtcttatttgaagaaattagtcgctctggggaacttgcacaggagtatgacaagcgaaagaacgacatggtgaaggctgaagaagacacacagtttaattatcatcgcaagaaaaatattgcagctgaacgcaaggaggccaaacaagataaggaagaggctgaccgcta

SEQ ID NO: 62328 - DNA, 332 bp, Zea mays
ctgacgtcgatctggcttcatcagttctactacatctttggcttcctgttcctggtgttcattatgctcatcgtcacctgtgcggagatcacaatcgtgctgtgctatttccaactgtgcagtgaggactacctgtggtggtggaggtcctttctgactttcggatcatcagcaatctacctcttcctgtatgccgggttctacttcttcactaagctgcagatcactaaggtggtgtcgggcatgctgtactttggctacatgcttcttgcctcgttcgctttctgtgtgctcaccggtacgatcggcttctacgcctgcttctgcttcac

SEQ ID NO: 62329 - DNA, 342 bp, Zea mays
gactgaagatggacttatcatggctgctcgccacaagaagtacaaacacatccagggtgtccaattccacccggagagcatcatcacccctgaaggcaagaaaatcatcctcaactttgtcagattcattgaggaactggagaagcagcgttcgtaggggaggtagacgcgacaggtggtttcatttcatagatcagacggaagcagagacaaggcgcttaaagctgcgccaggttccggggctggcagttgaagcatagctaggaaacagctttccctctcttaattcgttgtgttcgtggtgacataatctgtgtgcggaccgaatttagaataaagtac

SEQ ID NO: 62330 - DNA, 323 bp, Zea mays
cagttaaagcgacatcagatttgcagctagtacagtctgatctatataccttggttgatggcttcgttacacgtaattcagccagaacaaatccatcaaatccctcaattgaacttagtcctgagttcaagaaggttgggagcttccttggtcgcttcaagtcgatacctagcattgttgagcttgacagcttgaaggtttccggtgatgtttggttcggttctggaattgtattgaaggggaaagtgaccatcactgcaaaacctggcgtcaagctagaaatcccagacggagcagtgattgggaataaggatatcagtggc

SEQ ID NO: 62331 - DNA, 335 bp, Zea mays
agagcaagatgctttatgcaagctcaaaccaaaaattcaagagtgggctcaatggcattcaggtggaactgcaggctactgatgccagtgcaatcagccttgatgagatcaaggatcgggctcgctaggcatcatcatgatcatgcatcatggacttggcctactactgtggattcgtatgccattatagacttggtgctgtgaaagactgcttgatgatttgcgggtttgttgctgtgtaaaaaaaggtcccattgctcccagaagaccatgaaggttcggatctatcatgtaattccttgttatctgccaattatgtatggactatggacaaa

SEQ ID NO: 62332 - DNA, 230 bp, Zea mays
cgaacccaaacgaagcgagagctgagcaaggcagaggcggcgtgaccggcgatggaccgcctgcagcggatctttggcgcctccggcatgtgggcagccgccgacggactcgccgctgctcgattcctccgagcaggtctacatctcctccctagcgcttctcaagatgctcaagcacgggagggctggggtgcccatggaggtcatgggcctcatgctcggcgagttcg

SEQ ID NO: 62333 - DNA, 234 bp, Zea mays
gacaactgataatggaaagtcgttcacttgcacactcagattcgacactgaggtggagcttgcttactacgctcatggtggcattctaccatatgtcgctagacagatagcggaacaatagattgtaccgtcgagatggttgcgatgcttgcggtgaatcgtaattggtgtaaacggtttgtttagtagtacaacccatttttgcggactacttataataacctctgagtatct

SEQ ID NO: 62334 - DNA, 257 bp, Zea mays
gtgactggctcaccaagatcttcaagtctgatggcctgaagggtctctaccagggcttcagtgtctctgtgcagggcatcatcatctacagagctgcctacttcggagtctatgacactgccaaggggatgctgccagaccccaagaatgtgcacattattgtgagctggatgattgcccagagtgtgacagccgtggcgggcctagtgtcctatccatgttgccctgtccgtcgtaggatgatgatgcagtctggc

SEQ ID NO: 62335 - DNA, 248 bp, Zea mays
gccgctgcttgcgcctctctcgcccgcatcggcgtcaggtccgcaaagatggcagtgccgctgctgacgcagaagatcgtgaagaagcgggtcacgcagttcaagaggccacacctcgaccgctacaagtgcctcaagccaagccggcgtaggcccaagggtatcgactcccgtgtcaggcggaagttcaagggatgcaccttgatgcccaacattagatacggctctgacaagaagacgaggcacta

SEQ ID NO: 62336 - DNA, 325 bp, Zea mays
gaccaggccgaagacaacaatcctgaaaccaagccatgggtctgcaggaggaatttgaggagcatgctgagaaggcaaagaccttgcctgagaacacgagcaatgagaacaagctgatcctatacgggctctacaagcaagccacggttggagatgtgaataccgatcgtccgggcatattctaccaaaaggacagggccaagtgggatgcctggaaggctgttgaaggcaaatcgaaggatgaggcgatgaatgactacatcaccaaggtgaagcagctccaggaggaggctgccgcctcttaaaagtctcttaatagtgttgc

SEQ ID NO: 62337 - DNA, 286 bp, Zea mays
  unsure (1)..(286): unsure at all n locations
gaccaggccgaaggaaaacaatcctgaaaccaagccatgggtctgcaggaggaatttgaggagcatgctgagaaggcaaagaccttgcctgagaacacgagcaatgagaacaagctgatcctatacgggctctacaagcaagccacggttggagatgtgaataccgatcgtccgggcatattctaccagaaggacagggccaagtgggatgcctggatagctgttgaaggcanatcgaaggatgaggcgatgcatgactacatcaccaaggtgaagcagctccagg

SEQ ID NO: 62338 - DNA, 324 bp, Zea mays
aacccacccatctacatcactgagaacgggatgggtgacgttgaccatggcgatctacccatggaagttgccttggatgaccaccaaagagtacattacctccagcgccacatcgcaactcttaaggagtcaagagacttgggagcgaatgtgcagggctacttcgcttggtctctattggacaacttcgaatggttctccggctacacggaacgttacggcatcgtctatgttgaccgcaacgatggctgcaaacgctacatgaagcggtcagccaagtggttcaaagagttcaatgctgcgaagaaagcggctgccaagaag

SEQ ID NO: 62339 - DNA, 288 bp, Zea mays
tcagagttgccattctttgcctccaaggttcggctcggcaagaatggaggtggaggaagtgctgggtctgggtgatctcaacgagttcgagaagaagggtctggaaaaccacaagggcgagctcaagtcttccatcgacaagggtatcaagtgtgcccacgggaactaggcaccttgcccggcttctaacaattgatgcgccttgcatttttgtttgactgcctatttttcctgccccccgtattgttggggcaatgaggcgtagtggtcgataatagaacccagcgg

SEQ ID NO: 62340 - DNA, 282 bp, Zea mays
gcgagcaaaccagccagttgttttgctgatcgatgaacttgatcttcttatgacaagaaaccaatcggtgttgtataacattcttgactggcctaccaaaccaaattcaaatctagttgttataggtatagcaaacacaatggatcttccagaaaagttattgcctcgtatatcaagtcggatgggtatccaacgactgtgtgttggtccatacaattatagacaactgcaggaaattataacaagccgtttagagggtattgatgcctttgaggaacaggc

SEQ ID NO: 62341 - DNA, 267 bp, Zea mays
tgaagcagcgcagatcgatgtgcccagcctccaggtgatcaagctcatgcagaactttaagtccagtgagtatgttagggagacttctcctggcagtactactactggtatctcaccagcgatggcattgatcacctacgcaactacctgaacctcccgtctgagatcgtgcctgccacgctcaagaagtctgccaagccacctggccgcgcatttggctctggccctcctagtgaccgccaaggggcccaaggtcgtttgacggcg

SEQ ID NO: 62342 - DNA, 168 bp, Zea mays
gtggaccctgacaagctaaagcctggtgatctggttggagtcaatagagcgtagctaccttatactagatacatggccatcagagtacgattcacgagtgagggcaatgggagtggatgaagagcccactgaggattataatgacattgggggtcttggatagcagag

SEQ ID NO: 62343 - DNA, 279 bp, Zea mays
agtttttgagactgatagcacggacatgttccagatgaataagcttctgtccaagcatatacgtcctctggagagtaaaaatgattcggaaccagaagcaaagaaattgaagccacagggtgatgaaccaatttcttcagttgaaactgatgttaaccaacttccccttatggtttctgatgcgcttgctaccttttttggtaccggagaaagagaaatggtccattctgaggctgttaagcgtgtctgggatcacattaaagagaatgattagaggat

SEQ ID NO: 62344 - DNA, 283 bp, Zea mays
cactgttgttgacaacaaagtctgtcatccaaggaacttcgatttctacatgtgttcacatgctggaatgattggaactaccaggccaactcactatcacatcctgcatgacgagataggcttcaatcctgatgacctgcaggagctggtgcactcgctctcttatgtgtaccaaaggagcacaacagccatatcagttgttgctcgcatctgctacgcccaccttgcagccgcccaggttgggcagttcataaagttcgacgagatgtcggagacttcatct

SEQ ID NO: 62345 - DNA, 284 bp, Zea mays
gtcgaagagaagtcctaccataagtcatgcttcaaatgctcccacgggggctgcgcgattacaccttccaactatgcagccttggagggcatcctctactgcaaacaccatttctcccaacttttcaaggagaagggaagctacaaccacttgatcaagtgcgcgtccgtcaagcgcgctgctgaagcacagccagaacaaccggcctctgattcctcctcctgaccacgccatttaaacagtgggggtttggaggcgagagagttgggaagcctcctgtttct

SEQ ID NO: 62346 - DNA, 262 bp, Zea mays
gacaaagtggatagatgtgtgaaaagtggagcaaagatagtgctgtctcggctagctattagtgatcttggaacacagtattgtgcgagtcgagacattttctgtgctggccgtgtcactgaagaagatttgcaacgtgttgctgcagcaactggtggaactgttcaaacttctggtagataatgtcatcaatgatgtactcggttcctgtgaggtattcgaggaaaagcaagtggcgatgaaagattcaacatatttagtg

SEQ ID NO: 62347 - DNA, 279 bp, Zea mays
accggacgtctgggtcgcttgcgtctggggtggatcacacgccatgggcctgttccagcgagtcgttgaggatcaggatgtgagtcggatcggagtggaggcagctggcgaacgcgtagacaccgacaagcatgcggcgactttgacaaagggccaagttggagttctcgatggatctatgagctatgtgctgcaggacgacgatgggcaagttatcgagcgccactccatcagtgctggactggattagcctggcgttggacctgagcacagttgttg

SEQ ID NO: 62348 - DNA, 283 bp, Zea mays
cagcctcggccagccacctccccgtcgctctcacgctcttcgtgctcgccgcctcgcctcttccgcctcgagctcactcctcccgtctgacgcacatggcctccatcgccggatcttccgctctctccttcgccatgcctgtcaaggcaatcaactcaaattctctagccttctccccggtgaggaagggtaacacattcctccgcctgcaaccagtgcctatgagatctgtttcctgcgctgccaagaaggatacggtggacaaggtgtgtgaaattgtgaa

SEQ ID NO: 62349 - DNA, 232 bp, Zea mays
gacaagctcaagaagatggcattgagggtgattgctgagagtctatctgaggaggagattgagggtttgaaggagttggtcaaaatgatcgatactgacaacagcgggacgataacttatgatgaactgaaggatggtctgaaaagggttggctcggacctgatggaacctgaaatccaggctttaatggatgcagctgatatcgacaacagcggagccattgctatggaga

SEQ ID NO: 62350 - DNA, 273 bp, Zea mays
tgcaagcattggtggacctcttcctattaccaaacctctggaggctccagacagatctggtgcttacatccctggggacacatggcgatccacgtgcatctatctgtggtgtagatgacagccaagggaaatggttgggtggtatgtttgacagagacagctttgtggagacatgtgaaggatgggcaaaaacagtggttactggcagagcaaagcttggaggaattcctgtgggcgtcatagctgtggagacacagaccatgatgcagatca

SEQ ID NO: 62351 - DNA, 277 bp, Zea mays
ggagtggatggtcgtgtacaccgactacgaaggcgacatgatgctggtcggggacgacccctggaatgagtgtctgcagcatggtgcacgagatcttcgtgtacacgagggaggaggtccagcgcatgaacccgggcgccctgaactcgaggccggaggacagcggcctcgccaattcgacggagaggggctccgcatctactgctgctgctagagaggcacccggctaccagtgccgctcgtcgcttgactccgacaactgctgatgccttggcag

SEQ ID NO: 62352 - DNA, 278 bp, Zea mays
atcacattcgcctccttcaaagccctgcggcgatttcgattcttcccctctatctccaggtatacccagcggagcagcactgacagaaatgctccaggaactccaagaattcatctgatatggcaagcaaaaggattcagaaggaactcatggatctgcaagaggacccagcgacatcatgcagtgcagtgcctgctggagaggatctattccactggcaggccacaatcatgggtcctagtgacagcccctatgcaggcggggttttctctattaat

SEQ ID NO: 62353 - DNA, 276 bp, Zea mays
agcgggagcagcatcggcgcgacggcggctgaggagaaggagtgcgccgtcgagtcgcgcttcgctgcgcaggtgctcgtggcagcgaggaagatctacgacccgctggaggaggacgccttccgccgcatcctgcaccactacgacgggcccaagttccggctcgagctctccgtcaccgaggccctcgcgctcctcgacatcttcgccgacaaggacgacgcctgatccccatcggatctgtcgtcgggccactcgaagctcgagtgacgaatg

SEQ ID NO: 62354 - DNA, 276 bp, Zea mays
ctcagatcagcaagaagaagaagttcgtcagcgacggcgtgttctacgccgagctcaatgagatgctgacgcgggatctcgcggaggacggctactccggcgtggaggtgcgcgtcacaccgatgcgcacggagatcatcatccgcgccacggcacgcagaacgtgctcggcgagaagggccgcaggatcagggagctcacgtctgtcgtccagaagaggttcaacttccccgagaacggcgtcgagctctacgccgagaaggtcgtcaaccgcgg

SEQ ID NO: 62355 - DNA, 276 bp, Zea mays
tggagaggtcttcaagaagtttggagttgaaaagtttgatcctttgaatgagaagtttgatccaagataggcactatgccattttccaaattcctgatccttcaaaaccatcaggaactgttgctgctgttgtgaaggttggctacatgttacatgatcgtgttcttcgccccgctgaagttggtgtcactgaaggtggtccaactgaagaagagccagaggagtaatctagatcaaacggaggttgctggctgcacgtatatctatgactactgc

SEQ ID NO: 62356 - DNA, 277 bp, Zea mays
gggcacgggcgctgtcaagcttctcaagcacaagcagaccggcaaggtccgcctagtcgtgcgccaggctaaaacgcttaggatctgcgcgaaccacctcgtggcctccaccacgaagatgcaggagcatgcgggcagcgacaagtcgtgtgtttggcacgctgctgactttgccgatggcgaacttaaggaggagatgtgtgccatcaggtttggttcggtagaaactgcaagaagttcaaggagttggttggagagatagctgagtcgcttacaa

SEQ ID NO: 62357 - DNA, 266 bp, Zea mays
tccatgttcgcctacaagaaggagcgtgacggttacgccaagtggatggccggtaacttggcctccggtggtgctgccggtgccacttccctcctcttcgtctactccctcgactacgcccgtacccgtcttgccaacgacgccaagtccgccacgaagggtggtgagcgccagttcaacggtctcgtagacgtctacaagaagaccctcgcttccgacggtatcggtggtctctaccgtggtttcatgctccgtgctgtacggtg

SEQ ID NO: 62358 - DNA, 274 bp, Zea mays
ccggtgtgtgcctcgactcggttgatagcggatcacaggtgtgcgctctgctgtggaagaagaacgagatggagctgctgagctcacatggattcacacagaaccaactcaccttgtggaagtacccatcgatggtgaagatggctgaacttaatggccatacctctcgcgtcctcttcatggctcagagtcctgatggatgcacagtagcgtcactgctgctgacgagaccctccggtttctgggagcgtttttggaacgcctgaaacgccca

SEQ ID NO: 62359 - DNA, 251 bp, Zea mays
tgtgatcccaagggtgagatgaaaggttccgctatcactggacctatcggcaaggagtgtgctgatctttggcctaggattgctagcgcacaaacgccattgtttgagagcttgttggaatatgttcagacttatatgatcatcttattatcagttgctaagaatgctattgggcttaataggccctttatgtttgttcactcaattttgtagtaaacagaatttggtatagaaaagaaaaggaagatggg

SEQ ID NO: 62360 - DNA, 271 bp, Zea mays
ataaaatggaataacacaaggttgtctagaagaccagtggaagaggcgtactgtgctccagacagatgggttcctttcctgctttggtggaccgtctgccagtcaccaaatctgaatctctggagttctctcctgtcgagaatgcgattcgaatgatcgaaacaagaacagctgcattgagagatgaactagaagaaccacggagttctgaaggtgatcagctctcaaggcttcaaagcttgcagaggatactccaaggaagtgtggctgt

SEQ ID NO: 62361 - DNA, 257 bp, Zea mays
gcgatggacaagggcagcgtcgtcgtgcccccggcgcctgccgccgccgccgcgaagaaggccaagcgcttcgagatcaagaagtggaacgccgtctctctctgggcctgggacatcgtggtggacaactgcgccatctgccgcaaccacatcatggacctttgcatcgagtgccaggcgaaccaggcgagcgccaccagcgaggagtgcaccgtcgcttggggaatttgcaaccatgcattccacttccactgtat

SEQ ID NO: 62362 - DNA, 350 bp, Zea mays
tggggcgagaagggctacatccgcatgaagaggggcaccggcaagccggagggcctctgcggcatcaacaagatggcatcctacccgaccaaggaccattgatggatcatggacgacggagatcatatctatcttcacttccctttcatccgactctttcgatttccatcgtttgcccccttttcctgaatgtgtgtgtttttttttatatattactgtgtcaagtaatttctcgatggatcgatcgaggaagaacgacaaacatgcactcaagcacgagcgcacaatgtcatctttctcttcatttggtgcgttgaaatgacgaatatcaaatatagtggtgtattttt

SEQ ID NO: 62363 - DNA, 345 bp, Zea mays
ctgtcgccctctcggtctccctcgagcttttcttgtgcgcaccgcacccgctgcttttcgttcgtcttcatcctacgcgagggcgaaacccacaaaccctctccctcctgtactccggccgacacatccaggggcgatgacgctgggtagctccggcgccggatcgagcgtcgtcgttcctcgaaacttcaggctattagaggagctcgagcgtggagagaagggcattggtgatgggacagtgagctatggaatggatgatgctgatgacatctacatgcggtcatggactggtaccatcattggccctcacaatactgtacatgagggtcgcatctaccagct

SEQ ID NO: 62364 - DNA, 346 bp, Zea mays
aaagacatttgcaaagatggcggcatattcaagaagatccttaaagagggagagaaatgggagaacccaaaggatcctgatgaagtacttgtgaaatatgaggcccgtctggaagatggtactgttgtatccaagtctgagggggttgagtttactgtgaaagatggctacttttgtcctgccctggccaaagctgtcaaaaccatgaaaaaggcagagaaggtgctccttacagtaaagccacaatatggatttggtgagaagggtagaccagcagctggagaggaaggtgctgtgccgccaaatgcttcgctgctcattgaccttgagttgatgtcatggaaga

SEQ ID NO: 62365 - DNA, 339 bp, Zea mays
ggcaggttcatatggcagtggtcctcaatgaatatggtggaactattggtattgtaacactagaagacgtagtggaagaaatagttggtgaaatcttcgatgagaatgattccaaggaggaaatccagaagaaaacaggctatatagtaaggcggggggatggaacatttgatgttgatgcaaacacatcgatagatcacctatctgaagagcttggtatcaaaataccagagggacatcagtatgagacggtgtctggttttgtctgtgcatcttttggctatattccagaagaaggtgggagaatgcttgtgattcttgaaaagaatttcagagaag

SEQ ID NO: 62366 - DNA, 371 bp, Zea mays
  unsure (1)..(371): unsure at all n locations
cgtcatacgtcggaattggctcgagatgctctcctcttgaaggtgaaccaaatcgggtctgtgaccgagagtatcgaagctgtcaggatgtccaagcgcgccggatggggagtgatggcaagccacaggagtggcgagttgagaggacaccttcattgctgacctctcagttggcctgtctacgggccanatcaagacgggagccccttgccggtctgagcgcctggccaaatacaaccagctgctcaggatcgaggaagagctcggtgatgccgcggtctacgccggagcaaagttcagggcaccagtggagccctactaagaaaggaagaggatgaggatgtnttcttgtggagctatactagctcgct

SEQ ID NO: 62367 - DNA, 344 bp, Zea mays
gtcacatgctactatgcaaaaaagtttgaagcactaagaaggtcttgctgtccatctgagcttgatttttttagatccattagtcgatgtaaaaaatggggagcacagggtggtaaaagcaatgtgttttttgcaaaatctgtggatgatagatttataataaaacaagttacaaagacagagcttgaatcattccttaagtttggcactgaatattttaaatatctgtcagagtccataagcactggaagccctacatgcttagcaaaaattttggggatctatcaggttactagtaagcatgtaaagggtggcaaggagtcaaagatggatttgcttgtgat

SEQ ID NO: 62368 - DNA, 344 bp, Zea mays
  unsure (1)..(344): unsure at all n locations
ggaaagttggcctgctttggcatgtggaaatactctcgtgctcaagactgctgaacaaacccctctatcggctttgtatatctccanattgttgcatgaggctggactgcctgagggtgttgtgaacgtcgtttctggttttggccctactgctggtgctgctcttgctagtcacatggatgttgataagatcgcatttactggatctaccgatactggaaaaattattctcgagttggctgcaaagagcaaccttaagacagtgacactggagttaggaggcaagtcncctttcatcataatggacgatgctgatgttgaccatgctgttgagcttgcgcact

SEQ ID NO: 62369 - DNA, 332 bp, Zea mays
gcttgttgctcttcaagagatacttcaagaatgtggtatagggtcagaaatatctagtcctgatgcttctacagctgttgggcaacacagagttttgatttttgctcagcataaggcttttcttaacatcatagagaaggacctgtttcaatctcatatgagaagtgtcacatatttgcggctggatggctctgttgatccagagaagagatttgaaatcgttaaagcattcaattcagacccaaccattgatgtacttctgctaacaacccatgtcggtgggcttggcttgaacttgacatctgccgacacattggtgttcgtggaacatg

SEQ ID NO: 62370 - DNA, 334 bp, Zea mays
gccgccgccgccgccgcttcgtcgtctccgccgcagcgatgccgtcgcacaagaccttccggatcacgaagaagctggcgaagaagatgcgccagaaccgccccatcccctactggatccgcatgcgcacggacaacaccatcaggtacaacgccaagcgcaggcactggcgccgcaccaagctcggcttctgagcgcgcggatcggccggctcctgcgtcggaattctagggtctctacctttcctttggtgttatcgatgtctcttgtgtttctgtaagctagcaaacagttccagaaagcttttgttaagattttgatgacgctaagagga

SEQ ID NO: 62371 - DNA, 332 bp, Zea mays
cgctgctggtcacttctttggacataaggcaactagtgccgggctcaaggagcaggaagcaataaattttctggagaagaaaatgaaggatgacccgaaattcacctatgacgaaactgtgcagattgcaatatctgcgttgcaatcagttctccaggaagatttcaaggccactgagatcgaagttggtgttgtgagaaaagatgaccgcgttttcagagctctcacgacagaggagatcgatcagcacctgacggcaattagtgaacgtgactgagatgtcatatgctgcacatttcagcgctgcacacactgcgcatatgccattgtgc

SEQ ID NO: 62372 - DNA, 336 bp, Zea mays
cgcaggcagaggcagcatagcagcagccagctccatccatcctctttcccctcctcgcttcgcttcctcggcggattcctcctccctcgaccgtcaccgtccccgtccccttccggcgcgcaagtcgcccgagatggcaaacgcgagatcgggtgtcgctgtgaatgacgagtgcatgctcaagttcggcgagctgcagtcgaagaggctgcagcgcttcctaactttcaagatggacgacaagttcaaggagatcgttgtggaccaagtccgggatcgcgctaccagctacgatgacttcacaaacagcctccccgaggatgactgccgatacgc

SEQ ID NO: 62373 - DNA, 344 bp, Zea mays
  unsure (1)..(344): unsure at all n locations
gcttgccggagttgtggccgtcgaggtcaccggtgggcctgagatccccttccaccccggcatggaggacaagcctcagccgccacctgagngccgacttcctgatgccaccaagggttctgaccacctgaggcaagtctttggcaagcagatgggtttgagtgatcaggacattgttgccctctctggtggccacaccttgggaaggtgccacaaagagcggtctggttttgagggggcctggactacgaaccctttggtctttgacaactcttacttcaaggaacttctgagtggcgacaaggagggccttcttcagctcccaagtgacaaagccctgctga

SEQ ID NO: 62374 - DNA, 343 bp, Zea mays
cggctcgaggaacggaaccatgattgagaacatgataaaggagggaaagattgttccatcggaggtgactataaagcttttgcaggaggcaatgataaaaagtgaaaatgacaaattcctgatcgatggatttccaaggaatgaggagaatcgtgcagcctttgagaatgttaccaaaatttctcctgcatttgtgctattctttgactgttctgaagaagatatggagaaacgactcctggggcgcaatcagggaagggttgatgataacattgaaactatcagaaaaaggttcaaaacctttgttgactcaactctgcctgtcattgagcattacaactca

SEQ ID NO: 62375 - DNA, 338 bp, Zea mays
gtaaaggtttatttaagatcttaaagttctacttgagtcgagaggtgcctagggagtcactgttatctatgattccagcgattggagcgactgtttcatgtgaaggagaaggagctccatgtgctgaaatagacgaagatatcgctcaccagattgttgataggccgacacagagccatgtttgcctctccagggagtatgttcaaccacagtgggtctatgattgcgtagatgctcgtatcatattgctaacagaaggttatcttgttggacgagtacgtccagcacatctgtctccttttgtggacaatgatgccgatggctacatgcctgagtat

SEQ ID NO: 62376 - DNA, 331 bp, Zea mays
  unsure (1)..(331): unsure at all n locations
canagattgcctttatgttcttgacaccaggttcattgccttttgagaagttgtggtaggaatntttacagggtcatgatggtcgtaattccatctttatccatgcatctcgtgaaatacctatacattctagctccctctttgttggacgtgaaattcgcagtgaaaaggtagtatgggggaggatttcgatggttgatgcagagaagaggctgttagcaaatgcattggaagatgtcgataatcaattttgtgtcttgctttctgacagctgtgttccagtacatacatttgattacatatataattatctgatgggaacaaatgtcag

SEQ ID NO: 62377 - DNA, 343 bp, Zea mays
caaacagctaagggaggttcagtttctggttccgatgcgctataaaggaacccaaaaaacaactgctgatacggctttactttcaataattttgcagctaactggagcaaaaattggtaaccgcctgatggcagaggcagaaacgaatttggctattaatgttctccctggaccattatcagaatcttatgaagttcaaggaagaggagagcttcagttaggaatattaattgaaaatatgcggcgtgagggatttgagctttcagtttcacctccaaaagtgatgtataaaacagagcgtggtgaaaggttggagcctattgaagaagtgactgttgaggtt

SEQ ID NO: 62378 - DNA, 330 bp, Zea mays
gtgcgaccctgcaactgctgatcacatcgatcgacgaccatggatatgattattatctatctagcttgtggtggtggttgaacaataataagcgaggccgagctggctgccatacataggtattgtgtggtgtgtgtgagagagagagaaacagagttcttcagtttgctatctctctctgcatgtttggcgtcagtctttgtgctcatgtacgtacgtgtgtctacctgcatgttggttgatccgattgcatctgctgtaaccatatattaattggtccacgatgatatgatttgatactatatatatactaaaaccggacttcttatt

SEQ ID NO: 62379 - DNA, 339 bp, Zea mays
gcaagatcttcccaatgccatgaatgctgctgagattactgacaagcttggattacactccctgcgccacgacactggtacatccagagcacttgtgccacaactggcgagggtctgtatgaaggcctggactggctgtccagcaacattgcgagcaaggcttgaggcctaccttgaatgtcaaccgcgaactgactaggagctccggatgtatcatggaaactcaggacagaatcgcagttgcaacctgttagatgtcttctaccggcactatatatatttgttgtttgatgtgtaatgatgttactgttcaacgtttattaccctactatactgttg

SEQ ID NO: 62380 - DNA, 334 bp, Zea mays
gcgcattgatgagaggttatctgcccttggcaattgcatagcctgcaatgaccatgttgcacttacgcaccctgaccttgacaaggagactgaggagttcattgcagatgtgcttggggtcgaggtgtttaggcagactattgctggaaatatccttgtggggagttactgcgccttctctaacaggggtggtttggttcatccccatacatccgttgaagaccttgacgagctctccacgctcctccaagttcctcttgtcgcaggaactgtgaacagaggaagcgaggtcattgctgcaggcatgacagtgaacgactggactgccttttgt

SEQ ID NO: 62381 - DNA, 328 bp, Zea mays
  unsure (1)..(328): unsure at all n locations
cggctcgagcacagcgccggcaaccgccgccatcgatcgatcgcccggaaactgacctctaccgatgtctggagccggcgaggatgataagaagcccgcggagggcggcgcccacatcaaccttaaggtcaagggacaggatggcaatgaggtgttctttcgcataaagaggtccacccagctgaagaagctgatgaacgcctattgctacctgtagtctgtggacatgaatgccattgcattcctgtttgatggccgcaggtncgcggcgagcagacccctgatgagctggagatggaggacggcgacgagatcgacgccatgcttc

SEQ ID NO: 62382 - DNA, 334 bp, Zea mays
ctcggagctcctcaagaaccctaagatcttagccaaggccatggaggagctgaaccatgtcatagggccggaccgactggtgacggaaagcgacctccctcgcctcccctacatcgaggctgtgctcaaggagaccatgcgcgtgcaccctgccgcgccgatgctggcaccccacgtggcccgcgaggacacatccgtggacggatacgacgtgctcgctggcacggtcttgttcatcaacgtgtgggcaatcggccgcgaccctggactgtgggacgcgccggaggagttccggccggagcggttcgtcgagagcaagatcgacgtgaggggc

SEQ ID NO: 62383 - DNA, 336 bp, Zea mays
ctcaagtcctacccgttcgtcaaggaagggctggagaaagggaccctcaagctggtcggcggccattacgacttcgtcaatggaaagttcgagacatgggaaccctaagtggccatacgtacaaatacgccccaccggacttatttgccgcgtggagtgcttaattatgtgccgatatatatatacacatataccggaaatgaccggtgagaactatactgttgtaataataatagcgaggaaaaaaatatttgcatccgggatataaaaacacttctttacaaatagaagacaaataaattattaagggattaatttataaatttgatatgtttt

SEQ ID NO: 62384 - DNA, 327 bp, Zea mays
cgcacgggctgcttcccagtttacttgaacatgcttgatgagcccaaagaaggatacggcccccacagtggttgtgtccgccggtacaacacattctcctgggtgcacaatgcacatcttaaggccatgcttgagaagctccgggctaagcaccccaatgtgagaatcatatatggcgattactacactccagtcgtccagttcatgcttcagcctgagaagtttggttttgccagacaactgcccagggcatgttgtggggcgccatcgactcctgagagagcacttacaacttcaatgtcacggccagatgcggtgagcctggtg

SEQ ID NO: 62385 - DNA, 328 bp, Zea mays
tcgacatcgagtgcaccagggtgccgtgcgagttccctggcctcaagatcgcgttctacgtggaggagtactggagcgccgtctacttcgcggtgctggttgagtacgaggacggcgacggcgacgtggtgcaggtggacctgatggagtccaagactgcgcgcgggccgccgacggggcgctgggcgcgtatgcgcgagtcctggggctccgtctggcgcatggacaccaaccaccgcatgcagccgcccttctccatccgcatccgcaacgagtccggcaagacgctcgtcgccaagaacgtcatcccggccaactggaggccaac

SEQ ID NO: 62386 - DNA, 338 bp, Zea mays
gtcgctgaaccatagcagggatctgaagcgtgggtatgtggcctccaactccaaggatgaccctgccaaggaggctgctagcttcacctcccaggtcatcatcatgaaccaccctggccagattggcaatggctatgccccagttctggactgccacacctcacacattgctgtcaagtttgctgagctcgttaccaagattgataggcgatccggcaaggagctggagaaggagcccaaatttctcaagaacggtgatgctggtatggtgaagatggttcccactaagcgcatggtggtcgagacttttctcagtatcctctcttggtcgattgctg

SEQ ID NO: 62387 - DNA, 345 bp, Zea mays
ctttcggtgctcctacaaagacttggccttgggaggacggcacaaattctttggccatggctaagagaagaatgagagctcactttgagttcatggagaacttgggagttgacaaatggtgcttccatgacagggatattgccccggatgggaagactcttgaagaaacaaattctaacttggatagatagtccagctggcaaagcagctgcagggtgagaccaatataaagccattgtggggtaccgcacagctctttatgcatccacgttacatgcatggcgctgctacgagcccagaggttaaagtatatgcttatgcggctgcacaagttaagaaagcttt

SEQ ID NO: 62388 - DNA, 345 bp, Zea mays
aagagttcaatttgaggaaacctccatccttccactatgatttgcttctcttaggcttcctgacgttaatgtgtggccttattggtatccctccatcaaatggtgtcattccacaatcacccatgcacacgaagagtttggctactctcaagcatcagctgcttcgtaaccggctagtagccactgacgaaagagcatgagccagaatgcgagcttgagccaactgtatggcagcatgcaggatgcttatcagcagatgcagacaccactggtttatcagcaacagtctgtcagaagaggcttaaatgagctcaaggactcgacagtccagctagcttcgagtat

SEQ ID NO: 62389 - DNA, 346 bp, Zea mays
agggacttcagcctcagggctccagatcggttagctgcgtcgcatcttcttgccccggtcagtgtgtgtggatatcgactcctgcttcggcactaatggcagcagagcccccgactgaactggagtcagccattgaaacggtagtcactaccttctccacctttgcagggcgggaaggacggaaagtagcctgagcaccaacgaatgtaaggtaattgtcactcagcagttacctcatgtgctcaaggatgtgggttctctagacgataagatgaagagcttggacgtgaatcaggattcggagctgaagttcaatgagtactggagactgattggggaactggca

SEQ ID NO: 62390 - DNA, 350 bp, Zea mays
  unsure (1)..(350): unsure at all n locations
ctaggccaccaccagcgggcgggctccagtcgcaactcgcaacacagacgccgccgccgcccaaaagaaagacgtcaactccaggagacaagatagtgagaactgaagagaaggatgggcttcgagaagcagatcctgagatccggcaccggccccaagccgataaagggccagaaggtcaccgttcatgcaccggctacgggaaggatcgtgatctgtccaagaaattttggagcaccaaggaccctgggcagcagccattcagtttcagcattggtcagggttcagtgatcanaggatgggacgagggagttatgaccatgcaagtgggtgaagttgctcgtatccag

SEQ ID NO: 62391 - DNA, 338 bp, Zea mays
  unsure (1)..(338): unsure at all n locations
gataagcaccgccatggcgatagtagccaatctcttgctgagaatcaacataaatacttcattttgttaatagtcactgatggcgtggtaactgattttcaagagactattgatgcgatcataaaggcatcagattttcctatatccataattgttgttggagttggaggggctgatttcaaggaatggagtttctagatccaaacaaaggagagaaactggaaagctcaaccgggagagttgcatcaagggatatgatacagtttgccccgatgaaggatatgcacggcactgggatatccacattcaatcatttctgctgnagtacagggcatcat

SEQ ID NO: 62392 - DNA, 345 bp, Zea mays
  unsure (1)..(345): unsure at all n locations
actnagataataggagcanacgtatagctcgcagatcggctcgagcagaacgtggcatgaatctgatggtagagagggccttaaacaggaccgcatttggaaagaggattgcacagcatggttcctttttatcagatcttgcaaagtgtcggattgaactggagcaggcaaggcttttagtccttgaagctgccgatcaacttgatcgacatgggaacaagaaagcacgtggtatcctcgcgatggccaaggttgcagctccaaatatggccctgaaggtgcttgacatggcgatgcaagttcacggcgcactggtgtctcgtctgacacggcttgtcgcactat

SEQ ID NO: 62393 - DNA, 343 bp, Zea mays
cgctgtcggccgccaccaccggcgcagccccttcagtagccactccgatggcgccccctccgtcctacccggcctcctccacggcctcttcctccatctccgcgtccgccgacgaggaggaggacctctatcgccgcctcaaatcgctccaacgccacatggagttcgtcgaaatccaggagagtacgttaaagacgagcagaagaacctgaagcgcgaactccttcgtgaccaggaggaggttaagcaggatcactctgtaccgctcgtcattggccagtttatcgagatggtcgacggcaacaacggcatcgtgggctctaccactggcagcaattactac

SEQ ID NO: 62394 - DNA, 335 bp, Zea mays
gtgatccagaaagcgaacaacacccggtacggcctggccgccggcatcgtgaccaagaacatcgacgtcgccaacaccgtgtcgcggtccatccgcgccggcgccatctggatcaactgctacttcgcgttcgacccggacgcgccgttcggcgggtacaagatgagcgggttcggcaaggacatgggcatggacgcgctcgacaagtacctgcagaccaagaccgtggtcactccgctgtacaacactccatggctctgaccgaccgacctcattgctatccgatgaacagttcaacatcacaaaacaagaagaaacatgtcttgtaagatact

SEQ ID NO: 62395 - DNA, 339 bp, Zea mays
agctctgccgccatcgtcagcgagttcttcgggtacgcggcgaatagcatcctctacaaccgcgctgtgtacccggaggagagcttcagcaaggtgaagaagtacgggcttaccatgctgctcacgcaggacgagggcgtgaagaacttcatcgccagcctcacctcccagctctcagaatggtggaggccgggaagctgcagcgtatcgtgctggtcataatgagcaaagccaccagcgaggtgctcgagcgctggaacttcaacatcgtcaccgacgccgaggtcgtcgagaagggggcatcaaggagaagagcgcaaggagatcgatgaggagatc

SEQ ID NO: 62396 - DNA, 305 bp, Zea mays
  unsure (1)..(305): unsure at all n locations
ccgccgcctgccgcactctcccgcgacgccaccaccacacgttcacggtagcgagagttatcgtcgtcggcggcgaagatggtgtcgctgaagctgcagaagcggctcgccgcgagcgtcctcaagtgtgggaaaggcaaagtctggcttgaccccaatgaagtcagcgagatctccatggctactcccgccagaacatccggaagttggttaaggatgggtttatcatcaggaagcctcagaangttcacgtctaggtccgtgcaagaagggcacatgaggcctagcagaagggaaggcactct

SEQ ID NO: 62397 - DNA, 346 bp, Zea mays
gcagcagccagctccatccatcctctttcgcctcctcgcttcgcttcctcggcggattcctcacccctcgaccgtcgccgaccccgtccccttccggcgcgcaactcgcccgagatggcaaacgcgagatcgggtgtcgctgtgaatgacgagtgcatgctcaagttcggcgagctgcagtcgaagagctgcaccgcttcctaactttcaagatggacgacaagttcaaggagatcgttgtggaccaggtcggggatcgcgctaccagctacgaggacttcacaaacagcctcgccgagaatgactgccgatacgcgatctatgattcgactttgcactgcagaga

SEQ ID NO: 62398 - DNA, 279 bp, Zea mays
agacgtggaggatattttgatcaatatggtatcattcgtgatatcattcagaaccacttgttgcaggtcttctgtttggtggctatggaaaagcctgtctctcttaaacccgagcacattagagatgaaaaagtcaaggttctgcaatcggtggagcctataaagcatgaagaggtatcatcggacaatatgatggctacaaggatgaccctactgtgccagatgactccaacacccctacttttgcatctgttgtactgagggtacacaacgaaagat

SEQ ID NO: 62399 - DNA, 336 bp, Zea mays
gtgggcctctggatcgtcctgcagtccgcgttgctgaaagagtaccccaacaagatgcttgtgacggtgacgcagtgcgtgttcagcatgacgcatcgttcgttgtggcggtggtggccgagaggggcgacttctccgagtggaagctccggttcgacattagcttgttagccatctttacacggggtttgtggtaacgggcgtgtcctactacctccaggcatggtgtatggagatgaaaggccccgtctttctggccatgtccaacccgctctgcttcgtcttcaccatattctgctcgtccttcttcctcggagagatcgttcaccttggcaa

SEQ ID NO: 62400 - DNA, 334 bp, Zea mays
  unsure (1)..(334): unsure at all n locations
ctgacatcgagaccggctgcccgaccccggtccggcgatccctctgcacgcctttctttgcgctgccagccccaatctctcgcatccctgtcaaccatggcggcgtcagcangcggaggcgcggtgcgctctctgtcccagaaggagcaggacatacagatgatgctcgcggccgcgtccacctcggcaccaagaactgcgatttccagatggagcggtatgtctttaagcgtcgcaccgacggcatctacatcatcaacctgggcaagacatgggataagctccagctcgcggcgtaggttattgttgccattgagaacccacaagacatcat

SEQ ID NO: 62401 - DNA, 331 bp, Zea mays
ccgctgcagccatgagtaagttgcagtctgagtctgtcaaggatgccatctcccagattgttggggatgccaaggagaagaataggaagttcactgagactgtggaacttcagattggtctgaagaattatgatccacagaaggacaagcgtttcagtggctctgttaagttgcccatatccctcgtcccaagatgaaggtgtgcatgcttggtgatgcccagcatgttgaggaggccgagaagatgggacttgactacatggatgttgaggctctcaagaaaatgaacaagaacaagaagcttgttaagaggcttccaagaagtacatgc

SEQ ID NO: 62402 - DNA, 261 bp, Zea mays
aacacttttgcaccgccatccaaaccgcttttggggggtactatctcaggaaaccaactcctgctgatatcgctaggcttctccaagttggagaggcacgcggcttccccggtatgctaggtagtgtcgattgcatgcattgggagtggcgtaactgcccaactgcatggaagggatgtttaccggtcacggtaaacaccctacaatgatcctcgaagctgttgcctcatatgacctgtggatttggcatgcatacttcgg

SEQ ID NO: 62403 - DNA, 352 bp, Zea mays
  unsure (1)..(352): unsure at all n locations
atcgatgacacgataanctagcggagtaggtcggaatgctgctcgaggatgatgacctgattgccagactgttgaagctcgggtgttgcagaaataaggaaatagctgttaagacagtcaaaaccatcaagttcttgggactacatgaagagactcaaatacctaagggttgttcgagcccatttgatgtgatttgccagcgaatggaacagaggatggcctatggcacaatgagcaagacatggtactgctccaccacgaagtcgaggtggaatacccggacgggcaaccgccgagaagcacaagcgacgctactggagttcgggaaggttgaaatggcaggtccacactg

SEQ ID NO: 62404 - DNA, 212 bp, Zea mays
gttcaggtgatggccgtgatgcgaacttctgatcctgcttatcgaattttgactacggattactactttttaagactacatatccagtcttgatggctgaatgacgaccctagttatcgagacgcaaaaccttttgttgtatgtgttccttttacagacttccttggcttgtcatgaatttctaatgtgaacttgtgctgtgaacttgttgc

SEQ ID NO: 62405 - DNA, 317 bp, Zea mays
gtcgaccaggcactacctccccagcaagttcaagaagtttgtggtccacaacgtttctgagctggagttgctcatgatgcacaacaggacctactgcgctgaaattgctcacaacgtgtccaccaagaagcgcaaggagatcgtggagcgtgctgcacagctcgacattgtggcaccaacaagcttgctaggctccgcagccaggaggacgagtagtctggtttcttgtcttaacgacgaactggatgttgccattcctttctgtagggaactactttgcttgtgtcttgttagtactgaaaacctagagcactcct

SEQ ID NO: 62406 - DNA, 329 bp, Zea mays
cgcgagaaatacgccagagatgttcaggaaatcatcggatttggaactacagggagagttggtgggttcatttcggaagccatacagggggttggtggaatagtggaactggcaccaggatacttgcccgtggcatacagtatggtaaggaaagccggtgggctctgcatcgcgacgaattcaggcaggagtcgcgagaactggaagccacttctggggattcgaagggcatggtgtcatcccggacatagtcaccatggccaagggtatcgggaatggcatacccataggagctgtagtaacgacgccagagatcgctcaggtgttga

SEQ ID NO: 62407 - DNA, 333 bp, Zea mays
ggttcaacttccctgagaatggcgtcgagctttacgccgagaaggtcgtcaaccgtgggctctgtgccatcgcgcaggccgagtccctccgttacaagctcctcggaggccttgccgtccgcaggcttgctatggtgttcttcgttatgttatggagagtggtgccaagggttgtgaggtgattgtgagtggaaagctcagggcccaaagagccaagtccatgaagttcaaggatggctacatgatctcatctggtcagccagtgaacgagtacattgactcggctgtgagacacgttcttctcagacagggtgttctcggtatcaaggtgaa

SEQ ID NO: 62408 - DNA, 285 bp, Zea mays
cgacgtgagcgtgccgtccgactaccgccacatggaagggttcggcgtgaacacgtacacgttcgtgagcgcggcgtgtgaaggcgcagtacgtcaagttccactggaagccgacgcgcggcgtgcggtgcatgctgacggacgaggaggcggcgctggtctggggacggaacacagccacgcgacgcaggagctgtacgactccatcgcggcggagagcttcccggagtggacgctgtacgtgcaggtgatggacccggacactgaggagcagtacgacttcga

SEQ ID NO: 62409 - DNA, 329 bp, Zea mays
gtcaccattacaccgcccgagaggccgctagaaatccgatcccgagccgccgcgtcttgctcgcgtcttttcccctctgctcgagcacgcgcgggcgcgcgcatgctcccggcggcggcgatgagcgcggtgaacatcaccaacgtggcggtgctggacaaccccagcgccttatcaaccccttccagttcgagatatcctacgagtgcctcgtgcccctcgacgacgatctggagtggaagcttatatatgttggatcagctgaagatgagaactacgaccaacagcttgagagtgtgcttgttaggcctgtcaatgttgggacctac

SEQ ID NO: 62410 - DNA, 329 bp, Zea mays
atgatttgcaagacgatgaattagatcctcggtcctatatgacgtatctgaagtctagaccaccatcatgggaggaagcggctatcagagatctgcaacgtgcaatgaaggatacggagttgggcggtcggtccgaaggagctcatattcacattgttcatctatcagatgcgaaactagcttggaacttatgaaggatgctagacgcagtggtgcaagtctgtctatagaaacatgccctcattacctggcattttcgtccgaagaagttccagatggagatactcgctttaaatgttctcctcccatacgtgatgacacaaacagag

SEQ ID NO: 62411 - DNA, 329 bp, Zea mays
gaagaaagggagcaatttgtcagagcgcgaggtgatggagttcgtggcgaaacaggtagcgccttacaagaaggttagaaaggtggcgtttgtggcggagattcccaagaacgcgtccggcaagattctgaggaaggatctcatcaagctcgccacatccaaatccaaacatgaaaattgtttttcgtgtttacagtgctggaatacgcctgtcgtccacgagcggcgagccattctctacgctgccccggtagtttggttgtagaatgcttgtataactgaagatcccgtcggctatgtgcttgcttgtgtacagtgctctgttctcg

SEQ ID NO: 62412 - DNA, 323 bp, Zea mays
atcgtgctctggaagtggtgcgagggcgacaaccagcgctggaagatcgtcccctggtaaatgtgctgttctgtggctgcactggtcatcaccatgatctggagctttgaaggcatagccacctgtggtcagcagctgctgccgtgttgctagaataaagttggtggcgacgatcgatcgatctttggtgatgggtgtccctccctgtgtgtttgtgtttagttccagtcgtttgtgaggaagtcagttatgtttgagtgagaggggtattcgctcttcggttaactctgtacttgtcatgaggagagtttcatacgcggagt

SEQ ID NO: 62413 - DNA, 331 bp, Zea mays
ggcgacgccagcacgatggcccgctacgaccgcgcgatcaccgtcttctcccccgacggccacctcttccaggtcgagtacgccctggaggccgtccgcaagggcaacgccgccgtcgagtccgcggcacggacaccgtcgtcctcggtgtggagaagaagtcaacccccagctccaggactccaggtccgtgcgcaagatcgcgtgcctggacacccacatcgctctggcatgcgcggggctgaaggcggacgcacgcgtgctcatcaaccgcgcgcgggtcgagtgccagagccaccgactcaccgtcgaggaccccgtcaccgtcgat

SEQ ID NO: 62414 - DNA, 332 bp, Zea mays
caccccgcagccgccctagcacccgcgacgagcaggatctgcccagttgctcttgcggtagttcccccaactgtcaccatgcagaacgaggagggtaagactgtggacctctatgtccccaggaagtgctcggccacaaacaggatcatcactgccaaggaccatgcctctgccagatcaacattcgccacttggatgcgaatggcctgtatgatggtcacttcacaacgtttgctctctctgggtttgtccgtgctcagggcgacgcagacagctccttggacaggctgtggcagaagaagaaggctgatatcaagcagtagattttacat

SEQ ID NO: 62415 - DNA, 314 bp, Zea mays
cctctgcttccgagatctctccccacctcccggtccgctagcagatagcgggggccagagagatcgagatccggaggcgctacgccacccatcagcgtctgcggcaatggcgggcacggtgacggtcccggggtcgtcgaaaccctccacgccgctgctcaaggacgagtcgacatcgtgatcccgacgatccgcaacctcgacttcctcgagatgtggaggcccttcttccagcctaccacctcatcatcgtgcaggacggcgacccgaccaagaccatcaaggtgccgagggctcgactacgagtctacaac

SEQ ID NO: 62416 - DNA, 338 bp, Zea mays
gaactggatgagcaagacgaggaagactccgactccgacgatcccaaatttcagcaggatacagcctgtgagtataggaaactcatcaccatccaagctggcaaaccaaaaggccatttgcgggatgcgctaaaagtggatccagataaagtcaggcggctttctttgagcgagacacagttagctaaagcgacaatctctcatggtgctgaagtcataaggttcacacagaagaatatactccgtgtgtatccaaagggcacgagggttagattcttcaaactacgatccaatgaacgcctggacccatggtgcgcagatggttgcatcaacatgca

SEQ ID NO: 62417 - DNA, 344 bp, Zea mays
gcgcatcgccgccgcgacctcatcgatcaccttcagctttcaatcatggcggacgtcgatgtcgaaccggagttgccgccggagctcccaagaagaggacgttccgcaagtacagctaccgcggcgtcgacctagatgcgcttctcgacatgtccacggacgaccttgtccagcttttccccgcgcgcgccaggagaaggttccagaggggtctgaagaggaagcccatggcgctcatcaagaagctgcgcaaggcgaaaaaggatgctcctgctggtgagaagcccgagccagtcaagacacatctccgtaacatgatcattgtcctgagatgattggaagca

SEQ ID NO: 62418 - DNA, 340 bp, Zea mays
cggcagagagcatatggctacatatgcacatcattgaagattttcgtcaattgccgccaagttttcaaaggctcagttaactatgcttggacaacagtacctacataccctagcggagttattgggttcatgctttgctccaccgaagggcctgctgttgatttccagcaccctgttttcaccatcgaggaggatgaacattctacgaaatcaaaaggaccccttaagttctacaactcggagatccacacggcatcattctgtgtgccctcttttgcaaagagggtaattgagtcaaaggcaagctagacgtgaggatacttcaccagtccagtcgatt

SEQ ID NO: 62419 - DNA, 343 bp, Zea mays
gggtgttggcattgatcagacgcctgccatggcggatcagttcgaggattcggcgaacaatgtgatcattgaggaggtgaacaagggcctgaacccaggaatggtggttctgcttgtggttgcaagcttcctgctgatcttctttgtggggaactatgcgctgtatgtgtatgcgcagaagacgctcccgccaaagaagaagaagccggtgtcgaagaagaagctgaagaaggaaaagctgaagcagggggtctctgcgccgggagagtaaacggccatgctgccgatcctcccgtccagagctcctattcacatgattattagagaaagaattatatatata

SEQ ID NO: 62420 - DNA, 344 bp, Zea mays
tacaaaggggacgtagagaacacaattctggatatccttggaggacttcggtctacctgtacctacgtgggggccgccaagctcaaagagctcagtaggagagccacattcatccgcgtgacccaacagcacaacacggtgttcggctaacctcggggatgttcggttaacctcggggaagcggaagcctcctttcgccacgcttcaccccatcccgcctccttatctgccctagcaggctgcctgctatcacagacgctgagactgagtcctcatcctgatctcggggcttgccctagtgcctgtgtggggcccagaaacagggtctcgaggggccatgggtc

SEQ ID NO: 62421 - DNA, 343 bp, Zea mays
agcaatcatcttcacagaataccaggcaaagaaggtcagtgccaattggctgtggttgccccccactgggaaatttccatcctagcacgagaagtgctaaaccctgcgcagccaatgttgttgcagtacttcctgatggcttccatggcacaacaacatctggacagccattgcctttgatcgagaggtggaggtcaggaggagcttgtgactgtggcggatgggatgaaggttgtatgctaagcgtcctcactgatgcggcccaagagaatgatgccattcaggctaaccaggtaaaggatggcagccagagatttgagctttagatcagggtcgatcacga

SEQ ID NO: 62422 - DNA, 344 bp, Zea mays
cctctgcttccgagatctctccccacctcccggtccgctagcagatagcgggggccagagagatcgagatccggaggcgctagcgctacccatcagcgtctgcggcgatggcgggcacggtgacggtcccgaggtcgtcgaaaccctccacgccgctgctcaaggacgagctcgacatcgtgatcccgacgatccgcaacctcgacttcctcgagatgtggaggcccttcttccagccctaccacctcatcatcgtgcaggacggcgacccgaccaagaccatcaaggtgcccgagggcttcgactacgagctctacaaccgcacgacatcaaccgcatcctcg

SEQ ID NO: 62423 - DNA, 340 bp, Zea mays
ctgggtggcttttcgtcaaggagtggaatgcggatttcaaggacgaactaataaattggttgatggttgctactccttttggcagggagctgccattgctttcacacaaaagttaattacgattgttgataagcaattgaagtcctcgtattcctgcaaaaggccatcaggagaggatgcctgcagcaccagttcatatgggtgcaccgcgaaaaagtcttcctctgctgtggactatgcgaagtttggatttgattttatacaacagagcaaccaaattggcccactcttccataacattgccctgcaacaatacatcctatttgttctcaggtactag

SEQ ID NO: 62424 - DNA, 342 bp, Zea mays
  unsure (1)..(342): unsure at all n locations
ctagaagccccctctccctccctccctctctctctctctcttcgccgtccgaagctccgcacccaatctaatccacacctcagccagatgngccgcaagttcttcgtcggtggcaactggaaatgcaatggaaccacagatcaggtcgagaagattgtcagaaccctgaatgaaggacaggttcccccttcagatgttgtcgaggtcgttgtcagccctccttatgtcttccttcctgtggtcaagagccagctgcgccaagagttccatgttgctgctcagaactgctgggtgaagaatggaggtgctttcactggtgaagcagtgctgagatgctcgtca

SEQ ID NO: 62425 - DNA, 342 bp, Zea mays
cgtggaagaagatgtcgtacctgctgccgcatctgcactcggggtgggcggtggaccaggccatcctcgccgaggaggagcgcctcgtcatcatccgcttcggccatgactgggacgagacctgcatgcagatggatgaagtgctggcagcagtagctgagaccataaagaactttgcggtcatctaccttgttgacatcacagaggtccctgatttcaacaccatgtatgagctgtacgacccttcgacagtgatgttcttcttccggaacaagcacatcatgattgatctcgggactggatacaacaacaagatcaacttggccctgaaggacaagcaag

SEQ ID NO: 62426 - DNA, 336 bp, Zea mays
gatctgcttcagatgatgggtcatgccagtagaccacttcaagataactcagggagatgtgttatattgtgtcatgcacctcgcaaagagtactacaagaagtttctttttgaggccttccctgtcgaaagcaatctgcaccagttcttgcatgatcacatgaatgctgaggtggtggttggtgttgtagagaataagcaagatgctgtggattatcttacttggacgttcatgtatcggcggctagctaagaatcctaacttctacaatcttcagggtgtaagtcacaggcatctgtcagaccatctttctgagctagtgagactattctgaatg

SEQ ID NO: 62427 - DNA, 339 bp, Zea mays
caaggactcgcgacggacggagcaacggaggaagcaactacgcggcaccatggtgaacgttccgaaaaccaagaagacctactgtaagaacaaggaatgcaggaagcacaccctgcacaaggttacccagtacaagaaaggtaaggatagcctttcagctcaagggaagcgacgttatgaccgcaaacagtctggatatggtggtcagacaaagcctgttttccacaagaaggcaaaaacaacaaagaagattgtgctgaagctgcagtgccagagctgcaagcactactctcaacacccgatcaagaggtgcaagcattcgagatcggtggtgacaag

SEQ ID NO: 62428 - DNA, 335 bp, Zea mays
atcaaccagcaacactcttctcttataacatagtacagcgaaggtaactcacatggcaacttccatgggttgtctcgtcttgctctgccttgtttcttctctccttcccagtgccgtccttggccacccatggcgtggcttgttcccacagttctatgaccattcgtgccccaaggcgaaggagattgtgcagtccattgtggcacaggctgtggccaaggagaccaggatggcggcatctttagtcagactgcatttccatgactgctttgtcaagggctgcgatgcttcggtgctgttggacaacagcagcagcatattagtgagatagggtc

SEQ ID NO: 62429 - DNA, 340 bp, Zea mays
  unsure (1)..(340): unsure at all n locations
cgtcctcctggagngtacctcctgaagcccaacatggtgactccaggctccgactccaagaaggtgaccccggaggtgattgctgagtacaccgtcagtaccctccagaggactgtacctgctgctgtgcctgctgtggttttcctctctggtggacagagcgatgatgaggctacccgcaacctcaatgccatgaacaagctcagcaccaagaagccgtggtccctgtctttctccttcggccgtgccctccaggcgagcaccctcaaggcctgggctggcaaggttgagaacttggagaaggctagagctgccttcctgccaggtgcaaggccaactc

SEQ ID NO: 62430 - DNA, 339 bp, Zea mays
caaggactcgcgacggacggagcaacggatgaagcaactacgcggcagcatggtgaacgttccgaaatatgacaagacctactgtaagaacaaggaatgcaggaagcacaccctgcacaaggttacccagtacaagaaaggtaaggatagcctttcagctcaagggaagcgacgttatgaccgcaaacagtctggatatggtggtcagacaaagcctgttttccacaagaaggcaaaaacaacatagaagattgtgctgaagctgcagtgccagagctgcaagcactactctcaacacccgatcaagaggtgcaacactttagaatcggtggtgacaag

SEQ ID NO: 62431 - DNA, 336 bp, Zea mays
gttgatatgacctatgaggtccgtgagggtgatgatataagcgctggtgacaatgtaacagtgcaggtaactctggagcgtgacatgactaacgtttcatctgaggttggtccagtccatgcgccaaggtttcccaagcctaaggaagaaggctggtggctggtgattggggacagctccacaaaccagttactggcaatcaaaagagtggcactccagaagagggcgagagtgaaacttgagttctctgctccggcagaggctgggagaaaggactacatgatttacttgatgtcagactcttacttgggctgcgataggagtatgaattcaccg

SEQ ID NO: 62432 - DNA, 338 bp, Zea mays
tgagaatgactgccgatacgcgatctatgatttcgactttgttactgcagaggatgtccagaagagcaggatcttctatatcctatggtccccatcctccgccaaggtgaagagcaagatgctttacgcaagctcaaaccagagattcaagagtggcctcaatggcattcaggttgaactccaggccacagatgcgagtgaaatcagcctcgatgagatcaaggatcgggcacgctaggcgcaccgccatcgcgagtttcatgatcacgcatcatggactcgcctactactgtggatttgtatgccattatagacttggtctgcgagagactgctttg

SEQ ID NO: 62433 - DNA, 330 bp, Zea mays
ggctgcagaaggagggctcgctagctttccctctcacctccgagattataggcgccgtcatgtttgacatattcggaggtgccaccacaaccctagggtccacgatggagtgggctatgtcagagctaataaagaaatcagagacgatgagaaagacacaagaggacattcgtcgcgtgctaggtgggtcacgacgaggtgtcatcacgaacactgacctcgttggcctcacctacctaccaatggttatcaaggaggttcttcggctgcatcctccaaaccctcgtgtggtcccgcgtgagtcgagagaggattgccagtcatgggcta

SEQ ID NO: 62434 - DNA, 315 bp, Zea mays
cacagctgcgacctccgcatgggcgccttcacgcttggcgtcaaccgcgtcgcgcgcgccaccgtcctcaggggatgggaagcatgacctccctccgtgtcgtccgttggcccctccctgttgtatcctcttggtcttgggcccttgtttttctttggttaattattgtcgagatcaacggagatccgagaaaaacgggctcagttaataattccaagaagtgcgtcttcttggagataaaatagcggaaggagagttataataagtctgtaactgtaacccatagctgagatgctgtctgcaagcagcaatgcc

SEQ ID NO: 62435 - DNA, 333 bp, Zea mays
gttgggcgcagagaatccccaagcaaacaaacagggtatagggagaggagaggagaggagaggagagtttgggtctgggacaccatggctccgatgaagctgtacgtggcggtgatgtcgtggaacgtgacgaggtgcgcaacgcgctggatgaggctggctccgactacgagatcgtgcccatcaacttcgccaccgccgagcacaagagccccgagcacctcgtccgcaacccgtttggtcaggttccagctctgcaggatggtgacttgtacctcttcgaatcacgagcaatctgcaagtacgctgctcgcataacaagccagagctgtt

SEQ ID NO: 62436 - DNA, 333 bp, Zea mays
cgttgatccggccggcgatgctgatgatgtggtcactacttacgaagacaaggatggtgactggatgctggtcagcgacgtcacgtgggaaatgtttgtcgagtcatgcaacggctgaggatcatgaacagttctgaagccataggtcttgcaccaagaacgaaggacaagtgcaagaacaagagctgaagaagatgcagtgttaaagatgttgcacattgtatcaaaagaatggtccccttgcagtgcgctgccgttttttttcctactagaaatataacgcgttttaattactactagttggagggagactgcttgttcaactcttcatgg

SEQ ID NO: 62437 - DNA, 334 bp, Zea mays
cttccagaacgtgcaaatgagtgtcaacttcctcgtgtcgctcttgaaaaagaattggcagaatgtatgttcctcaatgttcctcacatctgtataaaattaatgcttatgttctaaaatatgactatccactgggctaactgtcatcttgtgtgtttgcaggtgagatgcttgtacctgaagagcactatgggaaaggtgtaccggctgttctaaattttccaattaggcttagaatttccaggagactcgagtgcttggacacttgccattttccctaccatccattttttttgagcaactatggattaactattaaaaacttggtcttgta

SEQ ID NO: 62438 - DNA, 330 bp, Zea mays
gttcaggatccacatcttcccgagcgagttcttggttgacctcttcccccttcggaccacctccaaggctcttggtgtagcttgccactctcaccaatcaagttttcatgtctgatctcgacattcagatcccaactgccttcgatcccttcgctgaggccaatgctggggactctggtgcggcacagggtcaaaggactacgttcacgtgcgcatccagcagcgtaatggtcgcaagagcctgactaccgtccagggattgaagaaggagttcagctacagcaagatcctcagagatctcaagaaagagttcgctgcaatggtacagtg

SEQ ID NO: 62439 - DNA, 329 bp, Zea mays
gggatactacctcatgctgacaactttgctcacattggtggattcgcaacgggtttcctcttgggttttgttctgttggcaatgcctcaatttggctggatggaacaccacgagctgccgcagactaaccaacctcccaagtacaaagcgtaccagtatattttgtggggtgtggcactagtcttgctgttagttgggtttgtgatttcacttgtgatgcttttcaaagggaagaacgggaacgacggctgccactggtgccactatctaaactgcgtgccaacatcaaagtggaagtgcaacacctagaccctcaggtttctgttact

SEQ ID NO: 62440 - DNA, 331 bp, Zea mays
ctccatccgcacctctctccatctccctgctcctccgccttcttcttgatccagccaagccagggatcgccatgtcggactcggaggagcaccacttcgaatcgaaggcggacgccggagcgtccaagacctacccgcagcaggctggcaccgtccgtaagaacggcttcatcgtcatcaagaaccgcccctgcaaggttgtggaggtttctacctcaaagactggtaagcatggtcatgccaaatgccactttgttgccatagatatattcaacggcaagaagctcgaagatattgttccttcgtcacacactgtgatattccgcatgtg

SEQ ID NO: 62441 - DNA, 330 bp, Zea mays
cagagcttctagggaggctccgtgggcttaaggaggatttgctgagttggaggagtaatttagactcccaagtgacgagatacaaagtggaactctctgacatcaagagtgcactcaataatgaaatagagcagcttcgcgcagatttccaagagctgaggaccacccttaagaagcagcaggaagatgtgtcacttagcttgaagaatttgggggcttcaagatgctaccgaaaatgatgggaacaaaggaaatggagacggcacaaatgaggtcttgtcagctaacttggggaacttgaaactggatggtcttctgagaactatgatg

SEQ ID NO: 62442 - DNA, 373 bp, Zea mays
  unsure (1)..(373): unsure at all n locations
agttcaacttcgctcgataagtggcagtcgagctgttacgtccgggaagagtcgtcacaccgtagggctactgtggcgcatcggacgccaggcncgaggtaccgctcgcgtntagcgatggctgcgctcaggagtgcgcgttgcacatacgacgcatgagctttgacgtatgggctgttctgtcggttatgttgatcggagatgtggtgccaagggttctagaggtgatggtgagtggaaagctcagggcccaaagagccaagtccatgaagttcaaggatggctacatgatctcatctggtcaaccagtcaacgagtacattgactcggctgtgagacacgttcttctcagacaggtgttctcggtatcaag

SEQ ID NO: 62443 - DNA, 325 bp, Zea mays
gttatggaagaagagagttgggcactacaagtccgtgattgcgcaacttggtcagaaaggccggtaccgcaacctactcgatatgaatgcaaagtttggcggcttcgctgcggcattggtgaatgatccctagtgggtcatgaacatggtcgctactgtggggaactcaacaacccttggggcaatatacgagcggggcctcattggaagctaccaggactggtgtgagggcatgtccacttatccccggacctacgacctcattcatgcggattcactgtttacactgtacaatggcagatgtgagcggacaacattctgctcg

SEQ ID NO: 62444 - DNA, 276 bp, Zea mays
cgattggtgagctcaagaagttggtggaggaggggaaggtcaagtacatcggcttgtcagaggccagcccagacacaatccgccgtgcgcacgccgtgcatcccatcaccgccgtgcagatggagtggtcgctctggtcccgagacatcgagcccgagatcgtgccactctgcagagaattggggattggaattgtggcttacagtccaattggccgtggattttttggtggaagaggagtgacacagcaagtttcttctgaatctagtctgcaaa

SEQ ID NO: 62445 - DNA, 285 bp, Zea mays
ctgatggttacctacccttcaactcacggagtctatgaagaaggcattgatgagatctgcaagatcattcatgaaaatggcggacaggtctacatggacggggctaacatgaatgctcaggttgggttaacaagccctggttttattggagctgatgtttgtcacctttaccttcacaagacattttgcattccacatggtggaggcggtcccggcatgggtcctattggggttaagaagcatttggcaccatttttaccatctcacccagtgattcccactggt

SEQ ID NO: 62446 - DNA, 285 bp, Zea mays
aacgcactcgaacagctcttgggatcaagaagggaacagtgggcgagtgggtgaggtgtcacgacgcagacctgccgtacacgatcgacctcaagagcgccatcaagtaccaccggaacctgacgtccagaggctaccgcgccctggtgtacagcggcgaccatgacctgctggtgccacacctgggcacccaggcatgggtcaggtccctcaacttccccgtcgtcgacgactggagggcgtggcatctcggtggccaagccgccgggttcacgataaattact

SEQ ID NO: 62447 - DNA, 287 bp, Zea mays
caaatttgatgagaagacagggatttccttggttaacggggctcatgatactgcaaagctggctggtctccttgaggtattcatcaagaagtatgtccaatgttatgggtgtggaaatcctgagacagagattctcatctcaaagacccagatgatatcactgaaatgtgcagcctgtgggttcgtctcagatgttgatatgagggacaagctcacaaccttcattctgaaaaacccaccagaacagaagaagggcggaaaagacaagaaggccatgaggagagctg

SEQ ID NO: 62448 - DNA, 290 bp, Zea mays
cttcctgcaaggttatgcgggattcgaatggtgtcagcagaggttctggatttgttgctttcaaatctgctgaagatgctaaccgagctcttacggagatgaatggcaaaatggttggaagcaagcccctttatgtagctcttgcgcagcgtaaagaagacagaaaggcaaagctacaggcacaattttcacaaatgcgtcctgttgcaatggcgccttcagtaggtcctcgcatgcccatgtttccacctggtgtccctggagttggtcagcagctgttctatggtcag

SEQ ID NO: 62449 - DNA, 267 bp, Zea mays
aacgcactcgaacagctcttgggatcaagaagggaacagtgggcgagtgggtgaggtgtcacgacgcagacctgccgtacacgatcgacctcaagagcgccatcaagtaccaccggaacctgacgtccagaggctaccgcgccctggtgtacagcggcgaccatgacctgctggtgccacacctgggcacccaggcatgggtcaggtccctcaacttccccgtcgtcgacgactggagggcgtggcatctcggtggccaaccgccgg

SEQ ID NO: 62450 - DNA, 277 bp, Zea mays
gcacagagtatttttgacagataaataccgcccagaatcttgctgcataattgcaaattactacagtctgaagggtcagcatgagaaatcagtttcatactttcaaagggcactaaagcttaatcgaaagtacctctcagcttggaccctgatggggcatgagtatgttgaattgaaaaatagtcctgctgcaattgatgcctacagaagagctgttgatattaatcctagagatttccgtgctttgtatggtcttggtcaaatctatgagatgatg

SEQ ID NO: 62451 - DNA, 282 bp, Zea mays
ggacacccaagtgaagcttgctgttgtggtgaaggtgatgggaaggaccggctccaggggtcaggttacccaggtcagagtgaagttcttggatgaccagaaccgtctcatcatgaggaacgtcaagggaccggttcgcgagggagacatcctcacactgctcgagtccgagagggaggctaggaggctgcgttgaggcggaatggtgtcttgctagttttcgtatggagttggatgtcatctaattgtgctatgtttttcaaacattggaatgacctttaa

SEQ ID NO: 62452 - DNA, 281 bp, Zea mays
catgattgagaggtccaccaaccttgactggtacaaaggcccaaccctgcttgaggctctcgaccagatcaccgagcccaagaggccttcggacaagcccctgcgtctgcccctccaggatgtgtacaagattggtggtattggaactgtaccggttggtcgtgtggagactggtgtcatcaagcctggtctggtagtcacctttggtccaaccgggctgactaccgaggtgaagtctgttgagatgcaccacgaggcacttcaggaggctcttccgggtg

SEQ ID NO: 62453 - DNA, 281 bp, Zea mays
gacacatcaagtgacaccaccgctcttgccgtggcctgctacgacctctcacaattccttcagtaccatccatctggccgaatcgtggtggcagacctcaaggctaaggaccgagtcatgaaactcatgaatcatgagaacactgaagtgaggaaaaatgcattgatctgtgtgcagaggctcttccttggcgcaaagtatgccagtttcctgcaggcttgagaaaagctgagtcttgtatttagatccagagaaccctggtcatttttcagaatggctgt

SEQ ID NO: 62454 - DNA, 279 bp, Zea mays
acaagaacaacatttcggggacaatacctcctgcccttggaaagttgaagtcccttgtattcttgcgtctcaatggcaatcatttgactgggcccatcccaagggaactcgctggaatatctagtctcaaagttgttgatgtttcaagtaatgatttgtgcgggacgattcccacgtctggaccatttgagcatattcctctgagcaactttgagaagaacccgcgcttggaaggtccagagctacaaggcctggccatatacgacaccaactgctaga

SEQ ID NO: 62455 - DNA, 285 bp, Zea mays
gttctcttgaagaaagtggtgaagctcggcgccttagaaaatcattcgaggaaatggctgatgtaagaagcaaggatctgttgaaagattcttgcctccctgttactgcattggaggcggcccctgatggttcctctgataatatgtggtcttgggcagaggtgaaacatctctctaaatgtctagtccaggcccttgatgctggtctggaacacgccctcttggattctgtagtgactgtagacaggtatgcagctgctgagggtttctataaactagctatgg

SEQ ID NO: 62456 - DNA, 290 bp, Zea mays
accaaacatgccagtacaacactactccgcaggaagcttttacagtggctcaagatatcatgaagacgatgctagaaaaggggtacgtgctcagcaaggatgctttggctaaggctagagcctttgatgagtcctatggattaacagctgcagcagcagccagggctgcagagctgagcaagagaattggtttaactgatagggtcaatgctggtgttggtgcaatgcgatcagtcgatgagacatatcgcgtaagagagacaaccaagacggttgctactgccactgga

SEQ ID NO: 62457 - DNA, 272 bp, Zea mays
agaggaagcaagtgagactaccgaggaggaagaggctgagaaacctgagatcaagatcgaaacagctccagcagattttcgtttcccaacaacaaaccaaacaaggcattgtttcacacgctatgttgaatatcacaggtgtgtggctgcaaaaggtgaggatgcacctgagtgtgataagttcgccaagtactatcgatccctgtgcccaggtgaatgggttgatcgctggaacgagcaacgcgaaaacggcaccttccctggacctctgt

SEQ ID NO: 62458 - DNA, 271 bp, Zea mays
caagctatatgggttttgctcccacccaaggtacagatttttagtgtacgattatgtcgatagagggagccttcgcgcgtccttggaaaacgtggagatcgcaggggagctgggctgggacggagagacgagtcgccatcgcaagggacgttgctcaagctctgtattacttacaccacgagtgcaccccgccaattattcaccgagacataacaagtaacaatatcttgcttgacacagaatttaaggcttacgtttcagactttggcat

SEQ ID NO: 62459 - DNA, 275 bp, Zea mays
ttgatccaaggagcattctgcattacaaaatcaatgcatatacgaagaagtaatagaggcatgtgcgcttcatgttgacatattggcaatgaccagaggagatatgtcacatattggagagaaaggtaccaacttatctggtggacaaagagctcgtctagcattggcaagggctttgtaccacaattctgatgtatacttgtttgatgacatccttagcgcggttgactcccaagttgcttcgtgcatcctggaaaaggctattatgggggcac

SEQ ID NO: 62460 - DNA, 277 bp, Zea mays
gatacaggtttcttcttcagaggccagcgtatctgggaagcagtcatggccgaacttctgtctaagggtgtagccagagcgaaacaggcttttatgactggatgctcggctggtggcctttctacatacattcattgtgatgatttccgggcacttctaccaaacacacctactgtcaagtgcctcgcggatggtggattctttcttgatgtagaagacatttctggaagaaggtatatgcggggcttttataacgatgtgctacggctgcaggatg

SEQ ID NO: 62461 - DNA, 284 bp, Zea mays
ggtctgggatgtcgggggtcaggacaagatcagacctctctggaggcattacttccagaacacacagggtcttatctttgttgtggatagcaatgaccgtgaccgtgttgttgaagccagagatgagctgcacaggatgctgaacgaggatgagctacgtgatgctgtgctgcttgttttcgccaacaagcaagatcttcctaatgccatgaatgctgctgagatcactgacaagcttggattacactccctgcggcagcgacactggtacatccagagcactt

SEQ ID NO: 62462 - DNA, 290 bp, Zea mays
ttgatccaaggagcattctgcattacaaaatcaatgcatatacgaagaagtaatagaggcatgtgcgcttcatgttgacatattggcaatgaccagaggagatatgtcacatattggagagaaaggtaccaacttatctggtggacaaagagctcgtctagcattggcaagggctttgtaccacaattctgatgtatacttgtttgatgacatccttagcgcggttgactcccaagttgcttcgtgcatcctggaaaaggctattatgggggcaccaactaatgcagaaa

SEQ ID NO: 62463 - DNA, 274 bp, Zea mays
gtcaagttgacaatgtttcatgggaggggtggaacagttggcagaggaggtggtccaactcatctggccatattatctcagccaccagacacgatacatggatcacttcgtgtaacagttcaaggcgaagttattgagcactcctttggagaggagctcttgtgcttcagaactttgcaacgctacactgcagctactcttgagcatggcatgatcctccgatttcccctaagccagaatggcgtgctctgatggatgaaatggctgttgtagc

SEQ ID NO: 62464 - DNA, 279 bp, Zea mays
aacaagctcaagaagatggcattgagggtgattgctgacagtctatctgaggaggagattgggggtttgaaggagttgttcaaaatgatcgatactgacaacagcgggacgataacttatgatgaactgaaggatggtctgaaaagggttggctcggacctgatggaacctgaaatccaggctttaatggatgcagctgatatcgacaacagcggaaccattgactatggagagttcttggcggctacgttgcacatgaataaactggagagggaggaa

SEQ ID NO: 62465 - DNA, 299 bp, Zea mays
cggctcgagcaacatcttagataaagacaaagacaagtacctccgcaatgcttgctcagcagaggggaagtttgtcatcatagagctttctgaagaaactttagtagatacaattgcaatcgcaaattttgagcattattcgtctaatccaaaagaatttgaactgctgagcagtctgacatatcccacagaaaactgggaaactcttggaagattcactgccgcaaatgcaaggcttgctcagaattttacttttcttgagccaaagtgggctagatatttgaaactgaacttggtaa

SEQ ID NO: 62466 - DNA, 266 bp, Zea mays
tcggaactccccagactcgatcaaggatattacaacaacgttcagggctcttggaagattgaattggccatcagagtatgaggattatcatgtgggcattccgtttggtacctttcttacagtagggggtttcctcaacttcatgttgactggaagtacctctgctcttcgttttggtattgttcttggccttgcactgttgactctgggtatctcaagtttgagatcacatagagaaggcgaccgtcggcctcgtcttctggtga

SEQ ID NO: 62467 - DNA, 267 bp, Zea mays
ggaaccatttgtcaatatacccgatgacaaaataagggaggcgctcaaagttgtcttagacccaagaaaccaacctctgcttattcattgtaagagaggcaagcaccgaactggttgtttggtcgggtgcttgaggaagctgcagaaatggtgcttgtcttcagtcttcgacgagtaccatcgctttgccgctgcgaaagcgcggatcactgaccagagattcatggagctgttcgacgtctcaagcttgaagcacctgacaccctc

SEQ ID NO: 62468 - DNA, 276 bp, Zea mays
ctcactcctggagcacactgatgtctccatcctgctcgacaacgaggccatctatgacatctgcaggcgctccctcgacattgagaggcccaactactccaacttgaatcgccttgtgtctcaggtgatctcatcgctgactgcttctctgaggttcgatggtgccctcaatgtggatgtgaacgagttccagaccaacctggttccttacccgaggatccacttcatgctctcctcctacgcaccggtgatctcttctgcgaaggccttccacga

SEQ ID NO: 62469 - DNA, 278 bp, Zea mays
acctgatggagattcaggtcaatggtggtaccattgctgacaaggtggactatggctacaaattctttgagaaagaggtccctgttgatgctgtcttccagaaggatgagatgattgacatcattggtgtgaccaaggggaaaggttacgagggtgtggtcactcgttggggtgtcacccggcttccccgcaagacccacaggggtctccgcaaagttgcttgtatcggtgcatggcatccggctagggtctcctatacggttgcccgtgctggtcag

SEQ ID NO: 62470 - DNA, 282 bp, Zea mays
aagagatctataatgggatctggggacggcaatttcctcaaggtgcttctcaaaaacttcgatgtgcttgctgggcctgtcattagtcttgtttatcctctatatgcttcaattagggctattgagatcaagtctcctattgatgatcagcagtggctcacttactgggttctctactccttgatcaccctctttgaacttacttttgctaaagtccttgagtggattccaatatggccctatgcaaagctgattgtcatctgctggttggtccttccttac

SEQ ID NO: 62471 - DNA, 286 bp, Zea mays
tttctctcttcgttcccaatttgaaggctgcccaacccttgcgccggtaggtggtggcggtgaggatagagggttacctgaggaggcagtgatggcggccacgattcagtacaaccggagcaacccggcggtgaagcggatcctgcaggaggtcaaggagatgcagtccaacccctcacccgacttcatgtccctccccctcgaggaggacatcttcgagtggcaatttgctatccttggtccgagagacagcgagtttgagggtggaatttatcatggcaggatc

SEQ ID NO: 62472 - DNA, 266 bp, Zea mays
aaacaaggttctgtttagtagagaggaagggcagcagcaaggggagcagaggctgcaagagagcgtgattgtggaaatctcgaaggaacagattcgggcactgagcaaacgtgccaaatctagttcaaggaaaaccatttcctctgaagataaaccttttaacttgagaagccgcgaccccatctactccaacaagcttggcaagttctttgagatcaccccagagaaaaaccccaagctgtcgggacttggatatcttcctcagt

SEQ ID NO: 62473 - DNA, 275 bp, Zea mays
gttcagcaggtgtccctggtcatcaactatgatctccccacccagccagagaattacctgcatcgcattggtcgtagtggtcgtttcggtaggaagggtgttgccatcaactttgtgacccgcgacgacgagcggatgctgttcgacatccagaagttctacaacgtgttgattgaggagctgcctgccaacgtcgctgaccttctgtgatcattttgaagaaaaacagaactaaaagaacggtggtgggggtgatctggtaaggcttggttttg

SEQ ID NO: 62474 - DNA, 106 bp, Zea mays
agaaggtggtgacattgtgtttggtggaatcgattctagtcactaccagggtgatcacacctatgtcccagtcactcagaagggatactggcagttcactatcggt

SEQ ID NO: 62475 - DNA, 278 bp, Zea mays
ttcgcttgttgttctaaatataagtcacaacaagatattctcccttccagcagctatcggagatctcccgttgctaaaatcactggacatgtctttcaatcaaataaacactctgcccgaagagattggcctggctactgctttagtcaaggttgacttctcaaacaattgccttactgagcttccacctaacctcgccacatgcccggactagtccgaactcaaggcatcaaacaacaacatatccagagtaccagatgtacttgctggctgttcca

SEQ ID NO: 62476 - DNA, 281 bp, Zea mays
agcggcattaagaatgcagatcttcgtgacaaccctaacggggaataccataaccctcgaggtcgaaagcagcgacaccattgacaatgtcaaggctaagattcaagacaaggaaggcatccctccggatcagcagcgtatgattttcgacggaaagcaacttgaagatggaaggaccttggccgattacaacatccagaaggaatcaacccttcacctcgtcatcaggcttcgaagtggcatcatcgagccttcactcatggctttggctcgcaaatagg

SEQ ID NO: 62477 - DNA, 282 bp, Zea mays
ccagactgagaggaagagagagggagattctttgtttgctaccttctctcggaaaaatggttacgttcaggtttcaccagtaccaggtggttgggagggctcttcccacggaagcagatcagcacccgaagatctaccgaatgaagctctgggccaccaacgaggttcgcgccaagtccaagttctggtattttctgaggaaactgaaaaaggtgaagaagagcaatggccaagtgcttgccatcaacgagatttttgagaagaacccaaccaaaattaaga

SEQ ID NO: 62478 - DNA, 277 bp, Zea mays
cacaaatatttaactgtggtgcacctgatacaggtaacatggaggtcctgttgaggtatggcactaaggagcaacagaagcaatggctagttcctttattggaagggacaattcgttctggatttgcaatgacagaaccacaagttgcatcttcagacgcgacaaatatagaatgctcaatatccaggcaaggagatttttttgtgataaatggaaggaagtggtggaccagtggagctatggatcctaggtgcaaaatctgatattaatgggaaag

SEQ ID NO: 62479 - DNA, 280 bp, Zea mays
ggcctagcaaatcagaagaggaacagctgaatgtcttccggttccctcctcttgtggcccctatcaagtgcaccgtgtttccccttgttaagaatcaagagtttgacgatgctgccaaagtaatcgccaaggcattaacaactgctggtatctcccacattattgacactactgcaatttctattgggaggaggtacgccaggacggatgagatcggtgttccatttgctgtaacagtggattcggcaacgaacgtgacgatccgagagagggacagcaa

SEQ ID NO: 62480 - DNA, 281 bp, Zea mays
gcacaagcagaagttgcggttgtactcttcctcctccgccgtcggctcagatctctgcgtgcgggctagcgatggcgtcgttctcggaggctccccctgggaacccgaaggcgggcgagaagatcttcaagaccaagtgcgcgcagtgccacacagtcgacaagggcgccggccacaagcaaggtccaaacttgaatggtctttttgggaggcagtcgggtaccaccgcaggctactcctattctgcgggaaacaaaaacaaggctgtggtctgggaggag

SEQ ID NO: 62481 - DNA, 303 bp, Zea mays
agaggaacgagatctgggagttcggctcgagatctggaccagagtcgtctgccaaacttgacattgttgttctcgaaggtgatttcaacaatgaagatgaggagggctggacaggggaagagtttgacagccatgttgtgaaagagcgcgagggaaaacgacctattttaaccggcgatctacaagtcacactaaaagaaggtgtcgggacaattggggagcttacgttcacagataactctagctggataaggagtaggaagttcaggcttggcttgaagcttgcctcaggattttgtgagg

SEQ ID NO: 62482 - DNA, 271 bp, Zea mays
cgcccgttcaggatccacatcttcccgagcgagttcttggttgacctcttcccccttcggaccacctccaaggctcttggtgtagcttgccactctcaccaatcaagttttcatgtctgatctcgacattcagatcccaactgccttcgatcccttcgctgaggccaatgctggggactctggtgcggcagcagggtcaaaggactacgttcacgtgcgcatccagcagcgtaatggtcgcaagagcctgactaccgtccagggattgaag

SEQ ID NO: 62483 - DNA, 273 bp, Zea mays
tgattggccaagggaacccaaatgatttcttagtttctgctgctgtagctgagtttaaagggcctgttgtatttggtgttgttcgtctggcccaagtaaacatggagttggctagagttgaagccacgtttagtggtctatcacctggtaaacatggatggtcaataaatcagtttggggatttgacaagaggtgcagaaagcactggcaatgtctataatccgccagatcatttatctgataagccacttggtgacctgggaacactagaag

SEQ ID NO: 62484 - DNA, 273 bp, Zea mays
agagaatccgaggcgaagagaagagaaaaattaagatggaggggaaggagcaggatgtgtcgctgggagcgaacaagttcccggagagacagccgattgggacggcggcgcagagccaagacgacggcaaggactaccaggagccggcgccggcgccactggttgacccgacggagtttacgtcatggtccttttacagagcagggatagcagagtttgtggccacttttctgtttctatacatcactgtcttaaccgtcatgggagtcgccg

SEQ ID NO: 62485 - DNA, 276 bp, Zea mays
cagggattgaagaaggagttcagctacagcaagatcctcaaagatctcatgaaagagttctgctgcaatggtacagtggtccaggacccagaacttggacaggtcattcagctccagggtgatcagaggaagaacgtctcgaatttcctcgtccaggccggcattgtgaagaaggagcacatcaagattcatggtttctgagcaaccgccgggtccatagcaaaccaaccctgcatgcagggccagcttattatatataatatctgaggtggagca

SEQ ID NO: 62486 - DNA, 268 bp, Zea mays
gccggcgtcgacggcctagggttcgaggaacgtccgtccgtccgtccggggaaggagcggtagggaggcggagatgatcgaggtggtgctcaacgaccgcctggggaagaaggtgcgggtcaagtgcaacgaggacgacaccatcggcgacctcaagaagctggtggcggcgcagacggggacgcgccccgagaagatccgcatccagaagtggtacaacatctacaaggaccacatcaccctcaaggactacgaggtccacgacggc

SEQ ID NO: 62487 - DNA, 270 bp, Zea mays
cgccgacgccgagtcctttctccatcctgcatctgccgctgtttccgacaggatgtatctcacgaggacggagtacgaccgcggggtgaacaccttctctccggaggggcggctgttccaggtcgagtacgccatcgaggccatcaagttgggatccactgcgatcggtttgaagacaaatgatggtgttgtcctcgccgttgagaaacgtgtgacctcaccactgctggaaccaagcagtgtggaaaaaataatggaaattgatgagca

SEQ ID NO: 62488 - DNA, 273 bp, Zea mays
cttggcgctgagattgttggcaccttcatcctagtctacaccgtcttctcagccaccgatgccaagaggaatgccagggactcccatgttcctatccttgccccactgccaattgggttcgcggtgttcctggtccaccttgccaccatccccattactggcactggcatcaacccagctaggagccttggcgctgccatcatctacaacagggatcacgcctggaacgaccattggatcttctgggtcggccccttcattggcgctgccctg

SEQ ID NO: 62489 - DNA, 271 bp, Zea mays
gcaaaaacaagccagagctgttgagggaaggaaacctcgaggaggcacggatggtggatgtttggatcgaggtggaggctaaccagtacaccggtgcactgaatcccatcctcttccaggtcctcatcagtccgatgcttgggggaaccaccgaccagaaagttgtggatgagaaccttgagaagctgaagaaggtgctagaggtgtacgaggcacgcctgaccaagtgcaagtaccttgctggagacttcctcagcctcgccgacctgaa

SEQ ID NO: 62490 - DNA, 273 bp, Zea mays
aaacaattcaattcaatctgcctcgatcatggagaggaaaacatttgggtttttgttcttgctcctccttgtcttagcttctgatgtgacggtgaagagagcagaggcgaaagattgcttgacaaggaggcacgggttccagggtagatgcttattcgacaggcaatgtgcacatgtgtgcaggagcgatggtttcatcggtggtcagtgccgaggccctcttcgcaaatgcttttgcagcaggccatgttgatcgagattactactgccaaa

SEQ ID NO: 62491 - DNA, 272 bp, Zea mays
agcaactccccacgcaaagccgccgccgttccctctcgtcttccccagttcccctacgccggtaatcccacgtcctatcagccgccgatccagccttgcttccatccatccatccatccatctcgtcgcttctctctgttccgcgtgcgatcgagtagatcaaaaggaggaggaggatggcgaggagttcgttcaagttggagcaccccttcgaaaggaggcaagctgaggctaaccgcatcagggagaaataccctgacagaatccctgtc

SEQ ID NO: 62492 - DNA, 276 bp, Zea mays
caagaacgcggaggcaacacaatcaacattgacacctgatggatggctcaagactggggatctctgctacatagatgaggatggttatctcttcgttgtggatcgtctgaaggagttgatcaaatacaaagggtaccaggtgcctccggcggagttggaagctcttttgctaacacatccagaaatcgaagatgtcgccgttataccgtttcccgaccgtgaggtcggccagttcccaatggcctacgtagtgaggaagaaagggagcaatttgtc

SEQ ID NO: 62493 - DNA, 270 bp, Zea mays
aacgcactcgaacagctcttgggatcaagaagggaacagtgggcgagtgggtgaggtgtcacgacgcagacctgccgtacacgatcgacctcaagagcgccatcaagtaccaccggaacctgacgtccagaggctaccgcgccctggtgtacagcggcgaccatgacctgctggtgccacacctgggcacccaggcatgggtcaggtccctcaacttccccgtcgtcgacgactggagggcgtggcatctcggtggccaagccgccgggt

SEQ ID NO: 62494 - DNA, 268 bp, Zea mays
gatctatttgattacttccccttgactgcattggtcgagtcagaaatatattgtttgcatggtggattatcgccatccattgagaccctcgacaacatccgcaacttcgaccgtgtccaagaagttcctcatgaaggtccaatgtgtgatcttctgtggtctgatccagatgatcgatgtggttggggtatttctccacgtggtgctgggtatacctttggacaggatatatcagagcagttcgaccataccaatagcctaaggctta

SEQ ID NO: 62495 - DNA, 268 bp, Zea mays
gttcgtgaaccgcgtcgtgtcgtccatgttcaacaccgttgccggcaagaagatcgccgtcctcggcttcgccttcaagaaggacaccggcgacaccagggagaccccggccatcgatgtctgcaagggcctgctgggtgacaaggcccagatcagcatctacgacccccaggtgacggaggaccagatccagcgggacctagccatgaacaagttcgactgggaccacccgatgcacctgcagccgacgagcccgacggccgtgaag

SEQ ID NO: 62496 - DNA, 270 bp, Zea mays
ctcgagccgaatcggctcgagggatcacacttatacaaaattctgcaattagtaacttgtagagagttgctgcttggaagaaaggttgtttaatggtcaagattgtgatgtctgggaatgcagcagtcaaaaggagtgattgggcctcattggtacaagtgtttttaacaaacagcaacagtacagagcattttgatgcatgtaagtggacaaaatcagaaccacattcctgggaattaatcttcccaatagaggtatgtggtcctaata

SEQ ID NO: 62497 - DNA, 262 bp, Zea mays
gagaaattcaatgaagtgtttcttggcaaaccaaatgaagcgtattgtgcttggattttggatcctgaaaagtggggaggagccattgagctctctattctatccgaatactacgggcgtgaaatcgcagcatatgacattcagaccactcgctgtgatctctatggtcaggagaagaattacagtgaaagggccatgctcatttatgatggtttgcattatgatgctctcgctatgtctccggctgaaggtgcacctgaag

SEQ ID NO: 62498 - DNA, 267 bp, Zea mays
tgactgcggacagctctcctagatctctctgatctggtgtgttcggccgccctccctccgtcatcgtcgactccccctgcgtccgttcctttggatctgaataagatggtggtgatctgagtggtggtcttagtttatcatgtatcgctcgcagtttaatttagcggtttaggtgtggatctgtgaaccccatggcgcctctgcttgattcgtgtttcacctgttatgttctgagattcatgataatgctatgagaactgaaattcc

SEQ ID NO: 62499 - DNA, 272 bp, Zea mays
cagctgaggagctgatcctcaccggcgtcgccatcgtaatcgccttggacagcggcaccagaacctctgcctccgcagggtgcttgctggtatcattacaatctggtagttttagtggttgggcttgacttcctactattcagaaacacagtaccgagaagtctttaggtggggtcaaagatggtgtcgctgaagttgcaaaagcgccttgccgcgagctacctcaagtgtgggaaaggcaaggtgtggcttgacccaaatgaagttagtga

SEQ ID NO: 62500 - DNA, 278 bp, Zea mays
agcgatcctggaccaacgtgaaggtcaagagaaaatggtatggctgatagacttcacaggatggacaatggcccatgccacacccataaagactgcaagagaatgtacaagcatcctgcaaaatcattaccctgagaggctggccattgcatttctgttgaatcccccaaaagtattcgaagccttttacagggctgtcaaatatttccttgacccaagatcgatcgagaaactgaacttcgtgtacctgaaggatgaggagagcatgaaggtcctgt

SEQ ID NO: 62501 - DNA, 241 bp, Zea mays
agtgatttcagtgagtgatcggtagtcacttgatctcatcataatcgtcagcgtcaattggagtagatggcgatcagaaacatcgccgtcggaaggcctgaagaggtgactcaccccgacacgttgaaggcggctttggctgagttcatctcaaccttcatcttcgtgttcgccggctcaggctccggcatcgcctacaacaagctcaccgacaacggcgctgccaccccgaccggcctca

SEQ ID NO: 62502 - DNA, 269 bp, Zea mays
gatacaggtttcttcttcagaggccagcgtatctgggaagcagtcatggccgaacttctgtctaaggggctagccagagcgaaacaggcttttttgactggatgctcggctggtggcctttctacatacattcattgtgatgatttccgggcacttctaccaaacacacctactgtcaagtgcctcgcggatggtggattctttcttgatgtagaagacatttctggaagaaggtatatgcggggcttttataacgatgttgctcggct

SEQ ID NO: 62503 - DNA, 265 bp, Zea mays
ctacagacttcaatctggtcattccctgagactccattcacgaaccacatactatgtggtcaaccctgacaacaacgaaaatctcacattaataacactcgccatacccgttaacaagcctggtagatttgatcgattcttcctatctagcactgaagctcaacaatcctacttgcaaggattcagcaggaacattttagaggcctcctacgataccagattcgaggatatacacaaggttctgtttagtagagaggaagggcag

SEQ ID NO: 62504 - DNA, 266 bp, Zea mays
gcaatatttatggttgtattgaagttaataaggttgctgggaatttccattttgctccagggaaaagtttccagcagtcatatgtgcacgttcatgacttgctcccgttccagaaggacagcttcaatgtcagtcataagatacgcagactaagttttggagaatactttccaggtgttgttaatccacttgatggggcaaattgggtgcagcattcatcgtatggaatgtatcgatacttcatcaaggttgttcctacagtctac

SEQ ID NO: 62505 - DNA, 258 bp, Zea mays
gggttccccatctctgtgtacaacaggacaacctccaaggtggacgagaccgtgcagcgtgccaaggcagaaggaaaccttcccgtctacggcttccatgaccccgcgtcctttgtgaactccattcagaagccacgggtggtgatcatgctcgtcaaggccggcgcgccagttgaccagatcatcgcgacgctcgcagctcacttggagcagggcgactgcatcatcgatggggggaacgagtggtacgagaacacg

SEQ ID NO: 62506 - DNA, 258 bp, Zea mays
caaaggggttttcaggaccatggtgtgttgagaatttcattcaggtaaactcactaaggagggcacaggacgtgcggaaacagcttcttgagattatggacaagttcaagctcaatgtcatctctgccgggaacaattccaccaagatagggaaagccctcactgctggattcttcttccatgctgcaaggaaggaccccagtgacgggtaccggaccctagctgatcatcagcaagtttacatccacccgagcagtg

SEQ ID NO: 62507 - DNA, 264 bp, Zea mays
gaattgttggaacactagcaggaggtttcatccttgacaagatagggtctactattcctaatgctttcaagcttctttctggtgcgacatttgtaggggcaatattctgctttggtgctttgtgtttcaagagcctttatgggttcataccctccttatgcagttcgggagctttcggacttcgtaactcaggcacctgtaaattttgtatgccttcacgccgtgaagccacatttgcggccattggcaatggccgtatccact

SEQ ID NO: 62508 - DNA, 268 bp, Zea mays
gttgtcctctacaggaatggaatttactctccacattggaacttgaacgcgaacagtgtgatctatgtgactcgagggaaaggaagagttagagtggtgaactgccaagggaatgcagtgttcgacggtgagctaaggaggggacaattgctagtggtgccgcagaactttgtggtggctgagcaagggggagaacaacgattggaatacgtagtgttcaaggcacaccacaacgccgtgagcagctacattagggatgtgtttaggg

SEQ ID NO: 62509 - DNA, 267 bp, Zea mays
gttaccatttgctcccagcactgagcttaaccgagcttcacaaagatgaatcgggaaaaattgatgaagatggccggttcggttagaactgggggaaaaggcaccgtgagaagaaagaagaaggctgtccacaagacaacaaccacagatgacaaaaggcttcagagcaccctgaagagaataggggtgaatgccatcccggctattgaggaggtcaatatctttaaggatgacgtgattatccagtttctaaatcccaaagttcaa

SEQ ID NO: 62510 - DNA, 261 bp, Zea mays
tccaggacaaggagggcatcccaccggaccaacagcgcctgatcttcgccggcaagcagctggaggatggtcgcactcttgcggattacaacatccagaaggagagcaccctccacctggtgctccgcctcaggggtggcatgcagatctttgtgaagacattgactggcaagaccatcaccttggaggtggagtcgtctgatacaatcgatgatgtcaaagccaagatccaggacaaggagggcattccaccggaccagc

SEQ ID NO: 62511 - DNA, 295 bp, Zea mays
gatacaaggctgggaccaaggattgctaggtatgtgcgtcggtgaaaagcggaactaaagatacctgcaaagatgggctatggcgagcgaggctccccaccgaagattccaggcggacgactctggtcttcgacacggagcttatcgccgtcaacgggaagacatctggcggtgcaaatccagaaactgaaagtgagctctgatacgatgcatttggatggagagtttcagctcgagggagtagtagcagagtcacgtagttcatttggtgccgtgaaagggctgttgtcttgtt

SEQ ID NO: 62512 - DNA, 299 bp, Zea mays
ggataacacccttggaacttcaacttcatgggagtgaagcacgacccacagatgaagtacaacatgaagctgggcatgccccgggacttctatcacgaggaccacaggccgacacacttccttgagttcagcaacatcgaggagggagaggtcgctgaaggtgatagggaggacacattcacgtagggcgctgggcgcatgttttagaaactcagtatctcaaacgcactttagctctgttttgaatggcaatgtgtgaaagctgtaacctgactcgacgggtgtcatctgtttgtttg

SEQ ID NO: 62513 - DNA, 298 bp, Zea mays
agaaattcgataagtcgaagttgaagaagacagaaacacaagagaaaaatcctctgccttcaaaagaaacaattgaacaagagaagcaagctggcgaatcgtaatgaggcgagcgccgccaatatgcactgtacattccacgagcattgccttcttattttacttcttttagctgtttaacttcgtaagatgcaaagaggttggatcaagtttaaatgactgtgctgcccctttcacatcaaagaatcagaactactgaccaggaaggcctccccccgcctctcgcgcccacctgctg

SEQ ID NO: 62514 - DNA, 274 bp, Zea mays
ggcgaggcaagccgtgcgacaagtgccagatgtacgatgaaatgattgaatcggagagcgtcaccgtttgtgtggattatcaagtcaggcaaatgacggtcacttggtcgtggaagggcttcttattgcagtcatagtgttccagctctccaggaagagttacaaaccaccaaagaagccactcactgaaaagtgccgctggaccacatacgattgttgatggtaaagaagttgtgaactttgcatcagcaaactacctcagtttaattggcaa

SEQ ID NO: 62515 - DNA, 295 bp, Zea mays
cattggtgtggtcgctggcgtttcaaatgcgatcaataacggatatgagtcatggggcccctctttgggaagctattctttgcattttgggtgattgtccatctttatccctttctcaaaggtttggttggaaggcaaaacaggacaccaacgattgtcatcgtctggtccattctgctggcttcaatcttctcgctcctttgggttcggattgatcctttccttgcgaaggatgatggtccgcttcttgaggagtgtggtttggattgcaactaggatgtcagtgcatcagctc

SEQ ID NO: 62516 - DNA, 153 bp, Zea mays
ggtctgggtcaagccatggctcgacttcaaggagctccaggaattcaggcacaagggggacgccaccgccttcaccagcgccgacctcggcgccaagcaaggtggacatgagcctggttggcgtgaggttccagtagaggatcctgtggtcaa

SEQ ID NO: 62517 - DNA, 298 bp, Zea mays
ctcaagtacaacatgaagtcaagggctgggagaggctttacccttgaggagttgaaggctgcgggcattccaaaaaggcttgctccaaccattggcatttctgtggatcaccgccgcaagaacaaatcccttgaggggctgcaggccaatgtccagaggcttaagacatacaaggccaagctggttatcttcccaaggcgtgctcgcaaggtcaaggctggtgactctactctggaggagcttaccactgctacccaggtacagggtgactacatgccaattactcgcggtgagaagc

SEQ ID NO: 62518 - DNA, 293 bp, Zea mays
gttgccatgttcaatgccatccttcgtgaatcagcaagtgagataccaacagaccctatatctgacccaattgttgacccaaaagtcctaccaattccagctggtgatctaagctttgggtcaggcgcgcacatgaagaactctattggaaactggtccagatggctgacagataagcttggcatagatcacgatgattctgaggacataggagatgttgaagacgaaagaagagctgcagctgaaacgaaatcgtttcaacttctcaatgagctaagtgatctcctaatgct

SEQ ID NO: 62519 - DNA, 204 bp, Zea mays
  unsure (1)..(204): unsure at all n locations
agccgccatcgcgtcctcccgcgccgccgagctgtacgggatggaggtgctggcggacggcatccaggacgactccggcaacgtcacccgcttcgtgatgctggcccgggagcccgtcgtgccgcgcaccgaccgccccttcaagaccagcatcgtgttcgcgnacgacagggagggcactccgtgctcttcaaggtgctcgcc

SEQ ID NO: 62520 - DNA, 221 bp, Zea mays
  unsure (1)..(221): unsure at all n locations
gtgtcgatttgcttctgagttntcttctttttatatcgttgcgatctcgtggttgtcgtttggttagcagccaagccaggctattagtacgaagaatgtcgtctataaacatgtgttcctacgttgccacatgctgagtcaatctgtatacagctagctctaggtggtcagctgcgtctaccacaatgagcatacatgtatggataaatcttctgtgaaag

SEQ ID NO: 62521 - DNA, 300 bp, Zea mays
gcaagaagtaccgtggtctgcgaggcaagggccacacccaccacaagaacaggccctcaaggagagccacctggaagcgcaaccagaccctctccctccgccgctaccgctgagcagctcgtcgggtgcttggatactgccactgtccgatcattcccaatcaagacaacaagcgtgcctgtctctggttgcattttcaaagttttgctatttgtgttcttggcacttttaatgttagaagtcaattatggagcatatgtcatgaactatttgcaattcggttgtattatcagacaatga

SEQ ID NO: 62522 - DNA, 292 bp, Zea mays
ataaatcgttctgcctcctgccaaggctggtcataagagagactttggctttgttcactttgcagaaagatcaagtgcattgaaggcagttaaaggaagtgaaaaatatgaaatcgatggtcaagtactggaagtgtccatggccaaaccattggcagataagaaacctgatcattcacacaggcctggaggaggccctaattatccccttcctccctatggtggtggtggctacatgggagatccatatggtgcttatggtggcggcggtcctgcatacaaccagccaatg

SEQ ID NO: 62523 - DNA, 292 bp, Zea mays
ctattttatgttctgtgatcctcaacttaagggattgaaggttacaggaagaactgtttggagagatccacagggttacctccctggtaaaatggctccaatgatgacattttatggtgtcatgtcacttgcatatcttgcacttggacttctatggttcattcagttcgtgcgatgctggaaggacattttgcagctgcattaccatataacaactgttattgctcttggcatgtgtgaaatggctttctggtattttgagtatgctaactttaattcaactggaaccaga

SEQ ID NO: 62524 - DNA, 289 bp, Zea mays
ttctgcggttctgccgtctacgcctccaatttggcctctctcccttgcaagccatgggtaaggagaagtcccacatcaacattgtggtcattggccacgtcgactctggcaagtcgaccaccaccggccacctgatctacaagcttggaggcattgacaagcgtgtaatagagaggtttgagaaggaggctgctgagatgaacaagcggtccttcaagtatgcttgggtgctcgacaagctcaaggctgagcgtgagaggggtatcaccatgatattgctctgtggaag

SEQ ID NO: 62525 - DNA, 290 bp, Zea mays
aacagaaatcgagcctatgggtgacctcaataccgaagctgagaaaaaacttggtcggcttgtcagacgaaaagtatgacacagattttttcatcctgtatcggtatcctttggctgtacgtccgttctacaccatgccttgttatgacaacccagcgtacaccaattcttttgatgtcttcattcgaggcgaggagatagtatctggagcacaaaggatacacactcctgaggctgtggccaagcgcgcgacagagtgtggaatcgacgtgagcactatctcggcctac

SEQ ID NO: 62526 - DNA, 297 bp, Zea mays
gttaccggattgaataacaacgaataccagataaccaggggaaaggagctcaaccgtttagcaggaattagtggaacatgtgattttgtcaaggcggacttcatgaagatgccgttcgatgacaacacttttgatgctgtttacgccattgaggcaacatgtcatgcacctgatccagttggttgctacaaggagatatatcgtgtgttgaagcctggccagtgctttgccgtgtacgagtggtgcattacggatcactatgatcctaacaatgcaacccacaaaaggatcaaggat

SEQ ID NO: 62527 - DNA, 273 bp, Zea mays
gggaggtccgcggggtcggccttctcgtcggcgtcgagctggacgtgccggctggtcctctggtcgacgcgtgcttggacgccggcgtcatcgtgctgactgccggtaagggcaatgtggtgaggctggtgccgccgctcatcgtctcggagaaggagctggagcatgccgcggatgtcataagggactgtctaccggcgctcgatgtcgttgctgctgcctaatgtatatggtggtgcaataggtccggatatgaaacctgatgcaaatttt

SEQ ID NO: 62528 - DNA, 153 bp, Zea mays
catggttggacatctctactacttctttgcagtgttgcaccctcttgccaccgggaagcagtacctcaagactcctaaatgggtacataagattgttgctcgattcaggataggcatgcaagggaactcaccggtccgtcaacaggccattgg

SEQ ID NO: 62529 - DNA, 289 bp, Zea mays
tgcaaggcacttgctcacccttgacgagaagaacccgcgtcgtatctttgagggtgaggcgcttcttcgccgcatcgaaccgctatgggctgcttgctgagggtcagaacaagcttgattatgttcttgccctcaccgctgagaacttcctcgcaaggcggcttcaaacacttgtcttcaaggctggcatggccaagtccattcaccatgctcgtgtcttgatcaagcagcgtcacatcagggttggcaggcaaattgtcaacgtcccatcattcatggtgagggtgga

SEQ ID NO: 62530 - DNA, 184 bp, Zea mays
cacggattaatgggctgcttggaaatatcgatgcaaacactggtgatcctcaagttggttgggacacagatcagttcatgacagacattgcagaggctactttggttatgtcaagtgtagttaagaatggtggacttgcacctggtggtttcaactttgatgccaaattgcggagggaaagtac

SEQ ID NO: 62531 - DNA, 280 bp, Zea mays
gcttcgagaagcagatcctgagatccggcaccggccccaagccgataaagggccagaaggtcaccgttcactgcaccggctacgggaaggatcgtgatctgtccaagaaattttggagcaccaaggaccctgggcagcagccattcagtttcagcattggtcatggttcagtgatcaaaggatgggacgagggagttatgaccatgcaagtgggtgaagttgctcgtatccagtgcacgcctgattatgcttatggagccggctggttcccagcttgggg

SEQ ID NO: 62532 - DNA, 148 bp, Zea mays
atcgaggctgaactgagcaatatctgtgatggcatcttgaagctgcttgactcccacctagtgccttcttctactgctgctgaatcaaaggtcttctacctcaagatgaagggtgactatcacaggtatcttgcggaatttaagactg

SEQ ID NO: 62533 - DNA, 289 bp, Zea mays
gtcatgaatatcgtgccgatcgattcaccagacacgctgcccatcatctacgagcgcggtttgtttggcatgtaccatgactggtgcgagtctttcagcacttacccaagaacgtatgaccttctgcacgcggaccatctgttctcaaagctcagaaagagatgcaaactggctgcagttttcgccgaggtcgaccgtgtactgaggccacgaggcaagctgatcgtgagggacccgcggacacgataaatgagctggagagcatggccaagtccctgcagtgagaagt

SEQ ID NO: 62534 - DNA, 282 bp, Zea mays
accgcagcaatcttgctggcatgggaatcatccctctatgcttcaaagcaggggaggatgcagacaccctgggcctaaccggccatgagcgctacacggtccaccttccaaccaatgtgagtgagataaagcctggccaagatgttaccgtgacaactgataatgggaagtcgttcacttgcacactcagattcgacactgaggtggagcttgcttactacgaccatggtggcattctaccatatgtcatcagaaagttgcggaacatagatgtacatttga

SEQ ID NO: 62535 - DNA, 284 bp, Zea mays
  unsure (1)..(284): unsure at all n locations
agganaatcaggctccgtgctgaagatgtgcagggcaggaatgtgctcacaaacttttggggtatgaattttaccactgataaattgaggtccctagtgaagaagtggcagacattaatcgaagcccatgctgatgtcaagacaaccgacaactacatgttgcgtttgttctgcatcggcttcaccaagaggcgcccaaaccaggtcaagagaacctgctatgctcaggcatcccagatccgtcagatccgccgtaagatggttgagattatgatcaaccaggc

SEQ ID NO: 62536 - DNA, 154 bp, Zea mays
tgaaaaacatgggcgagatattgaaagctagtggtgctaactattcttcagttgtgaagacaacgatcatgttggctgatctgcaggatttcaataaagtaaacgagatctatggcaaatatttcccggtgccagcacctgcacgatcaaccta

SEQ ID NO: 62537 - DNA, 229 bp, Zea mays
atttcgtgtggacagtatgagttgctcgatgagatgatggattttgggtacgcacaatacacggaggcgaagatattgagtgagttcatcaagacagatgcatacaggatggaggtcacacagcgtccacccatggccgtgacaaatgctgtgtcatggaggagcgaggggatccggtacaagaagaatgaagtcttcttggatgtagtggagagtgttaacattctag

SEQ ID NO: 62538 - DNA, 145 bp, Zea mays
gcttctcaaccggataggtagcaccggagcaggtagaacgctgcacaatccccttcgccgccgccaagatggtgaacgttcctaagaccaagaagacgtactgcaagaacaaagagtgcaagatgcacacactccacaaggtgac

SEQ ID NO: 62539 - DNA, 361 bp, Zea mays
agacgccattacgatcaagcaaaccggctcgggcgacgtctcgtacatcattggtggaggagcattccatgccgaggacaagattgttcagcataacggtgcaggtactgtctcgatcaagaacttctacgccaatgacttcggaaagttgtatcgtgcctgtggcaactgctccactagctatgctcgtcacgttattgttgacaacgtcgcattggcgagtggatccgcgggtgttggtatcaacgagaatttcggcgacaccgccaccctcagcaacatttgcaccaacggcaagcccaccactgccaacctctgctgccgttacacaggaacaactcctggtaacgagcccacgaag

SEQ ID NO: 62540 - DNA, 346 bp, Zea mays
cattgtatccctcatagtaagtcggaatcggctcgagccaaatcccagaccctaggcgaactcggcacggcggcgattgcagcggcgggcctgcggaatgggaacgcgcggctcccaaccgaggtgaacccggtgctgtacgtacggaatctgccgttcaacatctcgagcgaggagatgtacgacatcttcggcaagtacggcgcgatccggcagatccggctgggcaacgccaaggacacgcgcggcaccgcctacgtcgtctacgaggacatatacgacgccaagaacgccgtcgaccacctctccggcttcaacgtcggcaaccgctatctcatcgtgctct

SEQ ID NO: 62541 - DNA, 355 bp, Zea mays
agcaaatgcaggtaggagcagtaggagggaggcaggtctacaagaatgtgttccatgcgctctactgcataatggagaaggaaggggttggcggcctgtacaaggggctcggaccgagctgcatcaagttgatgcctgcagcaggcatctcgttcatgtgctacgaggcctgtaagaagatcctggtcgaagacaatgaggatagtgagtgaagctgaagcatgtatgcccctgaggaggggtatgactgatgtgccaggctagaagaggtttgggttgggttggggagtataccctagtattatcaactgatgaaaatgtagatccaagatatttgaacgccctttagatcata

SEQ ID NO: 62542 - DNA, 344 bp, Zea mays
ggacattgttgccctctctggtggccaaccttgggaaggtgccacaaagagcggtctggttgtgacggggcctggactacgaaccctttggtctttgacaactcttacttcaaggtacttctgagtggcgacaaggagggccttcttcagctcgcaagtgacaaagccctgctgagcgaccctgtcttccggcctcttgtggagaaatatgctgcaaatgagaaggcattctttgatgactacaaagaggcccacctcaagctctccgaacttgggtatgctgatgcttaaatggtccatatcctggagcgggatacaaactgctgcctgtatggactcgtgcg

SEQ ID NO: 62543 - DNA, 351 bp, Zea mays
atcccctcataaggagatagacccacacaatgcagcacccaagcgaaagaaagccaggttcatgataccaaagagtgctcaggtggacagtgatgtgcgccgcgagctgcaggagctcatggacgctagggaggcaggcatgtccttcatcctggggcactcgtacatgaaggcgaagagcgggtcgagtttcataaagcggattgtgataaacttcttctacgagttcttgaggaagaacagccgtggccctgcatacgccgcaaacataccccatgcctccactctggaggtaggaatggtctaccaggtctgacaacagttagcagctgtgtaaacgtagagagatga

SEQ ID NO: 62544 - DNA, 348 bp, Zea mays
gatcgctagaacagcgccaattaagtacttgcaccggtacttagtgcagaagggggctgtgcctcaggactacgaggacttcaagagaatgctgacatccctatggtttgatttgtatggaacaggtggcaactctagctgctcttctgcctttgagcatgtgtttgttggtgagatcaaaggacggggactcggggagagtgaggtatcaggcttccataactggattcagttttacctggaagaagccaagggaaatgtggattaccaaggttatatatttccaaggcgccgtggtgaatcgcctgattcagagatacagctgctgactgttcagtttgagtggca

SEQ ID NO: 62545 - DNA, 336 bp, Zea mays
cagagaatcaccaagcaaacaaacagggtagaggtagagggagaggagaggagaggagaggagaggagaggttgggtctgggacaccatggctccgatgaagctgtacggggcggtgatgtcgtggaacgtgacgaggtgcgcaacggcgctggaggaggctggctccgactacgagatcgtgcccatcaacttcgccaccgccgagcacaagagccccgagcacctcgtccgcaacccgtttggtcaggttccagctctgcaggatggtgacttgtacctcttcgaatcacgcgcaatctgcaagtacgctgctcgcacaaacaagccagagctg

SEQ ID NO: 62546 - DNA, 347 bp, Zea mays
gggtttttgattttagccgccgccgctgctcatctcacatccctcgagaagacgcctgctcctcgccgatcgatacgatggccgtcttctccgacctccacaccgccgacggcctcaagtccctcgaggctcacctcgccggcaaaacctatgtgtctggtgactccattactaaggatgacattaaggtcttcgccgcggtgccgtcgaagcctggcgctgagtttcctaatgccgcccgctggtacgagaccgtctctgcggctgtagcctcaagattcgctggtaaggctgttggtgtaaatctgcctgcgggatcagctcctgcggcactgctcctgcggatg

SEQ ID NO: 62547 - DNA, 342 bp, Zea mays
ttcactttgttcgagattcgtgattttgagtatagtcctgaagcacaagaaagtagtaagcaggagatggagaagttactgctagagcaggaagttatgaggacctcgcttctgcaatggtgctatgccagctacagtgaggttttcagttcctggatgcacttctgtgccgtgcgcatatttgtagagagcattcttagatacggtctgccaccatcgttcctgtctgccgttcttgctccgtctacaaagggcgagaagaaagtaaggagcatcttagaggacctttgcggcgatgtccatagtatttattggaaaggcgaagatgacgtggcagttgct

SEQ ID NO: 62548 - DNA, 324 bp, Zea mays
  unsure (1)..(324): unsure at all n locations
gcatctcgctgctggagatcctgtcgagccactcctccgacgaggtgtacctcggccagcgcgacaccaaggagtggacgtcggacgccaaggcgcaggatgcgttcaagcggttcggcgcgcggctgaccgagatcgagaaacgcgtcgtcaccatgaacgcggaccctcgcctcaagaaccgttacggcccggccgagttccactacacgctgctctagcccaacacctccgatactaagggcgacngcgccggcatcaccgtcaagggcattccagacagcatttccatttgagttctgtctgagatgagacgtacgtcgt

SEQ ID NO: 62549 - DNA, 354 bp, Zea mays
agtcactcggcagtcggcacgcaggctagcagcacagcagcagccagagccatcccctctcctcgctacgcttcgcttcctcggcggcgattcctcctcctcctcctccaccctcgtccgtcacgttccggcgcgcgagctcgcccgagatggcgaacgcgagatcgggtgtcgctgtgaacgatgagtgcatgctgaagtttggcgagctgcagtcgaagaggctgcaccgcttcataactttcaagatggacgacaagttcaaggagatagttgtggaccaggtcggggatcgcgctaccagctacgatgacttcacaaacagcctccctgagaatgactgccgatacgcga

SEQ ID NO: 62550 - DNA, 343 bp, Zea mays
  unsure (1)..(343): unsure at all n locations
atcaaatgcgtcatcatagacttgtatgttgccggtggcgagacgtcggcgacggccatgcagtgggcaatgacggagctgatacgtggacctcgggcgatgcggaaagcgcaggccgaggtccggtcggcgctcgcagggcagagcacggtgacggaggccggcctcaccgacctacactacctgcggctagtcatcaaggaggatgtgccctggcgcaaccttgggcttagcgcatgtgggagctcgcgctcgctgctctgctgttccatttcgactgggagatgccacccacgctggttgctgangagatggacgtgacgaagcggctgggatcaccatg

SEQ ID NO: 62551 - DNA, 338 bp, Zea mays
cacattcgtgagaaggatggcatctgggctgtgcttgcatggctttcaattcttgccttcaagaataaggacaaccttggaggagataagcttgtcactgttgaagatattgtccgtcagcactgggccacatatggtcgccattactacacacgctatgactatgagaatgttgatgcaggggctgctaaggagcttatggcaaacctagtaagcatgcagtcatcactttctgatgttaacaagttggtcaaggagatccggtctgatgtttctgaagtagttgcagctgacgagtttttgtacaaggatcctgttgatggctctgtgtccaagca

SEQ ID NO: 62552 - DNA, 343 bp, Zea mays
acttcctcagctgagtaactcggaatcggctcgagacttcctcgcatacgcctcatggtccaagcggtggatccgtcccgaggtgtacccgctgttcgtgccgatggccgtgggcttgggcatctgctcgtaacatcttgtgctcaacatcacgggcaaccccgatgtgcgggtgaccaaggagaagatggcggccggcgtcctggacaaccacgacgagggctcgaggtacgctatgcacggcctcaggaagttcgtccgcaggaagtagcccgagatcatggcctccatcaactccttcttcggcgaccctcgcaaggacgattaggctagattacgtcat

SEQ ID NO: 62553 - DNA, 330 bp, Zea mays
gcaaggtagcaatgttgacaaagtcctgaactttgcgattgatgatgctgtattggaagaacggattactggtcgttggatccactcagccagtggtagtgattaccactcaggatttgcacctccatagtctccaggagttgatgatgtaactggagagccatcgattcaaaggagagatgacactcctgaggtcttgaagtcacggcttgaagctttccacagacaaaccgtacctgtgattgattactactccaagtaaggcttagtggtgagctgcctgcagagatacactgaagtagtgctgctgagtgctgaaacgtctcgtga

SEQ ID NO: 62554 - DNA, 173 bp, Zea mays
  unsure (1)..(173): unsure at all n locations
gtgtttntgattgcaacgtcgctctgtgntagttgttagtgctgtgttcatcctcggctccagcagacccatgcatcaaccagcatggactgtggatcgatggatgctgttactcctgtcaggacttgttctaagttaatcctaaggaaaaaatggtgcttcttggtgctgca

SEQ ID NO: 62555 - DNA, 327 bp, Zea mays
  unsure (1)..(327): unsure at all n locations
ggatgctggacctctcgttgatgatgagcgactacaaggtcgagatggtgaacgatgggatgcaggaattcttcgtcgaattcaaggggccggccgaaagtatctaccaaggcggtgtctggaaggttagggtagaactgcctcgtgcatatccttacagatccccgtccatcggcttcatcaacaagatttatcacgcagatgtcgatgagatgtctggctctgtatgtttagatgtcatagatccaacatggagcccaatgtntgatctagtaaaatgttctgaagtattccttccccnagctgtactatatccagatcttctga

SEQ ID NO: 62556 - DNA, 341 bp, Zea mays
cacattcgtgagaaggatggcatctgggctgtgcttgcatggctttcaattattgctttcaagaataaggacaaccttggaggagataagcttgtcactgttgaagatattgtccgtcagcactgggccacatatggtcgccattactacacacgctatgactatgagaatgttgatgcagcttctgctaaggagcttatggcaaacctagtaagcatgcagtcatcactttctgatgttaacaagttggtcaaggagatccggtctgatgtttctgaagtagttgcagctgacgagtttgagtacaaggatcctgttgatggctctgtgtccaagcacca

SEQ ID NO: 62557 - DNA, 366 bp, Zea mays
agcttatctagcttagctaagtcggaattcgagtcgagcctaagttcaacattgtctctcctggagcagacatgtagtgtttatcatcttatacggtaatcgataagagactcactgagtttcaacctgacatcgagaacgtcatcaacagcgacgtcgagaactccgagcacaagttcgtgctgaatgacaagaagaatccgatcatcttctcgatgtcgcgtctcgaccgcgtgaagaacatgtcaggcctggtggagatgtacggcaagaacgcgcgcctgagggagctggcgaacctcgtgatcgtcgccggtgaccacggcaaggagtccatagacagggaggagcaggcggagttcaaga

SEQ ID NO: 62558 - DNA, 303 bp, Zea mays
gccattcgacggtcggactgtgtatagtctgagtggtgtgctcatccttggctaggtatgggactgtctgaagccatgttcctgtgcctatcgaggcattcaacctcatcagccatattgagttctactacaaggagatctcggatcacatgcggagcgtgtgcggggcgctcgcattctgcaacctggcactcggcaactacctcagtggcttcctggtgaccatcgtgcaccgggacactgggtccgggcagaactggctggcggaggacctcaacaaggggcgcctcgacctcttctact

SEQ ID NO: 62559 - DNA, 356 bp, Zea mays
acaccgcgtgcgaaccaagcagaccacagcaagaagcgtagtcgtcgccggaaggaaaggcgcggacaagatgtcgttgcaggcgtacgtcgatgagcacctgatgtgcgagatcgaaggacaacatctcagcgccgccgccatcgtcggtcacgacggcagcgcttgggcgcagtccgagagcttccccgagttaaagcctgaggaggttgctggtatcataaaggactttgatgaacctggtactcttgcaccaactggtcttttcgttggaggtacaaagtacatggtgatccaaggtgaacctggagttgtcatccgaggaaagaagggcactgggggcattactatcaaga

SEQ ID NO: 62560 - DNA, 348 bp, Zea mays
gccgctgcttccgaggtatccggcgagaagttctggagactgccgctgttcctgaaacagttcgtcgacgacaaggtccagtggatgcacatcgacatggccgggccagtgtggagcgacaagaagcgggccgccaccgggttcggcgtttccaccctggtggagtgggttctcaacaactcgtcctcgtcgtgaacaaaacccataccccccctcgtatcacaatgcctttccatgcgttttttttttcctcctcttttgtgctaccattccatagttgcaaactgcagagcgcctcttggcatgccaagtgtgcgtgtggtaccgttgcgatagaataatcagcat

SEQ ID NO: 62561 - DNA, 343 bp, Zea mays
ttcagctaggagccaagactcttgtggttccaggaaaccttcctattggatgtgtcccaaaatatctgatgatattcaagagcaataagaaagaggattatgatccacagacaggttgtcttagatggatgaacgagttctcacagtaccacaacaagcttcttgtggagcagctcaagaagcttcgcaggctccatcctggagtaaccatcatctatgctgattactatggagctgctatggaaatattcctttcccctgaacgatgggatcgaatatcccctagtggcttgctgtggtgcagaaggaccctacggtgtgtcccaactacaagctgtggatt

SEQ ID NO: 62562 - DNA, 347 bp, Zea mays
tatcgttatgaagagattgtgaaggaagtctcatcctacctcaagaaagttgggtacaaccctgataagattgccgttgttcacattactggttgtgatgccgacaacatgattgagagttccaccaaccttgactgggacaaatgcccaatcctgcttgaggctcttgaccatatcaccgagcccaagaggccttcagacaagcccctgcgtctgcccctccaggatgtgtacaagattggtggtattggaactgtaccggtttgtcgtgttgagactggtgtcatcaagcctggtatggttgtcacctttggtcacacttgcctgactaccgaggtgaagtctgt

SEQ ID NO: 62563 - DNA, 347 bp, Zea mays
  unsure (1)..(347): unsure at all n locations
ccaattctcacactgaagctcgcactctcgcctccagcatgaaagtctctgccgctcttctgtgcctgctgctcatagtgagggccttcattccccaaaggctcgctcagccagatgcaattaatgccccagtcacctgctgttataacttcaccaatagggagatctcagtgcataggctcgcgagctataggagaatcaccagcatcaagtgtcccaaagaagctgtgatcttcaagaccattgtggccaaggtggtctgtgctgaccccaagcagaagtgggttcaggattccatggaccacctggacaagcanacccaaactccgaagacttgtacactcact

SEQ ID NO: 62564 - DNA, 343 bp, Zea mays
ctttacgtgatgctggtcggtgcgacccttttgaggaccccgatgatccaaagaatttcagaaaaacgattgggagaatagtgtcaattcagtaccagataccagagtatgtccacatatcccaagactgcagacagctcctggctcggttcttcgtcgcaaatcctgcaaagagaatcacaatcagggagattaggaatcacccctggttcctgaagaatttgcccagagagcttacagaagctgcgcaacgaagtactacaagaaggacaacagtgcccccaccttctccgatcaaaccgttgaagagatcatgaagattgtagaggaggcccgcacgcca

SEQ ID NO: 62565 - DNA, 345 bp, Zea mays
atcatcttcattcaccatgatcccaacatctggggacaagacgcaagcgagttcaatccacagaggttcgaggatggcatttccaatgcgaccaagcatcaggccgccttctttccatttggatggggtcccaggatctgcataggccagaacttcgcgttgcttgaagcaaagatggcactgagcaccatcctccaacgcttctcctttgagctctcaccatcctacactcatgcgccatacaccgtgataactttgcatcctcagcatggtgctcacatcaggttgaagaagctttgaccatgatggtcatactgaatgctacaacatgtactcctagtaaca

SEQ ID NO: 62566 - DNA, 338 bp, Zea mays
caattaatcccaagttgcttcagttggtcgaagacagacggttcaggtcgttccaggggtagaggaggcatgaaggatgaccgtcgggacagatactctgcgggcaaaaggggtggatttaatacctttagagacagggaaaattatgacagaggttactctagcctgcttaaaagagattttggggcaaaaactcagaatggtgtttacagtgctgcaaattacaccaatgggagctttggaagtaattttgtgtctgctggtatacagaccagttttaggactggtaatccaacagggacttaccagaatggttatgatagcactcagcaatacgg

SEQ ID NO: 62567 - DNA, 343 bp, Zea mays
tgaatattcttcattcatgggcgatttctcaactgctaccggcatagctacatttacaatgatgttgttaggaagattgatcctcagaaagtttgggtggggagttgcatctacgatcacgcctgcagtgttactcctcacaggagttgggttcttctcactgattttgtgtggtgagccattgactcctcttatgaccaagtttgggatgacgcctttgcttgcggcagtctatgttggagcaatgcataacattttcagtaagagtgcataatacagtctgtttgatccttgcaaagagatggcatacattccttttgatgaggatatgatggtgaaaggt

SEQ ID NO: 62568 - DNA, 342 bp, Zea mays
gttgacacacctggtgttctttctggtgaaaagcaacgcacacagcgcagtgatgatttcactggtgtgacatcatggttagctgcgaagtgtgatcttatccttctcctgtttgatcctcataagctcgatatcagtgatgagttcaaacgtgtcattggatcattacgtggccatgatgacaaaatacgcgtagttttgaacaaggcagaccaagtagacactcaacagcttatgagagtttatggtgcattgatgtggtctctcgggaaagtattgaatacacctgaggtttcacgtgtatatattggatcattcaatgacaaaccagtaaatgaatca

SEQ ID NO: 62569 - DNA, 341 bp, Zea mays
gtagatacatcaaggaaggtagcactgtaagtgtgatgggggttgtccaaaggaacgacaacgttctgatgattgttcctccatcagatgccatctcaactggttgtcagtgggccaagtgcgttctcccgaccaaccttgacgggcttgttttaagatgcgaagatacttcgaacattgatgtggtgccagtttaattagacggtgaagagtcgttgccaaagaaagtgtctgttaaatatgagtctgaattgtttcatgcaatgttagttgacaaaaatgtgcagatgttgggtgtgattatggcaggtggagggtggttcgttaagctggcttttggg

SEQ ID NO: 62570 - DNA, 334 bp, Zea mays
gtgctttataggagcaatcaatacgttatcaaggagttgagtattccccgaacagacaaccaggacctgtcattttctacaaaatattcacaggatttctacggtcaatgtgccgcaaacttttgggagcaataccggtcgtactggaagaatccaccctacaatgctatgcgctatctgatgacatgtctctttggccttgtatttgggacagtattttggcgaaaagggaagaacatagattcacaacaagatttatataatctgcttggagccacttacgctgctacattctatcttggggcttcaaataggatcacggttcagcctgttg

SEQ ID NO: 62571 - DNA, 342 bp, Zea mays
caaggccctagagaaggagggatttgctgttgcagcttgcaattgtactgagactgtcttggagaagtttgatagaggatctgaagatgctgctattcaacaagtgaattgggacacctcataagtgatggataagcttagacgtgacattgaggctcatgtagcttcagttcgggctgctacattgtctgaactttgtgcgagatatgaggcacaacttaccagagctctggtggaaccagttgagtctgttctagattcagccagtgaagacacgtggccagctattagagaacgtcttcgacgcgagagaataactgctgtttgaggtcttgagtctgc

SEQ ID NO: 62572 - DNA, 329 bp, Zea mays
ctctgctcctccggctccggctgttccatccaagacagggatcgccatgtcggactcggaggagcaccacttcgaatcgaaggccgacgctggggcgtccaagacctacccgcagcaggctggcaccgtccgtaagaacggcttcatcgtcatcaagaaccgtccctgcaaggttgtggaggtttctacctccaagactggtaagcatggccacgccagatgccactttgtcgccatagacatattcaatggcgaaaagcttgaagatattgttccttcatcacacaactgtgacattccgcatgtgaaccgtactgagtatcagctga

SEQ ID NO: 62573 - DNA, 326 bp, Zea mays
ctcctccagagctcgtcgccaccggccaccgccaccctcgatcacgccgtccgtcgacgtaaggtcaccatggtgacggtcagtgtgctcaacgatgcgctcaagtccatgtacaacgctgagaagattggcaagaggcatgtcatgatcaggccgtcatccaaggtcatcatcaagttcctgacggtcatgcagcgccatggctacattggagagctcgagtacgttgatgactacgatcgggcaagactgtccgtcgagtcaacaggaggctgaacaagtgcggcgtgatcagccctcgctttgatatcggcgtcaaagacatc

SEQ ID NO: 62574 - DNA, 343 bp, Zea mays
ccagcgtcggcgcggtcagttgaaccatggcggactccaatgccacctcggcggtcatgctccgcacccgcaagttcattatcaaccgcctcctggtccgcaagcaattcgtgcttgaggtgatccaccccggccgcggcaacgtctccaaagcggagttgaaggagaggcgtgtcaaggcgtacgatgtgaaggactccaacaccatctttgtcttcaagttccgtacccacttcggagtaggaaagtccactgggttcggcctcatctacgacaacctcgaggctgccaagaagttcgatccgaaataccgcctcatcaggaatggtcttgctactaaggt

SEQ ID NO: 62575 - DNA, 334 bp, Zea mays
tacaagtagttagaggagctttacaagaagaaacaatccgatgttcttcgattcttatccagagtaagatgctgggaatacagacaattaccagctattgtccgagttcaacacccaacccgtgtcgataaagcacgaagacttggatacaaagccaaacaaggattcgttgtctatagagttcgagtacgccgaggaggacgaaagagacccgttcccaagggtattatctatggtaaacccaaatctcaaggtattacccaacttaaattccatagaagcattcgttctgttgccgaagaaagaattggtcgaaaagctggtaatctcagag

SEQ ID NO: 62576 - DNA, 333 bp, Zea mays
gcttcatgttgtcgatagacttaaagaactgattaagtacaaaggcttccagattgctcctgctgagcttgaaggactgcttttgtctcatccagagatccttgatgccgctgttatcccgtatcctgatgctgaagcgggggaagttcctatcgcctacgttgtactatcaccgaagagttcactggccgaagctgatgtccagaaatttatcgagaaacaggtcgcgcactacaagaggctgaggaaggtaacgttcgtgggcagcgtaccgaaatctgctgcggggaagattttgaggagagagctcatcgcccaagtcagactgtccaa

SEQ ID NO: 62577 - DNA, 310 bp, Zea mays
ttctaaactgatgattaatcagtccatattgcaacgatgcaacgcagcttagctgcatacatatttaccaagagcatacctcgttcatggcgtgtatccgaatcccttgaatacggcttagttggggtaaacgaggggattatttcaacagaggtggcaccatttggcggagtaaagcagtctggtcttgggagataaggatcgaagttcggcgtcgacgaatacttggagctcaagtactctgcatgggcaactgggttgagttctgaaatcggccgaggctagaaacgttggcagatgatgaacgaga

SEQ ID NO: 62578 - DNA, 332 bp, Zea mays
aagaattgctcccaaacatcgaaacgtactccaagatgattaaagcctttttgagaggtcgcagggtagctgatgcgctccaaatgtttgatgacatgttgattcaaggagttctgccaaatactgggatgataacatcatttatcaatccactgtgtacatttggaccgcctcatgctgctttgatgatctacaaaaagagtaggaaggctggttgtgtaatatccttgaaagcttataagcttttgctggaaagactcgctaaatttgggaagagtggaatcgttttggacatttgggaagagatgcatgagtgtggatatcaacctgat

SEQ ID NO: 62579 - DNA, 352 bp, Zea mays
cttgtaggcgtgtctctttctactgtaggcaaaagtactcttgcgattaatcctgatctacacgaggctcagaatctcaagtcatggtatgactctgaaggcaaagatacttcgctggcaccaattggtgcagaaatgggtgccgcacgggccggtggcttcaagtccacgtattctgatagagtttttctgtctcacattactagtgatcctgccatgggccaggaaaagcctgttttctttagtttgtatgccaccataagccacatcaagcctgaccagaacatgtggtaccgtgcttgcaagacctgcaacaagaaggtgactgaaacttttggatctggatactggt

SEQ ID NO: 62580 - DNA, 350 bp, Zea mays
gagctgccagatgggcaggttatcaccattggcaatgagcgcctccgctgccctgtcgaccctcttccagccttcctttattggcatggagtccgctggaattcatgagactacctacaattccattctgaagtgtgacattgacatccgtaaggacttatatgccaacaatgtcctctctgggggcaccaccatgtaccctggcattgctgacaggatgcagaaggagatcacagccctggcccccagcaccatgaagatcaagattattgctcccccagagcggaagtactcagtctggatcgggggctctatcctggcctctctctccaccttccagcagatgtgga

SEQ ID NO: 62581 - DNA, 343 bp, Zea mays
gcgcaattcccggcgacaacgtcgtcgcggaagtagacgcggctcgcgacggagaggtggaccgccgtgacgtgggcaagatgaagcacgggtgcaagatcgtggcaccgccctgcaaccaggtgttcacctgccgccactgccacaacgaggctacggcttccggagatcggcatacaatatgtcgtcaggatgttgaaaaagtagtttgcctactctgtgaaacataacagccggtgtcacaagtgtgcataagctgtggagtcaatatgggagagtattctgtgatatatgcaattctatgatgatgatacagacatagggcagtacattgcatcgattg

SEQ ID NO: 62582 - DNA, 343 bp, Zea mays
ctggtattatagctgtggatcgtctcgagcgagatggcgagatcgtcgattcgcgtaatacgtctcgtcgccggccacgacatggtgcaacagcttcaacgacgtgcgcgccgtggagaacaacctggccaccgccgccgcagtggccgccgccgccgccaagaaacagcagcagcagcaggcatcctcgcacgtcaacctcatcaggacctgcccctcctgcggccaccgcgcacagtatgaacaggtgcaggcggcggcgacgatccaggacctgccggggctgccggccggcgtgaagttcgatccgacggaccaggagctgctggagcacctggagggg

SEQ ID NO: 62583 - DNA, 346 bp, Zea mays
atgaggcttactttgcagccaatgctgctgctcaggcctcaaggagatcatcacctagagtgacaaacgaggaggtccaaaaggctgcagctgctttgaagggttctgacctccgccgtgctactactgttgctgctagattggatgctcagcagaaaaagctcaaccttcctgtccttcccacaaccacaattgcctcattccctcagactgtggaactcaggagggtccgtcgtgagtacaaggcaaagaagatctccgaggaggaatacatcagtgccatcaaggaagaaatcagcaaggttgtcaagatccaagaggagcttgacattgatgtgcttgtgca

SEQ ID NO: 62584 - DNA, 344 bp, Zea mays
atccactccatcatcgacatggatgccgatgtgatcacgatcgagaactcccgatctgacgagaagctcctgtccgtcttccgtgagggtgtgaagtacggagctggcattggccctggtgtctacgacatccactctcctaggattacctccaccgaggagatcgcagaccgcgtcgagaagatgctcgccgtgctggacaccaacatcctctgggtgaaccctgactgtggtctcaagacacgcaagtacacggaggtcaagcccgccctgaccaacatggtctcggccatcaagctcatccgcacccagcttgccaacgcgatatgagtcgtatgatagct

SEQ ID NO: 62585 - DNA, 331 bp, Zea mays
gggattcatgattacttgccttgcttgacaaataccatcaagcacaaagcaacagggttttggtctttgtgctgtacaagaaagaagctgcacgagtggaaacaatgcttcagagaaggggatggaaggctgtttcagtccatggcgacaaggctcagcatgatagaacaaagctttatctttatttacagaagggaaatgcccattaatgattgctacagatgtcgcttatgatggacttgatattcctgatgttgaagtagtgattaactatagttatcctttgtccactgaggactacgtccacaggataggaaggactggtcgtgct

SEQ ID NO: 62586 - DNA, 351 bp, Zea mays
cagggcaataccacttcgtggatttcgacctgccagcagagaatgcttgcaggaatccagagaactggtggctcaaggagtatggacttggaagcctttccaccgggatacggacctggtggtgcttcagggagtgccataagcccccaagctcggtctgcagagaatgtagaattttcggacgaggctagaaaaaaggctatacagcgggagctgagacggcggcagaagttcaggtgaaggcaatatatccagtcttcaagacaagacaatatatccagtcttgatggctgaatgagtgggcgaccttagttgccatcaagcataacccttgttgtatcagctgcttat

SEQ ID NO: 62587 - DNA, 341 bp, Zea mays
tctgaagaaggcgatgatgattcaagtgatgaagatgataccagtgacgatgaggaggaagacacgccaactcctaagatgcctgatgtaggcaagaagagagctgctgacagttccgtgctgaaaactcctctatctgataagaacgcagaggttgccacaccgtcatctcagaagacaggtggcaagaagggcgccgcggtccatgtggcaactccacacccagcaaaaggccagaccattgtaaacaatgacaaatcggtcaagtctccataatctgcgccaatatctggtggctcggtcccttgcaaatcgtgcagcaagtcattcatcagtgagac

SEQ ID NO: 62588 - DNA, 304 bp, Zea mays
atcgcggagaaggaaaccgataagattctaggtgtgcacataatggcactcaatgctggtgaaatcatccatgaagctgtcatcgccttgcagtatggagcatccagtgaggatgttgctcgaacatgccacgcacaccctaccgtgagcgaggccctcaaggaagcttgcttgcaaacctcataaagcatccactatgattctcatttctattccttgcatcaacttttgtcacaagtcaagttatggatttgggctgtggacagaggctcagttgtctttgtttgtcgcatatgtgatcttg

SEQ ID NO: 62589 - DNA, 334 bp, Zea mays
cgctcctgtccaccctgccaccgccgacgccgcgccgccgcagcaactgtcaccgtcgctatggcccgtatcaaggtgcacgagctccggcgggaagagcaagactgacctgcaggcgcagtcaaggagctgaagtctgagctctccctcctccgcgtaccaaggtcaccggcggcgcacgcaacaagctctccaagatcaaggtggtgcgcacctctatcgcgcgcgtgctcacagtgatctcgcagaagcagaagtcggcgttgcgggaggcgtacaagaagaagaacctgctccgcctcgacctccgccctaagaagaccgtgccatccgc

SEQ ID NO: 62590 - DNA, 337 bp, Zea mays
  unsure (1)..(337): unsure at all n locations
cagcaatgagacaagacgcagtgaacaaggctaaagcatttgatgagaagcatcaatttagggctaatgcatcagcgaggatcaattcctttgataaacgtgttggcctttcggagaagataaacaatgggatatccgttgtcaatgaaagggtgaaatcagtagaccaaagattgcatgtttctgatanaacaatggctgcattgctggctgcagagcgcaagctcaatgatacaggctctgctgtgaaaaccaacaggtatgtgtctgctggaacaagctggctgaatggtgcttttagcaaggtcgccaaggctggtcatgttgctggctcaag

SEQ ID NO: 62591 - DNA, 341 bp, Zea mays
gtatggagaggagattgagaatccacttactctgttgaatgatccatcctctgatgagccactggggaactgtgggaagaaggtcctactgtggtggcatcgtgttgaagcacgggcggatagcaagtttcctcaagggtgggtaattgagccacctttggaagtcgtcgtccccgcaaagcgcactccatggcctgataccaccaccgagcttccatccgagttgttggatgacaagcaaaagccggaggataggcacttgtcaagaggcacagatcgtctcagctcagatgtcacacgagacggataggcgaccctcaagggcatgataactgatggag

SEQ ID NO: 62592 - DNA, 340 bp, Zea mays
actgcaccgagctcactggcaatggctaccagcaccaagctcgtggcccttggctttgccgtcctcctgagcatcggcttctccgatgcagcgagggtagttaggcttggtagccatgcgtccgcgggatgtggaggtggcggtgggggaggcggctccgggtcgactgggggtggctttagcggtgggtctggcggtggcggcggatacggcataggtaagggtggcggcgactggtggaacaatttcgtctctagtatagcaggtggtggaggaggaggacaaggcggaggcggtggcaccaatggtgggtccgggtccggcggtgggtccggttatg

SEQ ID NO: 62593 - DNA, 345 bp, Zea mays
ccaggtccagacatagcaaggattgacagactgagagccctggtttctggagtgcagatcgccatctctgcttccaacaccggcggtgcatgggacaatgccaagaagtacatcgaggctggtgccagcgagcacgcgaggaccctcggtcccaagggatccgactgccacaaggccgctgtgatcggtgacaccattggtgaccccctgaaggacacctccggcccgtccctcaacatcctcatcaagctcatggccgtggagtccctcgtgtttgccgccttctttgccaaccagggtggcctgctcttcaagtacctgtaaacaggacaacaccaagcacac

SEQ ID NO: 62594 - DNA, 341 bp, Zea mays
cggaaagcttgtggatgttgggtggccatctgtctgggtcaggattgcaacccactgggcgacggcaggtctgttcatatggtcgcttgttgcacccatcctctttcccgacagggaattctaagttcaaccacggtaagcctggagcatcatacgtgtctactgtggtagctaatatatcctatcaagtatgttgcctttaaaacatgctccgagcgtggatggcaaaaagtcggtgtttgtccactgttatcaagtttgtctacttaataacgtgtgctgcttgtattgtgtatatactggagaattttaaggctgcatcatgcgagcgtgttgtgtat

SEQ ID NO: 62595 - DNA, 341 bp, Zea mays
tgtcgcagctgagcagcaacaaggccggaaaggatgtcgtcgcagacctacgtcgacgagcacctcatgtgcgagatcgagggccaccaccacctcacctcagccgccatcatcggccacgacggcaccgtctgggcccagagcaccgcattcccgccgttcaagcctgaggagatggccaacatcatgaaggacttcgacgagcccgggttcctggcccccaccggcctcttcctcggccccaccaagtacatggtcatccagggcgagcccggcgccgtcatccgcgggaagaagggatctggaggcataaccgtgaagaagaccggggaggcgctggt

SEQ ID NO: 62596 - DNA, 336 bp, Zea mays
ctcatcacctctgaatcagctccagaacaggatatggctgatgcattgggctctgttcatcttctttaaccatgaaaatggtagaaatgggatcattgatctgttcttccaggacaggtacttgaatgctatacagacaaatgcacaccatcttattaggtatctagctactgcagttgttgtcaacaaaaggagaaggaatatgcttaaagagttgattaaggtcattcaacaggagcaccatagctacaaggatcccgtaactgaatttctggaatgcttatatgttaactatgcatttgtaggtgctcaacagaaactcatagagtgtgagca

SEQ ID NO: 62597 - DNA, 323 bp, Zea mays
  unsure (1)..(323): unsure at all n locations
tgcagttaatcatctatgtagtagagagaagcattatgccactacttaacttctgcaggtaatgaacaccgcaaaagccccaattactatagaaatatacaaagatgcttctgctgacgttgtggatagatttatcaacttgtgcaagagtaatcatttcaaaggaatgccatttcggcatatcataaaaaattttgtaattcaaggaggtgattttgatttcgatggagcttcccaagaatggataaccacagctaaagctagtggaaaaaatgatctcagtccanaacatgaggcatttatgattgggactgcaaagaatc

SEQ ID NO: 62598 - DNA, 332 bp, Zea mays
gttttggtattcaggagcacattgatcttggaatcaagtatgacccgtctactggtatttatggcatggacttttacgtcgttctggaacgagctggttatcgtgttgcacgtcggcgcaggtgcaagtcccgtgttggcatccagcacagggtgaccaaagaagacgccatgaagtggttccaggtgaagtacgagggtgtcatcctcaacaaggcccaaaacacctcgtaatcattgatagtcatcaaacgacttgcccttaattctgtgtactatgaacaaaacaccccgtgtttggttcaagtataatctgtgtactatgaattctgt

SEQ ID NO: 62599 - DNA, 335 bp, Zea mays
cttcgatgcagcgtacggaagtcggaatcggtcgagcacgccgtgacatttttgacagggctcgccatctgctccttggggcctcttctttgatgaacctgactcaatgctactcagagaggaagcagtgtgggtgatgctggaggtgcggctgatagagtgcttaatcagctactgacagaaatggatggcatgaatgccaagaaaactgtggttattattggagctacaaacaggcctgacatcattgaccctgccctcgcgaggccaaggcgccttgaccagctgatctacattccactgcctgatgagcagtctaggctccagatcttcaa

SEQ ID NO: 62600 - DNA, 325 bp, Zea mays
  unsure (1)..(325): unsure at all n locations
gaaccgaatcctccgcaactcgccgccgccgggaccgaccgacccggtcctatcgatcgacgatgtcgcacgcctacctcttcaagtacatcatcatcggcgacacaggcgtgggctagtcgtgcctgctgctgcagttcacggattagcgcttccagcccgtgcacgacctcaccatcggcgtcgaattcggcgcccgcatgatcaccattgaaaataagcccatcaagctccagatttgggacacggcttgccaagaatcattcagatctantactagatcatactacagaggtgctgctggctgccttgtagggttatgata

SEQ ID NO: 62601 - DNA, 333 bp, Zea mays
gttggcttcaacgtgaagaatgttgctgtgaaggatctgaagcgtgggtatgtggcctccaactccaaggatgaccctgccaaggaggctgctagctttacctcccaggtcatcatcatgaaccaccctggccagattggcaatggctatgccccagttctggactgccacacctcacacattgctgtcaagtttgctgagctcgttaccaagattgataggcgatccggcaaggagctggagaaggagcccaaatttctcaagaacggtgatgctggtatggtgaagatggttcccactaagcccatggtggtggagaccttttctcagtat

SEQ ID NO: 62602 - DNA, 334 bp, Zea mays
gacgtcccgtgggagatgtttgtcgagtcatgcaggcgtctgaggatcatgaagagctctgaagccataggtcttgcaacaagaacgaaggacaagtgcaagaacaggagctgaagaagatacagcgttaaagacgctgcccgttgtgtcaaaagaatggtgcccttgcagtgtgccgcggtttttctagaaatataatgcggtttaattactagttggagggagacctgtcttgttcaatttgttcatggaccagaagcaataatctatctgtgtgtagctggattgggtgtatgcgatgtcccctaccgtgtgtcccagaatctacttggtg

SEQ ID NO: 62603 - DNA, 353 bp, Zea mays
ccaccaacagaccctcccaggctaagctgcggcgggcactcgacgaatccctccaagtcgctgagaggttgaccaggaaatacaacgagctgctacagtcctaccagtggaagatgctcaacacctcctccttgctggagcagctgaacgagcagtttaactgggtgtcccggctggcaaacctcacgcaaggcgaagaccagtactatctgcgggtcaccacggtggcttcccacacttctgactcggacgttccttccggtgtcactgaggtggtcgtgaagctctttgactctgatcccatcactgtgacggtccctgtagaagtctccaggaagaaccctaaatttatg

SEQ ID NO: 62604 - DNA, 352 bp, Zea mays
ctcctcctcgcctcctctctctagcctccacgacgcaacggagagtgacggacatcgacgcgtcgcgacgaggagtgccaacgggaacagtctaagcaccgcaccatgacacttgttcgcagccgcagcctctgatctccgcgaggttgtcaggacacaatatgtcgaccatcacattcgctacttcctgcacgctgttaggcaatgttacaacaacgcaggactcccagacagcggtgaagagcccttcgtctctaagcttcttcagccaagttactaatgttccaagcctgaagacctccaagatactggatgactccgccatggctctatacaaggtgcagcttgtcgg

SEQ ID NO: 62605 - DNA, 347 bp, Zea mays
ggaagcgtatccatgtccgtgtggagcatgtgcagccgtcccgctgcacagaagagttccgcctgaggaaggcgaagaatgaccagctgaaggggatgcaaaaagcgcggcgaggttatcagcaccaagaggcagccattgggtcgcaagcccggcttcatggtcgagggcaccaccattgagaccgtaactcccatcccatatgatgtggtcaatgatctcaagggtggatactaggttgtttggtccatctacctgcagtacccagttctacatctgtgttactctagtgcgtgcaactttgctcactctgagcagtagtatgaacctgttgtctgttcctgttg

SEQ ID NO: 62606 - DNA, 356 bp, Zea mays
gtatggcaactatgttacacagcatgttctagacagaggaaaagctcatgagaggagccaaattattactaaattggccgggcaggttgttaccatgagccataataaatatgcatcagatgtgatagagaagtgttttcaacatggtgatattgcggacgggatcttctgatcagacggattgtggagcagacagagggcaacaacaatttattggtctgtttggtagtgtagtacaagtgttccctccattatcccttcctctctttgccaaacgggtcggggttctggaaggtagggctaggacatggggagctgatctcagttcggtacagcaaatcagataacaccatgag

SEQ ID NO: 62607 - DNA, 337 bp, Zea mays
  unsure (1)..(337): unsure at all n locations
ttgcaacctggcatagcaggcgtctgatgaagctatctctgagttagacagccttggtgaggagtcatacaaggatagcactctgatcatgcaactcctgatggataactttacncctttggacatccngactcacggaggatggtgctgatgagggcatacatgccccgaaaggtgatgcatgcgagggacagtaatcttcggagggggtgcaaagttgttcgagccccaatgttttagatgctctatgctgtcgaagctgtgctgtgccattattgtagctgatttcgtctccattcacttcttatttcttgttagtaggctggtagttgtcgaa

SEQ ID NO: 62608 - DNA, 338 bp, Zea mays
gctacagctggcgacacccatcttggtggtgaggactttgacaacaggatggttaaccactttgtccaggagttcaagagaaagaacaagaaggatatcactggcaacccgagggctctccggaggctgatgacctcttgtgatagggccaagagaactctgtcttccactgcccagaccaccattgagattgactcgctgtacgagggcattgacttctactccaccatcacccgtgccaggtttgaggagctcaacatggacctgttcaggaagtgcatggagcctgttgagaagtgcctgatggatgccaagatggacaagagcagcgtccatga

SEQ ID NO: 62609 - DNA, 342 bp, Zea mays
ctaggtctgtgaacgaatcgctttggaccagagtcaccggtgttgcaattttgcaatattcacattcagagggaaaagcatctggtcctcttcctgatccaccagatgatgagtatgacaagactttttcaatgaaccaggcacgttccatcaggatgaacgtgagcactggtgctgctcgtccgaatcctcaaggatcatttcactatgggtctatcaatgtgagccaagtttacaagctgaggaatgaaccacctgatatcatcaatgggaagatacggactacactgagtggtatctcttattcgccacccgacactcctctaaggatggcagatctgt

SEQ ID NO: 62610 - DNA, 341 bp, Zea mays
cttcgacacgtacggcggcggcgccaactcgctcgcctccggctactcccgcggcaccggcctcggcgccgagatcatcggcaccttcgtgctcgtctacaccgtcttctccgccaccgacgccaagcgcaacgcccgcgactcccacgtcccggttctggctcccctccccatcggcttcgccgtgttcatggtgcacctggccaccatccccgtcaccggcaccggcatcaacccggctaggagcctgggcgccgccgtcatctacaacaaggacaagccctgggacgaccactggatcttctgggtgggccactcgtgggcgctgcatcgcggcttct

SEQ ID NO: 62611 - DNA, 380 bp, Zea mays
ttctgcagcttagtaactcggaatcggctcgagcgcggttgagccgtcatacccgttgaaggagggcgccaacccgccgaaccctggccccagcccgccgtccccgaccccggcgcccgccgtgtgcgacaactactactcgtgccctgacagcaccacctgctgctgcatctacgagtacggcaagtactgcttcgcctggggctgctgcccgctcgagggcgccacctgctgcgacgatcactacagctgctgcccccatgactaccccatctgcaacgtcaggcagggaaccgcctcatgggcaaggacagcccactgtcactgtcagtgaaggctacgaagcgaaccctggccaaccgcactgggctttctccggc

SEQ ID NO: 62612 - DNA, 349 bp, Zea mays
tgcataaacgtgcaactggcgaggagtatcatgagcttatggaagagttcatggctgctgttaagcaaatctatggcgagaaagtcctcattcagtttgaggacttcgcgaatcataatgctcttaatctgcttgcaaaatatagcaagagccatcttgtgttcaatgatgacatccagggcacagcatcagtggtccttgcaggtttgttagcggcactcaaggtggttggtgggaccttggcagagcacacttatttattccttggtgctggggaggctggaactggtattgcagaactcattgctcttgagattcataacagacgtcggctccaatcgaagagtgc

SEQ ID NO: 62613 - DNA, 344 bp, Zea mays
cctccgcctctcgagtctcgtccacctgtcatcctcctagctcctctactcgccagtcgccttgggcaagatctagacttgtatcaacggcttcggaaggatcggcatgctcgtggccatggtcgccctccagagcgaggatgtcgagctcgtcgccgtcaacgaccccttcatcaccacggactacatgacctacatgttcaagtacgacaccgtccacggccactggaagcacagcgacatcacactcaaggactccaagacccttctcttcggtgacaagccggtcaccgtctttggcatcaggaaccctgaggaaatcccgtggggtgaggctggcgctg

SEQ ID NO: 62614 - DNA, 334 bp, Zea mays
cctacgcgcaaggtccgaaatcactacgatcatcccaacgaccaccagcctaccacctatgctgcctctgcgctaagccgacgcgctcccgttctccaccgggagcttcgccgacatcctcgccatgttcgcgccgacgacatccgacgccatgggcgaagagatacggtcgacgctcgacacctgatgaaacacgcgcccgctctccggcgagaaggccgcctgcgccatctccctcgagtctctcgccaggatacccgtcgtcctcctcgggacacgcaacgtccgcgctctctccgacgacatggccaccgatcctgccggcacgtcggcg

SEQ ID NO: 62615 - DNA, 381 bp, Zea mays
aacttcgtgcagctttagtagctctgaatctgctcgatgtgagttccctcactggggtcgcccatgttagcttcaagtatcctaccaggccagatgttcagatattccgggacctttgcttgacaattcatgctgtaaagactgttgcactcgttggagagagtggtagtggcaaatcaacggcaatttcattgctccagaggttctatgaaacagatgtaggccatatactactagatggcgtggacatacagaagttccagcttaggtggttaaggcaacaaatgggcctggttagtcaagaaccagctttgtttaatgacacaataagggcaaacattgcctatggaaaagatggacaagcatcagaatctgagatca

SEQ ID NO: 62616 - DNA, 345 bp, Zea mays
gctaggcgtttatccgaagcagcatttggcgaggctatgcttcacaccattggttatatttatgtccggcaagcagcaagagaactcgggaaaagtagaatttacatgggtgtacctcttatagctgaatgggttagagacaaaggacaccacattaaatcacaggttaatgctgcttcaggtgctatttctctaatacaacttcaagaagggatgaaaaagatggaggggagtgaggacagcgaggagcaacttatgaagagtttcgaggagaaaaaagatgccatgctcagctcgctttggaaaatcaatgtggttgatatcgagtccacgctctcacgtgtc

SEQ ID NO: 62617 - DNA, 344 bp, Zea mays
gccgctccaggatttctgtgttgctgatattcactctcctgtgaaggtgaatggagttgtttgtaaggatcctatggcggtgaccccagatgacttcttcaaagcagccaatcttgataaagctagagacaccatgaagagtaaggtggggtccaatgtcactttgatcaacgtcatccagctccctggcctcaacacggaacacatctccctggcacgtatcgactacgcgccattgggcgagaacccgccgcacacccacccacgtgccacggagatcctcacgggtctcgaggggacactgtacgtcgggtttgtcacctccaacccaaacaagctatttg

SEQ ID NO: 62618 - DNA, 342 bp, Zea mays
ggccaagctggctgcctcctctatcgacagcatcgtgaacggcagcgacgccgtcatggagccggttgttgctggcagcaacacggtagtagctgttgcccaagttgagttgcaaacaatgaacgtgcagcagcccgctgatgttgcagtacgcagcgagggggtggcggcgatctccaaaggggggaaggtagggccgaaccggtgcagcgcctgcaggaagagggttggacttacgggattcaactgccggtgtgggaacttgtactgcgcactccaccgctactccgacaagcacgactgcaagttcgactaccggactgctgccatggacgccattgc

SEQ ID NO: 62619 - DNA, 339 bp, Zea mays
gtccaagaggagataagcttgcattgtggactaggactgccagcaatgaagctgtccaggtaaacattggcaagaaatggaaggatgtcatcgactacgatgacaagatcatctacactttccatgacgactcgagaagggataagccaagcagaggtggacggtacaccgtgtaagttgcacacgaagaaggtcgttgttgttcggactggacagagggtgagagtggagttttgtgctgagatcggcacagctttcatctaatacagcctcagcttacctgaggcagatgtcgcacctgttatgatgtagtctgctctcagatagggttatgtagca

SEQ ID NO: 62620 - DNA, 340 bp, Zea mays
atggcttcgcctcgaggccaacccgacgtcatgaaccagttcatgtggggactgggggtcccgaggacacggggttctgcgacgtgtacggcctcgatgacgagttgctcgccatggtgccccagccggtgctcgcggtcctacttctctacccccaggaccggagcaaggagtcccaagcttcagctacctcttcggtggagaccaaggagcccagcaagaacgtatatttcacaaagcaaactgttgggaatgcctgtggcacagttggtattattcatgcactggggaatgctacttccagaatcaagttaggtgaggggtcatatcttgatagatt

SEQ ID NO: 62621 - DNA, 340 bp, Zea mays
tggcgcacgctggccgactacaacattcagaaggagagcaccctccacttggtgctgcgtctcaggggcggcatgcagatcttcgtgaagactctgaccggcaagactatcacccttgaggtcgagtcttctgataccattgataatgtcaaggccaagatccaggacaatgagggcatccctccggaccagcagcggctcatttttgccggcaagcagctcgaggacgggcgcacgctggccgactacaacattcagaaggagagcaccctccacttggtgctccgtctcataggtggcatgcagatcttcgtgaagacacttactggcaagacgatca

SEQ ID NO: 62622 - DNA, 339 bp, Zea mays
gacaagaagaccaggcactaccttcgcaacaagttcaaaaagtttgttgtccacaatgtctccgagctggagctgctgctgatgcacaacaggacttactgcgctgagattgcccacaacgtgtccacccgcaagcgcaaggagattgtcgagcgtgctgcgcaaatggacatcgtggtcaccaacaagcttgccaggctccgcagccaagaggacgagtgaaatgttgggtagttttgactgtgctctgctcgtgttgaagatgttactgagattgatgttcttctgtaccatttctatgcttatgatagactcttcatatggacaaaattatgctat

SEQ ID NO: 62623 - DNA, 315 bp, Zea mays
agctgcgagaggtgtgaaggacgtcgtgctatgactggccgcatgattcattcggggccaccaggcctatgggaggcagcccccggtaccattcgtggggactacgccgtggaggtcggcaggaatgtcatccatggaagcgactccgtggagaacgggatgaaggagacgctctctggttcctgaaggtgtgcacaagcgagagcaccttcatccctgatctacgaggctgagcattgagctggatgcatgctgctcatggaaccagagtttgtgagtatatctgttgctctgctagatcatattacgcctggg

SEQ ID NO: 62624 - DNA, 344 bp, Zea mays
cagccagctcattaaccctcgttcctgtcgcgcagcacgacctccacttccacatctcccccggcgtcggcgcggtcagttgaaccatggcggactccaaggccacctcggcggtcacactccgcacccgcaagttcatgaccaaccgcctcctggcccgcaagcaattcgtgcttgaggtgatccacccggccgcgccaacgtctccaaggcggagttgaaggagaggcttgccaaggcgtacgaggtgaaggacctcaacaccatctttgtcttcaagttccgcactcacttcggaggaggtaagtccactggtttcggcctcatctacgacaacctcgagg

SEQ ID NO: 62625 - DNA, 288 bp, Zea mays
cacctacctctctacgaactacctgccgccggaaaaccctagagcgctcgaccatggatccgcagcagccggagcctgtcagttacctctgcggagattgcggagctgagaacaccctgaagcccggagatgtcatccagtgtcgtgaatgtggctaccgcatcctctaaaagaagcggaccgccggattgtccaatatgaagcgcgctgaagagtgaagacatagggaaaacactgaagatggttgatctattactcgcaacattactatgtaacaatctctggggg

SEQ ID NO: 62626 - DNA, 333 bp, Zea mays
ggcaaggatatcaatgctcttgagcagcacatcaagaacctccccagccctaccacctcatcatcgtgcaggacggcgacccgaccaagaccatcaatgtgcccgagggcttcgactacgagctctacaaccgcaacgacatcaaccgcatcctcgggctctaagcctcctgcatctacttcaaggactccgcctgccgctgcttcggctacatggtctccaagaagaagtacatctggcacagcaaggctagcaaccccttcggtaacttgaagaaggaatacaagggcatcttctggcaggaggacatcatccccttcttccagaacgtga

SEQ ID NO: 62627 - DNA, 337 bp, Zea mays
aggagctccatttaaagaaatagacgaagatatcactcaccagattgttgataggccgacacaaagccatgttttcctctccagggagtatgttcaaccacagtgggtctttgattgtgtaaatgctcgtatcatattgccaacagaaggttatcttgttggaagagtacctccaccacatttgtctccttttgtggacaatgatgccgagggctacatgcctgagtatgcagagacaataaagaggctccaagctgctgctcgcaatgaggtgttgcctcttccaggtattggtgatgaagatctagacaattcactggtagcagcaatgatggat

SEQ ID NO: 62628 - DNA, 319 bp, Zea mays
  unsure (1)..(319): unsure at all n locations
cttattctggctggagatcatctgtaccgtatggattaccaaaagttcattcaagctcatagagaaacagatgctgatataacagttgcagccctgccaatggatgaacaacgtgcaactgcatttggtcttatgaaaattgatgatgaagggaggatagttgagttcgcagaaaaaccaaaaggagagaagctgagatcaatgatggtagacaccactatattgggccttgatcctgaaagggccanagaactgccttatattgctagtatgggaatctatgtttttagcatagatgtgatgcttcggcttctcagag

SEQ ID NO: 62629 - DNA, 338 bp, Zea mays
tgattatgtagcttgcagagggcatccaagttggctgctgggagggtacataaaccactatggaagcatgctgatccacgttttgtctggaacatcaatctgtctacatgaacttattgaagctaagctggatgagctcatcatcccgctgatacaaggaagttttcagtcagcacaatttgacttgaaggatagaccagtgaggataacattgttctcaaggagatgcaacaggcgtttaggatcaagaatgtggagaaggggttcgaatcttgaaggcgccacagcagattctgtcgtgacagaacagttggttgagtatgaagatctcacgtcct

SEQ ID NO: 62630 - DNA, 329 bp, Zea mays
tgcgaggcgctcaagcactccacggggcagggccaccccgtcaagctcgtgccctacaacccggactaccaggacgagtccgtgctctggaccgagagccgcgacgtcggcaacggcttccgctgcgtccgcatggtcaacaacatctacctcaacttcgacgccttccacggcgacaaggctcacggcggcgtccatgacggtaccgagatcgtgctctggaagtggtgcgagggcgacaaccagcgctggaagatcctcccttggtgaacgaacgaaagaaactactagctggtaccctaataataattctgctggctgcggcgatc

SEQ ID NO: 62631 - DNA, 341 bp, Zea mays
ttagggattccctcttctttcccttcttatcagcatcctcccagtctacaaggacgtcattgctgagttgaaggcagctggggcttcatggattcagtttgatgagcccactcttgtcctcgaccttgattctgacaaattggctgcattctctgctgcatacgcagaacttgaatctgtactttctggattgaatgtgcttgttgagacttactttgctgatgttcctgctgagtcctacaagaccctaacatctctgagcagtgtgactgcttatggttttgatcttggccgtggaacccaaactcttgggcttgtcacgagtgctggtttcctgctgg

SEQ ID NO: 62632 - DNA, 271 bp, Zea mays
gccgttaacctttgctgagatcaccacacaagacacgccatagccatctaagacagttcttgcatttggattgcctggaaatccagtgagctgtatcgactgcttgaatctgctggatgttcctgcgatccgtctactcactggctggtcaaatcgtcatctgcaaagagtgcatgtgcgcatatcacatgcttgaagagcatacccacatcgaacagaggttcaccgtgcagtacttagatcggtgctagatgacggatcaggtcgacct

SEQ ID NO: 62633 - DNA, 340 bp, Zea mays
gcgcaagaagaagggtaacaagaggacggcggcgatggcgaagaggctgctcccatctctgaaccgggtgctggttgagaagctggtgcagcccaagaagaccgccggcggcatcctcctcccggaaacatccaagcagctgaatgctgctaaagtggtggctgttggccctggtgagcgcgacaaggcaggcaatctgatcccagttgctctgaaggaaggtgacactgttctcctgccagagtatggtggaactgaagttaatcttgcagctgataaagagtacctcctcttcagagagcacgacattttgggcacacttgtggactgattcagagca

SEQ ID NO: 62634 - DNA, 333 bp, Zea mays
cgggcacagaatctggtgtctcttgctccgaccccgttggcgactgagacgcgatccccttctcctgcactgccgtcctccgtcgctgcgatgcctcggtattactgtgactactgcgacacctacctgacccatgactcgccatctgtccggaaacaacataatgctggatacaaacacaaggcgaatgttcgaacctactatcagcaatttgaggagcaaactcaaagtttaattgatcaaagaatcaaggagcatcttggacaagctgcagctttccaagcaggtgcccctttcaaccaacatctgcttgcattcccaggagctatggcc

SEQ ID NO: 62635 - DNA, 339 bp, Zea mays
  unsure (1)..(339): unsure at all n locations
gattccanagctgctctcgtccctagaaataaagcagctcctccgcggggcggcgaactgctactcatcgccaaaaccctagccccgatccggtcgaggagcactacttcttggcatggcgggcacccctagccaggcaagcctcctgctccagaagcagctcaaggatcttgcgaagaaccccgtggatgggttctccgcnaggcttgtagacgatagcaacgtcttcgagtggcaggtcaccatcatcggcccgcccgacaccctatatgatggaggctacttcaatgcaataatgacctttccccagaactatcccaacagcccgccatcagtaag

SEQ ID NO: 62636 - DNA, 107 bp, Zea mays
accaatgatgggttatagttcaataataaagttttttatctgatgtttgtggcttcccagaaataagaaagtacatttctaaaaaaagagaaaaaaaaagggggggc

SEQ ID NO: 62637 - DNA, 280 bp, Zea mays
tggggacttcacttttcgtgataaagatttccgagcagccatagactggtataccaagtgtatggatatggggccaaagaaggcgtcaccaacagttctcgttcgacgcagttgctgccacctcatgtgcggcaacctggacgccgccctccgcactgcaatgcaatcgcacgtcagtatcccgactgcccaacctcactgtacatgcaagcagtggcactttcaaagctagggatgcatagtcaatccatgggcatgctgattgaggcgtcggagatgg

SEQ ID NO: 62638 - DNA, 273 bp, Zea mays
gtcttctacctcaagatgaagggtgactaccacaggtaccttgctgagttcacttctggggcagagaggacggatgctgttgagatcaccatggatgcctacaaagctgctcaggacattgctctcgtagatttggctgtaaggcatcccatcagggttgtggtcgctcttaggttctcagtgctctacgacgtgattctggacttacctgatatcgtcttcatgcttgcaatacaggtcttctatgatgcgatccctgtggtaggcagtctg

SEQ ID NO: 62639 - DNA, 338 bp, Zea mays
ctcttacgcgatcagcatgcccgagcctctctccgtgttcgtcgacacgtacggcatcggcgcgatcgccgacaaggagatcctcaagattgtcaaggagaacttcgatttcaggcctggcatgatcatcatcaaccttgacctcaagataggcggcaacgggcgctacctcaagacggcggcatacggccactttggaagggacgaccctgacttcacctgggatgtggtgaagccactcaagtcggagaaaccttctgcctaaggcggtacttcttctcagtaagaagcttttggtggtctgctgtgcttaatcatgcttctatatggcttctaca

SEQ ID NO: 62640 - DNA, 338 bp, Zea mays
cgttgggctaccccaactcacaagcttcagatgcttcgcaattgatttctcaagcttcctttgatggtgacatagatggggcaagcctagttacaaactctaatgtcatagaagatgatgattttcaaggcaagccaaccaacagtggcacatcaaaggaactgtcagacgatgatggtgaccttgaagagaatactgaccccgctaacgccaagaagatgaggagaatggtgtcaaaccgggaatcggctaggcgatcaagaaagaggaagcaagcacacttgaccgatcttgaatcacaggtttccaggttaacgtctgagaatgcatctttgctg

SEQ ID NO: 62641 - DNA, 333 bp, Zea mays
tggggacttcacttttcgtgataaagatttccgagcagccatagactggtataccaagtgtatggatgtggggccaaagaaggcgtcaccaacagttctcgttcgacgcagttgctgccacctcatgtgcggcaacctggacgccgccctccgcgatgcaatgcaagcgcactgcagtatcccgactgcccaacctcactgtacatgcaagcagtggcactttcaaagctagggatgcatagtcaagccatgggcatgctgattgaggcgtcggagatggaagcgaatcagaacaagacccgaaaagcagcttaagaagactcaacatgggcg

SEQ ID NO: 62642 - DNA, 341 bp, Zea mays
cggcctctgtcccttgcaagttcaatctcacctccaaccatgggtaaagagaagtcccacatcaacattgtggttattggccatgtcgactctggcaagtcgaccaccacaggacaccttatctacaagcttggaggcattgacaagcgtgtgatcgagaggtttgagaaggaggctgctgaaatgaacaagcggtccttcaagtacgcgtgggtgctcgacaagctcaaggctgagcgtgagagaggtatcaccattgatattgctctgtggaagtttgagaccaccaagtactactgcacggtcattgatgctcctggacaccgtgacttcatcaagaa

SEQ ID NO: 62643 - DNA, 313 bp, Zea mays
  unsure (1)..(313): unsure at all n locations
tataccgagaagagaccaggccgaagaaaacaatcctgaaaccaagccatgggtctgcaggaggaatttgaggagcatgctgagaaggcaaagaccttgcctgagaacacgagcaatgagaacaagctgatcctatacgggctctacaagcaagccacggttggagatgtgaataccgatcgtccgggcatattctaccanaaggacagggccaagtgggatgcctggaaggctgttgaaggcaaatcgaaggatgaggcgatgaatgactacatcaccaaggtgaagcagctccaggaggaggctgccgcct

SEQ ID NO: 62644 - DNA, 325 bp, Zea mays
cttcaaagccctgcggcgatttcgattcttcccttctatctccaggtatacccatcggagcagcactgacaaaaattctccaggaactccaagaattcatctgatatggcaagcaaaaggattcagaaggaactcatggatctccaaaaggacccaccgacatcatgcagtgcagggcctgctggagaggatctattccactggcaggccacaatcatgggtcctagtgacagcccctatgcaggcggggttttctttattaatatccattttcctcctgactaccctttaagctccaaaagtgaacttcgaacaagatttatca

SEQ ID NO: 62645 - DNA, 253 bp, Zea mays
gcaaggccgacgaggggttcagcgccacggtccgcaacggcgccgtgtgcctcgcgcccagcaacccgcgcgacgagtaccagcactggatcaaggacatgcgcttcagcagcccaggtcaaggacgacgtatggaagcctgcgttcgacctcgtcaacaaagccactgggctcgtcatcaaggagtccctgtgtggatgagtatagttccagtcgtttgtgacgaagtcagttatgtatgagtgagaagggt

SEQ ID NO: 62646 - DNA, 336 bp, Zea mays
tgcgatgccaacggccttcacgggcaacctgaagaaagcacttgcaggtctgagaagaatcaatttagatgggcttcgatggcgcgtatttgatgctaagggtcaggtgctgggaagattggcttcccaaatagccgttgtgcttcaaggcaaggataaaccgacctatgcgccacatgtggaaaatggagacatgtgcattgtacttaatgcacaggatatcagtgttacaggaaggaaaatgacagataagatttactactggcatacagggtatgttggccatttgaaggaaaggaggctcaaggaccagatggagaaagacccaactgaagt

SEQ ID NO: 62647 - DNA, 320 bp, Zea mays
  unsure (1)..(320): unsure at all n locations
tgtacactgacatcacacaagctctcgaagccaatggaatccaaacaaaccccaaggactatctcactttcttctgcttaggtaaccgtgaggtgaagcaggagggagaatatcaacctgaggaacacccagaacctggcactgattacatccgggctcaagaggctaggaggtttatgatctatgttcatgccanaatgatgatagtggacgatgaatacatcatcattgggtccgccaacatcaaccagaggtccatggacggtgccagggactctgagatcgccatgggcgcgtaccagccgtaccacctggcgact

SEQ ID NO: 62648 - DNA, 251 bp, Zea mays
ggacgagataacttggcagctaacttcagcagagaattagcagactacataatctacattatcgatgtctctggtgggggcaagataccatgaaaatgtggcccttggagtacccaggcctatctgttcgtgatgaaccagacagagcgatcacctgctgtactaggtgatctgtctgtaatggagcgaggtgcacgtcgcatgcgcgagatgaggggctgtcatggtacacgggatccgcatgggagtgt

SEQ ID NO: 62649 - DNA, 209 bp, Zea mays
caagccttcctgagggttatgggtttatagagtttgtttcacatgaagctgctgagataattctccagacttacaatggcacacagatgcctggaactgaacacacattcagattgaattgggcctctatcagctctggtgagaagcgcccagatccatgatctgatcattcgattgtcgtatgggaccgtgcacctgatgtcacagat

SEQ ID NO: 62650 - DNA, 327 bp, Zea mays
ttttcatattctgcatgaacaggggattcctgtagctcctctctgggactcattcagaggtcaatttgtcggccttctgagcccattggatttcatacttatattgcgggagctagaaactcatggctcgaacttgacagaagatcagcttgaaacacacactatatctgcatggaaagaggctaagcggcaaacttgtggaagaaatgatggtcagtggcgagcacatcagcatctagtgcatgccaccccttaccagtccttgagggacattgcagtccagcttttgctaaatgacatttctacagtgccagttatttattcatc

SEQ ID NO: 62651 - DNA, 301 bp, Zea mays
atgaagccgacgagcagccgacgctaaagcttagtccggtgagcttcagagaaggggcgggtacgtcaagatgcagatcttcgtgaagaccctgacgggaaagaccatcaccctcgaggtcgagagcagcgatacaatcgacaatgtcaaggccaagatccaggacaaggaaggtatcccgccggaccagcagcgactaatcttcgcggggaagcagctcgaagacggccgcaccttggccgactacaacatccagaaggagtccacccttcaccttgttcttcgtcttcgcggtggcatc

SEQ ID NO: 62652 - DNA, 304 bp, Zea mays
gctggcttctcctccacctcatatcaagtcctcctcgggttagggttccttagggatttgtggaggggcgatggcggcggctgatgtggagtaccggtgcttcgtcggcagacttgcctgggccagcagcaacgagtagctggagaatgccatcgacacctacgtcgaggtcctcgattccaaggtcatcaccgaccggtagactgggatgtcacgcggcgtcggcaacggtaccttcacatccgagaactgcatgctcgacgctatcgaccacatgaaccgcaaggagatccacggacgtaac

SEQ ID NO: 62653 - DNA, 313 bp, Zea mays
ttctgcggttctgccgtctacgcctccaatttggcctctctcccttgcaagccatgggtaaggagaagtcccacatcaacattgtggtcattggccacgtcgactctggcaagtcgaccaccaccggccacctgatctacaagcttggaggcattgacaagcgtgtaatagagaggtttgagaaggaggctgctgagatgaacaagcggtccttcaagtatgcttgggtgctcgacaagctcaaggctgagcgtgagaggggtatcaccattgatattgctctgtggaagtttgagaccaccaagtattactg

SEQ ID NO: 62654 - DNA, 322 bp, Zea mays
gttagttccaagggatctaatatcgctattcaatgataaagaacttgaactgctgatcagtggtcttcctgaaattgacttggatgatctgaaggccaacacggaatatataggatattcagctgcatctcctgttatccagtggttctgggaagttgttagagcattcagcaaggaggacatggcgagactactacagttcgttaccggaacatctaaggtaccattggagggtttcaaagcgctacaaggtatctctggcacccagagatttcagatttacaaggcgtatggatctcctggtcgacttccatctgctcat

SEQ ID NO: 62655 - DNA, 319 bp, Zea mays
ctcgagctctgaagtttgcatcgaagactgctacatcgaaagcggagacgacctcgtggccgtcaagagtggctgggaccagtacgggatctcatttggcaagccgagcacgaacatcgtcatccagagggtttcgggcacgactccgacgtgctcgggcgtaggcttcggcagcgagatgtcaggaggcatatctaacgtgctcgtccgtgacctccacgtgtggaattcggcgcagccgtgaggtcaagaccgactagggaggggtggtacatcaccaacatcacatagcagtgtggcatggagaagtcaggtgcga

SEQ ID NO: 62656 - DNA, 327 bp, Zea mays
cgccgaaatcctcaacaacgctctgaagattgttgtgtctcagtgcaagccaaaagtcaagattgttgacctttgcgagaagggcgactctttcataagagagcaaactgggaatgtttacaagaacgcaaagaggaagattgaaaggggtattgctttcccaacctgtgtatccgtcaatgacacagtttgccacttctcaccgcttgcaaccgatgatgccgttctggaagaaaatgacatggttaaaattgatatgggctgtcatattgatggctttattgctgtggtggcacatacacatgtaattacaaatgggcctgtcac

SEQ ID NO: 62657 - DNA, 334 bp, Zea mays
ccagatactgttccacagcgtcgaggagaagctctgcccgctcctcgccttcttccagacgctcggcgtctccgagatgcagctcgccaagctgctcatggtcaacccgcgcctcatcagctacaacatcgaggccaagttctcgcagaccgtcggcttcctcgccggcctcggcgtcgacagggaaggcatgatcggcaagatcctcaccaaggagccgtatatcatggggtacagcgtcgacaagcggttgcgccccactgccgagttcctcaagtcggaagtcgggttacaggggccagatctccagagggtggtcatgacccttcccgat

SEQ ID NO: 62658 - DNA, 339 bp, Zea mays
ctggcccccgcaactgctctaggtttcaatccgcctgacaaggacatcatgaagaagccacctaggaggagcgacgactcactgatcactccctggatcttgttccgctacctggtgattggcctttacgttgggatggcgaccgttggcatcttcgtcatatggtacacacatgggtctttcatgggcattgacctgaccggagacggccacactctggtcacctactcgcagctttcgaactggggccagtgctcttcctgggacaacttcacggcctcgcctttcaccgccggagccagaacgttcgcgttcgacgacgacccgtgcgactacttc

SEQ ID NO: 62659 - DNA, 326 bp, Zea mays
tgatgatgtctggtttgcatatccttctcgcccatctcatatgattcttaagggaataactctgaagctagcaccaggttcaaaggttgcacttgttgggccaagtggtggtgtcaaaaccacaatagcaaatttgattgagcggttttatgaccctctaaagggaaggatcttgcttaatggagtaccgctggcagaaatttcacatcaatatcttcacagcaaggtaagcattgtcagccaggagcctacgctcttcaactgcaccatcgaagagaatattgcttatggactagagggcacaacgaactttgctgacgttgaga

SEQ ID NO: 62660 - DNA, 278 bp, Zea mays
cttcgctgaagaggagccatataagtagcagtctcacttcagtgagtacattaagaagggaattgaggctgatgacatggaagctctgtacaagatggtccatgctgccatccgtgctgatccttctgtggtcaagtcaaccaagcagccaccaaaggagcacaagaggtacaaccccaagaaactgacatacgcgcagaggccagccagtctcattgcaaggctcaaccaactcaactcctctggaggcgcagatgccgacgatgatgatgacgact

SEQ ID NO: 62661 - DNA, 327 bp, Zea mays
gtttgaaactttcagtgttcctgctatgtatgttgctattcaagctgtcctttccctttatgctagtggccgtaccactggtattgtcctggattctggagacggtgtcagccacactgtcccaatctatgaaggctatgccctcccgcatgccattcttcgtctcgatcttgctggtagggacctcactgattccctcatgaagatcctgactgagaggggttactctttcacaaccactgctgagcgggaaattgtccgtgacatcaaggaaaagcttgcatatgtcgcgctcgactacgaacaagaactcgagaccgccaagag

SEQ ID NO: 62662 - DNA, 324 bp, Zea mays
cagcgctgcaaggagctctgtatcatagcgctgcacattaagcttcgtgccactggacgcaacaagaccacgtctcctggagtctggtgtcagtctgctctcagggctcttgctcgttctggagtgaaaattggacgcattgaggatgttaccccggttcccactgacagcactcgttgaaagggtggtaggatgggaaggaggctgtaggcgtgtatccttgctatttgccatcactttgcactggtctctgagtagttctgctatttattagcttgccaaaaggagctttaattttgctcatttcgctctatgtcgaggatc

SEQ ID NO: 62663 - DNA, 311 bp, Zea mays
atactttgataatatcactcagttgttcagcttcaactacaaaccacttactccatatggtggtggcataaatgatacggcaatgttctggggtgtaaaattctacaatgatctgctgatgcaagccggcaaacttgggaatgtgcaatcagagctgcttctccgcaaggactcccggactttcactttcgaaaagggatgggccttcccacgccgagtttacttcaatggtgataattgtgtcatgccatctccctcaaattatccatggctgccgaatgcaagccctctaacaaaaccattggcactcc

SEQ ID NO: 62664 - DNA, 322 bp, Zea mays
tagcagctcatttcggcaggaaaggatgcggagagcgcttactgggaactcgttataaaggatatccaagatgcgtgcaaactttttgagcccatctacgacgagactgatggggctgatgggtatgtctccgtagaggtgtctcctaggttggcaaatgacactcaaggaactgttgaagcggcaaagtggttacacaaagtggtcaaccgccccaatgtctacataaagatcccagctactgcagaatgtgttccttccatccaggaagttatcgctaatggcattagcgtcaacgtcacgcttattttctcaattgcga

SEQ ID NO: 62665 - DNA, 325 bp, Zea mays
ctgagcaggagcttgttgactgtgacacttcatacaaccaggggtgcaatggaggtttgatggactatgcgtttgagttcatcatcaacaacggcggaatcgacaccgaggaggattacccttacaagggcacggacggacggtgtgatgtcaacaggaaaaacgccaaggttgttactatcgacagctatgaagatgtaccagcgaacagtgagaaaagtctgcagaaggcagttgcgaaccagcccatcagtgttgcaattgaggctggtggcagagcatttcagctctacaactcgggtatcttcacaggaacctgtggaac

SEQ ID NO: 62666 - DNA, 311 bp, Zea mays
aaggctgctaagaaagtatccgctattctttcatgggaaaacacaaagaaagcaaacatagaagctgaactgaagaagattgaggaacaactggaaaagaagaaggctgaatatgcagagaagatgaagaacaaggttgcaatgatacacaaggaagccgaagagaagcgagcgatggtggaggcaaaacgcggtgaggaggtcctgaaggccgaggagatggctgccaagtaccgggccaccggccacgctcctaagaagctcatcggttgcttcggagcctaagaagccttccaagtcagaccgagcag

SEQ ID NO: 62667 - DNA, 291 bp, Zea mays
  unsure (1)..(291): unsure at all n locations
gtgaaatccatgaatctgagccttttactcagcgcagcgncgtatatagtttcggtgtggtgatgctagaacttcttactggtcgtaagccatatgacagctctcgtccacgtgctgaacaacatcttgttagatgggctgattctcagcttcatgtcatgaagtccctgtcagagatggttgatccatctatccgaggagagtgttcagtgatactattgtcatgttttgcagacatcatcagtcggtgtattcagccgggaccagaattcaggccagcaatgtctcaaa

SEQ ID NO: 62668 - DNA, 330 bp, Zea mays
tattagataccatgatgataatagatcctgactttattttttgtactacaggtagcacaagagtattctgaatgcccatcagggaagaaaggtggagatcttggttggttcccgcgtggcaagatggctggtcctttccaggaggttgctttcaacacacctgagggaactgttagcgcaccattcaagtccacgcacgggtatcactttatcctctgcgaaggaaggaagaactgatctggaaatgtcggttggggagactgcatcatcaggttgtatgagacgcaatgcaaactactcaccttctctaataagcgctggacatgtgta

SEQ ID NO: 62669 - DNA, 330 bp, Zea mays
gtaagttctgtccattcaacaccgtcctcttggatcatggcgacccgtcagtgaacacagttctaactgcgccaactgataagcctggcgtcgcgttgcttgattttgtaatattcccacccagatggctggttgctgagaatacattccgcccaccctactaccaccgcaactgcatgagcgaattcatgggcctcatctatgggatgtacgaggctaaggccgatggttttcttcctggtggcgccagcattcacagctgcatgacaccgcatgggccagacaccaagacgtacgaggcaacgatcagccgtgctgctgccaacgagc

SEQ ID NO: 62670 - DNA, 314 bp, Zea mays
atcactaagttcttttggtgggaatctggatattggtgtactatggacattgctcatgatagagctggtttctatatctgctggggatgcttggtatgggttccatccatatatacttcccctggaatgtaccttgtaaaccaccctttgaatttgggcccccagctagcactctcaattcttctagctggaatgttgtgcatatacataaactatgattgtgaccgtcagcgccaagaatttcgacggacgaatgggaaatgctcggtctggggcaaggctccatctaagattgttgcctcttatcagactac

SEQ ID NO: 62671 - DNA, 317 bp, Zea mays
gtcattccttgctaccaagcagaatgcaaagaatgcaagttttgcaagagcggaaagaccaacctctgtggtaaggtccgtagtgccacaggcgtaggtgtcatgatgaatgatatgaagagcaggttctctgtaaatggaaagcccatttaccatttcatggggacatcgacattcagccagtacactgtggtgcatgatgtcagtgttgcaaagatcaacccacaggcacccttagataaagtctgcctgctcggttgtggtgttcctactggtcttggagcggtgtggaatactgcaaaggttagatctggctc

SEQ ID NO: 62672 - DNA, 317 bp, Zea mays
gctacgcatcttgttttatttgttctaaaccatatattttacgtggcagcacaaatgctacatagttgctacttgtgatagagatttgaaaaggaggataagaaaggtatgtttggtgtttagtgctcatagctcaggacatgcttctaatatcgcaaaagctttttcatgcatgcttgtaccatgggcatttccccaatcttgcaggttcctggtgttccaatcatgtacatcacaagacataggtattcgatagaacggctccctgaggccacaattggtggaggtatgtgatatcttcatctgacaaactttgt

SEQ ID NO: 62673 - DNA, 331 bp, Zea mays
aggctggactgcctgagggtgttgtgaacgtcgtttctggttttggccctactgctggtgctgctcttgctagtcacatggatgttgataagatcgcatttactggatctaccgatactggaaaaattattctcgagttggctgcaaagagcaaccttaagacagtgacactggagttaggaggcaagtcccctttcatcataatggacgatgctgatgttgaccatgctgttgagcttgcgcactttgccctgttctttaaccagggacaatgctgctgcgctggatctcgcacgtttgtacatgagcgtgtttatgatgagtttgtgga

SEQ ID NO: 62674 - DNA, 239 bp, Zea mays
atatttcttgaccaggatttatcaggtgtttcactagagcaatttaaatgtgaagtgagaatcatgtcaaggctaaggcatcccaatgttgttcttttcttgggatatgtgacacaatcgcctaatctctctatattaactgagtacctcccaagggggagcctatatcgtctgttgcataggccaaatagtcgaattgatgaagtacggaggctaaaaatggcattcgatgtggcaaa

SEQ ID NO: 62675 - DNA, 320 bp, Zea mays
gcaaagcaagtgaaggccaatgctgttgcaattggaaactatctcatgagcaagggctacaagatggtgactgatggaactgagaaccaccttgttctctgggatctccgcccccttggcttgactggaaacaaggtcgaaaagctatgtgatctttgccacatcacattgaacaagaatgctgtcttcggtgacagcagtgcattgtctccgggtggtgtccgcattggcgcgccagcaatgacctcgaggggtctactggagaaggatttcgagcagattggggagttcctccaccaggcagtgaccatctgcctgaa

SEQ ID NO: 62676 - DNA, 313 bp, Zea mays
catcccagtggtggacctgtccgtggcgcggcgcgaggatctggtggcccaggtgaagcacgcggccgggacggtgggcttcttctgggtggtgaaccacggcgtgccggaggagctgatggccagcatgctcagcggggtgcgccagttcaacgagggctctctggaggccaagcaggcgctcaagtcacgggaccccgctcgcaacgtgcgcttcgcttccaacttcgacctcttcgagtccgcggcggccgactggcgcgacacgctctactgcaagattgcgccggatccggcgccgcgggagctcgtg

SEQ ID NO: 62677 - DNA, 329 bp, Zea mays
caggtggccgtgtggtcccagaaccgccgcgcgcgttggaagacaaatcagctcgagaccgactatgaccgcctcaaggctgcctacaacgcgctcgccgctgaccaccagggcctcctggccgacaacgatagcctccgggcacaggtgatctgcctaacagagaagctgcaaggcaaggagacatccctgtcggcaaccatggctacccaagaggtcgaccagccagacgaacacaccacaggcactgagaaattgctggcgcacagctcaaggacgacctgcacagcagctgcggttgcactggacatggtgccctgtcttcggag

SEQ ID NO: 62678 - DNA, 323 bp, Zea mays
ctctcctcggaggctagctctacttccacagaccatgcgatcccgatgactcgctacgcttcgcttcctcggcgccgattcctcctactcctcctccaccctcgtccgtccccttccggcgcacgagctcgcccgagatggcgaacgcgagatcgggtgtcgctgtgaacgatgagtgcatgctgaagtttggcgagctgcagtcgaagaggctgcaccgcttcataactttcaagatggacgacatgttcaaggagatagttgtggaccaggtcggggatcgcgctaccagctacgatgacttcacaaacagcctccctgag

SEQ ID NO: 62679 - DNA, 325 bp, Zea mays
agagcaccccccgcgcatcaagttcaagaggcccgacaagaccgccaggcacattatgaatatcctaaacaaagaggcggtcgaaaaggtccgctcggaaagggagattcctgatgtgcagcctggatgcatcattcagatgagattgcaagttcctgagaacaaacggcgtgagtcgacgctgaaggggattgtgataggaaggcgcaacgccgggatcaatacaaccttcagattgcgtagattagtggctggtgtcggagtcgagtctgtctttccacgttactcgccaaacatcaaagaaatcaaggtattggacaggaag

SEQ ID NO: 62680 - DNA, 327 bp, Zea mays
agagcaccccccgcgcatcaagttcaagaggcccgacaagaccgccaggcacattatgaatatcctaaacaaagaggcggtcgaaaaggtccgctcggaaagggagattcctgatgtgcagcctggatgcatcattcagatgagattgcaagttcctgagaacaaacggcgtgagtcgacgctgaaggggattgtgataggaaggcgcaacgccgggatcaatacaaccttcagattgcgtagattagtggctggtgtcggagtcgagtctgtctttccactttactcgccaaacatcaaagaaatcaaggtattggacaggaagaa

SEQ ID NO: 62681 - DNA, 323 bp, Zea mays
caagcagtccaaattcaaggcacacagatccaaaggctttggtttcaaagaattaccaggggacatgttttgctgggccttgtgttgaaaatggcaagagggtttcttggtggatggtagacatcggacaggagcaccagttgatgtgcaactactacacggtgaggcaggatggctccacagcattcatgaggtcttgggctttccagggatccatggacggccggaactggacaagcctccgtgtccacgacagcgaccctaccgtctgctatccaggccagttcgcctcttggcccatcgttggcccggcggccttctgc

SEQ ID NO: 62682 - DNA, 317 bp, Zea mays
ctccgttctcgccgtcgcctccgcctccgctgccgccgcgcaggtcagggtcatgtcgatcttcgagtacaacgggagcgccgtggtggcgatggtggggaagaactgcttcgcgatcgccagcgaccgccgcctcggcgtgcagctgcagacgatcgccaccgacttccgacgggtgttcaaggtccacgacaagctctacatcgggctctcggggctcgccaccgacgcccagacgctgtatcagcggctggtgttcaggcacaagttgtaccagctgatggaggagagggacatgaagctcgacacctttgcca

SEQ ID NO: 62683 - DNA, 325 bp, Zea mays
cgcacccgtggcacctgcacggccacgacttctgggtgctgggctacggcatcggccgcttcgacccggcggtgcacccggcgtcctacaacctcagggaccccattctcaagaacaccgtcgcggtgcacccctacggctggacggcgctgcggttcagggccgacaaccccggcgtctgggcgttccattgccacatcgagtcccatttcttcatggggatggggatcgccttcgaggaaggcgtcgaccgcgtcgctccgctcccgccacagatcatggggtgcgggaaaaccaggggtggccactaactgatggtgttcag

SEQ ID NO: 62684 - DNA, 333 bp, Zea mays
tcagagaaggagatcaaagagaaaaagtcgtcaggataaaaggtgacaaaaggtaaaggagaatcagctgaagcagttcttcccagcaaggacgatctgaggaagaccattactgatatcctcaagaaagttgacttcaacacggcaactttcagtgacattcttaagaagctcgacaatcactacaaaatggatctgaccccaaagaaagaagccatcaaagttatgatccaagacgagttaaccaagttatcagaggacgatgaaggagagggagacgaagacaccgggaagatacagcagcagcctcaggcgcaggagatcgaggcatga

SEQ ID NO: 62685 - DNA, 284 bp, Zea mays
tagctttgtcatgtcctgctcattcactaaccaggtcattgcccaacttgaactgtggaaggagaagagctctggcaagtatgagaagaaggtgtatgtgctccccaagcaccttgatgagaaggttgctgctctccacttgggcaagcttggtgccaagctgaccaagctcaccaagtctcaggccgactacatcagcgtgccgatcgagggtccctacaagcctgcccactaccggtactaggcagccagcacacggcttgcagctcactcgggccgttgtg

SEQ ID NO: 62686 - DNA, 321 bp, Zea mays
tcttgattgctggttttgctaacatgcgggccaggaactacagcatccctgaagttgacaagttgaaggcgaagttcatagcgggaagaatcatcccggccatcgccacctcaactgcgatggccaccggccttgtctgcctggagctttacaaggtccttgctggtgggcacaaggttgaagactaccggaacacatttgcgaacctcgcaatccccctcttctccatggcggagcctgtgccgcccaagaccatgaagcaccaaaatatgtcctggaccgtgtgggaccggtggaccgtaactggcaacatgacgctga

SEQ ID NO: 62687 - DNA, 306 bp, Zea mays
ccatgagccaggggacgccgctcaagcccaacgtgcccgtcgacgtctacgtgttcgcgctcttcaacgagaacatgaagccagggcccacgtcggagcgcaactacgggctgttctaccccaacggctcgccggtgtacgcgctcagcgacggctccggcggcggttcaggtccgggcgggtcgctcaacccgtactacacatccatgttctcctcctcgtccagatccgcggtgagcgcgaccttcttgacagagagagtgatgctgttactgctgctgcaacaactgtaatactccgacacta

SEQ ID NO: 62688 - DNA, 327 bp, Zea mays
ccgccgccgcctccttcgccacccagcgctcgagctcctcgctccctgcgagcgcgcgccgcaacgccaccatgaagttcaacatcgcactcccttccaccgggtgccaaaagaagctggaaatcgatgacgaccagaagctacgagccttttatgaccgaaggatatcccaggaggtcagtggtgatgctctgggtgaggagttcaagggttatgtcttcaagatcatgggtggatgtgacaagcaaggcttcccaatgaagcaaggagttttgacttctggtcgtgttcgtcttctgctccataggggcactccctgcttccgtg

SEQ ID NO: 62689 - DNA, 303 bp, Zea mays
tggggttcaaaaatgaagtttcaaataaatctattgttgagcccactcttgaatttgcaattgtacaagatgcagatcgcttggatgcaattggggcaattggtattgcaagatgttttacatatggtggtagcaagaacagcgcattacatgatcctagaattctgccacgtgatagcttgtcgaaagaaaggtacatgtccaaggaagagaagcagacatcaatcaatcattttcatgagaagctttttaaactgaaggacatgatgaagacagaggccgggaaaaggagagctgagaaaa

SEQ ID NO: 62690 - DNA, 324 bp, Zea mays
tcgaggactagatataaagaatgtggattgggtggtgcaggttgattgcccagaaaacattgataattacatccacagagttggccgtacagctcgttacaataagaaaggaaaatcacttatattcctttgtcctgaagaagaagcaatgcttgaaaaattgaaggcaaccgaaagtaaaatacctatacatattcgaaagccaaaggcagaacaactggagcagatatcgcagagtatagcctcagtgctggttaaatttcccaatcttcaggaattgggtacaagggcttttgttacctatcttaaggcagtatacctcca

SEQ ID NO: 62691 - DNA, 317 bp, Zea mays
ctagttgccagagcaattcttgagaaccctaatgacaacaccaaggttcacttaatttatgctaatgtcacatatgaagacattcttctgaaggatgagctggacgacatggccaaaacctatcctggccgctttaagatctactatgtgttgaatcagcctcctgagaactggaacggtggtgttgggtttgtgtctaaggaaatgatccaatctcattgtccagcgcctgctgaggacattcagatcctgagatgtggtcctcctccgatgaacaaggccatggctgcacaccttgacgagctcaactacacaaa

SEQ ID NO: 62692 - DNA, 324 bp, Zea mays
gcctcccaagaaggacctgcaccgattcgtcaagtggcccaaggtcgtgcgcatccagcgtacacgtcgcatcctcaagcagcgcctcaaggtgcctccggcgctcaaccagttcacccgcaccctcgacaagaacctcgctaccaacctgttcaagatgcttcttaagtaccggcccgaagacaaggctgccaagaaggagaggcttctgaagagggcccaggctgagaatgaaggaaaaactgttgaatccaagaaaccaattgttgtgaagtatggccttaaccatgtgacttacctcattgagcagaacaaggctcagct

SEQ ID NO: 62693 - DNA, 324 bp, Zea mays
tagttccaatcacacatgctgcattctcgtgtgacagtcaactgatctatgcaagctttatggatgccactgttggcatatttaatgcatcgagtttgagacttcaatgtcggattcttccagcttcgtatctccccccaaatatcagtccgagtgttcatcctgttgtggttgcggcacacccttcggaagcgagtcagtttgctctagggctgactgatggtggtgtttttgtgttggaacctttggaatcagatagaaaatggggaaatcctccaccggtagaaaatgggtctgctagcaacttgtccgcaccgcctccta

SEQ ID NO: 62694 - DNA, 328 bp, Zea mays
attcggctcgaggtatagtgtctgagtaggaaggtgctgctatctgaacgcggcatggtccaacagatgtggatatctaaggaggagtacgatgagtctggcccggcaattgttcacaggaagtgcttctaggcttcgcaagttcctcatcgttgcctagtctcaagttatgtccccttcatttctcaagatacgtgtggcagatttgcatggtacggttcatttatcaaattatgcccaccccctctttgtatgttgtggctccatgtgcgagcacgctgtctgtcgtgacacctggttcgtcagatgttttgtcaaacttgcttgg

SEQ ID NO: 62695 - DNA, 317 bp, Zea mays
ggccgcgctacgcccgcgctgcccgcggtcggggggtgaccagaacctcttcttcctcgaccccgtcacgcccttcaagttcgagaaccagtactacaaaaacatcctcgcctaccgtggcctcctcagctccgacgaggtgctcctcaccggcagcggagccaccgctgaccttgtcaagctctacgccgccaaccaggatatcttcttccagcacttcgcgcgctccattgtcaagatgggcaacatctcgccgctcaccggggccaatggcgagatcaggaagaactgcaggagggtcaaccacgcctgatcga

SEQ ID NO: 62696 - DNA, 317 bp, Zea mays
gtcatacagggctgagttggaaaaaatgttcatgggtctgcctgcagtttttaccggaatgctccaaggtgaggagctctcacaagcgtacgccagtgcggatgtatttgcaatgccttcagaatccgagaccctcgggcaagtagtgctggagtccatggcttctggagtcccagtcgtcgctgctcgtgctggagggatacctgatataatacccaaggacaaggagggtaaaacaagctttttgtttacaccgggagatctcgatgagtgcgtgaggaagatagagcaagtcctcagttcaaaggatctcaggg

SEQ ID NO: 62697 - DNA, 318 bp, Zea mays
ggctagccaactgtcttgtgatgtatctcaagggaaaagccttcttgtgactggtccaaatggtagcggaaagagttccatctttagggtgcttcgaggcttgtggcccattgcttctggtagtcttagcaagccatctgaaggaatttttaatgttcctcaacgtccatatacttgtcttggaaccttgagggatcagatcatataccctctctctcacgaggaggcaaagttgaagatgctctcaggcgaaacaagtgacaagtctacagcttccgagctgttggatgatcacctgaggacgattctagagaatgt

SEQ ID NO: 62698 - DNA, 319 bp, Zea mays
gcctccgacccccttcctctctccctccgccgccgctgcgcacgctagggaacaagcgacatgggcgtctacacctttgtgtgccgcaacaacggcggcgagtggaccgccaagcagcactccggcgagatcgaggcttccgccgctaccccatacgagctgcagcgccgcctcgtcgctgccgcctccgcggccgactctgcctacggcgtccagtcgtccttctccatggtcacccccagctccgccgtgttccaggtgatcgtcggtgctgtcggtggtggtgcaatgatggtgagcggaggtggcggcggcggtg

SEQ ID NO: 62699 - DNA, 302 bp, Zea mays
  unsure (1)..(302): unsure at all n locations
tatgaatcncatgcaggttgttggagctgttggttttcagcaacgacggcttgatattcctggtggtgtggatcctgctgtagcagagataataaggagatgctggcagactgatccaaggatgcggccatcattttcagagatcatggctactttgagaccattgttaaaaaacatgcctgccaaccaacctaccaggaagcgggcacaacacacagatgtattaagaaaatggtcagcatcagctgaagacacaggccgcagagagactgcattggtttgtcttgctcttgccttcccag

SEQ ID NO: 62700 - DNA, 232 bp, Zea mays
ctggcaacctcggcgactccgtcaccatctctcgcgagaagaccaaggtcaccgtcacctctgacggacccttctccaagaggtacctgaagtacttgaccaagaagtacttgaagaagcacaacgtgcgggattggctacgcgtggttgctgccaacaaggaccgaaacgtctatgagctccgctacttcaacattgctgagaacgagggcgaggaagaagattagattgc

SEQ ID NO: 62701 - DNA, 310 bp, Zea mays
  unsure (1)..(310): unsure at all n locations
cggctcgagatggaatggaggctcggatactatggatgaaattcttgctaggatacaacaacgggaagaagcagcagtaaagcgtgagcgngccatggcgtacgcgttcaaccatcagtggagagcaaggtctgccacaagtctaggaaacttcagctatgaagtcggtaagggtggctggggctggagctggatggaccgctggatcgcagcacgaccatgggagccgcgatccatggtccaccctgagaacccgaagaaagcacaggcaaagaaggagaacaccacaaacccatcagctctcaagctg

SEQ ID NO: 62702 - DNA, 241 bp, Zea mays
ggaactcaggagggttcgccgtgaatacaaggcaaagaagatcaccgaggacgaatacatcagtgccatcaaggaagaaatcagcaaggttgtcaagatccaagaggagcttgacattgatgtgcttgtgcatggagagccagagagaaatgacatggttgagtacttcggtgagaaattatctggttttgcgttcactgccaacggatgggtgcaatcctatggatcacgctgtgtgaag

SEQ ID NO: 62703 - DNA, 321 bp, Zea mays
gttcttgcgcgtacggtacacagccccgatccgaatcgtcctcctcgcgagcctcgccgatcccccactcccctcccctcgcttcaagatgcagatctttgtgaagacactcaccggcaagactatcaccctcgaagtggagtccactgacaccattgacaatgtcaaggctaagatccaggacaaggaaggcatccctcctgaccagcagcgccttatcttcgccggcaagcagcttgaagacggccgcacacttgctgactacaacatccagaaggagtcaaccctacatctggtgctacgccttaggggaggcatgca

SEQ ID NO: 62704 - DNA, 272 bp, Zea mays
ccaagttgtcaagcaataagacggtgaggagggtccgtgttcggggaggtaatgtgaaatggagggctcttcgccttgatactggtaactactcatggggaagtgaagctgttacccgcaagacccgtatcctcgacgtggtctacaatgcatcaaacaatgagcttgtgaggacacaaacccttgtgaagagtgccattgtgcaagttgatgctgccccattcaagcagtggtacctcactcactatggagttgacattggtaggaagaag

SEQ ID NO: 62705 - DNA, 229 bp, Zea mays
atcctctggaggtattcgcagtcgaccgtgtcctcggagcacgaagaaggttgttgctgcctacctgcttgctgtcctcgctgggaatgccagcccctccgctgaggatttgactggcattctggagtcagttggctgtgaagttgacaatgaaaggatggaactgctgctgtcccaactgagcggtaaggacatcaccgagctcattgccgcgggcagagagaagttt

SEQ ID NO: 62706 - DNA, 278 bp, Zea mays
  unsure (1)..(278): unsure at all n locations
ccttatctcaattgacatctggaaaacaacctgttggtacaatggcttacatgggcaatgtacaatatctgatgcaatgcaaatgtgctgttaacacagctgaagattggcttaaccctgttgccatacaagaggcgtttgaagccagggctctcaggatggcagtaaactgtgcccagaacataggccaagcagcaaaccaagaagaaggtttctatgagcggtcncctgatttgctagaggctgcagtagctcacatccagttggtcattgtaacc

SEQ ID NO: 62707 - DNA, 348 bp, Zea mays
cttcttttcacaggagggggatggtccgaccaccgtgactggaagtatctctggcctcaagccagggctccatgggttccatgtgcacgcgcttggcgacaccaccaacggctgcatgtcgactgggccacacttcaatcctgttggcaaggagcatggcgcaccggaagatgaggaccgccatgccggtgatcttgggaatgtgacagcgggagaagatggtgttgttaatgtcaatattactgacagccagatacctcttgctggacccgactcgatcattggccgagctgttgttgtccatgctgatccggatgatcttggcaaaggtgacatgagcttagcaag

SEQ ID NO: 62708 - DNA, 346 bp, Zea mays
ctgtacccaacattaacagattatgacattcggtattacatctacgattactcaaggcattagattactgccattcacaaggtattatgcaccgagatgtgaagccccacaatgttatgatagatcatgagcttcggaaactccggctgatagactggggtcttgctgaattctatcatcctggcaaggaatataatgtccgtgttgcatccaggtacttcaaggggcctgagcttcttgttgacttgcaagattatgattattctttggacatgtggagtctgggctgcatgtttgctgggatgatttttcgtaaggaacgattttctacggcatgacaacacga

SEQ ID NO: 62709 - DNA, 337 bp, Zea mays
tgtacgcgaccagtgaggtgcggttggccagccagcggcgagccaaacgagcgtacgccatggatcgcgagttgggctccaagcccggcagctagggtgccgcctccgcccagaatgaggctattgaccggcgggagcgtctccgccgcctggccctcgagaccatcgacctcgccaaggatccctatttcatgcgcaaccacctcggcagctatgagtgcaagctgtgcctgacgctgcacaacaacgaggggaactacctagcccacacgcaagggaagaggcaccagaccaacctcgccaagcgcgctgcccgtctctgccaggatgcgcccgc

SEQ ID NO: 62710 - DNA, 297 bp, Zea mays
tttttttttttttttaaaaaaagtgagctataccatatatatgatctatgctctcaacaaagaattagatcatccaggtttatccccaacggttcaactggaattttttttgtatagctaatggctgagcgaactgagagagaaaaaatacaggagaaagaatagcattacagcatcaaccaaggtatttcagcgacacattcccgacgaactacatggccgtggttttgaataataataaatttgtaacacgtagcctgcattagcagcgcgttttaaataaaggaacttcctgat

SEQ ID NO: 62711 - DNA, 348 bp, Zea mays
ctggcgtcaagcgcatcaccatcaagctccagactgaccgctgggtgttccccgagaccaacactggcatcattgtccttgctgagggtcgcctgatgaaccttgggtgtgctactggccatcctagctttgtcatgtcctgctcattcactaaccaggtcattgcccaacttgaactgtggaaggagaagagctctggcaagtatgagaagaaggtgtatgtgctccccaagcaccttgatgagaaggttgctgctctccacttgggcaagcttggtgccaagctgaccaagctcaccaagtctcaggccgactacatcagcgtgccgatcgaggtccctacaagct

SEQ ID NO: 62712 - DNA, 349 bp, Zea mays
caggcattgctgaaaatgctggaaggcacgatagtcaacgttcctgagataggagcaaggaagcatcctcgtggtgataatatacagatagataccaaagatattctttttatatgtggtggtgctttcgtggatttggaaaaaactatatcagagagacggcaggattcatctattggtttcggcgccccagttcgtgcaaacatgagggctggtggcatttcaagtgctcaatgacatcatccttgcttggaatctgttgagagtggtgatctaatagcttatggacttatccttgtgagcctggccgctctaaatgaggaccagcttgttaggttctgattgagcc

SEQ ID NO: 62713 - DNA, 349 bp, Zea mays
taggcactgggggcattactatcaagaaaaccggcatgtccttgatattggtgtctacgacgagccaatgactccagggcaatgcaacatggtggtggagaggctcggcgattacctgatcgagcagggcttctaaaagttcgtcatgttctgttttggtcatttgggcaccaaagtttgcgcctcatttggttctgtaatccgtgagctcgtgcatgtacttggcgtattgcatgcagtgaataatttagcttgggtttgtttgttgggggcagtgttggggacggatttggattggggtttatgcttggcatcgcgtcgtatcgaaactcatgctgtttcgctgagt

SEQ ID NO: 62714 - DNA, 347 bp, Zea mays
tatccgaaactggattcggaacattgagcaacatgcctctgatatgtcaacagaattttggtgggcaacaaggccgatatggacgatatctagagggccgtatctactgcgtaaggacaagcacttgctgatgagtatgggatcaagttttctgaaacgagtgccaagacaaacctgaacgtggagcaagtgttcttctccatcgcacgtgacatcaagcagaggcttgcagagactgattcacagccagaggacaaggcaatcataattaacaagccagaccagggttccgaggcaccagctgcccagcgatctgcatgctgcggttcatagcagacgcacgatag

SEQ ID NO: 62715 - DNA, 347 bp, Zea mays
gcaactcgtacctggacaggcaggcgctctcgttccaggtcaccgccagctacggccgcaccgtcaccagcaacggcgccgtccccgctggctggcagttcagccaactcttcgagggcggccagttctgaggatgaacagctagcgcgcgcgctgctagctattggataattaattacggtactgtagatttggtttttttgccttgttttttttttgcgcgacgacgacgaagaggaggatgaagacgaagatgaagacgaggcctctctccgggtatattgaaggaaggagaaggcttttgcgcgcgctatgctgaggctgctaatcaacacccgcctagacgt

SEQ ID NO: 62716 - DNA, 340 bp, Zea mays
ttaaaataccctatcatgcgccttcttttggaggctgtgagagcataattgatcagcctgccatcatgtcctactgggattcaaaggagcagcgggacatctacgggatcaaggacaacctgatcaggttcagcattggtgtggaggatttcgaggatcttaagaacgatctcgtgcaggccctcgagaagatctaagcactctaatcagtttgtattgacaaaatcatgaggtgatggctgtcttggatcttgtcaagatctgtgacaatgatatgagctgatgactgcgaataagttctcttttgcttattttatccgtcaaatcaataagctgtgat

SEQ ID NO: 62717 - DNA, 342 bp, Zea mays
  unsure (1)..(342): unsure at all n locations
gggagagtgagagtggggattcaagtttcaaactcactatcgaggnggggataggaaggtggtcactcatcggtccacagctagctcgtcgccccccatggctgactggggccccgtggtgatcgcgacggtgctgttcgtgctgctcacgccgggcctgctgttccagctgccgtcgcacggccgaatcgtcggcttcggcaccatgcacaccagcggcctcgccatcctcgtccacgccgtcctctacttcgcgctcatcaccatcttcctcatcgccatcggcgtccacatctacgccggctagctagggtgtcttctagtcgaaccccttcgtctctt

SEQ ID NO: 62718 - DNA, 320 bp, Zea mays
atagaatctaccttggaatggaatgcgtgcagatcagcacttcgccagcatctggttcatctgcctcttcatctcgatcttcgccacgggcatcctggagatgaggtggagcggggtgggcatcgacgagtggtggaggaacgagcagttctgggtgatcgggggcatctccgcgcacctcttcgccgtgttccagggcctgctcaaggtgctggccggcatcgacaccaacttcaccgtcagctccaaggcctcggacgaggacggcgacttcgcggagctgtacatgttcaagtggacgacgctcctgatcccgccca

SEQ ID NO: 62719 - DNA, 343 bp, Zea mays
atccctcactctcctccgaagccatcgtctccgtcccagctccccggactccaggggcaaaagctgcagcgtcgagatggtgaaggggcgcacggggcagcgcgtgaggctctacgtccggggcaccgtccttggatacaagcggtccaagtcgaaccagtacgagactacgtcgctggtgcagatcgagggggtgaacaccaaggaggacgtcgcgtggtactgcgggaagcggatggcctacatctacaaggccaagaccaagagcagcggcacccactaccgctgcatctggggcaaggtcgcccgcccgcatggcaactccggctcgtccgcgccaagt

SEQ ID NO: 62720 - DNA, 342 bp, Zea mays
agcatttccttgcaaccgattgccttcccccctcccaaccaagaccgatggcgcccaaggccgagaagaagcccgcggcgaagaagccggcggaggaggagcccgcggcggagaagacgaccgccgggaagaagcccaaggcggagaagcggatccccgctggcaagtccgccggcaaggagggcggcgagggcaagcgtggcaagaagaagggcaagaagagcgtggagacgtacaagatctacatcttcaaggtgctgaagcaggtgcacccggacatcggcatctcctccaaggccatgtccatcatgaactccttcatcaacgacacttcgagaagct

SEQ ID NO: 62721 - DNA, 300 bp, Zea mays
  unsure (1)..(300): unsure at all n locations
tanagatctcaaggcatgtactgttctgttgaggggagcagcaaggatgtattgaatgaagttgagagaaacctgcaggatgccatgtccgttgcaaggaacattttgaaaaatccaaaactccttcctggaggtggcgctacagagctgactgtatcagcaacactgaagcaaaagagttcttcagttgaaggtgtggaaaagtggccctatgaagctgctgctctagcatttgaggcattccaaggactttggcccaaaattgcggtttgaatgttattaggataatgacacagcttc

SEQ ID NO: 62722 - DNA, 335 bp, Zea mays
gtcagcggcaaactgttacaaatctgagcatctaaaagaccagagaactgggcactagttgaaaaggcaaaatacatctacattgctggatttttccttacagtgtcgcctgattctatccagctagttgctgagcatgctgcagcaaataacaaggtgttcctgatgaacctctctgctcccttcatctgtgagttcttccgtgatgcccaagagaaggtcctcccgtatgctgactacatcttcggcaacgaaactgaggcaaagatctttgccaaagtcagaggatgggagactgagaatattgaggagattgctttgagatctctcaactt

SEQ ID NO: 62723 - DNA, 334 bp, Zea mays
ctagcagccgcccggtgctccctctctgcagatctccttcgcagccgccgaggaaccccttcacagcgcggaagatggctgaacaggaggccccagtcgtggttgatgcaccaaccccagttcttgaggagcctatggacttgatgactgctctgcagctcgtgatgaagaagtcaagtgctcatgatggacttgtgaagggtctccgtgaggctgccaaggccatcgagaagcacgccgctcagctttgcgtgcttgctgaggactgtgaccagccagattatgtcaagctggtgaaggcactctgcgcggagcacaatgtcacctggtcact

SEQ ID NO: 62724 - DNA, 341 bp, Zea mays
gccgcctctctccgcgcgaccgatctactgccgccgcactatgtcgctgatcttcggcgaggacttccacaatattctgcgtctgctgaacaccaacgtggatgggaagcagaagatcatgttcgccatgacctccataaagggtgttgggcgccgcttctccaacatcgtctgcaagcatgccggaatcgacatgaaccagaaggtccggtgagctgacgcctgaagagctggagcgcctgatgacggtcgggccaaacctaaggcagttcaaggtgccggactggttcctcaacaggaagaaggattacaaggatggaaggttctacaggtcgtgtcca

SEQ ID NO: 62725 - DNA, 339 bp, Zea mays
cgcagtgccatcctctcgctcgccaggagatgcagccccgttgctgctgccgcgtccacagaatggggggtttcgtgaagacgcataagaccaatgcgtatttcaaacgtttccaagtgaaattcaagagaaggcgggctggcaagacagactacagggccaggataaggctgattaccaagacaaaaacaagtacaacacacccaaatacagatttgttgtgcgatttaccaacaaggacatcactgcacaaatcatatctgctagtatagcgggtgatatggttcttgcttctgcctactctcatgagttgccacgatatggtctgaagttggtctg

SEQ ID NO: 62726 - DNA, 333 bp, Zea mays
cgaagtcatccatgttaagatcgctgttgggaagagatgtggttttgttcagtttgttaccagaccttctgctgagcaggcgctgctaatgttgcaaggggccttgattggtgcacagaatgttcggctttcgtggggtagaagcctgtcgaacaagtagactcagcctcagcaggaatccatgcaatggggtgcgggtgcgcctgctggtgttggtgattactatggtggctatggacaaggttatgaggcttatggcagtgggtatgcacaaccccaggaccctaacatgtatggttatggcgcttatgttggttacccaattaccaacag

SEQ ID NO: 62727 - DNA, 331 bp, Zea mays
acagaagcttgatgagatgttggcaaagcaaggtccaatgttgacaaagtcctgaactttgcaattgatgatgctgtattggaagaacggattactggtcgttggatccactcagccagtggtaggacttaccactcaaaatttgcacctccaaagtctccaggagttgatgatgtaactggagagccattgattcaaaggagagatgacaccgctgaggtcttgaagtcaaggcttgaagctttccacagacaaaccgaacctgtgattgattattactccaagaagggcttagtggtgaacctgcctgcagagaaacccgaggaagtga

SEQ ID NO: 62728 - DNA, 339 bp, Zea mays
cacccaactcgccgccgccgctgccaacgccgcctgctgccgcagccgccatgggggcgtacaagtatgtgtcggaactatggaggaggaagcagtcggacgtgatgcgcttcgtgcagcgcgtgcgctgctggagagtacaggcagcagccgtccatcgtccgcctcaccaggcccacccgccccgacaaggcacgtcgtctcggctacaaggccaagcagggatatgttgtctaccgtgtccgtgtgaagcgtggtggcaggaagaggactgtgcccaagggtattgtctatggcaagcccaagcaccagggtatcacccagtcaagttccagagga

SEQ ID NO: 62729 - DNA, 330 bp, Zea mays
tttcctccgcatacgcctcatggtccaagcggtgatccgtcccgtggtgtacccgctgttcgtgccgatggccgtggccttgggcatctgctcgtaccagcttgtgcgcaacatcacgggcaaccccgaggtgcgggtgaccaaggagaagagggcggccggcgtcctggacaaccacgacgagggcgagaggtacgctatgcacggcctcaggaagttcgtccgcgggaagaagcccgagatctggcctccatcaactctcttttcgcgcgacctgcgcattgacgattaagctagattccgtcatggatggatggatggaggttcccg

SEQ ID NO: 62730 - DNA, 339 bp, Zea mays
agtctcctcttcgcacgagcgcaacaccatccaccaccagttcgaagcggaggcgaccggcaacctgcggcggagatgtcaggcaggggcaagggcggcaaggggctcgggaagggcggcgcgaagcgtcaccggaaggtgctgcgcgacaacatccaggggatcacgaagccggcgatccggaggctggcgaggaggggtggcgtgaagcgcatctccgggctgatctacgaggaacccgcggcgtgctcaagatctttctcgagaatgtcatccgcgacgctgtgacctacacggagcacgctcgtcgcaaaaccgtcacgtaatggacgtcgtgta

SEQ ID NO: 62731 - DNA, 316 bp, Zea mays
ccttctgtatcttcatgcagggctcaaccggacaggcaagagctgccggctgcgctgggtcaactacctccaccctggcctcaagcgtgggcgcatgtctccccatgaagagcgactcatcctagagctgcacgctcggtggggaaacaggtggtccaggatagcacgccgcttgccagggcgcactgacaatgagatcaagaactactggaggacacacatgagatagaaggcacaagagaggaagaggaacatgtctccatcgtcgtcttcgtcttcgctgacttaccagtcaggctacccagatactccatca

SEQ ID NO: 62732 - DNA, 333 bp, Zea mays
ctctcaggcttgacattatcgatccctcgttccgaggtacaagaatgcagatatcgttatcttcaatactggccactggtggacgcatgacaaaacttctctagggaaagattactaccaggagggcaaccgcgtatacagtgagctggatgttcatgacgcctttcggagagctctcaacacctgggctaagtgggttgattccaatgtgaaccccaagaaaaccactgtgtttttcagaggctactctgcatcccatttcagtgggggtcaatggaattcgggcggcagttgtgacagggaaacagagccaataacgatgaccagtacctc

SEQ ID NO: 62733 - DNA, 328 bp, Zea mays
gtcttaccgagactctatctcctgtgcactggcaatgagggaggccatcagagctgccaggaaggaattctcggtctgcactggtacagcaaactctgccatcacgttcgagatggacgtgcctgcgacgatgcccatcgtcaaggagctctgcggcctggatgttgtggagaggtacctggagagcatgtccactgccggaccaacaaccacgccaaagcatagatccagcaggtgcaccgcccatggtgagagagcttaataggtctgtgtataacactgaacagcatgacatgccaagcttacatgtgttagcttgatgtacaga

SEQ ID NO: 62734 - DNA, 182 bp, Zea mays
gtttgatactttcagtgttcctgctatgtatgttgctattcaagctgtcctttccctttatgctagtggccgtaccactggtattgtcctggattctggagacggtgtcagccacactgtcccaatctatgaaggctatgccctcccgcatgccattcttcgtctcgatcttgctggtaggg

SEQ ID NO: 62735 - DNA, 225 bp, Zea mays
  unsure (1)..(225): unsure at all n locations
catggagagattctcagcgtatcctacccttggtaggtttgctgtccgtgagatgaggcagacggttgctgttggagttatcaagagtgtggcgaagaaggaccacangcgcgaaccgtgacncaggctgctgccaagcagaactgatgcgatcctccgcctgctttcgcaatacctagttctcatgattagaagttttgtttgtggtcgttgntgtcattgtgt

SEQ ID NO: 62736 - DNA, 180 bp, Zea mays
  unsure (1)..(180): unsure at all n locations
ctatgagctggctggcatgcgccacagcatccgtgagcgcactgctgctcctgctgctgctggcaacaccactgctgctattggaccggggtttgccattggttccgntgctcttgtgctcctggcgctttttggtgcctttgttcgccgcgctggcgtgccggtcgtcgcacgtctctc

SEQ ID NO: 62737 - DNA, 69 bp, Zea mays
cggacatacatacagcatcccttcgctgaggccaatgctggggcctctggtgcggcagcagggtcaaag

SEQ ID NO: 62738 - DNA, 60 bp, Zea mays
cgcggctgtggccggcataactagattgttcctggcgccctgctctccttgtctgagcag

SEQ ID NO: 62739 - DNA, 70 bp, Zea mays
cgtgcaccacctagctgcgttccagttttcttgtgtcatgtaccatggtgccctagcgcatgcatgcagt

SEQ ID NO: 62740 - DNA, 217 bp, Zea mays
atcaaggtcgacaagggcaccattgaggttgttggcaccgacaaggagaccaccacccagggccacgatgacctcggcaagcgctgcgctaagtactacgaggccggtgcccgctttgccaagtggcgtgctgttctcaagattggccccaacgagccgtcacagcttgccattgacctgaatgctcagggtctggctcgctacgccatcatctgcc

SEQ ID NO: 62741 - DNA, 216 bp, Zea mays
ctctcttcgccgtccgaagctccgcaccccaatctaatcgacacctcaccgagatgggccgcaagttcttcgtcggtggcaactggaaatgcaatggaaccacagatcaggtcgagaagattgtcaaaaccctgaatgaaggacaggttcccccttcagatgttgtggaggtcgttgtcagccctccttatgtcttccttcctgtggtcaagagcc

SEQ ID NO: 62742 - DNA, 217 bp, Zea mays
caaggcttccttgctagttatttcccggacttgcttgatcagccaatgttccatccaccagctaatggtacaaaactttggggtacttatcgcctccccctaggctaccagatggatgcatcttactattatctgaagcttcgctggagtattccatgtggaccgaacagtgtgattacattcccaagcgctccatggtttaagccatggtactggt

SEQ ID NO: 62743 - DNA, 216 bp, Zea mays
gcctcgggtcaaaccctaagcagggagttgatttatccgctgcagccatgagtaagttgcagtctgagtctgtcaaggatgccatctcccagattgttggggatgccaaggagaagaataggaagttcactgagactgtggaacttcagattggtctgaagaattatgatccacagaaggacaagcgtttcagtggctctgttaagttgccccata

SEQ ID NO: 62744 - DNA, 215 bp, Zea mays
gccatgaagatgggagttgaggtgtaccacaacctgaagagcataatcaagaagaagtacggtcaggatgcgacaatctttggggatgaaggtggttttgcacctaacattcaggaaaacaaagaaggccttgaactattgaaggcagccatagaaaaggctggctacactggaaaggtggtcattggaatggatgttgctgcttctgaattctt

SEQ ID NO: 62745 - DNA, 216 bp, Zea mays
gcttatttcatttgtgaaggacaaggagtcgtgggacttgaacaatgaagagaagattgaggctgctggtaagaagaaagaggaagggaatgcattgttcaaatcgggcaaatatgctagagcttccaagcgatatgagaaggctgccaagtacattgagtacgacacttcgttcagtgaagatgagaagaagcaatccaagcaactgaagatcag

SEQ ID NO: 62746 - DNA, 214 bp, Zea mays
aggtgctgtacatcaagccgccggccaacacgctgtcgcacaacgagctgctgtcgctgtgggagaagaagaccggcaagacgttccggcgggagtacgtgccggaggaagccgtgctcaagcagatccaagagtcgccgttccctctgaacatcatcctggcgatcgggcacgcggcgttcgtgcgtggggagcagacgggcttcgagatcga

SEQ ID NO: 62747 - DNA, 215 bp, Zea mays
gcgcctctacatttcttctctctctgctcctccgcctccgcctgatccatccaagacagggatcgccatgtcggactcggaggagcaccacttcgaatcgaaggccgacgctggggcgtccaagacctacccgcagcaggctggcaccgtccgtaagaacggcttcatcgtcatcaagaaccgtccctgcaaggttgtggaggtttctacctcca

SEQ ID NO: 62748 - DNA, 211 bp, Zea mays
tgatccggcctggagcgctggacagcagcagcagcatcgagctcgaggccgctccgccaccccgcactcgcctgtcgcctcttctcgctttcgccaccggggcagcgctccgccatggctggacctgctgttctcaatgagcgtatcctttcttccatgtcccagaaacatgttgctgctcacccatggcatgatttggagataggaccag

SEQ ID NO: 62749 - DNA, 212 bp, Zea mays
gagagagagaagagagagagagagagaggagtgggagacccgcgagaggctgccgtgtagggaccgtagactcagcgactgcgaaggagggataaggggatggccgggatcggaccgatcaggcaggactgggagccggtcgttgtgcggaagaaggcacccaccgccgccgccaagaaggatgagaaggccgtcaacgccgcgcgccgcgc

SEQ ID NO: 62750 - DNA, 207 bp, Zea mays
ctctcgttccatttccccatctcccagatccaattcgcgagttctccctcctctgcggccatggcgctctctgtggagaagacctcgtctggacgggagtacaaggtcaaggatctctcgcaggcggacttcggccgcctcgagattgagctggccgaggtcgaaatgcccggcctcatggcgtgccgcgccgagttcggcccgtcc

SEQ ID NO: 62751 - DNA, 207 bp, Zea mays
agatgatgtaaatgaccgaggccctataatgttaaatgaagcactggaactgttgagccaacggtgggacaggataaatggtgctcaggctcttaggctgttaccaagagatactaaactccaggatcttgtatcatttcttgagccactattgcgtaactctagtgaacatcggcgcaattatttggttatcaaaaacttgatttt

SEQ ID NO: 62752 - DNA, 206 bp, Zea mays
cgcacggcagcactgaagcaccacttcctgcactcactgtgctagctgctcaaaccgtagtagtaacagtccatcaccaccaatggctcccaaggttgcgctcttccttgccctgagcctcctgtttgctgccaccgcgcatggctgcgaacccaactgttctggcccagtcgtcccaacgccgccagtcgtgccgactccgtcgt

SEQ ID NO: 62753 - DNA, 125 bp, Zea mays
gaccttgtttcaagggttctgcaccaatcaatcttttcgatcgtcttaatcaggttctccgttgggctcttgggtcagtggaaattctgcttagtagacattgtcctatctggtatggttacaat

SEQ ID NO: 62754 - DNA, 202 bp, Zea mays
ccgtctgtcaacaatacaaaatgcagatttgattgcggtcgtgaggaatggggttatcatcgagaagggaaagcacgatgccttgatcaacatcaaggatggcgcctatgcgtccctcgtcgcccttcactcggcagcctcttcatagcaggtgatggtatgggatcctgcatacgtctgctaagacatatatgaacagagc

SEQ ID NO: 62755 - DNA, 201 bp, Zea mays
gcgacctgttcgcgcggcccttccgcaagaaggggtacatcccactcaccacgtacctgcgcacctacaagatcggcgactacggcgacgtcaaggttaatggcgccgagcacaagggcatgctgcacaagttctaccacggccgcaccgggagcgtctggaacgtcaccaagcgcgccatcggcgtcgagatcaacaagc

SEQ ID NO: 62756 - DNA, 202 bp, Zea mays
tgaagggtgattactacagataccttgctgagttcaagactggagctgagagaaaggacgccgctgagaacacgatggtggcatacaaggctgcccaggacattgctctggctgagcttgctccaactcaccctattaggcttggactggcacttaacttctcagtgttctactatgagattctgaactcacctgatcgcgc

SEQ ID NO: 62757 - DNA, 202 bp, Zea mays
atcccggcagccgcaaacgccttcgccgtcgcgtcccgctcctccgcccgcccgacgcgacccctaggacctggagagagaggtcggcatggctgccgcagtggtcgacgacgctggtatggacgccgtccagaagcgcctcatgttcgaagacgaatgcattttggtggacgagcaggacaatgttgttggccatgagtca

SEQ ID NO: 62758 - DNA, 200 bp, Zea mays
ctccgaccccggctgtccgacgcatactgctctcggccgtgggtctccacttcttccagcaggcttctggcagcgactccgtcgtccagtacagcgcccgcctgttcaagagcgcggggatcaccgacgacaacaagctcctgggcgtcacctgcgcggtgggcgtgaccaagacgttcttcatcctggtggaactgcct

SEQ ID NO: 62759 - DNA, 199 bp, Zea mays
tggccatggccgcctcctcctcccggctgctctgggcgtcccgcgccgccgcctacctcaggatctccacattccccagggccttctccaccgtgatgaaggatctgaagtatgctgactctcatgaatgggtgaaagttgagggtgattcaacaaccgtggggattagtgaccatgcccagcgtgctttgggtgagct

SEQ ID NO: 62760 - DNA, 198 bp, Zea mays
tgcaccgcgagatggaggtgtatcctctgtggctgtgccctcaccggctgtacaagctgccggtgaagacgatggtgtacccggagcctgggttcgagcaccagcacaggcagggcgacacgagctacgcacagatgttcacggacgtgggcgtgtactacactcccggggcggtgctgaggggggaggagttcaacg

SEQ ID NO: 62761 - DNA, 332 bp, Zea mays
tgaagaagtctgaaagagagatggagttgaaggagaaatttgaaaagaatgttcaagaggtagctgagaagttccaaaacacaaacttgtatttgaagaacttagaggagaacattgatgatgagaaattgcgtgaactctttgctgagtatggcaatattacttcctgcaaggttatgcgggattcgaatggtgtcagcagaggttctggatttgttgctttcaaatctgctgaagatgctaaccgagctcttacggagatgaatggcaaaatggttggaagcaagccctttatgtagctcttgcgcacgtaaagagacagaaggcaacta

SEQ ID NO: 62762 - DNA, 330 bp, Zea mays
tgcagatgttcctccctttcggcttcgtgagcttcgacaacccggccagcgcccagaccgccatccaggccatgaacggcttccagataggcatgaagaggctcaaggtgcagctgaagcggcccaaagacgccaatcgcccgtactgagcgccggcgggagcgtcccccgggggagaccaggactcgcacagggcaggatgctgaacgggctacattaaaaacaaacctctttctctctctatttataaatgagaactgttggacgacacctttgacatatcagccaataccactcaagctgaagactccagacactacgtgtgactgt

SEQ ID NO: 62763 - DNA, 335 bp, Zea mays
cacccggggaccaggctcgggcgctcggctccgtcctcccccacatccacctgcccgtttctcgctccgaagcttctcctctcgcgtctcgtaccaggtcaggaggggagggagggagacgggagaaccagggagcggaggcgtgcgtgctgcggcctgcggcctgcaggaccagagatcggggactgagctagggtctgggactgggaggcggagatgtcgacgccggcgaggaagcgcctgatgcgggacttcaagcggttgcagcaggacccgcccgccggcatcagcggcgcgccgcacgacaacaacatcatgctctggaacgccgtcat

SEQ ID NO: 62764 - DNA, 298 bp, Zea mays
  unsure (1)..(298): unsure at all n locations
cgccgccgcagcccgcagtcgcttngcgcagagcacttcgcaccgccgccccatcccatcgccgccagtgtctgctcgatccgatggctcccacgaagaagtcgaagaagagcacagagagcatcaacaacaagctgcagctggtgatgaagagcggcaagtacaccctgggctacaagaccgtcctcaagacgctgcgcaactccaagggaaagctgatcatcatcgcaaacaactgccctccacttaggaagtctgagattgagtactacgccatgctggccanagttagcgtgca

SEQ ID NO: 62765 - DNA, 337 bp, Zea mays
tgttcaggccatgaaggctgtcgttggagaggaggcactctcgtctgaggatctgctttacttagagttccttgacaagtttgagaggaagtttgtgacacaaggagcatatgacacacggaacatcttccagtcactcgatcttgcatggacattgcttcggatcttccctcgcgaacttctccaccgtattccagcaaagaccttggaccagtactatagcagagatgcttcccactgaatcactgatcgttgatcagtgttccaatattttggcaagtgcagctttgaataaattgaacagattggcctcgtggccatattcctgtatttatct

SEQ ID NO: 62766 - DNA, 332 bp, Zea mays
  unsure (1)..(332): unsure at all n locations
cgacatcgcgcacntagtgaagcactcggcggagaacaaggggatcaagggcttcaaggggggagacgccatcgctccagactcgttgctcactgaagagtgcgacgtcctcatcccagcagcgcttgggggagtcataaacaaggataatgctaacgacataaaggcaaagtacatcatcgaggctgccaatcaccccacagatccagaggcagacgagatcctgtcaaagaaaggcgtcctcatcctccccgacatactggccaactctggtggcgtcacagtgagctacttcgagtgggtacaaaacatccaggggttcatgtgggacg

SEQ ID NO: 62767 - DNA, 336 bp, Zea mays
  unsure (1)..(336): unsure at all n locations
aacgcttctgatctcaccaaccactattttgatcatcaacctggtcggcgtggtcgctggcatttcctacgcaatcaatagcggttaccagtcatggggacctcttttcgggaagctcttctttgcgttctggttgattgtccacctgtaccccttcctcaagggcctcatggggaagcagaaccgcacgccgaccattgtcgttgtctgggctatcctccttgcgtcgatcttttccctgatgtgggttcgtatcgatccattcaccacccgggtcactggccctgatatcgcganatgtggcatcaactgctaggatgagctgaatatagttaa

SEQ ID NO: 62768 - DNA, 322 bp, Zea mays
attgtcacaaggttcgagttcgtcaccgtctagtacgactgtgcgagggaggaagaggcgaggagaagatgcagatcttcgtgaagaccctgacggggaagaccatcaccctcgaggtggagagcagcgacaccgtcgacaacgtcaaggccaaaatccaggacaaggaagggattcccccagatcaacagcgactgatattcgctggcaagcagctggaggatggacgcacgctggctgactacaacatccaaaaggagtcaactcttcatttggtcctcaggcttaggggtggaccatgatcaagtcagaatctcactgg

SEQ ID NO: 62769 - DNA, 328 bp, Zea mays
acggatctggagcgtacaccaaggcgctcgacctcgagctcgatctcacggacaaagggctgggcgtgcgctcgaagaggttcgctctcctggccgacgacctcacggtcaccgtcgcaaacatcgaggaaggcgggcagttcacgatctccggcgctgaggagatcctgaaggcgctttagaagctccgtctcctctagaagccgcagcaacgatcggtctatagtttgaactcgcctttgaataacttgtcgttgggcaaggtctagttcggtgttgtgtatggaacggtcgtcactgagtcatgcacgatttggtatccgtgttg

SEQ ID NO: 62770 - DNA, 255 bp, Zea mays
caccagccgccgtcatgtcgaagcgaggtaggggaggttcggctgggaacaagttccgcatgtcactgggtctaccggtggcggccacggtgaactgcgcggacaacacgggcgcgaagaacctctacatcatctccgtcaagggaatcaagggccgcctcaaccgcctcccgtccgcctgcgtcggcgacatggtcatggccaccgtcaagaagggaaagcccgatctcaggaaaaagtgatgtctgccgtcat

SEQ ID NO: 62771 - DNA, 344 bp, Zea mays
caaggtggccctcacaaccaccagattgctgcacttgctgttgctctacagcaaactatgtcgcctggcttcaaggcctatgcaaagcaagtgtaggccaatgctgttgcaattggaaactatctcatgagcaagggctacaagatggtgactgatggaactgagaaccaccttgttctctgggatctccgcccccttggcttgactggaaacaaggtcgaaaagctatgtgtctatgccacatcacattgaactagaatgctgtcttcggtgacagcagtgcattgtctccgggtggtgtccgctatggcgcgccagcaatgacctcgaggggtctactggag

SEQ ID NO: 62772 - DNA, 258 bp, Zea mays
attcctcccaacaccacctcgccgcgatctccgtagcctccgtcgcgtcgagcatcgatcatgtcggtctactgcggaaagtacaaggatgagctcatcaagaatgctgcctacattggcacccctggcaagggtatccttgctgctgatgagtccactggcaccattggcaagcgcctttccagcatcaatgtcgagaacgctgatgagaaccgtcgtgccctccgtgagtcctattctgctgccctggtgctctcc

SEQ ID NO: 62773 - DNA, 213 bp, Zea mays
gctcccgatggcaatggcggagtatatgctgctctaaaatctagaaggttgctcgatgatatggctgcaaaaggtgttaagtatgtagattgctatggagttgataatgtactggtccgtgttgcagatccaacattcctaggatacttcattgacagaggtgtatctgctgctgctaaggttgtcaggaaggcatatccacaagagaaagtt

SEQ ID NO: 62774 - DNA, 340 bp, Zea mays
  unsure (1)..(340): unsure at all n locations
cgacncgcgcgcggagaacaaggtgctgtacatcaagccgccggccaacacgctgtcgcacaacgagctgctgtcgctgtgggagaagaagaccggcaagacgttccagcgggagtacgtgccggaggaagccgtgctcaagcagatccaagagtcgccgatccctctgaacatcatcctggcgatcgggcacgcggcgttcgtgcgtggggagcagacgggcttcgaatcgacccggccaagggggtggacgccagcgaactgtacccggatgtcaagtacaccaccgtcgacgagtacctcaaccgcttcctctgagcctgaggtctcaacaaacagg

SEQ ID NO: 62775 - DNA, 338 bp, Zea mays
gtcccaaatcgaccgagcgaattcaccacagcttctcaccaccgctaccttcgatggcacccaaggcggacaagaagccggcggcgaagaagcctgcagaggaggagcccgcgacagagaaggcggagaaggctccggcggggaagaagcccaaggccgagaagcgcctcccggcgggcaagtccgccggtaaggagggcggcgagggcaagaaggggaaaaagaagcgaagaagtccgtggagacctacaagatctacatcttcaaggtgctgaagcaggtgcaccccgacatcggcatctcgtccaaggccatgtccatcatgaactccttcatca

SEQ ID NO: 62776 - DNA, 332 bp, Zea mays
caagatttgagctcatccgtcatgatgtcaccgagccgcttcttgtggaagttgaccaaatctatcaccttgcttgccctgcttcaccaatcttctacaagcacaaccctgttaagaccatcaagacaaatgttattggtaccctgaacatgctaggacttgcaaagagagttggagctaggattttgttgacatcaacctctgaagtttatggtgatccactgagcatcctcaaactgaggcctactggggcaatgttaacccgattggtgttaggagttgttatgatgagggtaagcgtgtagcagagacattgatgttcgactatcaca

SEQ ID NO: 62777 - DNA, 326 bp, Zea mays
  unsure (1)..(326): unsure at all n locations
gttggaaatgaatggttgggtagtgcttcagatctgttgggtacaaatggcattgacacttcactgccgcatatttgcaggcgagaatatattatcaactgtaactggaaggtcttctgtgacaattacctagatggtggatatcatgttccatacgcacatggggctcttgcatcgggtctgcagcttcaatcctatgaaacacttacatatgaaaggttagtgttcaaagatgtgaaagtgcaccagcagaaccagatgacttcgatcgcttagggacaaaagctctctatgcctttgtttatccanactttatgatcaacaga

SEQ ID NO: 62778 - DNA, 341 bp, Zea mays
  unsure (1)..(341): unsure at all n locations
caagatctgagctcatccgtcatgatgtcaccgagccgcttcttgtggaagttgaccaaatctatcaccttgcttgccctgcttcaccaatcttctacaagcacaaccctgttaagaccatcaagacaaatgttattggtaccctgaacatgctaggacttgcaaagagagttggagctaggattttgttgacatcaacctctgaagtttatggtgatccacttgagcacctcaaactgaggtctactgggggaatgttaacccggattagtgttatgaggtgttatgatgnaggttagcgtgtagcagagacattgatgatcgactatcacaagcagcat

SEQ ID NO: 62779 - DNA, 313 bp, Zea mays
tcggcgaacgagaacgacctccagctccaggagctcgcgcgcttcgccgtcaatgagcacaaccaaaaggccaatgctcttctggggttcgagaagcttgtgaaggccaagacacaagttgttgctggcacgatgtactatctcactattgaagtgaaggatggcgtagtcaagaagctttatgaagctaaggtctgggagaagccatgggagaacttcaagcagctgcggaattcaagcctgttgagagggtgctacgcttaggatctgtcgtctcctgtgcatttgctgcctgaacgcaaactaagtacag

SEQ ID NO: 62780 - DNA, 321 bp, Zea mays
gatctccgtctccacgccgcgtcctcccgcacgaatccgcgctccggccaacgggccaagccctagccacccccgcccattcatggtgggcgggtcgtgagatctctagggaggcttgtcggcttcgtcgggcgggaggggaggagatgggcgcccggaacagcgctgccgccacgccggtgctgctcaacgtgtacgaccttacggccgcgaacgattactctactggctcggcttcggcgtcttccactccggaatcgaagtccatggcacggaatatgggtttggagcccacgactacccatccagtggtgtggttga

SEQ ID NO: 62781 - DNA, 237 bp, Zea mays
cgcctggcaaagtggtatatgcagttcgatgatgacgagaagcagaagttgatcgaggaagtgcacgccgtggtcaccgtcatggatgccaagcacaccaactttgtggaactccggaacttctagatcatctaccgtcgctacgctggcctctacttctgcatctgcgttgacgtcaacgacaacaatctggcctatcttgaggccatccacaacttgtagaagtgttaaatgaat

SEQ ID NO: 62782 - DNA, 324 bp, Zea mays
  unsure (1)..(324): unsure at all n locations
gcatcgtcaggagttggggctgtatggaacacagccaacgtttccgcgggctccaccgttgcgattttcggccttggcgctgtcgggctcgcggttgctgagggtgccaggctacgaggggcagctcggatcatcggtgttgacataaaccctgaaaagttcaccaaagggagagagatgggcgtcactgactttgtcgactccagggcctctgacaaccggtgcacgaggtgatcagggagatgacccatggaggtgtcgactacagctntgagtgtaccgggatcaacggcgtgctgcgagaggccttcgtgtccacgcatg

SEQ ID NO: 62783 - DNA, 253 bp, Zea mays
aagacatccaaatcttgttaccttggtaggttaccatctaggcgagtctgaaatgtgtctcatatataactacttgtctggaggaaaccttgagaggtttatacaggagagatcgaagagaccggtagactggaaaatgctgcacaagattgcattggacgttgccaaagcacttgcttatctgcatgatacctgtgttcctcgcatccttcagcgggacgtgaaccgagcaatatttcgttggacactacta

SEQ ID NO: 62784 - DNA, 332 bp, Zea mays
atattcagcaccagctgtactaacttgctggagtcaatttcacagtgtgcaggtctggagttcttccaggagcttcttcggcgtggaggacttcgtggacgatgacaacagtatgccatacacgtacaagaaggagaagaggtccaagaacccccacaagcacatctcgttcaagcagctcaccatcgcccacatggagccgttcacgctggacgtgttcattccaagcgcttcgtctcggcgtccctcacgcaccggtcgacctgcaggcaggtcgcggtcgccgggaccaactccaaggacatcaaggcggcgctcaggtcgatgtccga

SEQ ID NO: 62785 - DNA, 328 bp, Zea mays
ctcgccgtcaccacccccaatccagcaaacgcaaacccgatatcgccgccgccgccgccgccgccgcgatgtctcgccgctatgacagccgcacgacgatcttctcgccggagaggcgtctctaccaggtcgagtacgcgatggaagcgatcggcaacgcggcgtcagccctcgggatcctagcggccgacggcgtggtcctcgtcggcgagaagaaggtgcctccaagctcctccagacctcgcgctccgccgagaagatgtacaagatcgactcccacctggcgttcgccgtcgccgggatcatgtcctacgtcatcatcctcatc

SEQ ID NO: 62786 - DNA, 305 bp, Zea mays
cagaaaaggaggcatccaagtcactgcctgacttcaagaaggatgaccagaaggctgtggattctgctctgatcaaggctattgaggctgttccggagctgaaaacctatcttggcgcccggttctctctcagggatggtgacaagccccatgagatggtcttctaagctcttagttgtggagttcggaggaagctgtctagtctgtgttcttggactctgagttttgtaccagtagcgaatgtctcattgtggttgaagtcttcctgccatatattataagatctaagaaagttctatcaaaaa

SEQ ID NO: 62787 - DNA, 326 bp, Zea mays
cagagacgccgcattgctcgtcaaaagaaggctgtgaagatattcccccgcccgactgctggtcctctacgccccattgttcaatgccagactttaaagtacaacatgaagtcaagggctgggagaggctttacccttgaggagctgaaggctgctggcatcccaaagaagcttgctccaaccattggtatttctgttgatcaccgccgcaagaacaatcccttgagggactgcaggccaatgtccagaggcttaagacatacaaggccaagctggttatcttcccaaggcgtgcgcgcaaggtgaaggctggtgactctactcca

SEQ ID NO: 62788 - DNA, 306 bp, Zea mays
catttacgtatatgcccttgtcccggttcctttccccatccccaactccattatttgcttgatccttgagaagagagaggaagacgagagctagaagcgaaggagaaaagcagttcttcagctaggcaggagggcacaggaaggaggagatggcgtcaaagaggattcagaaggagctcaaggatctgcagaaggaccctcccacctcgtgcagtgaggtcctgttggtgaagacatgttccactggcaggcaacaataatgggtccatctgatagcccatattctggtggagttttcctagtcac

SEQ ID NO: 62789 - DNA, 217 bp, Zea mays
gcagaaggcaatacagcaggagttgaggaagataaaaatgggacgatgaagtttgtagacaaagatatgtgccagacttaggactgctcctgaaatttccacgtcgggtcgtgacctcgctgccggtgctatggaccttgaaacttcggctttgtatggctctatgacggcatccgaaattcatagctatacctttacaactttacaagtcagctag

SEQ ID NO: 62790 - DNA, 229 bp, Zea mays
ggtctcccaccgctcccgatccaccattcctcctccggatttcgcagtcagcggtggtgaaggtagcgggcgcggaggaagatggggctcgcgttcgggaagctcttcagccggctcttcgccaagaaggagatgcggattcttatggtcggtctcgacgccgccggtaaaaccaccatcctctacaagctcaagctcggcgagatcgtcacaaccatcccaccatcgg

SEQ ID NO: 62791 - DNA, 320 bp, Zea mays
ggttgatgtcaagaacaggcaagtcaaggccaagcaagttacattccaccggaagaagaacttgcagtactatgagatttctgccaagagcaattacaactttgagaagcccttcctttacctcgctaggaagctggcaggggatcagaaccttcactttgttgaagctgttgctctgaagccaccagaagtgcagattgatatggccctgcacagcagcatgaagctgagcttgcagctgccgctgcgcagtccctccccgatgacgatgatgacctgatcgaatagatatgttatacatggcccttgttgatgactct

SEQ ID NO: 62792 - DNA, 318 bp, Zea mays
ctgtcctttctgtgtatgatatagaaggtccgccacctgctgcttttcttgccactccaacaggattctagcgttgcagacttgattataccttggcaacatctttttggtgctagagtagcagaaaacgtagggtacaaacattggatccaggatgagagctgggtttcctaacgaaaactctgattcatttgtggcggtgctataaccatttcagcttgcagttcagagctcacgggtgtagttccctgctgacatcgttcctccgagacggagtaatatgcttttatatctatcgcctaatattcgcttcaaaaa

SEQ ID NO: 62793 - DNA, 325 bp, Zea mays
gccgtctccttgccccgatggcgtccgagaagaagcagtccaacccgatgcgggagatcaaggtgcagaagctggtcctcaacatatccgtatgggagagcggcgaccgcctcacccgcgccgccaaggtgctggagcagctcagcggccagacccccgtcttctccaaggcgaggtacacggtgcgctcgttcggcatccggcgtaacgagaagtcgcctgctacgtcacggtcaggggcgacaaggccatgcagctgcttgagagcggcctcaaggtcaaggagtacgagctgctcaggaggaacttcagcgacaccggctgc

SEQ ID NO: 62794 - DNA, 318 bp, Zea mays
tccaaatttttcttcgtatctttttggcgagtatttatgtagtacgtcagacaagaaattatctgaaggcgtctaccttgcaaggaataagcggaaatattcagataatgatgaaccttcagattttttgaaggcaatggatggtatcaaagttgtgaatggtctcgaatgcaagatatcctgcaagacctctaaggtctcgtatgtcctagcactgaagatttcttgtcacggcttcggaagagaaggaaaattttgcggggtgggagtgtgtctgacagttcgcaagtttcaaaaatatatgctgcaaaagtgcag

SEQ ID NO: 62795 - DNA, 315 bp, Zea mays
cctggagctggaccggaaggttgctgaccagcagagcacactggagaaggcaggggtagctggtaaatatgtgaccactaatcctcaggagctgacgctgcagatgaacttactggaactcatcaggaagctgcaacagaggggctgccaaatgggaaagccggctctgtgaccaagtgggcggtcctcgctgtcctctgttgcctaggacgctggcaccacagcctagtctgtgtgggggctactgactgtccggctgccaacaggcctgatctctctgaggagctgactagaccctggctatgccgctgccac

SEQ ID NO: 62796 - DNA, 332 bp, Zea mays
gttcctacgtggcatagggatctgtgcagggtctgtgaaaacatccccattgtcctctgcggtaataaggttgatgtgaagaacaggcaggtcaaagccaagcaggttactttccacaggaagaagaatctgcagtactatgaaatttctgccaagagcaactacaactttgagaaacctttcctgtaccttgcaaggaagctggctggtgatccgaacttcactttgttgaagctgttgctcttaagcctccggaagttaccatcgacatggctatgcagcagcagcatgaagccgagcttgctgcagcagctgcacaacctcttcctgat

SEQ ID NO: 62797 - DNA, 303 bp, Zea mays
cgggcatgccgacctcaaggacgagcactggtggcccaagatgcagacggtgccggagctcgtgaaggcctgcaccaccatcatctggatcgcgtcggcgctacacgccgccgtcaacttcgggcagtacccgtactgcgggtaccacccgaaccggccgtccgttagacggcgtgccatgccggtgctcgggctccgacgcgtacaaggagctggagagaacccggagaagttcttcgtgcgctccatcaccgctttgttccaggccgtcgtcggcatctcgctgctggagatcctgtccag

SEQ ID NO: 62798 - DNA, 320 bp, Zea mays
gccgccgtcatgtcgaagcgaggtaggggaggttcggctgggaacaagttccgcatgtcactgggtctaccggtggcggccacggtgaactgcgcggacaacacgggcgcgaagaacctctacatcatctccgtcaatggaatcaaggggcgcctcatacgcctcccgtccgcctgcttcggcgacatggtcatggccaccgtcaagaagggaaagccgacctcaggaagaaagtgatgcctgccgtcatcgtccgccagcgcaactcgtggcgtcgcaaggacggtgtctacatgtacttcgaagataatgctggagtg

SEQ ID NO: 62799 - DNA, 348 bp, Zea mays
atgcgtctaggtagaagtcggaatcggctcgaggagcgcagcgcccaggcaggagcagcagccagcgatacctggagtccgttgcagaaacctcgccctacactttgcaacaaaggcagcctgctagtcagcgaggacatctgcaagccaaaaaatgtcgtcccagcaataccagcagcaacgtcgaaaatttgcagctgccttcctggccttgattttcatcctggcagccgtggacactgtgaggccgggaagaaagagaaaccagaaaaaaaggtgaaaaaatctgactgtggagaatggcaatggagtgtgtgcgtgcccaccagcggggactgtggtctaggc

SEQ ID NO: 62800 - DNA, 287 bp, Zea mays
caagcatcgagctaataaaatcactgagcagtgtctctgctggcataatctatgttgagatagatgagtgcaatattgttcaaaggcttgcataattattgaggtgcagggacagcatttggtggctgctgattggatgcaagaagttgctgtggaaacatttggctctatggcttagacggagaatattgctttcattcttgagctgtccggctatgcctggatcggcacgattttgtcagagcacaaattttatccaggataatcagtactagtgtattgcacgc

SEQ ID NO: 62801 - DNA, 271 bp, Zea mays
cttgatgacaatttcacaactataataaatgtcgcgaggtggggtcgtgcggtttacataaacatccaaaagttcgtgcagttccagctgactgtcaacattgttgctttggtcatcaacttcgtctcagcatgcattacagggagcgctccgctcacagcggtgcaactgttgtgggtgaatatgattatggacacattatgggctctatctctagcaacggagcctccatacgatgacatgatgaagagaccacctgtcgggcgagggg

SEQ ID NO: 62802 - DNA, 271 bp, Zea mays
tgaacttctgttatgtgttcccaatagcatttgttcagtctcttgcaaatcttgaagggattgagaaggcagcgcgtttctgaagcctctgattgaagagcatactattaaatcattcatccaaggtttccttccgggaattgctctgaagatcttccttatattgctcccaagcatattaatgtttatgtctaaggttgaaggattgacctcaatatcttcactggagagaagatctgcatcaaagtattatatgttcagattcttcaat

SEQ ID NO: 62803 - DNA, 262 bp, Zea mays
gttttgcatgctcgagttgtgaccgatcgtgtcagtgggttttctaagggatttggctttgtaaggtatgctacgaccgaagaggcagccaagggaatagagggaaaggatggaaagttccttgatggatgggttatttttgcggaatacgctaaacccagaccaccaccggaggaaacagggatgaattcgcagccccagcagtcatggggagctccatcaggttcctggggtgcacagtagatgaagtgatattgtgaga

SEQ ID NO: 62804 - DNA, 261 bp, Zea mays
caagaccaaacggctgggttttatggttgccgttgtgctgctcaacctattcatgtccaactgaatttggccacctattttgtggaggtggtaaacactacagctgatgaactcaaagacatggctgtcgagatttcagtgtgggatctagatggtgcatgcccctattacaaagttaccgagaaaatagttataccgccaaagaaagtgaagcaaattatcgagatgaaatacccaaagatgaaagatgccaagcctgtg

SEQ ID NO: 62805 - DNA, 266 bp, Zea mays
accttcttgtgagaaaactcgtgctccattcacgtgggaagcttttcaagggattggcagtttcatgcggttggctgtaccttcggctcttatggttagtcttaaatggtggtcatatgagctgcttgttctgctttctgggatgttaccaaatgcagcacttgaaacttctgtgctctctatatgtatctctacagtaatactggtgtacaatctcccatatggcatcggaacagctgcaagcgtgcgtgtggcaaatgaactag

SEQ ID NO: 62806 - DNA, 270 bp, Zea mays
acaccgccgacgccgcgccgccgcagcaactgtcaccgtcgctatggcccgtatcaaggtgcacgagctccgggggaagagcaagacggacctgcaggcgcagctcaaggagctgaagtctaagctctccctcctccgcgtaccaaggtcaccggcggcgcacccaacaagctctccaagatcaaggtggtgcgcacctctatcgcgcgcgtgctcacagtgatctcgcagaagcagaagtcggcgttgcgggaggcgtacaagaagaag

SEQ ID NO: 62807 - DNA, 263 bp, Zea mays
gttttatgtggtcttcatgctgtcagcctgtgctctgttctcaaagacatggattgaagtttctggttcatcagcaaaggatgttgctaagcagctcaaggaacaacaaatggtgatgccaggccatcgtgagtcgaacttgcagaaggaacttaaccgatacatccccactgccgctgcatttggtggtgtatgcattggcgcattgaccgtcctggctgatttcatgggtgcgattggttcaggaactggtatattgctcg

SEQ ID NO: 62808 - DNA, 265 bp, Zea mays
tgaagggtgattactacagataccttgctgagttcaagactggagctgagagataggacgccgctgagaacacgatggtggcatacaaggctgcccaggacattgctctggctgagcttgctccaactcaccctattaggcttggactggcacttaacttctcagtgttctactatgagattctgaactcacctgatcgcgcctgcagtcttgcaaagcaggcttttgacgaggccatctcggaacttgacaccctgagcgagga

SEQ ID NO: 62809 - DNA, 254 bp, Zea mays
cagccagctagggtttgcagttgacgaccgcggcgcgccccacctgggcgccggccaagggcggcaacgagcaggggggcacccgcatcttcggcccctcccagaagttctcctcccgcgacctcgccgcgcacacctccctcaagccaagaaaagacggtcaacagacccaagaggagttacagaagaggaatctcagggaggaacttgaggaacgtgagcgcaactactactcttccaaggataagtcctat

SEQ ID NO: 62810 - DNA, 266 bp, Zea mays
ggccaggcgctgctgcagtgcacgccgcacatgtgccccatccgggtgcactggcacgtcaagctcaactacaaggactactggcgcgccaagatcgccatcaccaactacaactacaggatgaactacacgcagtggacgctggtggcgcacaccccaacctggacaacgtcaccgaggtcttcagcttccagtacaagccgctgcaaccatacgggagcatcaatgacactggcatgttctacgggctcaagttctacaacgac

SEQ ID NO: 62811 - DNA, 272 bp, Zea mays
cacccgcctccactcccccctcccaggcgctgcccaggtaagtcggcggcggcgatgacaacgcgcttcaagaagaaccgcaataagcgcggccacgtgtccgccgggcacggccgcatcggcaagcacaggaagcacccgggaggtcgcggtaacgccggtggcatgcaccaccaccgtatcctcttcgacaagtaccatccgggctacttcggcaaggttggcatgcggtacttccataagctccgcaacaagttctactgccccgcggt

SEQ ID NO: 62812 - DNA, 269 bp, Zea mays
gcggcactgctcctgcggatgaggctgaggatgatgatgaccttgatctttttggtgatgaaactgaggaggacaagaaggcagctgatgagcgtgctgccgctgccaaggcctcttctaaaaagaaagaaagtggtaaatcctccgtccttatggatgtaaaaccatgggacgatgagactgatatgaagaagctggaggaggctgtccgcagtgtccagatggagggtctgacttggggagcatcaaagcttgtgcctgttggatac

SEQ ID NO: 62813 - DNA, 257 bp, Zea mays
cggcggcttccgctccaagcttcagccaagccggatatggcggggagcctgcaccttcccgtggtggacctcgcgttgccggacctccgcgccgccgctgaatccatccgacaggcgtgcgtggagcacgggttcttctacgtgaccaaccacggagtgtaccgctgcctgctcgaggcggtgttcgcggagagcaagaggttcttcgacctgcctatggaggataagatggcgctactcaggggcgcaaaccaccg

SEQ ID NO: 62814 - DNA, 264 bp, Zea mays
gttaaaattgacatggggtgtcatattgatggctatattgctatggtggcacatacacatgtaattgcaaatgggcctgtcacaggaagagcagctgatgttcttgctgctgccaacacagcagcagaagttgcaatgaggcttgtcagacctgggaataagaataaggatgttactgaagtcaatcataaattttctgttgtgtatgtattcaaaattgtggaaggtgttcttagccatcaactgaagcatattgtgattgat

SEQ ID NO: 62815 - DNA, 259 bp, Zea mays
cgagaaggttcagtataagaatgtggcattcactgtgtgggatgtgggtgggcaagaaaaactcaggtcactgtggaagatgtacctgagtaattctgatgcactgatctatgtcgttgattctctggacagagaaaggatcagagacgcgaggcaagagttccagaccattatcaaggaccctttgatggcaaacagcataatcttggtatttgcatacaaacagggcctgagaggcacgatgagcacggacgaggtc

SEQ ID NO: 62816 - DNA, 264 bp, Zea mays
ttgccatatcgtccaactcagttaggacgcatccccaggattgcccagatcgcatggctgaagaagcagagctgttcaaatatcctttcccatatctttacgatgagtctcaagaggtagccaatgcttttggagcggtctgcacgccagagttctacttgttcaaaaaggatggccggatgctttttgaacttttctaccatggacagttcgatgactcaagacccagtaacaacgtgcctgtaaccggaagttttgcaggga

SEQ ID NO: 62817 - DNA, 240 bp, Zea mays
gatcccggtgaagttgctccatgaggcatcgggtcatgtggtgacggtggagctcaagatcggcgagcctaccgggggtccatggtctagtgcgaggataactggaattgccagctcgagaacattaccttcaccgccaaggatgggaaggtttcgcatctggagcacgtcttcatcagatgatgcagagtgagatttatgagtatacccgatatgctcaagaacgctcccatgttcaag

SEQ ID NO: 62818 - DNA, 261 bp, Zea mays
ggaagatgccggcggggcacgggcttcggtcgcggacccgcgactgttcgcgcggccgttccgcaagaagggttacatcccgctcaccacgtacctgcgcacctacaagaccggcgactacgtcgacgtcaaggtgaacggcgccgtgcacaagggcatgccgcacaagttctaccacggccgcaccggtcgcgtctggaacgtcaccaagcgcgccatcggcgttgtatatcaacaagcaggttaatggccgcatcatca

SEQ ID NO: 62819 - DNA, 260 bp, Zea mays
cgctccgccgccgcagccgcaacaatgccgtcgcacaaacccttccggatcaagaagaagctggcgaagaagatgcgccagaaccgccccatcccctactggatccgcatgcgcactgacaataccatcaggtacaacgccaagcgcaggcactggcgccgcaccaagttcggcttctgagcgtcgggattacccggctgctgcgtcggaaggctagggtctaagagctatcttcctgctgtcttcgtcactgtgtcagt

SEQ ID NO: 62820 - DNA, 263 bp, Zea mays
aagggaaccaatgctgctctcagtgcaagactagatacaagagacagaaaggtagccctcgagttcatggtgatgatgaggatgaagatgttgatgacctggacaatgaattcaactataagcaaggcaatgggaagggcccagagtggcagcttcaaggagatgacgctgatctgtcttcatctgctcgccatgaccccttcctcaagggtctcatgggcatgcagacctcacgccaacaatcgtcatcgtttggtccatcc

SEQ ID NO: 62821 - DNA, 153 bp, Zea mays
tccatcatgcccaatgacatccagctcgcccgccgcatccgcggggagcgcgcatatgcggctcgacggataggccggttgcccgtttcgcagtctcttctcggaattttgtactagtggtcgggtcgtctggtaggattggtgtactgatct

SEQ ID NO: 62822 - DNA, 240 bp, Zea mays
ctgcaaagttaggacagtgagtttagggaccagttacagaaggtacagcagaaattccctcaaatcctaagagaagtgcgcgggaggggtttgctgaacgcagtggatctaaacaacgacgcgctatctcctgcttctgcatatgacatctgcatcaagttgaaggagagaggcattttagcgaaacccacacatgacactataatccgacttgctcctcccctcacaatcaggcctgag

SEQ ID NO: 62823 - DNA, 267 bp, Zea mays
ggcgaccctccctccttcgctccttccgcgccgcctcccggccgtcgccgccatggtgaagtactcgcaggagccgggcaaccctaccaagtcggctaaggccatgggcagggatctgagggtccacttcaagaacacaagggagacagcctttgcgcttcgcaagttgtcttttaccaaggctaagcgataccttgaggatgttattgctcacaagcaggcaattcccttccggagatactgtgggggtgttggtcgcaccgcgca

SEQ ID NO: 62824 - DNA, 265 bp, Zea mays
tgggaaaccttatgggtatcacaatatgatatttagctggattgataccatcagtgataattatccaccaccattagatgctcatgtggttgcttctgttatgactgtatggagcaagcttcaaccagagtatgctgctaatatgttgaaagaagcccttaacaaacggctttgaactaagggtcttgacctttctgatatcatagtggaatcagagaaacgtgggataacatttgacaagttactatctgttccggagaacgat

SEQ ID NO: 62825 - DNA, 267 bp, Zea mays
acaagaagctggtgacggttccagaaatccgtgaaatcggagagtatgttgcagagatcaagcttcacccagacgtgacagcgcgagtaaggctgaatgtctatgcgaaatgagctcagcagttacagaacctcgagtaatggactttggcgaagctgatgtttgccagagattttgctgaaagtgccaggtgctgcggtagacatgaggcctggtctggccgtgacttgcctggttttgatacacaattcactggctcactgcgca

SEQ ID NO: 62826 - DNA, 267 bp, Zea mays
gtcccaagaggagaaactccggccggcgacgcgggggaaaatggggaagacgccggtgcggatgaaggcggtggtgtacgcgctgtcgcccttccagcagaaggtgatgccggggctgtggaaggacatcaccaccaagatccaccacaaggtcaccgagaactggatctccgccacgctcctcctcacccccgtcgtcggcacctaccaatacgccatgtggtacaaagagcaggagaagctttcccacagatactaaatgggatg

SEQ ID NO: 62827 - DNA, 255 bp, Zea mays
gcggccaagtcaggttgctgctggtgggtactagccaaaccaataactaccacagggctgatggtcagaacactggcaacttccttacggaccgtccttcaaccaaggtccacgctgctcctggcggtggctcttccctgggctacctgttcggtggcaactgatgcccgtgctggggcgctcaccaaagttatcctcccctgcctgctgcgtgctatgtctgaatcgtgaacaaccgttgtcatttcatgtgtg

SEQ ID NO: 62828 - DNA, 265 bp, Zea mays
tgcgagatcgacatcatcctggctgaggttgatctgccggtctccaagtgcttcaagatgctcaagtacattgccaggaacaaggacctgcgccacatccccatcatcatgatgtccaacagagacgaggtgtctgttgttgtcaagtgcttgaggcttcgtgcggctgagtacctggtgaagccgctgcgcacgaatgagctgctgaacctttggactcatgtgtggcggcgggacgatatcttgggtttcccgagaaaaattc

SEQ ID NO: 62829 - DNA, 260 bp, Zea mays
gagctgtaccgctacatttgcgataccaagggcgcattcgtgcagcctgcgttctacgaagcgttcggcctgactgtgatcgagtccatgacgtgcggtctgccaacgatcgcgatctgccatggtggccctgctgagatcatcgtggacggggtatctggcctgcacattgacccttaccacagcgacaaggccgcggatatcctggtcaacttctttgacaaatgcaaggcagatccgagctactgggacaagatctc

SEQ ID NO: 62830 - DNA, 355 bp, Zea mays
gtcgccaccggccaccgccaccctcgatcacgccgtccgtcgaggtaaggtcagcatggtgagggtcagtgtgctcaacgatgcgctcaagtccatgtacaacgctgagaagattggcaagaggcaggtcatgatcaggccgtcatccaaggtcatcatcaagttcctgacggtcatgcagcgccatggctacattggagagttcgagtacgttgatgaccaccgatcgggcaagattgtggtcgactcaacgggaggctgaacaagtgcggcgtcatcagccctcgctttgatattggcgtgaaagacatcgagggatggactgcatagctgctccgtccaggcagttcggata

SEQ ID NO: 62831 - DNA, 345 bp, Zea mays
gtgatctttgccacttcgtgactttatgcaatgcatcatgctatttcatacctaatgagggagttccaggagattcaaccaggaaatgcatggatctcaaaggaaacaaacacccaataaactcggagtggcagactgacaactgtgagacatgcacttgctacgaaacagaaatttcatgttgcacccttgtttctacacctgtgggttatgacaaagacaactgccaaagaatcttcaagaaggaggactgcaagtatatcgtggtggagaagaaggacccaaaaaagacctgttctgtcagtgaatggataatctaatgtgcttctagtaggcacagggctc

SEQ ID NO: 62832 - DNA, 360 bp, Zea mays
caagaatgggcgcccaccaccgagggtgatgtaaccgggctacttatcgcagcgctctttgctggacagcataccagctcaatcacctcaacctggactggagcgtacatgcttcgcttcaagcagtactttgcagaagccgtagatgagcagaaggatatcatgagacggcatggcgacaagatcgatcatgacatcctggcagagatggatgtcctctaccggtgcatcaaggaggcccttcgtctccacccgtcgctgattatgttgcttcgccaatcacacagtgacttcaccgtgacaacaaaggtaggcacagagtacgacatcaccaaggtgcacatcgtcgcgacatcgcca

SEQ ID NO: 62833 - DNA, 321 bp, Zea mays
ggtatctccaaggatggccagacccgtgaacatgctctccttgcgctcaccttggagtgaagcagatgatttgctgctgcaacaagatggatgcaaccactcccaaatactccaaggcacgttatgaagagattgtgaaggaagtctcatcctacctcaagaaagttgggtacaaccctgataagatgctcttgttcccatttctggttttgagggtgacaacagatgatggtcacacctgactggtataagccaccctgctaggtctgacagacacgagccagagctcagacaagcctgtgcgcctcagatggacagatg

SEQ ID NO: 62834 - DNA, 305 bp, Zea mays
cggacgagttgcagttggatctcagatcggtgatcacataaacaatggtgaaggctgttgctgtgcttggtagcagcgatggtgtcaagggcaccatctttttcacccaagtgggagatggccctaccactgtcaccggaagtgtctctggcctcaagcctggcctccatgggtttcatgtgcatgcgcttggtgacaccaccaatggctgcatgtcaactggcccacactacaatcctgcgagcaaggaacatggagcaccagaagatgagaaccgccatgccggtgatcttggacatgtgaca

SEQ ID NO: 62835 - DNA, 337 bp, Zea mays
cgcggtagctgggaccgccgttcagtcgccaatatgcagctctttgtccgcgcccaggagctacacaccttcgaggtgaccggccaggaaacggtcgcccagatcaaggctcatgtagcctcactggatagcattgccccggaagatcaagtcgtgctcctggcaggcgcgcccctggaggatgaggccactctgggccagtgcggggtggaggccctgactaccctggaagtagcaggccgcatgcttggaggtaaagtccatggttccctggcccgtgctggaaaagtgagaggtcagactcctaaggtggccaaacaggagaggagaagaagag

SEQ ID NO: 62836 - DNA, 349 bp, Zea mays
gcaactgctgcagcttcttcaaaagcacagctgagcctgagcaggtccatgggttgcacgaattgacttgatccaatctcgatgcattgtgtatgcttgggggagaggagagcacgggaggcttggatttggagatgataagagtagtcacatggtgcccctaaaggttgagcttctagctggagaggatattgttcaggtatcatgtggaggaacacattcagttgcgctagctcgagatggccgaatgttgtcttacgggaggggcgaccatggccgtctaggctacggcaggaaggtgacgacgggtcactcgatggaattgcccatcacctgccgccgctcagca

SEQ ID NO: 62837 - DNA, 347 bp, Zea mays
cgtgaatccgccgccgacgcagcagcaggagacgcgccaaggagagccgcaaggaggcgactatgagggccaagtggaagaagaagcgcatgaggaggctgaagaggaagcgccgaaagatgaggcagagatccaagtaggctgatggggattgtggatggtggtgtcggcatagttgtgttacgtttcttcgatgcgtgagttcatggagagatgtcacatcctagttcgtcgtcaccgtttgccatgggtccaatggctcgtcttggaaacctgcacttcagtaggccatctatcgtggtttctagctatatccagagtttcgtgcaagacaaatcagtcagtcg

SEQ ID NO: 62838 - DNA, 290 bp, Zea mays
aagatcgccaaggacaagaagctgaaaggctttgatgtcataaaggctgtccatctcgaccctctgccgtttgacatcgagcgcgacctcatcaccccgacgtacaagaagacacggccgcagatgctcatacactaccagggagtaatcgacgcgctctacaagggcatgaagtgagacggcacgtttgcagagtcgcaaggggtactgttgtgaattgtgatgcacatatttgtctatatgttgtttcagtatctgtggtgtgtggagtcaccgtaggttgtgtattg

SEQ ID NO: 62839 - DNA, 354 bp, Zea mays
ccgccatcttccagtaattcgccaaaatgacgaacacaaagggatagaggagaggcacccgatatatgttctctaggccttttagaaaacatggagttgttcctttggccacatatatgcgaatctataagataggtgatattgtagacatcaagggaatgggtactgttcaaaaaggaatgccccacaagtgttaccatggcaaaactggaagagtctacaatgttacccagcatgctgttggcattgttgtaaacaaacaagttaagggcaagattcttgccaagagaattaatgtgcgtattgagcacattaagcactctaagagccgagatagcttcctggacacgtgtg

SEQ ID NO: 62840 - DNA, 308 bp, Zea mays
catgacactaaatccttggaatcgatgttccaagtggaaattagcacatgccgagaggttcgctgctgatttctacgtagcggatgcaaaatcaggtaggagggccttggtgaaagctgggcaccactcaaaggtcgtgccgctgatcgacgagaacctcctggtgacaacaagcaggggcaccgagttatcttccactctagagcactggctcgaagaaaggaacctttcttccgaagaagcccagattatccgtctagaggaagggtatatcagagaacggatgcggttgagcgtggttggagttc

SEQ ID NO: 62841 - DNA, 352 bp, Zea mays
acgacgtcctacgcccagggtccgtaatcacgccgatcatcccaccgaccaccaccctaccacctctgctgcctctccgcgaggccgacgcgctcccgttctccaccgggcgcttcgccgacatcctcgccatgttcgcgccgacgacatccgacgccatcggcgaagagatacggtcgacgctcgacacctgctagaacacgcgcccgctccccggcgagaaggccgcctgctccatctctctcgagtctctcgccaggatactcgccgtcctcctcgggacacgcaacgtccgctctttctccggcgacatgcccaccgatcctgccggcacgtcgtcgaagcgggggcg

SEQ ID NO: 62842 - DNA, 347 bp, Zea mays
gcagcgcgcctggatcgagcagccgagcgactaagcgaagactcccttttccccgagcacaagagaaccatggacgcggcggcagtttacggcggcttcaaagggaagcttggcgtcgaggatgcccccgagctgcagctcaaccgcatccgcatcacactctcatccaagaacgtcaagaacttggagaaagtatgtgcggattgggtaaagggagccaaggacaagcatttgagtggtaagggacctgtccggatccctactaaggttctccacatcaccactcgcaagttcccttgcggtgaaggaacaaacacatgggatcggctgagttcgcattccaagag

SEQ ID NO: 62843 - DNA, 242 bp, Zea mays
cagtagtgcagcagcactgaagcactacttcctgcactcactgtgctagctgctcaaaccgtagtagtaacagtccatcaccatcaccatcaccaccaatggctcccaaggttgcgctcttccttgccctaagcctcctgttcgctgccaccgcgcatggctgcgaaccctactgttccggcccagtcgtctcaacaccaccagtcgtgccgactccgtcgtcgcatagccacgggcgctgc

SEQ ID NO: 62844 - DNA, 342 bp, Zea mays
aagcctcacagccatctgatgtcaacaattctgatgccctagcagctagcagtgaacgttcacctcttgaatcccaaagccggcaagtgaggagctgtaccaaggtaattatgcaaggaatggcagtaggaagggctgtagacctgacaaagcttagtggctacagcgatctttgccagaagctggaggagatgtttgacatccagggggagctgggttccacactaaagaaatggcgggtcattttcactgatgatgaggatgacatgatgcttgttggagatgatccttgggatgagttttgcaggatggtgacaaggatttactttacacatacgagga

SEQ ID NO: 62845 - DNA, 348 bp, Zea mays
ccgtactcaatctaatcgacacccggccgagattggacgcaatttcttcgttggtggcaactggaaatgcaatggaaccgcagatcaggttgagtagattgtcaagacgctgaatgaaggaaatgttccctcttcagatgttgttgaggttgtggtcagtcctccttatgtgttcctcccggtggtcaagagccagctgctccaagagttctaagttgctgctcagaactgctgggtgaagaagggaggtgcattcactggtgaaattagtgctgagatgctcgtcaaccttggcggtccctgggtcattcttggacactctgaaaggagagctctgtctgggagaat

SEQ ID NO: 62846 - DNA, 311 bp, Zea mays
tggtgaacgtgtgggcggttgcgcgtgatcccaaggtctggagcaacccgctggagtacagaccggagcgcttcctggatgagaacatcgacatcaagggcagcgacttcagggtgctgccgttcggtgcttgccggcgtgtgtgcccgggcgcgcagtcggcatcaacctcgtggcctccatgatcggacaccttctgcatcacttcgagtggtccctgccggagggcactagatcagaggacgtcaacatgatggagtccccgggctcgtcacgttcatgggcacaccgtgcaagctgtcgtcaatccg

SEQ ID NO: 62847 - DNA, 337 bp, Zea mays
tgtgcattgacgatggccgtgtagtcagtaacttcgttgctcaggcactgaggaaggagcattgacggtttatggtgatggaaagcaaaccaggagtgtccaatatgtgtctgatctggtcgagggtctgatgaagctgatggaaggcgagcatgtaggaccatttaacctgggcaaccccggcgagttcaccatgctggagcttgccaaggttgtccaggacattatcgaccccaacgcacggatcgagttccgtcagaacacccaggacgacttacacaagcgcaagccgacatcggccgtgcaaggagctccttggtgggagcacagatcccct

SEQ ID NO: 62848 - DNA, 347 bp, Zea mays
gcggcaagtagaggcatttaaggcaggattcaatcagggtgttgacatatcatcactgcaaatattttctcctcaagaacttgattatctgatttgtggtcgctgtgaactttgggagccggaaacactgcctgaacatataaaattcgaccatggttatacctctaagagtcctgcaattattaattttcttgagatcatggcagaatttactcctgagcagcaacatgctttctgccagtttgtgaccggtgctcctcggcttccacctgggggtttggctgctctaaatcctaaggtcgacattgttaggaagcactcttctgtggcaaataataattcaaatg

SEQ ID NO: 62849 - DNA, 348 bp, Zea mays
ctaggacatgcctttgatcctccgcaacaaggccccaaggtggcacgagcagcttcagtgctggtgcctcatactccggggccgggtgactgtcgcctcggtcaagaacttccagctagtcgcggcgacacagcctgccgccggagccctgaccccatcacaggcagccccgcagccagctccgcctcctccgccggaccaagagaaggtcatactgcagtttgggaaggtcggcaaggacatcttcaccatggactactgctacccgctgatagccttccaggccttcgtcatctgcctgagcagcttcgacaccaagttggcctgcgaataaatcctacctacaat

SEQ ID NO: 62850 - DNA, 347 bp, Zea mays
gctgggcgaattgaaggaagaacagggtccattacccaaattcctattctgacaatgcctaatgatgatatcacacacccaactccggaccttactggatacattactgagggacagatatacattgataggcagctccataacagacagatttatccacctatcaatgtcctgccatctctatctcgattgatgaagagtgctattggtgagggcatgacacgtagagaccattcggatgtgtctaatcagctttatgccaactacgcaattggaaaggatgttcaggccatgaaggcagtcgttggagaggaggcactctcgtctgaggatctgctttacttaga

SEQ ID NO: 62851 - DNA, 345 bp, Zea mays
cactcatatccgctcccctacctctccagcatctcccgtctccgtcgtctcgtctctgctcctcacctcgccgccagccatgggcaagatcaagatcggaatcaacggtttcggaaggatcggcaggctcgtggccagggtcgccctgcagagcgaggatgtcgagctcgtcgccgtcaacgaccccttcatcaccacggattacatgacctacatgttcaagtacgacaccgtgcacggccaatggaagcacagcgacatcaccctcaaggactccaagacgcttctcttcggcgagaagccggtcaccgtcattggcatcaggaacccgaggagatccgtggg

SEQ ID NO: 62852 - DNA, 345 bp, Zea mays
aggcgttttgatattagccgccgccgctgctcatctcacatccctcgagaagacgcctgctcctcgccgatcgatacgatggccgtcttctccgacctccacaccgccgacggcctcaagtccctcgaggctcacctcgccggcaaaacctatgtgtctggtgactccattactaaggatgacattaaggtcttcgccgcggtgccgtcgaagcctggcgctgagtttcctaatgccgcccgctggtacgagaccgtctctgcggctgtagcctcaagattcccatggtaggctgttggtgtaaatctgcctgctggatcagctctgctgcagctgctctgcggt

SEQ ID NO: 62853 - DNA, 232 bp, Zea mays
cacgatgcgaacgaggcagactccagcagtagatgcgaagtcgtcgccggagcaggaggttgagcgagcagcaagatgtcgtggcaggtgtacgtcgatgaccacctgctgtgcgacatcgaaggccagcacctcagcgctgccgccatcgtcggccacgacggcagcgtctgggcacagtccagaacttccccgagttaatgcctgaggaggtatctgggatgataaagga

SEQ ID NO: 62854 - DNA, 310 bp, Zea mays
ccactcccaaatactccaaggcacgttatgaagagattgtgaaggtagtctcatcctacctcaagttgggtacaaccctgataagattgctctttgttcccatttctggttttgagggtgacaacatgattgagaggtccaccaaccttgactcgtacaaaggcccaaccctgcttgaggctcttgaccagatcaccgagcccaagaggccttcagacaagcccctgcgtctgcccctccaggatgtgtacaagattggtggtattggaactgtaccggttggtcgtgtggagactggtgtcatcaagcc

SEQ ID NO: 62855 - DNA, 307 bp, Zea mays
gtgtagcttgccactctcaccaatcaagttttcatgtctgatctcgacattcagatcccaactgccttcgatcccttcgctgaggccaatgctggggactctggtgcggcacagggtcaaaggactacgttcacgtgcgcatccagcagcgtaatggtcgcaagagcctgactaccgtcagggattgaagtaggagttcagctacagcaagatcctcaaagatctcaagatagagttctgctgctatggtacagtggtccaggtcccagaacttggacaggtcattcagctccagggtgatcagagg

SEQ ID NO: 62856 - DNA, 307 bp, Zea mays
attggagcgattctgacttatattctccatgagcattatgagttcttgtcatgcagctgtctggcatttgctcctcctgcatgtatgacatgggagctggcggagtcaggaaaggatttcatcacttctcttgtcaatagaaatgatgtggtaccagcattttcgaaagtttcttcggaagcctgcgatctgaggtgatggtttcatcaaagctggataatgtgcaggatcactttcaccatggtttattcgccactataagccagcgtgttgccttcatctaggtccatatgctctccatctctca

SEQ ID NO: 62857 - DNA, 305 bp, Zea mays
gatgagcaccaaggaggtggacgagcagatgatcaacgtgcagaactagaactcctcctacttcgtggagtggatccctaacaacgtcaagtccagcgtgtgcgacatcccacccgtcgggctgtccatgtcctccaccttcgtgggcaactccacctccatccaggagatgttccgccggtgagcagcagttcacggctatgttccggcgcaaggccttcctgcattggtacaccagcgagggcatggacgagatggagttcaccgaagccgagagctacatgaacgacctcgtcgccgagtac

SEQ ID NO: 62858 - DNA, 307 bp, Zea mays
tttggttgcaatggaaaagcctgtctcccttaagcctgagcacatcagagatgagaaagtcaaggttctgcaatctgtgaaccctattaagcctgaagaggtagtccttgggcaatacgatggctacaaggatgaccctacagtgccagatgactcgaatactccaacttttgcatctgtgttcttcgggtacacaatgaaagatgggaaggtgttccttgcattcttaaagctggtaaagcattgagttcaaagatagcagaagttcgggtgcaattcaaggatgttcctggtgacatttttagaa

SEQ ID NO: 62859 - DNA, 167 bp, Zea mays
ggcagccatagaaaaggctggctacactggacaggtggtcattggaatggatgttgctgcttctgaattctgcggtgaggtagacaagacttatgatcttaatgtctaggtggctaacaacgacggctcaaacaagatttcaggcgacagctgcatagacctggaca

SEQ ID NO: 62860 - DNA, 300 bp, Zea mays
ccgcagttccaccgcgcccgagacgcaaccccgcaccatgagtaagtgtgctccattatcgatattatcgatatagcgagggaggagactgtctacatggccaagctggctgagcaggccgaatggtatgatgagatggttgagtatatagagcaggtggctaagactgtagatgggaagagctcactgttgaggagcgtaacctctagtcggtcgcatacaagaatgtgattggggctcgccgtgctgcatggcgcattgtctcttctattgaacagaaggaggagtcccgtaagaacg

SEQ ID NO: 62861 - DNA, 287 bp, Zea mays
attgagatagtgcttgcagctgaagatgcagagtgttgtatttgcctatctgcttatgatgatggtgcagagttgcgggaactcccttgtgggcaccatttccactgcacctgcatcgataagtggcttcacatcaatgcaacatgccccctgtgcaagtacaacattcggataacaacagtagcagtggaagtgaagaagtatgaatgcaaccgcttgacaatgccaatctgtgtaaacttcgtgcctgtgtcgttgctaatgcaactccagggcttgagcagtgt

SEQ ID NO: 62862 - DNA, 290 bp, Zea mays
ccgcaggtgcctcatcgccctccctccgcgctcccgatccagatccagatccaggggcttgtcatggcatccaaacgtatcctcaaggaagtaaaggacttgcaaaaggtccctccaacatcatgcagtgcatgtcctgctggtgaggatatgttccactggcaggcaaccatctgggtcctcctgatagtccatatgctggaggtgtcttcttggtgaacattcatttcccgccagactacgccttcaagcctccaaaggtatcttctaagacgaacgtcttccatcca

SEQ ID NO: 62863 - DNA, 307 bp, Zea mays
atgagtcctgcttatcacaatggggctcccaaacttggctgtgcagtggaaactccgggggaattttgaagaacactgacacccatcttccaccccgacactctgatttaattgggctgcagtgagtacagagcatcaatttaaaaagctgcccagaatgttctcctgggcagcgtatgatctttgccaccttcgtgactttatgcaatgcatcatgctatgtcatacctaatgagggagttccaggtgattcaaccaggaaatgcatggttctctaaggaaactaacacccaataaactcggagtg

SEQ ID NO: 62864 - DNA, 271 bp, Zea mays
cgagaagctgctctccgtgttccgcgagggcgtcaagtacggtgcgggcatcggcctcggtgtctacgacatccactcccccaggattccgtcggctgaggagatcgccgaccgcatcgacaagattgctggcggtgctggacaccaacatcctctgggtgaatcccgactcggcctcaagacgcgcaagtacacggaggtcaagcccgccctgaccaacatggtctccgccgcgaagctcatccgcacccagctcggcagcgccaagtga

SEQ ID NO: 62865 - DNA, 287 bp, Zea mays
cctctgcatcggccggttctcagcgacctcgtttcaggtcctgggccacatgaagaccgtgtgcgtgctgatcctcggctggatcctgtttgactcggccctcaccgtgaagaacatcctcgggatgctgctcgccgtgatgggcatggtggtctacagctgggccgtgaagcggagaagaaggcggcagcccggtcccccggatcaagagcgaaatgctcgacggcgaggacgtacctctcaaggccagggcgagcggcgtcccgcagtcgacctcgaggacggcg

SEQ ID NO: 62866 - DNA, 296 bp, Zea mays
gctcttgcagatgctgggattccaatgcgagacattgccacatcatgtagtgctggttatctgtgctctactcctttgctcgagctgaatgaccgcgaagacagtgctgggggctccgatgtcactgttggcattcttgctaagatggacaaagtgacttcgcttcagaggatgcataattaccaattgatacatttgaaaatgtaatgggacttgcaatagaagggtgcaaagcaattgcaacttacatccgagaggtgctattggagattacaaagaagcttgagtgtcagcgt

SEQ ID NO: 62867 - DNA, 288 bp, Zea mays
atccattgacaccattggagggtctattcatacagggacctatatcgatgagctggttctttgctatatcaaatatggttgagatagtcccttctatgaaaggaggtggtgtgtattggtgtactgatttgagaactcctgataatgtatgaatcctcccagtgtaacatcactgacctttttggctacagtagagcttaatatgctagatggcatggaagggaatcatatgttaaaaccaatgataaagcgcgtccggttttttggagttttgtttgttcgcattta

SEQ ID NO: 62868 - DNA, 296 bp, Zea mays
agatatttctgaagcagcaaaggcttcaatgggccaggatctgtcaccagttgatttgatcaatgtccagcaatttgcccaaagggttatgaatctactctgagtatcgcaaaaaccgttatgagtatcttgtgactaagatgaatgatattgcacccaacctgacatgttgattggtgtagtagttggagctcgcctaatctctcatgctggcagtctttcaaaccttgctaagtgtgcagcctccacccttcatatacttggtgctgagaaggccctattcagagcactgaaaa

SEQ ID NO: 62869 - DNA, 352 bp, Zea mays
ccgaagtggggcgaggctggttacatccgtatggagaggaacgtcaacgccagcactgggaagtgcgggatcgcgatgatggcgtcctacccgacgaagaagggcgcgaaccctcccaggccgtctccaaccccgccgacaccgccggctgcccctgacaatgtctgcgacgagaacttctcgtgctccgcgggcagcacctgctgctgcgcgtttggcttcaggaacgtctgcttggtctggggctgctgcacggtcgagggcgccacctgctgcaaggatcacgccagctgctgcccgccgggctaccctgtctgcaacgtcagagcggaacttgctcggtgagcaagaa

SEQ ID NO: 62870 - DNA, 342 bp, Zea mays
  unsure (1)..(342): unsure at all n locations
tggcgcccgctgcctcctccgccatggcgccgtctctgctcgggggcttcaccaagtcgctggccatgacggtgctctccgaggtcggggacaagaccttcttcgccgccgcgatattggctatgcgccatcccaggaaactggtcctggcaggctgtttgactgcactaatagtgatgacagctctatcagcttctctaggttgggttgcaccaaatctgatttcacgtaaatggactcatcatgtgaccactctattgttctttgtatttggtatntggtcattgtgggaaggcttcaaggaagatggagattcagaagattggctgaagttgaagcaga

SEQ ID NO: 62871 - DNA, 328 bp, Zea mays
agaccaccaaacaagtgccagcggcctctcgcagtcgccgcaatggagagcaccttcatcatgatcaatcctgatggcgtccagaggggcctcattggtgagatcatcagccgttttgagaagaagggcttctacctcaaggccttgaagcttgtcaacgtggagaggtcgtttgccgagaagcactacgccgatctcgcctccaagcccttcttccagggcctcgttgactacatcatctctggccctgtggtggccatggtctgggagggcaagagcgtcgtcacaactggccgcaagatcattggcgccactaaccccctgcttc

SEQ ID NO: 62872 - DNA, 343 bp, Zea mays
tagcaggggacctcctcgcccacgacctgccccagcagttggagaggctgaagatcaagaaaatcagcaagccaccagttgtccaaaccagccgtctgttcgccgtggataccggcgtccctacaattaccggcgtcgcccgcgtcctcctaacgctccttcacaagatggcaaagaggccaaggcagctgaagcaccaactgagaaccctgctccacccacccagcagagcagtgctgagtaacaccaggctcctcaggcaccttcaccatcggcaggtgacctaaagaattaatgaccattcagaaataaagcaaaaagcggccacaaccttaaccaacac

SEQ ID NO: 62873 - DNA, 340 bp, Zea mays
ctcttccgtaagccctagccgctagccgccagtgtcgtgcattcgtgctgaggctcaactgctgatccgtcttccaagctctggtatcatccctgagcactgatttaagatgtatctccagtactacatcaacgagaagggggacaaggtctacaccaccaagaaggagtcacctcttggggtgccaacgcagtctgctcacccagctcggttctcaccagatgacaagtactctcgccagcgatacctgttgaagaagagatttggacttctgccaacgcagaatccaggaccgaagtactgaagcttcaagtcaacttccaacctgcgatgttctttt

SEQ ID NO: 62874 - DNA, 336 bp, Zea mays
ggcatctggctggatggcacacgttcaacgcattgcgcttctctgggaagaccgccaccgtggttggtgaggcggcccctgttctccccaagggtttggagtgggctggctttgtgttgaactcgagaatgctgtggaaggaggctgaaggcaagcccgactgggtgaaggatcttgatgctgttggcgagaatggagaggagattgagaatccacttactctgttgaatgatccatcctctgttgagccactggggaactgtgggaagaaggtcctactgtggtggcttcgtgttgaagcacgggcggatagcagtttcctcaagggtgggtaat

SEQ ID NO: 62875 - DNA, 306 bp, Zea mays
ggccatccatggacggaccctcattcctcccagggaccccagacctctgtctctctcgggccttggctccttgaacttttggccgccatgtgcttcccgaaggtcctctctgatgacatgaagaagctgaaggcccgaatgcaccaggccatagaaagattttatgatacaatgcaagatgcagaatcaggacgtggacaggtgatgtcgagcctggcagagctggaggacgacttcaaagagggctacctggagacagtggcggcttattatgaggagcagcaccagagctcactcctctacttg

SEQ ID NO: 62876 - DNA, 302 bp, Zea mays
  unsure (1)..(302): unsure at all n locations
caaggacatgcctttgatcctccgcaacataggccccaaggtggcacgagcagcttcagtgctggtgctcaacttccgnggccggtgactgtcggctcggtcaagaacttccagctagtcgcggcgacacagccttccgccggagccctgacaccatcacaggcagccccgcagccagctccgcctcctccgccggaccaagagaaggtcatactgcagtttgggaaggtcggcaaggacatcttcaccatggactactgctactcgctgtcagccttccaggcttcgccatctggctgagc

SEQ ID NO: 62877 - DNA, 347 bp, Zea mays
acttggttgagtggctcaagaccatggttgccgagaggaaagcggaggaagttctggacccaaagatggctgaaaagccttctcccaaaacgctgaaacgggcgctcctggtcgcgcttcgctgtgtcgaccctgatgcgaacaagaggcctaaaatggggcatgtgattcacatgctcgagatggacgatctcctcttccgagatgataagaagcccgggagagacgttcatcctcacggttcagacagatacagctccaaggaggaagggagcatcagcaagcgcgagcatatgaggattgccattagagagtagcgacattaccatgttccccacttctttccc

SEQ ID NO: 62878 - DNA, 342 bp, Zea mays
gaagacgaagaaaccctcctccaccaccaacccgatccagctacatccgttgaggcccggccaggagcagctagccgtcttcgttcgatccgttcgcaccccccaacgcggttcgatttgcaggaaggagcgtgatggccaagacgagctcgttcaagctggagcaccccctcgagaagaggcaatctgaggctaaccgtatcagagagaagtaccctgacattcctccagtgattgttgagaaggctgagaggagtgatattcctgacatcgacaagaaaaagtacctcgtccctgcagatcttacagtcgggcaatcgtgatgttgttaggaagagaatc

SEQ ID NO: 62879 - DNA, 339 bp, Zea mays
gcagcgctccgccgccgccgccgcatctaacgcattccctccgccgcagcccgaggcaagatggctctccagaacgacattgatctgctcaacccgccggcagaactcgagaagctcaagcacaagataaagagactcgtccagtcgcccaactccttcttcatggatgttaagtgccaggggtgcttcagcataaccactgttttcagccactcccagactgttgttgtgtgccctggctgccaaactgtcctctgccaacccacaggaggaaaggcaaggctcactgagggctgctctttccgcagaagggagatagagcggatgtggtcttcaagt

SEQ ID NO: 62880 - DNA, 336 bp, Zea mays
ttgatttcctctggctttcgtgtcataccacttgatatgaaaacagatggtgtatcctctggtaggacgctagatttggcatctagtcttgatgtgggttctgctgcaccccaagcctcaggggatgcacctccagatgactgtaatttgagatctgtgctgacaatcgcctttcaattcccttatgagatgcaccttcaggacagtgttgctactatggcccgtcaatatgtgcgtagtgttgtttctgctgtgcaaagggtgtcgatggctatatctccctcccaatctggtctaaatgctgggcagaggatctttccggcttccctgaagctg

SEQ ID NO: 62881 - DNA, 327 bp, Zea mays
gcaagaagtaccgtggtctgcgtggcaagggccacacccaccacaagaacaggccctcaaggagagccacctggaagcgcaaccagaccctctccctccgccgctaccgctgagcagctcgtcgggtgcttggatactgccactgtccgatcattcccaatcaagacaacaagcgtgcctgtctctggttgcattttcaaagttttgctatttgtgttcttggcacttttaatgttagacgtcaattatggagcatatgtcatgaactatttgcaattcggttgtattatcagacaatgaatggttagtgatcaatgcgcctgctaa

SEQ ID NO: 62882 - DNA, 301 bp, Zea mays
ccactcccaaatactccaaggcacgttatgaagagattgtgaaggaagtctcatcctacctcaagttgggtacaaccctgataagattgcctgtgttcccatttctggttttgagggtgacaacatgattgagaggtccaccaaccttgactggtacaaaggcccaaccctgcttgaggctcttgaccagatcaccgagcccaagaggccttcagacaagcccctgcgtctgctcctccaggatgtgtacaagattggtggtattggaactgtaccggttggtcgtgtagagactggtgtc

SEQ ID NO: 62883 - DNA, 331 bp, Zea mays
atggttctgagaagccatctgcaattcagcagagaggaattgttcccttctgcaagggtcttgatgtcattcagcaagcacaatctggtacaggaaagacagcaaccttctgctctgggatcttgcagcagctggactatggcctggttgaatgccaggccctggtccttgctcccacccgtgagcttgcacagcaaatcgagaaagtcatgcgcgcgcttggtgattaccttggtgttaaggtccatgcatgtgtgggaggaacatccgtccgtgaggacaaaggatgcttggcagtggtgtgcatgtagtgtggtacactggtcgtgtg

SEQ ID NO: 62884 - DNA, 338 bp, Zea mays
tctgcattggttttaccaagaggcgcccaaaccaggtcaagagaacctgctatgctcaggcatcccagattcggcagattcgccgcaagatggttgagattatgatcaaccaggcttctacatgtgaccttaaagaacttgtttctaagttcattccggaagttattggcaaagagattgagaagtctacctccagcatcttcccacttcaaaacgtcttcatccgcaaggtgaagatactcaaggcccccaagtttgatctcgggaagttgatggaggttcatggcgactacaaagaggacgttggtgtgaagctgagaggcctgtcgacggtgatg

SEQ ID NO: 62885 - DNA, 340 bp, Zea mays
gcctcgcctcgcctcacctcacctcatctcacctcgccgactagggttttgtaccgccgtggatctcgccgtccccgccatggacgtctcgcacgcgggatcctccgtcgccggcgaggctccgaccaccggggagcaccggatggggactaccatcgtcggggtctgctacgagggctgcgtcgtcctgggcgccgattccaggaccagcactggaatgtatgtagccaaccgtgcttcagacaagattactcaactgacagacaatgtgtatgtctgtcgctctggatctgctgctgatacacaagtcatctcggttatggacgctatctcctccacc

SEQ ID NO: 62886 - DNA, 336 bp, Zea mays
gggacgcgtacgatgccaccaagggcgcccacgggctgtgcatcctgaccgagtgcgacgagttcaagaccctggactaccagaatatcttcgacaacatgcagaagcccgccttcgtcttcgacggccgcaacatcgtcgactccgagaagctgagggagatcggcttcatcgtctactccatcggcaagccgctcgacgcctggctcaaggacatgcccgcggtcgcctaatcccacccccctcacccatggattggattccgggaaggaagaggagagaagctggctgaccgttctttattacagttcgttttgcaggctacgctagcgattt

SEQ ID NO: 62887 - DNA, 333 bp, Zea mays
gttcaatgtcactctcgcctgacttggtcggatctggggcagcattgtgctgcagatcgtctgactggtgaactgtgagcctgacgctaattcatcaggactcttgggatgatggtatgctctgtactgtgtgacctgggtgggatcttcaccccctgcatggtgctcaggctgatgcaagtgtggcaagtcctgctcctcattgtgtgttgggttctgggcctgacttgctggggccatgactcttcttctcccagagatcaatggcgtggctctgactgatactattgaagaagcagagaagctgtggagaggaaatcataggccagagat

SEQ ID NO: 62888 - DNA, 326 bp, Zea mays
ggaagtatagacggcacctgtgacatatcggaagcccaaggctctgctgccgacattgattccatcagggaggcgcagcccgcattgcgccgtacgttcacaggacgcccgttatgtcgtcgacgtccatcgatgccatggtggggaagaagctcttcttcaagtgcgagtgcttccagaaagcgggcgcattcaagatccgaggtgcttcgaattcgatattcgcacttgacgatgagcaggtatcaaagggcgttgtgacacatagcagtgggaaccatgccgctgctgtggctttggctgcaaactgctggcatacctgcgca

SEQ ID NO: 62889 - DNA, 322 bp, Zea mays
  unsure (1)..(322): unsure at all n locations
cccgnttcgtcctcgcggcattcgcggcgctttctccctctgctcgaaccgcgccgacgagcgacgacaagagctgctctattcttcataacaaatggcgaccgttccagttaacccataaccttttctgaataacctgacaggaaagcctgttattgtcatactcaagtggggtatggagtacaagggttatcttgcttctgtggactcatatatgaatctccagcttgccaacactgaggagtacattgatggtcaattctctggaaacctgggagagactctgatcaggtgcacaacgtcatgatctccgaggcgttcc

SEQ ID NO: 62890 - DNA, 280 bp, Zea mays
  unsure (1)..(280): unsure at all n locations
agggactgtgactgtggaaggttgtggcaccaccagtttgcagggtcatgtgaagtttgctgaggtactggagatgatgggagcgaaggttacatggaccgagactagcgtaactgttactggctcaccgcgggagccatttgggaggaaacacctcaaggcgattgatgtcaacatgaacaagatgcctgatgtcgccatgactcttgctgtggttgcctctttggtatggnncgacaccatcagagagtggctcctggagagtaaggagacgagagat

SEQ ID NO: 62891 - DNA, 329 bp, Zea mays
gagaagggggcctcttacgaggtgatcaagaaagctattaaggctgcttctgagggcccactcaagggtattatgggctacgtcgatgaggatctggtttccatcgacttcaccggtgacagcaggtcgagcatcttcgacgccaaggccgggattgccctgaacgaccacttcatcaagctcgtctcttggtacgacaacgagtggggctacagcaaccgcgtcgtcgacctgatccgccacatgttcaagacccagtagagagagatatatctgcctccctatcgtgggtcgtcaccaatggcctctggtgcagacatctgtgctgc

SEQ ID NO: 62892 - DNA, 294 bp, Zea mays
ctcgtttcgtcctcgcggcattcgcggcgttttctccctctgctcgaaccgcgccgacgagcgacgacaagagctgctctactcttcataacaaatggtgaccgttccacttaacccaaaacctgttctgaacaacctgacaggaaagcctgttattggcaaactcaagtggggtatggagtacaagggttatcttgcttctgtggactcatatatgaatctccagcttgccaacactgaggagtacattgatggtcaattctctggaaacctgggagagattctgatcaggtg

SEQ ID NO: 62893 - DNA, 331 bp, Zea mays
gaagatttggacaagccaatggtaactcttcgggagataaagttggtgccctgttttctgctacaattggttttggggctgaagtagagtccttagatggcgctccaccacaaaagattagtgtttgctccatcgacaatcctgtcaatgcatcattttttgaatcctatgaaagtgcacactccatgcatgatttgactggctctattgcagagaaacttggtgtccaagctcctccagttagaatcgacagccaagcaaaatatggtgctctggcccgaggtgatggcgccatttacctgcgctttccaacaaaggttatagagagaaa

SEQ ID NO: 62894 - DNA, 330 bp, Zea mays
cgatgccttaacagttctcacttccaggttgctgaacgcgctttgttcttgtggaacaatgatcacattgtaagcttgatagcgcaaaatcgtggtgttatatttccaattatatttgaagcgcttgagaggaatatacatagccactggtatcaagacagttcatggtctcactgcaaatgtgcgcaagatgtttctggacatggacagtgaactatttgatgagtgccagcagcagtatatggataaacaagcaaaagccaaagagatgcaggagcaacgagaatcagcatggagacaattggtagctgtgttgctgccaaggctgct

SEQ ID NO: 62895 - DNA, 323 bp, Zea mays
tgtttcgcgaggtggttgctgtcacaggtgacggcacgaatgatgctccagcgttgcatgaagcagatatcgggcttgctatgggcatagcacgaacagaggttgccaaggagagtgctgatgtgatagtgcttgatgacaatttcacaactataataaatgtcgcgaggtggggtcgtgcggtttacataaacatccacaagttcgtgcagttccagctgactgtcaacattgttgctgtggtcatcaacttggcctcagcatgcattacagggagcgctccgctcacagcggtgcaactcgttggggtgaatatgattatg

SEQ ID NO: 62896 - DNA, 271 bp, Zea mays
gcatcaacgactgatggcttaataaccaccgcgatgacggagcagcatgtaggacggggctgcagtatctggggtatccagtgtctctgccattgcccatggatcgtactagtctttcacagtatcagtatggattgtgtcgtgagtcgtgactgagctggtttcatggaccagttgtgttctcgtcacccgaaactatcgtgcggcacatatggcttaatcatgaatacatgtggtgtatgaatgtaatacaactcgtgcatagcgttct

SEQ ID NO: 62897 - DNA, 325 bp, Zea mays
gggatctggaccgcacaatcaagtactacacggaatgctttgggatgaaactgctgaggaaaagggatgttcctgatgagaagtacaccaatgccttccttggctttgggccagagaacaccaactttgcagttgaattgacatacaactatggcgttgacaagtatgacattggaacgggctttgagcatttcgcaattgctaatgatgatgtgtacaagttagctgagaatatcaaatccaagggtggtaagatcacccgcgaacctggtcctgtcaagggaggatccactgttattgccttcgacaggatcctgatggctac

SEQ ID NO: 62898 - DNA, 322 bp, Zea mays
  unsure (1)..(322): unsure at all n locations
caaccaatgggtaaccttgagatgtgcatgactggtcttgacaagaagatagcttgtgtctgtttcaagactaatgctgatgggaacacaacatgtgccaaggaaatgacaaagctctctggcatctctgaaatcatccccgagatggagatctgcgantttgacttcgaaccctgtggctactccatgaatgcgatccatgggttttttatnctccacaatccatgtgacgcccgaggacggtttcagctacgccagttacgaggttatgggcttggatgcactgctctgtcttatggtgacctgtaagagggtcctcggt

SEQ ID NO: 62899 - DNA, 323 bp, Zea mays
gcgcgctgcttgccgtcacgctcgttctcaacggcatccagtctgtgctgtcagagtgtcgccgttgggtgcgggtggcagcagttcgtggcctacgtgaacattggctgctactacatagtcggcgtccccctcggcgtcctgctcgggttcttcttcaagctcggtgttaagggcatttgggctgggatgatcggagggacctgcatgcagacggctattctagtgtgagtcaccttgagaactgactggaacaatgaggtagatgaagcacagaataggttgcacaagtgggaggctacaagacgacggagccccttctt

SEQ ID NO: 62900 - DNA, 321 bp, Zea mays
ccagatccaattggcaacaagtactatcttggccctgctcctttgcacgatatggcaaggcaaattgctacagccaatggctctactggctataatagggattacctgttctcaatggagaaggcattagccagcattagccacgaagatgattcgatcatagagcttgcaaacgaggtgaggaaggtgctcaacagaacaaaggagaccaagatcactggtgccaatgcttccctgatatcacatgcccctcttgtgcacctgtccgcgcttccagaaggcaccgttgtggactcgagatagcgagagcttggacgtgga

SEQ ID NO: 62901 - DNA, 263 bp, Zea mays
ggtaaaataataacttcctgctgtctcccaagcagttcgtgatctgctactgctggagagcgcacacactaatcgctgatgctgtcgacggttgtgtaggctgagaagagatgcagagtgggagacatgcgttccggtgatagactgcagctggaagcagatcgcagagcctgtgatgaagacctataccgagactacggacgggtcgactattgaggagaaggagactgccatcgtgtggtgctacgaggacgccgatccag

SEQ ID NO: 62902 - DNA, 194 bp, Zea mays
ctgcgccgtccacaaggggatgccgcacaagttctaccacggccgcaccggtcgcgtctggaacgtcaccaagcgcgccatcggcgtcgaggtcaacaagcaggtcaatgggcgcatcatcaggaagcgtatccatgtccgtgtggagcatgtggcagccgtcccgctgcacagaagagttccgcctgaggaag

SEQ ID NO: 62903 - DNA, 258 bp, Zea mays
ggccgcctcaaccgcctcccgtccgcctgcgttggcgacatggtcatggccaccgtcaagaaggggaagcccgacctcaggaagaaggtgatgcccgccgtcatcgtccgccagcgcaagccgtggcgccgcaaggacggtgtctacatgtacttcgaagataatgctggagtgattgtgaatcccaagggtgagatgaaaggttccgctattacttgacctatcggcaaggagtttgcttatctttggcctaggatt

SEQ ID NO: 62904 - DNA, 262 bp, Zea mays
gtcacgcagttcggctacttcaaggtgctcgggaagggggtgctgccgcccaagcccatcgtcgtcaaggccaagctcatctccaaggtcgccgagaataagatcaatgccgccggcgggccgtcgtgctcaccgcctagttttcagtccttattcgcctcttggctttgagatctatatctgaactagcagtgctttcttgtctcacctatttgttttaataagacgtagtgttaaaatccattgtgcttccggtttggac

SEQ ID NO: 62905 - DNA, 196 bp, Zea mays
cagatgatttgctgctgcaacaagatggatgctatcactccaaaatactccaaggcacgttatgatgagattgtgaatgaagtctcatcctacctcaagaaagttgggtacaaccctgataagattgccttcgttcccatgtctggttttgagggcgacaacatggattgagaggtccaccaaccttgactggtac

SEQ ID NO: 62906 - DNA, 267 bp, Zea mays
catggccacgccaaatgccactttgtcgccatagacatattcaatgggaaaaagcttgaagatattgttccttcatcacacaactgtgacattccgcatgtgaaccgtactgagtatcagctgattgatatttctgaggatggatttgtgagccttcttacttcagatggcaacactaaggatgatcttagactcccaactgatgagactcttgtggcccagattaaggaagggttcgaaagcgggaaggatcttgttgttgactgt

SEQ ID NO: 62907 - DNA, 130 bp, Zea mays
gacgccactcttgaacaactgcttcccatttttcttgctttgctgaaggattagtgccctgatgttcgactcaacattataagcaaacttgatcaagttaaccaggttattggaattgacttgctgtcgc

SEQ ID NO: 62908 - DNA, 158 bp, Zea mays
atgggcttgtcttggctgaggatggtaagaaaatgagcaagagtaaaaagaactatcctccacccaaggatctcattgatgagtttggagcggatgctctgcgactatatttggtaaactccccagttgtacgtgcagagtctctacgattcaaacgt

SEQ ID NO: 62909 - DNA, 251 bp, Zea mays
catccctgagcactgatttaagatgtatctccagtactacatcaacgagaagggggacaaggtctacaccaccaagaacgagtcacctcttggggtgccaacgcagtctgctcacccagctcggttctcaccagatgacaagtactctcgccagcgatacctgttgaagaagagatttggacttctgccaacgcagaatccaggaccgaagtactgaagcttcaagtcaactgtccaacctgcgatgttct

SEQ ID NO: 62910 - DNA, 268 bp, Zea mays
gccaccaccagcgggcgggctccagtcgcaactcgcaacacagacgccgccgccgcccaaagaaagacgtcaactccaggagacaagatagtgagaactgaagagaaggatgggcttcgagaagcagatcctgagatccggcaccggccccaagccgataaagggccagaaggtcaccgttcactgcaccggctacgggaaggatcgtgatctgtccaagaaattttggagcaccaaggaccctgggcaacaaccattcagtttcagc

SEQ ID NO: 62911 - DNA, 221 bp, Zea mays
tgaatcgtcagcagttccttcagccccaactccagatgttgctgaagcacaggccccagttgctgaggaggacgacgacgatgatgttgacctttatggtgaggagaccgaagatgagaagaaggctgctgaagagcgtgctgcagctgccaacgcttctggcaagaagatagaatctgggaagtcatcagttttacttgatgtgaagccatgggacgatg

SEQ ID NO: 62912 - DNA, 225 bp, Zea mays
ctatgcggtttaccgtgttggggatcttgaccgcacaatcatttactacacggaatgcttttggatgatactgctgaggaaaatggatgttcctgatgagaagtacaccaatgccttccttggcttttggccatagaacatcaactttgcagttgaattgacatacaactatggcgttgacaagtatgacattggaacgggctttgggcatttcgcaattgctaa

SEQ ID NO: 62913 - DNA, 272 bp, Zea mays
gtgatgtcctggttgatggaaagtccactgggttttgtgccggtggctgtgcagccattgcagattctggaacttccttgcttgctggccccacagccataattactgaaatcaatgaaaagaactgtgctgctggtgtagtcagccaggagtgcaagactgttgtttctcaatatggacagcagatcctagatcttttgctagctgagacacaaccaacgaagatctgttcccaggttggtctgtgcacttttgatggcactcatggtgtc

SEQ ID NO: 62914 - DNA, 266 bp, Zea mays
gcaggtcattaagaatgaagatcttgaagagctgcgagaactaggttctggtacctttgggactgtgtatcatgggaagtggagaggaacagatgttgctattaaaagaataaagaagagctgcttcactggtcgatcatctgagcaagagagactgactgtagagttctggcgggaagctgacattctttccaagcgtcatcatccagatgtggttgcgatctatggtgtggaacagcatgggccatggaggacaatggccactg

SEQ ID NO: 62915 - DNA, 261 bp, Zea mays
tttgaggataagaagataggtgatgagttcttttcgtttattgttgactataaagatctgaaggcatgtactattctattgaggggagcaagttgaaaattggtgcccactaatagtctggtgagtgtcttaattatatcaatgtcttctaggtgcccactgatgtatcatgaatgtcattatagcaatcttggctatagttaactttgatctttgcacacatagtatttccatcaacaaactggtaagtgtttgggtgta

SEQ ID NO: 62916 - DNA, 258 bp, Zea mays
gtgatgtcctggttgatggaaagtccactgggttttgtgccggtagctgtgcagccatcgcagattctggaacttccttgcttgctggccccacagccataattactgaaatcaatgataagaattgtgctgctggtgtagtcagccaggagtgcaagactgttgtttctcaatatggacagcagatcctagatcttttgctagctgagacacaaccaacgaagatctgttcccaggttggtctgtgcacttttgatg

SEQ ID NO: 62917 - DNA, 260 bp, Zea mays
ggacccaagcaagtttgctgttgccgccccggttgctgctggggactctggcgctgcagctgctcccaaggaagaagagaaggctgcggagcctgaagaggagtcggacgaggaaatgggcttcagcctcttcgacgactagagctgctgttttcgtcaaactgctgcaagttttggctttttttatcatctacaagtactgtttcctatattttttagcagacaaattatcgtgtgtaatcgacaatgatatctcctta

SEQ ID NO: 62918 - DNA, 230 bp, Zea mays
agccccccaaaaatgaagagcaccatcttctttgctctctttctcttttgtgccttcaccacctcatacctaccttcaaccatcgctgatttcgtgctcgataatgaaggtaccctcttgaaaatggtggcacatattatatcttgtcagacataacagcatttggtggaatacgtgcagccccaacgggaaatgaaagatgccctctcactgtggtgcaatctcggaat

SEQ ID NO: 62919 - DNA, 261 bp, Zea mays
gccgccgctccgcctcagcgcatcgcccgccgcgacctcatcgatcaccttcagctttcaatcatggcggacgtcgatgtcgaaccggaggttgccgccggagctcccaagaagaggacgttccgcaagtacagctaccgcggcgtcgacctagatgcgcttctcgacatgtccacggacgaccttgtccagcttttccccgcgcgcgccaggagaaggttccagaggggtctgaagaggaagcccatggcgctcatcaag

SEQ ID NO: 62920 - DNA, 237 bp, Zea mays
tcttcttctcttgcggctagggttttagcgcacttgcttctagatctaaggaagatgggtaaggaacaggttcacatcagtattgtggtcattggccatgtcgactctgggagatccactaccactggtcacctgatttacaagcgtggaggcgttgacaagcgtgttattgcgaggtttgagaaggaagctgctgagatgaacaagaggtctttcaagtatgcctgggtgctggac

SEQ ID NO: 62921 - DNA, 266 bp, Zea mays
ggcatccatactgggctgttcacctcaccacatttgatggatgttagagaccgatttcagttagatggggttaatatgtctgacaggatggtgttgaagtacttctggtggtgctggaacaagttgaaggagaagactgatgatgatattcccatgccagcctatgttcaggttcctcgcgctgctcgtattcaagatattttctgctgagcaggtagatgttgctgttctcgaggttggcctaggagggaagtttgatgcaacta

SEQ ID NO: 62922 - DNA, 260 bp, Zea mays
tttgaacagcttgcgaaatgcaaatattaaaacactttgggaggatgatgtccatccacactatgttacaaggagttatgctgaatttacagcttctctagttcatctcatgttgagcatggggacggtcagcttgatctaaatttggagcgattgcggatggccattgaggatttgcttgttaagttggccaagatgttttccaaaccgaagctacaaactgtctttctgataaacaactatgatttaacaatttccat

SEQ ID NO: 62923 - DNA, 259 bp, Zea mays
tgagggtatggaggatggcgagttctccgaggctcgtgaggatctggctgcgctcgagtaggactacgaggaggtcggtgctgagtttgacgagggtgaggacggtgacagggtgacgagtactagacgctctactggcgcggcgtcgtcgggcttgtgtgccactgctatcctgtgatctgcactgagtggctcctatcgtgttatgtttctgtcggttcttatctatctgtcgttgtgtggtttacaacttacgttg

SEQ ID NO: 62924 - DNA, 254 bp, Zea mays
tcttgggagaagaggtcgagtttcacagcagcaatggtgtacgtcaaggctcagaaatcaaaagcctacttcaagagatatcaagtcaagttcaagagaagaagaggggaaaaaccgattaccgtgccaggattcggttgattaatcaggacaagaacaaatataacactccgaaataccgatttgttgttcgctttagcaacaaggacattgttgcacaaataatatctgctagcattgctggcgatattgtt

SEQ ID NO: 62925 - DNA, 252 bp, Zea mays
gagaagccggtccgccaggttatgggcctggggaaagtcagggcaatatcacttcatggatttcgacaggcgggcagagaatgtttacaggtccttcaattacccgaccgaattcggctgcaaggatatggcccttcaggaatcccgggaacggatggctcaaggagtatggacttgaaagcctttccaccaggatatggacctgctggagaaatccagggcggtggtccttcagggaccttcataagcccc

SEQ ID NO: 62926 - DNA, 253 bp, Zea mays
cagtccccgatccgaagctgtgcctcgtaccatttcgatccaatggcgccgacgtcgaagctgtcgacgggcatcaagcgcgcttcgcggtcgcacacgtaccatcgccgtgggctgtgggccatcaaggccaagaacggcggcgccttccccaaggccgacaaggccgccgccgccgtggaacccaagttctaccctgccgacgacgtcaagccccgcgttcccagcacccgcaagcctaagcctaccaagc

SEQ ID NO: 62927 - DNA, 259 bp, Zea mays
ctttcctctcttctcccgtcccctcttccgcggcaaccccggcgcggcatggcgagcccgtcctcctcctctttcccgtcccggaaggccctgagcaagatcgcctgcaggcgcctgcagaaggagctaacggagtggcaggtcaacccgccggccggcttcgagcacagggtcaccgacaatctccagaggtgggtcatcgatgtagccggggcaccagacacgctctacaccggcgagacctagaaactgcaggtgg

SEQ ID NO: 62928 - DNA, 257 bp, Zea mays
gccagatgtgattatattcaaaggtttctccttgagcatccaaccaggcaagtcgacagcccttgttgggcaaagtggttctggtaagtcgactatcataggtctatagagaggttctacgacccacttaggggggtagtgaagatcgatggcaaagacatcaaaacatacaatctcagagccctgcgtcgacatattggattagtcagccaggaaccaacactatttgcaggtttattaagagaaaatattgtgta

SEQ ID NO: 62929 - DNA, 246 bp, Zea mays
gaagcccagatgggtaaggatgtcgtatcattcctttcgtgggcagctgagcctgagatggaagagagaaagctgatgggagtgaaatggatctttctactatcactagcgcttctccaagctgcctactaccgccgcatgaggtggtcagtcctgaagtcccgaaagctggtcctggatgtcgtcaactgaggactatcattaccctttttttattgaaatatgttgagccgttaaggagcattc

SEQ ID NO: 62930 - DNA, 253 bp, Zea mays
cttgcccgcgccgccgctcgccgtttgcccctcgtctccgcaccgcgcgctgttgtccatccttgtgcagcaaaaatgacggctggctacattgttggctcatggtcggatcctttgccattgcatacctgtgtgacacatttatctctgacaagaaggcatttggaggtagcacccccaagactgtttctgagaaggagtggtggcaagccacagacaccaagttccaggcctggcctcgcactgctgggcc

SEQ ID NO: 62931 - DNA, 253 bp, Zea mays
gagaaaatggaacatgcctgtgcataaatggattgttcgtcatatatattttccttgcatgcgaaatggtatatcaaaggaagttgctgtttttatatcgttcttgtttctgctgtacttcatgagttatgtgttgctgttccctgccacatactcaagttctgggctttttttaggaatcatgcttcagattcccctcatcatattgacatcatacctcaaaaataaattcagtgacacaatggttggcaat

SEQ ID NO: 62932 - DNA, 253 bp, Zea mays
caatgaacctatgatgggatcaaacagattgacaccaatggctcctcatggatgctttcccgcatatttacctgttccttttcccgtgtggccatcaacttgggttcacccctttgaagaagttaagggaggagagacatgccaccatcagatccacaagccaatcccagtcattccaaaggaacctgttaatgttgacgaacttgtgggaatgtctcatctaagcattggggaagcacaggtacgtgataga

SEQ ID NO: 62933 - DNA, 250 bp, Zea mays
caaggaaggagatcccttgaaaccagctgtgacaggcgtcttagtgttcgtttccactccagatccaattggcaacaagtactatcttggccctgctcctttgcaggatatggcaatgcaaattgctacagccaatggccctactggctataatagggattacctgttctcaatggagaaggcattagccagcattagccacgaagatgattcgatcatagagcttgcaaacgaggtgaggaaggtgctc

SEQ ID NO: 62934 - DNA, 241 bp, Zea mays
cacccagagatctatgagtactattcactacaactcacatgcaacgaagatagcacttgtgatcgatggcagatggcatcttcaaatatcatgtccacacatgtcatcaaggtcgtcacactcgaagcatgataagagtagcccttcataccatagaatcagttccgatttgaagcctggaatggtgtttgttgtccctcccggtcatcccttcgtcaccatagcttccaataaagagaat

SEQ ID NO: 62935 - DNA, 248 bp, Zea mays
gtcggggatcgcgctaccagctacgatgacttcacaaacagcctccctgagaatgactgccgatacgcgatctatgatttcgactttgttactgcagaggatgtccagaagagcaggatcttctatatcctatggtccccatcctccgccaaggtgaagagcaagatgctttatgcaagctcaaaccagaaattcaagagtggcctcaatggcattcaggttgaactccaggccacagatgcgagtga

SEQ ID NO: 62936 - DNA, 247 bp, Zea mays
tttagccgccgccgctgctcatctcacatccctcgagaagacgcctgctcctcgccgatcgatacgatggccgtcttctccgacctccacaccgccgaggcctcaagtccctcgaggctcacctcgccggcaaaacctatgtgtctggtgactccattactaaggatgacattaaggtcttcgccgcggtgccgtcgaagcctggcgctgagtttcctaatgccgcccgctggtacgagaccgtctc

SEQ ID NO: 62937 - DNA, 228 bp, Zea mays
cagagttcctgcggccagtgctccagctccgagctccattccaagatacacatggatatgtcgacaaacccatgagctttgtctgacttcttcctccttagctggaagcttgcagtctcctcaacgactccagggtggtcccccgccgtgctgaaatttgtcgaaatactccttcacctggacaacagcagttccctgaaggtgctccctgaggaagatgggctctct

SEQ ID NO: 62938 - DNA, 249 bp, Zea mays
gtttgctttcagaataatacacgccttctggacgatggtgataatttatctctagttctctaaaagtcatgttgatcttaggtacttctggatcgaatggttcagctgctcgatcagacggaggagatttgacaaacacaacggtatttgtgggtgggctcgacccaaatgttagcgaagaggaccttaggcaaaccttctcccagtacggagagatttcttctgtaaagattccaattgggaaacagt

SEQ ID NO: 62939 - DNA, 272 bp, Zea mays
ctcgagaccgcctctgatgccgccgtacccatccaagatgacctgaacagttacttcgccattccaagcgagatcggaggcagcgacggttacatgccagatatagcttcctcggctcaagaggacgacgatttcgtcaacggggctcaggtcgccggcaagatgggcagcactgactcgctgcagcgggtggtgagcctggagacctccagaagaggatgtgcggaggcccggcttcatcggggtcgactcctaggttcactatccatcgg

SEQ ID NO: 62940 - DNA, 341 bp, Zea mays
gggcgaggctggcgacgcagcagggcgtacaggagtccttctaccgcgacatgacggtcatgttcgggaggtggacggacttcgagccgacggacctcgagaagccgccgtttccggtgcacctgttccagggtgacgaggacggcgtcgtgcccgtgcagctgcagcggcacatatgcaataagctcggctgggtcagctaccacgagctccccggagctgggcacttcttgtcagcggtgccaggactcggcgacaggatcctcagcacgctcctgtcctcgccggcgtcggcgtgactgatccacgactcgcacctagcaagtactagactactagta

SEQ ID NO: 62941 - DNA, 339 bp, Zea mays
gcctgcctccctcagatcctccctaagattgccatggcggaccagctcaccgacgaccagatcgccgagttcaaggaagcattcagcctcttcgacaaggacggcgacggctgcatcaccaccaaggaacttggaactgtgatgcgctcgttggggcagaaccctactgaggctgagcttcaggacatgatcaacgaggttgatgctgatggcaatggaaccatcgacttccctgagtttctcaacctgatggcacgcaagatgaaggacaccgactctgaggaggagctcaaggagagcttccgcgtgttcgacaaggaccagaacggcttcatctct

SEQ ID NO: 62942 - DNA, 326 bp, Zea mays
gatagatgcatcaagttctggaacacacacactggagcatgtctgaactctgttaacactggatcacaggtctgtgcccttctatggaacaaaaatgagagagagctgctgagctcacacggattcacacagaaccaactaaccttgtggaagtacccatcaatggtaaagatggctgaactcagtggccatacctctcgtgtccttttcatggctcagagccctgatggttgcacagtagcatcagccgctgcggatgagacccttcgcttctggaacgtatttggagacctgaagtggccaagcctgcagccaaggcttcccac

SEQ ID NO: 62943 - DNA, 315 bp, Zea mays
cctgacaccacttgcactgatggagggtggggcatttgcgaaaactgtctttggcaatgaacctaccaaaccagattacagagctacaccttctgctgtgttctcccaaccaccaataggacaagctggccttactgacgagcaggcaattgcagagtatggagatcttgatgtcttcgctgccaacttcaggcccctcaaggccactctgtctggactacctgaccgtgtattgatgaagattcttgtgctgcgctagtcaaacaaagttgtaggagtgcacatgtgtggtgatgatgcacctgagataattca

SEQ ID NO: 62944 - DNA, 326 bp, Zea mays
gcagcgcagcactgaagcaccacttcctgcactcactgtgctagctgctcaaaccgtagtagtaacagtccatcaccaccaatggctcccaaggttgcgctcttccttgccctgagcctcctgtttgctgccaccgcgcatggctgcgaacccaactgttctggcccagtcgtcccaacgccgccagtcgtgccgactccgtcgtcgcacagccacgggcgctgcccgatcgacgcgctcaagctcaaggtgtgcgccaacgtgctaggcctcgtcaaggtcggcctaccccagtacgagcaatgctgcccgttgctggagggtct

SEQ ID NO: 62945 - DNA, 326 bp, Zea mays
ttgataggcagctccataacagacagatttatccacctatcaatgtcctgccatctctatctcgattgatgaagagtgctattggtgagggcatgacacgtagagaccattcggatgtgtctaatcagctttatgccaactacgcaattggaaaggatgttcaggccatgaaggcagtcgttggagaggaggcactctcgtctgaggatctgctttacttagagttccttgacaagtttgagaggaatttgtgacacaaggagcatacgacacacggaacatcttccagtcactagatcttgcatggacattgcttcggatcttcc

SEQ ID NO: 62946 - DNA, 333 bp, Zea mays
gtgagaagatggacatcatagatcttgaggatgagacaatagatgcagagatattgaactcgatggctgttacaaatccccatttcaagactgcgcttggaacaagcaacccatctgctctccgtgaaactgttgttgaagtcccaaatgtctcttgggaggatattggtgggctggagaatgtcaagagggagctccaggagactgttcaatatcctgtggaacatccagagaagttcgagaagtttggcatgtctccatccaaaggagttctgttttatggtcctcctggttgtggtaaaaccttgttggcgaaggaattgccaacgagtg

SEQ ID NO: 62947 - DNA, 334 bp, Zea mays
cggccacgtccacttcgccgtccccgccggccgcctggacggcttcgtctccaaggccgaggaggcccaggcggagctcccggactccaaccaagacgtgcagcagctcatcgacaacttcgccaggtagaacttcacggtggaggagctcgtcatcctcaccggggcgcactccatcggccagggccactgctcgtccttcaccggccgcctctccgagccatcgcagcagatcaccccggcgtaccgcgacctgctcaactacaagtgctcccaggggtccaacccgcccgtggacaacaacgtccgcgacgaggactacgacgtggtggcg

SEQ ID NO: 62948 - DNA, 315 bp, Zea mays
gtattgttcaggtcttctggggtttagataaaaagctcgctcaaaggaagcatttcccatctgtgaattggctcatttcctattcgaaatactccaaggcccttgagtccttttatgagaagtttgatccagatttcattgatattaggacaaaagcacgtgaggtgttgcagagggaggacgatctaaatgaaattgtgcagcttgttggtaaagatgcgctggcagaatctgacaagattacactggagacagcaaagctactgagagaagattatttggcacaaaatgcatttaccccatatgataagttct

SEQ ID NO: 62949 - DNA, 270 bp, Zea mays
ctagcttgtggtggtggttgaacaataataagcgaggccgagctggctgccatacataggtattgtgtggtgtgtgtgagagagagagaaacagagttcttcagtttgctatctctctctgcatgtttggcgtcagtctttgtgctcatgtacgtacgtgtgtctacctgcatgttggttgatccgattgcatctgctgtaaccatatattaattggtccacgatgatatgatttgatactatatatatactaaaaccggacttcttatt

SEQ ID NO: 62950 - DNA, 357 bp, Zea mays
gcacgcatacgcgagattcggctcgagctctgagattacatctgacaatagacctaaaaacaccatctttgattggttctttgaccctcttatggttataaaggaacagatcaaagctgagaatctcactgacgaagaggaagagtatctgaaaatgcgagtgctattggctggtgatcccagtcgcctgaaaggctctctgcctcatgttccatccttgactgaacgtaaaaaggcagatatagacgcattcgctcgcaggttgcaaggaatcacaaagtcgatatctagatatcctacatcaaagcgccgcttcgacgtccttgtgaaggcgctcttgtcagagctggagaggac

SEQ ID NO: 62951 - DNA, 340 bp, Zea mays
aatgatcttgcacaaagccgcgcagttatcctgagagcgaggtcaagtgctggatgcacaatggctttgttaacaaggatgataaaaaaatggcaaaatcagataataactttttcacgattagagatatcactgctctttaccatccaatggctttaagatttttcttgatgcgcacacattatagatcagatgttaaccattctgatcaagcgcttgagattgcatctgatcgtgtctactacatttatcagactctatatgactgtgaggaagtgttagctacatatcgtgaagagggtactctctcccagtgccgtctgaggacaaaatctgattg

SEQ ID NO: 62952 - DNA, 340 bp, Zea mays
  unsure (1)..(340): unsure at all n locations
agaatgttgcaagacttattgctgcacaggattcattggtcgaagctgctaaagaggaagccagctccataagtaacattattgctcaggctacaaaatgaagttcttcatgcctgccccccttccctctatcttgttattgttgtacaagcaactgtaatgcactggactgcgagttcatttgctctgctcatgtttatggatttcaagactccaggttatttagaatgagcgtgatgtgtaactacattgcatgtgttcccgttgcaagtanaatcatgatttccaggattgctcaggcatacatgtanattcctaatgttataagtggatattttgt

SEQ ID NO: 62953 - DNA, 319 bp, Zea mays
gcaccagaaggttctgtagcaaaaataactggcaaagagggactatacttctcaggtcctgcattagtttttgagggtgaagagtccatgattacagctatctcagaaaacccagcaaatttcaagggaaaggtagtagtgatccgaggagaaggaccaaaaggcgggccagggatgcccgaaatgttgactccaacaagcgcaataatgggtgctggtcttggaaaggagtgcgccctgctgacagatggtagattttctggagggtcacatggatttgttgtcggtcacatatgccctgaagcacaggaaggtggtc

SEQ ID NO: 62954 - DNA, 328 bp, Zea mays
atttcttctctctctgctcctccgcctccgcctgatccatccaagacagggatcgccatgtcggactcggaggagcaccacttcgaatcgaaggccgacgctggggcgtccaagacctacccgcagcaggctggcaccgtccgtaagaacggcttcatcgtcatcaagaaccgtccctgcaaggttgtggaggtttctacctccaagactggtaagcatggccacgccaaatgccactttgtcgccatagacatattcaatgggaaaaagcttgaagatattgttccttcatcacacaactgtgacattccgcatgtgaaccgtactg

SEQ ID NO: 62955 - DNA, 322 bp, Zea mays
gctagaggagaggaagcggaaagggcggcggcggcgctcgtggtcagtcaaagatccaacctccggactcgcgatggggcggcggatcctcaacgatgctctgcgcacgatggtcaacgcagaccggcgggggaacgcgtcggcgcttctccgacccatctccggcgtcatggtctccttcctcaacatcatgaagtaccgagggtatatcaaaaactttgaggtcattgatgagaatagagttgggaaaattagagtggagcttgatggacgtcttaaagattgcaaagctctcacctacaggcaagacctcaaagctaag

SEQ ID NO: 62956 - DNA, 331 bp, Zea mays
gatagatctaacgggggatggaggtgttcttaagacagtagcgcggaaagcaaaagatgatgctatagcgccatccgagagcctgcccttggttgatgttcattacgaaggtacacttgctgagactggtgaagttttcgataccacccatgaggataactctattttctcatttgaaattggacaaggcgctgtcatcaaagcatgggatatagccttaagaactatgaaggttggcgaggttgcaaaaattacatgcaagtcagaatatgcatatggagctgcaggctcgccaccagagatacctcctaatgcaaccttatttttgagg

SEQ ID NO: 62957 - DNA, 327 bp, Zea mays
ctttcatctggcctctccattcttctctggctgcagtttgctacttcaatctttggccacaccagcgcgaccttcatgtttgagctctactttggcctcctggttttcctgggatatatggtgtttgacacccaggagatcatcgagagggcgcaccgtggggacatggactacatcaagcacgcgctgactctcttcaccgactttgttgcggttcttgttcgaatccttgtcatcatgatgaagaatgcacaggagaaatcccaagacgagaagaagaggaagaagcggtagctgctgaatgaattggatgacatatgttgttgt

SEQ ID NO: 62958 - DNA, 316 bp, Zea mays
ggcatcccctacctgaacacctacgacggccgtaccatccgctaccccgacccgctcatcaaggccaacgacaccatcaagatcgatctggagaccaacaagatcatggacttcatcaagtttgacgtcggcaacgtggtcatggtgaccggcgggaggaacaccgggcgtgtaggtgtgatcaagaacagggagaagcacaagggcggcttcgataccatccacgtcgaggactccatgggccaccagttcgccacccgcatgggcaacgtgttcaccattggcaagggcaacaagccgtgggtgagcctgccca

SEQ ID NO: 62959 - DNA, 350 bp, Zea mays
aaatgcacggtactgagctccggatcggctcgagattatctgtggttacaaggtttagcaaccaatcgaggaagatgagtaatggatcttgattctgaagatgaagagaaggagctaaacattccagtaatcaaggaaaatggcaaaggtgatgggaatgcagttgctgcagcttcaaaatcaagtcttgggcttgaaaaaaatcaaggatgagtatgagtctgatgattctgatgatggagaacgtggaaccggtgaatgaggagatgtggttgtgcatggacgacagcatcaagaaacctgcaacatgcaacctgatgttaagaaatctgccaactgcagcatgactg

SEQ ID NO: 62960 - DNA, 313 bp, Zea mays
gcggcggcggcggacaaacgcaggcgaaggcgagggtgtgagggaaggagcaccagccatggtgcacgtcaacttctaccgcaactatggtaagacgttcaagaaaccaaggcgtccttatgagaaggagcgtcttgatgctgaactgaagctggttggtgagtatgggctgaggtgcaagcgtgagctttggagggtccagtatgcactgagcaggatccgtaatgctgcaaggcacttgctcacccttgacgagaagaacccccgtcgtatctttgagggtgaggcattcttcgccgcatgaacgctatgg

SEQ ID NO: 62961 - DNA, 319 bp, Zea mays
ctgacttcaaatgtccaagttggttttctaccgatgttcggaagcttttgcaaaggattcttgatcctaaccctagtagaaggatctcggtggataaaatcatggagaacccatggtttaggaagggtttaggtgcatagctacttaggtacgatttacagagtaagaatgcccctcatgtggacaagaatgcagattttgattcactgagcaccaacgtatcatactgagagcaagctacattaagacatgaagcctaccaacatgaatgcatttgatatgatctctctatcaactggcttggacctctctggtttat

SEQ ID NO: 62962 - DNA, 261 bp, Zea mays
  unsure (1)..(261): unsure at all n locations
accanacatgccagtacaacactagtccgcagaagcttttacagtggctcaagatatcatgaagacgatgctagataaggggtacgtgctcagcaaggatgctttggctaaggctagagcctttgatgagtcctatggattaacagctgcagcagcagccagggctgcagagctgagcaagagaattggtttaactgatagggtcaatgctggtgttggtgcaatgcgatcagtcgatgagacatatcgcctaagagagac

SEQ ID NO: 62963 - DNA, 62 bp, Zea mays
ccgttctacgacacgttcggcctgctgtgtcgagtcatacgtcggctgcaagatcggctgca

SEQ ID NO: 62964 - DNA, 316 bp, Zea mays
ggacaccctagtgaagcttgctgttgtggtgaaggtgatgggaaggaccggctccaggggtcaggttacccaggtcagagtgaagttcttggatgaccataaccggctcatcatgaggaacgtcaagggaccggttcgcgagggagacatcctcacactgctcgagtccgagagggaggctaggaggctgcgtataggcggaatggtgtcttgctagttttcgtatggagttggatgtcatttaattgtgctatgtttttcaaacattggaatgacctttaaaacacctgccttgtatgattatttgtgagcctgg

SEQ ID NO: 62965 - DNA, 319 bp, Zea mays
gtgcagtttggacaggcgacaactccgcagactgggatcacttgaaatcttctatcccaatggtcttaactcttggtcttactggcttgcctttctctggcgcggatattggtggattctttggagactcagaaccagacctattggtgcgttggtaccaagtaggagcattttatcctgtctttaggggtcatgctcatcatgacaccaagagacgtgagccatggttatttggagagcgaagaactgccatcataagggaggcgatacatatgcggtattcattgtttgcctacttctacacgctgttcagagaggc

SEQ ID NO: 62966 - DNA, 322 bp, Zea mays
tgccgcctcaccgcctctctcaatctgataccgcagatccgtcgtccggtgagtggaagccgcacgaacccatggcctccggcgagcttgcctgcacctacgccgctctcatcctcagcgacgatggcatcgccatcaccgccgagaagatcgccacgatcgtgaaggcggccaacatcaaggtcgagtcctactggccggccctcttcgccaagctcctggagaagcgcaacgtcgaggacctcatcctctccgttggatctggtggcggactgctccagttgctgctgccgcacctgctggtggtgctgcggctgctgct

SEQ ID NO: 62967 - DNA, 322 bp, Zea mays
ctcgaagacgatcagataccgtcctagtctcaagcatgatggccaagtgtgacccaaggcatgggaagtacatggcttgctgcttgatgtaccgtggtgatgttgttcccaaggatgtcaatgctgcagtcgcaaccatcaagaccaagagaactgtccagtttgtggactggtgccccaccggattcaagtgtggcatcaactaccagccaccgtctgttgtccctggaggcgacctggcaaaggtccagcgtgccgtgtgtatgatcagcaacaacactgccgttgctgaggtgttctcgcgcatcgatcacaagttcga

SEQ ID NO: 62968 - DNA, 311 bp, Zea mays
agcctgaggaggttgctgggatgataaaggactttgatgaacctggaactcttgcaccaactggtctttttgttggaggtacgaatacatggtgatccaaggtgaacctggagttgtcatccgaggaaagaagggcactggaggcattactatcaagaaaactggcatgtccttgattatcggtatctatgatgagccaatgactccagggcaatgcaatatggtggtggagaggctcggcgattacctgatcgaacagggcttctaagtttgtcataatgctattttggtcattgggcacttaagtttgc

SEQ ID NO: 62969 - DNA, 320 bp, Zea mays
gccatgggaaaaaatgtgtcaaatgcaaagacatttcttgaaaagagatacacagaggatatggaacttgatgatgccatccacactgcaattttgactttgaaagaaggatatgaggggcaaatttcctccaacaacattgaaatcggaattattcgagctgactgtgagttcaaagttctaagcccattagagatcaaggatttcttggaagaggtggagtaagttgtctgttgatgatttactgtttcaaacaagaatagcagcatcacttatgagcagccagcctgaagcttgtcttggttttatcactctgtaaa

SEQ ID NO: 62970 - DNA, 314 bp, Zea mays
gtcatacacttgtatcgtactcccagctctcaaactgggacaagtgctcctcatgggagggcttcaaggtgtcaccattcaccgcaggagcgaggacattcagcttcgaatggctctaggtggtggcagtggccttccccgttgtgctgatcgacgaggttctcgaatttgtggggcggtgcctgacagcgcgtgcccggaaacaatcagggaagaggaaggcagagtagatgctagtgatcatcggtatttagaatctgtagtgccacggggaatcgatattcaatgtgacacccccattgtttttgagctgc

SEQ ID NO: 62971 - DNA, 268 bp, Zea mays
ctagccgccatatctcacgatccactcgagcaccaagccgcgaaggtgaggagcgatggcgcgcggcgtggtgtcggcgaagggaggcgcggtcgcgggcaagaagaaggggtcggtttccttcacgatcgactgcaccaagccagtggaggacaagatcatggaggtcgcctcgctcgagaagttcctgcaggagcgcatcaaggtcgccggcggcaaggctggcaacctcggcgactccgtcaccatctctcgcgagaagaccaag

SEQ ID NO: 62972 - DNA, 266 bp, Zea mays
aaaatgaagtatatgcaatcgatattgtcaccagcactggggaggggaagcccaagttattggatgagaaacagaccaccatctacaaaagggccgtagacaagaattatcacttgaagatgaaagcgtcaaggtttattttcagtgagatcagccagaagttcccaatcatgccttttactgctagggcattagaagagaagcgtgcgcgtttaggcttggtggaatgcatgaaccatgaactattgcagccgtaccctgtactt

SEQ ID NO: 62973 - DNA, 266 bp, Zea mays
gtggaaaattaattttttgtcaacccaaaagtgggagaacccgttgatgggatggacatctactggggatccatatgctaatgtcggtgaagcaggacttacgtttgacagtgcagagtcagcaaaggcgtttgccgaaaaacatggatggaattatgtggttcggaaacgccatgcacctcttctgaggcctaaggcctacgctgagaacttcaagtggagaggccctccgaaagcggagcaagcatgagctcgagacatctgtg

SEQ ID NO: 62974 - DNA, 277 bp, Zea mays
gacgatgtgaacttggaagagtttgttatgaccaaagatgagttctcgggcgctgatattaaggccatctgcacggaggctggattgctcgccttaagagaacgtagaatgaaagtgacccatgcagatttcaagaaagcaaaggagaaggtgatgtacaagaagaaggaaggtgttccggatggtctctacatgtagtagacgtctcctgccttgtcagaacaagttatcctcgtctctctcgtcatgggagatttgattgccacggcacttgttg

SEQ ID NO: 62975 - DNA, 266 bp, Zea mays
gccagatgtgattatattcaaaggtttctccttgagcatccaaccaggcaagtcgacagcccttgttgggcaaagtggttctggtaagtcgactatcataggtcttatagagaggttctacgacccacttaggggggtagtgaagatcgatggcaaagacatcaaaacatacaatctcagagccctgcgtcgacatattggattagtcagccaggaaccaacactatttgcaggtacaataagagacaatattgtgtatggtacag

SEQ ID NO: 62976 - DNA, 262 bp, Zea mays
gtgatttcgccgccggaaagccgagggagagggagcgagatggggttcgtcggcgacacgatggagtcaatccgctccatgcagatccgccaattgctcacgcagatcatcagcctcggtatgattgttacctctgcattaatcatatggaaggggttgatagttttcacagggagcgagtcaccagttgtagtggttctctctggtagcatggaacctggatttaaaaggggtgatatcctgtttttgcatatgagcaaag

SEQ ID NO: 62977 - DNA, 264 bp, Zea mays
ctccgcttccgccgatcggcttgccccgtcgatttcgccaacccctcgacccgatcgactccattgatcgtacctcgtcgtccggttgtcgatggccaggacatctttcaaaatggagcacgacctcgagaaaaggcagtccgaatctgccaggatcagggataagtatcccgacagaattcctgtgattgttgagaaagctggcaaaactgatgtccccgagattgataagaagaagtaccttgtccctgctgatctcactgt

SEQ ID NO: 62978 - DNA, 264 bp, Zea mays
gctcggtgccaacaaaacctcaacaaccaagtttcatgtctgatctcgacgtccagcttccatctgcctttgatccgtttgctgaggcaaatgctgaggactctggtgctggtcctggaacgaaggattatgtgcatgtgcgcatccagcagcgcaacggcagaaagagtctgactacagtccagggtctgaagaaggagttcagctataacaagatcctcaaggatctgaagaaggaattctgctgcaatggtactgtagttc

SEQ ID NO: 62979 - DNA, 263 bp, Zea mays
cgacgcacaccagcacctgccctcctcgccgtcgccgactccctccgcgcgaccgatctaccctccgccgccaccatgtcgctgatcgccggggaggacttccagcatatcctgcatttgctgaacaccaacgtggatgggaagcggacgatcatgttcgccatggactcaatcaagggtgtcgggcgccgcttctgcaacatcgtctgcaagaaggccgacatcgacatgaaccagacggctggcgagctgacgcctgatga

SEQ ID NO: 62980 - DNA, 266 bp, Zea mays
tgaagctgtgagccccccaaaccagcagtggcaccagctgcaagtgctccacctgttgagaaaccatctgctgcaaagactgatgcggccaagcaggttgctgctggggttaccagccaaaccaataactaccacagggctgatggtcagaacactggcaacttccttacggaccgtccttcaaccaaggtccacgctgctcctggcggtggctcttccctgggctacctgttcggtggcaactgatgcccgtgctggtgcgctca

SEQ ID NO: 62981 - DNA, 267 bp, Zea mays
tcgtggtgtcccacaaattgaagtgaagtttgatattgatgcaaatgggatactctcagttgctgccattgataagggcactggaaagaaacaggacatcaccatcactggtgctagtacgttacctaaggatgaggttgagagaatggtagaagaagccgataagtttgccaaggaggacaaagagaagagagatgcaattgacacaaaaaatcaggccgattctgtggtctaccagactgagaagcaactgaaggagcttggcga

SEQ ID NO: 62982 - DNA, 268 bp, Zea mays
cagaggagcaccctgtgttgctcactgaggctcctttgaacccaaaggccaacagggagaagatgacccagattatgttcgagactttcaatgttcctgccatgtacgttgcaattcaagcagtgctgtcactctatgccagtggacgtactactggtattgttctcgactctggtgatggtgtgagtcacactgtgcccatttatgaaggatatgcccttccccatgccattcttcgtctggatcttgctggtcgggacctcacaga

SEQ ID NO: 62983 - DNA, 268 bp, Zea mays
gcgggcagcagcacacagccccatcccaatcctagtcgatcttcttcccctcctcaaggaagaaaagaagctgaaccatggggaagagaaagtcagctgctaagccacctcctaagaagcggatggacaagcttgacactgtcttttcctgcccattctgcaaccacgggagtagtgttgagtgccgaattgacatgaagaatctgattggcgaacatcttgtagaatctgtcaggaaaacttcagcacaactgttaatgcactcact

SEQ ID NO: 62984 - DNA, 273 bp, Zea mays
cctccctttccccttccctccctccctctccccgcgggccgccagaggcaatttcgccctcgattcgaccccgattcgtccgcccgcgaccgggattccctccgccaagcgcggatctgaacgctgcgctccgtgtcgccgctcgaatccgccatgaagggggccaaatccaagggcgccgccaaggccgatgccaagctggcggtgaagagcaagggggcggagaagcccgccaagggcaggaaagggaaggccggcaaggacccaacaagc

SEQ ID NO: 62985 - DNA, 258 bp, Zea mays
aattttcttgggcgttcttcggcttcgttgtcacaaggttcgagttcgtcaccgtctagtacgactgtgcgagggaggaagaggcgaggagaagatgcagatcttcgtgaagaccctgacggggaagaccatcaccctcgaggtggagagcagcgacaccgtcgacaacgtcaaagccaaaatccaggacaaggaagggattcccccagatcaacagcgactgatattcgctggcaagcagctggaggatggacgcac

SEQ ID NO: 62986 - DNA, 257 bp, Zea mays
gccattccttccattggccaaagatgcaaaaagaatactggttgcaggaacacatgctgatgatattggatatcaatgtggtggctggacgatagcatggcatggagacagtggaaaaataactcttggtacgagcatattggaggccatacaagaattagtgggagtgcaaactgaagttgtgtatgagaaatgcccaaccgaagctatgattgaaactggggggttttcctatgcggtggtggttgttggagagg

SEQ ID NO: 62987 - DNA, 264 bp, Zea mays
atcaacctggtgttgaggctgggaaaaaggcagcaggagaagtgttggcccttcagaaaagggtgctgactgtattaaatgaggcaacctgcaaggacccttgtgagccattgactatagatgaaattgcagatcgctgccattgccctgaagatattgagatgatctacaaaatagtccagcacatggctgctaacgacagagcaatcatagcagaaggcagctgtggctctcctcgcagcgttaaggtgtacctcggtgaat

SEQ ID NO: 62988 - DNA, 266 bp, Zea mays
cgacaaggcctgcagagaatctatgagaagtacacctggaagctctactccgagaggctgatgaccctgaccggcgtgtacgggttctggaagtacgtgagcaacctggagaggcgcgagacccgccgctacatcgagatgttctacgccctgaagtaccgtagcctggcaagccaggttccgctgtccttcgattagtacggggaaagaagaagaagaagaagcccaggccggagaaccatcgcctgcatttcgatctgtttcac

SEQ ID NO: 62989 - DNA, 268 bp, Zea mays
gggttttgctgctctccgaccccgagctccgaaggccgcagcatcaggcgcggcccccctcgcgtgtgaccgagatggcgctgccgaatcaggggaccgttgattaccccagcttcaagctcgtcatcgtcggcgatggtggaactggtaaaactacatttgtgaagaggcatctcactggagagtttgagaagaaatatgaaccaaccattggtgtggaagttcatccgttggatttcaccactaactgtggtaagatcaggttcta

SEQ ID NO: 62990 - DNA, 270 bp, Zea mays
ccgccgtcgccgccgccctcctcttggtcccgccgtccgtcgaggtcatcatggtgagggtcagtgtgctcaacgatgcgctcaagtccatgtacaatgcagagaagaggggcaagaggcaggtcatgatcaggccgtcgtccaaggtgatcatcaagttcctgacggtcatgcagcgtcatggatacattggcgagttcgagtacgtggatgaccacagagctgggaagattgtggtggaactgaacggcagactaaacaaatgcggtg

SEQ ID NO: 62991 - DNA, 272 bp, Zea mays
cttgggtgttctaagaaatggtaggagtgccgcggtcaaaaagttggattctaacaagcagccagaccaagagttctaggtgcatgtgtctatggtgtcaaggctgaagcatgaaaatgttgtcgagttgtatggttactgtgctgatgggacactccgtgtccttgcttatgagttcgctacaatgggttcccttcatgatatgcttcatggaaggaaaggggttaaaggggctcaacccggtccagtcttatcgtggtcgcaacgtgtga

SEQ ID NO: 62992 - DNA, 261 bp, Zea mays
tctcgtcctcctagctatgggattcttgggtcctgaagcgacaatagctgagaaattgggtttggagaaggacaacagatcaaacttcaaagcgcagtttggagacttcgctaccagtgtcgatggtgtgtttgccgccggggactgcagacgtggacaatcactggtggtttgggccatcacggaggggcggcaggctgctgcagcggtagacaagtacttgtcaaggtatgatcagaatgctgctgctacaggcgacag

SEQ ID NO: 62993 - DNA, 248 bp, Zea mays
tcttgatggagggttggcaccatcatccttatttcgcatcttgtatttgtttcgcgtcttgtgaagtcttggttgcctaactcaggaggtcaggtggagatagaatatacggcgtgtttgaccataagctccctgctgcttttaagaagctttccttcgaccgctacctgtcggtgcaaaacgtgaagaaggtggtttcagaagcagatggctatcagccccatctcatggcacctgaacaagggtac

SEQ ID NO: 62994 - DNA, 260 bp, Zea mays
ggaccaggtaagcagcagcaggaaccctagcaccgccgcatccgcagccatgggtatcgacctcgttgccggtgggaggaacaagaagaccaagcgcacagcgccgaagtccgacgatgtttatctcaagctccttgtcaagctctaccgtttcttggtcaggaggaccaagagcaacttcaatgctgtcattctcaagaggctcttcatgagcaaaaccaatcgcccaccaatctccatgcgccgccttgtcaagttca

SEQ ID NO: 62995 - DNA, 265 bp, Zea mays
ctcaaaggaaggaggattcttcagcgtctcgcttgccggccccgaatcgcagtcgccgcccggatccgaggaaacaagtcgtcgtcttgctccaccgtccgcccgccgccatgagcttcatcttcggcaagaagaagactcctgctgagctgctgcgggagaataagcggatgctggacaagtccatccgggagattgagagggagaggcagggcctgcaggcccaggagaagaagctcatcaacgagatcaagaaggtggccaa

SEQ ID NO: 62996 - DNA, 271 bp, Zea mays
cagaaattgttagattaaatggtgtgtatcagaggatccttaccagtgccggtgtgacaatgattgaaggggcaggcagtctagttgatgctcatactgttgaagttagccagcccgatggttcaaagcacaggtataccgcgaagcacattttgatcgcgactggtagccgtgctcaacgtgtcaacatacctggaaaggatctggctattacttctgatgaggccttgagcttggaggagcttccaaagcgcgctgtaatcctgggtgg

SEQ ID NO: 62997 - DNA, 256 bp, Zea mays
cgatgatattgatgcggactttgagaaacgattatgccaaatatgctcgtgaagatgatgatctagagtccctggagagagatgttaatgaggaatcaggatggaagcttgtccatggcgatgtatttcggcctccccaaagtttgatgtttctttctgcacttgttggtatcggtacccaattggcagctcttatcctacttgtgatcgttttggccatcgttggcatgctatacattgggtacactcaacatac

SEQ ID NO: 62998 - DNA, 257 bp, Zea mays
ctcgccgccggcatccaggacgacgccggcaacgtcacccgcttcgtcatgctggcgcgggagcccatcatcccgcgcaccgaccggacgttcaagaccagcatagtgttcgcgcacgacaccgatcggcacctccgtcctcttcaaggtgctctacgccttcgccttccgcgacatctccctcaccaagatcgagagccgcccgcaccgccaccgccccatccgcctcgtcgacgacgccaacgtcggcaccgcca

SEQ ID NO: 62999 - DNA, 257 bp, Zea mays
ccgggtcctcggagcacgatgaagtttgttgctgcctacttgcttgctgtcctcgctgggaacgccagcccctccgctgaggatttgactgccattctggagtcagttggctgtgaagttgacaatgaaaggatggaactcctgctgtcccaactgagcggtaaggacatcaccgagctcattgccgcgggcagggagaagtttgcttcagtcccatgtggtggcggtggtgtcgctgttgcggcagcttcacctgc

SEQ ID NO: 63000 - DNA, 259 bp, Zea mays
cggctcgagcgccttcgcgccgaccacctatttccttccctgcgtcatgtggctcgcaatctacacagcccaagaggttcagcctctcctggttgaccaactggatgtgcatcattcttggggtgctcctgatgattctgtcgcccatcggagggctccggcaaataataatggacgcgaaaacctaccagttctactcgtgagctaccaccagccatgacttgtaagcacgattggagaaatctgtcaaagcctcaac

SEQ ID NO: 63001 - DNA, 255 bp, Zea mays
cttcaacctctcaatcaaaggtcatgcggaatgtgttaggtatatgaggtctttcaacgttccattgttgctccttggtggtggtggatataccataagaaatgttgcacgctgttggtgttatgagacgggagttgctcttggccaagagcctgaagacaagatgcctgttaatgagtactatgaatacttcggtccagattacactcttcatgttgcaccaagtaacatggagaacaaaaatacacgacaaca

SEQ ID NO: 63002 - DNA, 258 bp, Zea mays
ctgctgatatttcgtttggttctcctttccgtcttgtccgtcgccgaggccttccgctcgctccccagctccagcaggcagatcagatccatccaaccacgaacaggaaggaaggtaggaggaggggctgaagttgaaccatgagtgccgtcgcggtttcgtcgtcgctgaacccgaacgcgccgctcttcatcccggcggcgctgctgcaggtggaggacttctcgccgcagtggtgggacctcatcaccaccaccg

SEQ ID NO: 63003 - DNA, 261 bp, Zea mays
caagaagtatgcgcacacgaggtctgatgcccttacaggcaaagagctacaggagatgatgacagcaaacagagaacccaaggacttgaaaggatggctgggtggcttcacagagtggaaggtgctgtactccctgtgcaaagacaaggacgggtttctccacaaagacactgtcagggcggtctacgatggcagcctgtttgaaaggttggagcaagagaggaactcaaagaaagagtcgagtaagaagaaatgatgata

SEQ ID NO: 63004 - DNA, 262 bp, Zea mays
cttgttggtacatgggtgcctgcgttgaacatatttgagacaagcttgagaagtggaaagtttgatgaatcacggaagctacctgatggatctcttatggagattgctaaagtatatccactggacgcatttatgacacccctgaggatgttcctgaagatgttaaagcaaacaaaagatatgctggagcttcaaactggactgttaaggaagttgttgagactgtaaagaatgactttggtagcattgatatccttgtaca

SEQ ID NO: 63005 - DNA, 159 bp, Zea mays
gtccatcaccatcaccatcaccaccaatggctccccaggttgcgctcttccttgccctaagcctcctgttcgctgccaccgcgcatggctgcgaaccctactgttccggcccagtcgtcccaacaccaccagtcgtgccgactccgtcgtcgcatagcc

SEQ ID NO: 63006 - DNA, 257 bp, Zea mays
cgacaatcctgtcaatgcatcattttttgaatcctatgaaagtgcacactccatgcatgatttgactggctctattgcagagaaacttggtgtccaagctcctccagttagaatcgacagccaagcaaaatatggtgctctggcccgaggtgatggcgccatttacttgcgctttccacacaaaggttatagagagaaaatatgggaccatgcagcaggctcaattgtcgtgacagaagctggaggcatagtgacag

SEQ ID NO: 63007 - DNA, 257 bp, Zea mays
gaaaattagctgaccttgttctttggaaaccatctttcttcggcgctaaaccagaactggttgtaaagggaggtgcaattgcatgggctaacatgggtgatcccaatgctagcattccaacacctgaacctgttgtgatgcgacctatgtttggtgcatttggaaaggctggaagttccaattcaattgcatttgtgagcaaggctgctaaagaagctggtgtcgcaacggagtacagactagaaaagagggtggaa

SEQ ID NO: 63008 - DNA, 271 bp, Zea mays
ctggatgacctagtcaacctcatctatgaatctctaacgaaccctacatacaaaggtgtaatcaatggaactgcacctaatcctgtgcgtttgtctgagctatgcgaacgtctggggcgaatcgttgggcggccctcttggttgcccgtgccgggatttgcgctcaaagcggtgctaggagaaggcgcttctgtggtgttggaaggacaaaaggttgttccggcgaaggccaaggatctgggcttctcctatagatacccctatgttgaag

SEQ ID NO: 63009 - DNA, 211 bp, Zea mays
ctggcggtgtgattgctggcttagcagcctgcggtgttatgatgtccatcgtgtccactgcagccgatctcatgcaggacttcaagaccggttacctcacactctcttcccctaggtccatgttcgtgtcgcagttgatcgggaccgcctacagttgtctcattgctccactcaccttttggctctactggtcggctttcgatattggtaa

SEQ ID NO: 63010 - DNA, 277 bp, Zea mays
cggacttcatcaagctgaagcacaaggcttgggcactccagaagagcacaaccatgtaccaaccttctacctaaaggtgctgcttgcagccttggatatttgcggatgcggagtgaagttaccatggcatcgttgctaagaataagaaagtaatgtggttatgaggagatgtgtaattttgtggcgatattatttgcaacaatgatgtatatatgggcatgtttggttcacggctaactgtgacacactttgcctaaggttagtcgttcgaattgaa

SEQ ID NO: 63011 - DNA, 278 bp, Zea mays
cgcaggctagcagcacagcagcagccagagccatcccctctcctcgctacgcttcgcttcctcggcgccgattcctcctcctcctcctccaccctcgtccgtcccgttccggcgcgcgagcacgcccgagatggcgaacgcgagatcgggtgtcgctgtgaacgatgagtgcatgctgaagtttggcgagctgcagtcgaagaggctgcaccgcttcataactttcaagatggacgacaagttcaaggagatagttgtggaccaggtcggggatcgcg

SEQ ID NO: 63012 - DNA, 273 bp, Zea mays
  unsure (1)..(273): unsure at all n locations
gaatctctcgacaacattaatctattttcgataattacagtcatgtcattcttcctgttggccccggtaaccttacttacagaaggtgttaaagttagtccagcagttttgcagtctgctggtttgaacttgaaacagatatacacaaggtcaataatntgtgcatgctgcttccatgcataccaacaggtgtcatacatgatcctcgccagggtatccccagtaaaaattccagtgggcaattgcgtcaagcgtgtggtggtcattgtgact

SEQ ID NO: 63013 - DNA, 274 bp, Zea mays
caaaatggtgttgttacggatgagtgtgatccatacttcgacccggtcggttgcaagcatcctggatgcgaacctgcttatcctacaccaaagtgtgaaaagaaatgcaaggagcagaaccaagtttggcaggaaaagaagcatttcagcattgatgcgtacagaataaattcagatccacatgacataatggcagaggtctacaaaaatggtcctgtagaagttgctttcacagtttacgaggatttcgcacactacaaatctggagtgtaca

SEQ ID NO: 63014 - DNA, 258 bp, Zea mays
caggtatagctgaacttatagctcttgagatctcacgtcagacgaaagctcctatagaggagtgccgcaagaaaatctggcttgttgattcaaagggcttgattgtcagtacacgaaaggagtcccttcaacacttcaagaaaccatgggctcatgatcataaaccactcagcaacctcttagatgctgttaatgctatcaaaccaacagtgttgattggcacatccgggaaggggcaattgttcacaaaagacgttg

SEQ ID NO: 63015 - DNA, 284 bp, Zea mays
cttccaaagcattggtccagtagaagggtgcaagctcatcagacaagaaaagtcatcctttggtttcattgactactatgaccgcagatatgctgcactagcaattttatctctcaatggcagacaactgtatggtcagccgattaaagtcaattgggcatatacaagtactccgagggaggacacatcaggtcattttaatatttttgttggggatctttgcccggaagtcactgatgctactttgtttgcatttttctctggatactctacttgctcagatg

SEQ ID NO: 63016 - DNA, 274 bp, Zea mays
attgtttatcaactacaagctgatgtctgttgctcatatgccatggagacaaatgacctacaagttcctcaacactataatcgatgacctttttgcatttgtcatcaaaatgccaatgcttcatcgtctctcagttttcagagatgatgttatcttcttgatatacctctatcagaggtggaagtatccggtcgacaagaagcgtgttaacgagtttggcttcgggggcgaggacgaaccggcagcccaggaggctgtggaaggagtgattcag

SEQ ID NO: 63017 - DNA, 272 bp, Zea mays
ctggcattgtcactgagagagattatctccggaaaatcatagtgcagggaaggtcttccaagtcaactaaggttggcgacatcatgactgaagagaacaaactgatcacagtgaatcccgacaccaaggtcctgcaggcaatgcagctcatgacagaaaaccgcgtcagacacatcccggtgatcgacggcacggggatgctggggatggtctccatcggcgacgtcgtgcgcgcggtggtggccgagcacagggaggagctgaaccggctc

SEQ ID NO: 63018 - DNA, 271 bp, Zea mays
ctgggacatctatccaagccataattatttcagacataataacttcttcagataaactgcctactccttcaaatccgtatccatcttcgtggtccttctgcaaaaagtatttctgcagatgtatctcagattgcatctccacaggatgctgaagttaaagtcgcaattctgactgtaagtgacactgtttcatcaggtgctggccctgataggagtggcccaagagctgtatctgtagtgaattcttcatcagagaaactgggtggtgcaa

SEQ ID NO: 63019 - DNA, 267 bp, Zea mays
tggggaccagttatgacagacgagtttaatcctcaaaaggacacttatgttctgtgccaccatggcatgcgctcaatgcaggtggctaaatggttgcagtcacagggtttcaaaaaagtttacaatgttgcgggtggaattcatgcctatgcggttaaagccgactcctccatcccaacgtattagaggatcctcatggtgacactttagcacggctgggaacttctcatatatcttaggcattggcgttgatcaatgcttgaattc

SEQ ID NO: 63020 - DNA, 223 bp, Zea mays
cgacttccacaccaacaagaaggcgctggaagaggtctcgatcctcccctcgaagcgcctccgcaacaaggttgccggcttcaccacccacctgatgcgccgcatccagcggggccccgtccgtggcatctcgctcaagctgcaggaggaggagcgggagcgccggatggacttcgtcccggagaagtcagcgctcgaggtcgaagagatccgcgtcgacaag

SEQ ID NO: 63021 - DNA, 270 bp, Zea mays
acggtttcctcgtgggcaaggacagagcaaggaactgagattgctcatcatacgccctttagtcaatttgatgttgtccaagatttctcggatcaccactatgcaaagacttcagcaggaaaggtcacaaaggattgggtgaaggcaatccaaagtgaatgggatcttctacagaaaaacctacctgaatctatatacgttagagtctatgaggacaggactgatctgctgagggctgccatagtcgggccagcaggaactccataccat

SEQ ID NO: 63022 - DNA, 276 bp, Zea mays
cgcagtatgggatgaagcacatgcggtccttcgcaaacatctgcaacgctggcatccttcctgaagcagtgtcgaatgttgctgctcaggcttgctccagcattccttccaacccctggagttctatccacaagggttttagcgcctaagaatcgtaaggtgaggcgaaatatttcagccgctccaccgcaacgaactgatttacattaccagtcctcaggggggtcctagttcttgaaccactattatagctgttccaccgttccagattacata

SEQ ID NO: 63023 - DNA, 264 bp, Zea mays
ccgagttcggcatcgggcggcggtggcgctccttctctgtcgacttctcccgcaattggcccaggtatcggagggacatcaatgacttcatgggaactcccatcgggagagcatttgctacaatatttttcctgtggttagcactgtcagggtggttgttcagaattttcatttttggcacgtttgtgctgccatttgctgcccctcttctccttgggacctttgctaacagggttgccattgagggaacatgcccagcatgca

SEQ ID NO: 63024 - DNA, 265 bp, Zea mays
caacatcctcggctgaaaagaccaagaagaaaaggtgatgatggcccagagcaatcttgggaaaagctagagatgtccactatactttattatggcgaagtacattctccctcacttcgtaggcaagagggaaaagtatcttgggtgacttgagtggccacctaaggctttgtttgggtactctagcattgaccccaatccacatgtgttgaggtggattggggtgtaaattcagttaagttacacctcaatccacctcaataca

SEQ ID NO: 63025 - DNA, 257 bp, Zea mays
gttgactgctttgatttaaatgatgatccccatggaatgggtggatgggactggcaggcttgtaccgagatggtaatgccaatgtcttacagtgaacagaggagcatgtatccaccatataaatttgactacacttcctatgctgaggattgcatcaaaagctatggtgtcaggccaaggcctcagtggattacaacagaatttggtgggcataatatcactaaggtcctggaaaattttggtagtaacatcatatt

SEQ ID NO: 63026 - DNA, 264 bp, Zea mays
cttgcaatcacaacgaacaaaagctctcgatctcaccgacaccgacgaagaagagatcaatggcgtccgagcagggagtcgtgatcgcgtgccacagcaaggctgagtttgacgcccacatgaccaaggcccaggaagccggcaagctggtggtcatcgacttcactgccgcctggtgcggtccatgccgcgccatcgccccactgttcgtcgaacacgccaagaagttcactcaggtcgtcttcctgaaggtggacgtggacg

SEQ ID NO: 63027 - DNA, 269 bp, Zea mays
catgaacttcatgcaccgccacgaggaggtcgactacttcccctccaggtacgacgccgccaggaacgcgcccaggtaccccatcccgaccgcccacattgccggccgccgagagaagactgtgattagcaaggagaacaacttcaagcagcccgggaagaggtaccgcgcgatggacccagcaaggcaagagcggttcatcaccagatgggtcgacgcgctctccgatccgcgcctcagccacgagatcaggaccatctggctctcca

SEQ ID NO: 63028 - DNA, 273 bp, Zea mays
ggcatgggcgccaacctcttcgaccggccgcagcccaactcccccaccgtctacgactggctctacagcgacgagaccaggagcaaccaccgctagatcgggcgagatggatggacagtgaagaggccatgtttgctggtccttgtggttatctaaaacgcacgcatgctctattatagctagtcatcactatatatatacttgtgtttgtgtattgttgttcttgttctgctggtgtctccgccgtttaatttgacctgttatggagtgagt

SEQ ID NO: 63029 - DNA, 276 bp, Zea mays
gatggactcccggtgaccatccgactcctggaccctcccctccacgagttccttccagaagggaacatcgaggacattgtaagtgaattatgtgctgagacgggagccaaccaggaggatgccctcgcgcgaattgaaaagctttcagaagtaaacccgatgcttggcttccgtgggtgcaggcttggtatatcgtaccctgaattgacagagatgcaagcccgggccatttttgaagctgctatagcaatgaccaaccagggtgttcaagtgttc

SEQ ID NO: 63030 - DNA, 259 bp, Zea mays
cacatacatagtttcttctactacacgacgacaaacatggggaagcctgcgaagatcggagagtggggtggatacgccggcgatcgtcgggatctgagggctactccggaccggctgatcgaggtgaaggtcacggcggacaacagcagctgcatccgctccatctccttcatctacatcggagccgatggcaaaccgtacgaggatgggccatggggtttcggccatgctggcacggagtacaagattgatctgtgca

SEQ ID NO: 63031 - DNA, 264 bp, Zea mays
aacaaacgcgcttacggaccgtacggcagggacgagggcaccccgttccgtgtcaaggtgatgaacaacggccacgtcgctggcttctttggccgctctggagattgcctggacgcgatcgggctctacgtgaaccccaactaataactaaaacgatggatcggatcatctgcatgcatgcatatgcagtatgcatgctgcttgcctgcctgtaacgaatatgaatgcataaaataacgcccctgctgctcccatgcatcagca

SEQ ID NO: 63032 - DNA, 241 bp, Zea mays
gtttttaaaaaggatgggactacaactgcaggcaattccagtcaagtgagtgatggtgctggagctgttcttctcatgaaaagatctgtggctctgaagaaagggctgcccattcttggtgttttcaggagctttgcggctgttggagtggatcatactgttatgggcgttggtcctgccgtggccattcctgctgctgtgaagtctgcaggccttgagattggagacattgatttgtttg

SEQ ID NO: 63033 - DNA, 270 bp, Zea mays
catgaacttcatgcaccgccacgaggaggtcgactacttcccctccaggtacgacgccgccaggaacgcgcccaggtaccccatcccgaccgcccacattgccggccgccgagagaagactgtgattagcaaggagaacaacttcaagcagcccggggagaggtaccgcgcgatggacccagcaaggcaagagcggttcatcaccagatgggtcgacgcgctctccgacccccgcctcacccacgagatcaggaccatctggctctccaa

SEQ ID NO: 63034 - DNA, 272 bp, Zea mays
gcaagaacttgcatgggaaaggtgccggcaacttcaggccgaagatgtcgttgtcacgggtaaagtaattggtggaaacaaaggaggtgtagtagctcttgtggatgggcttaagggtttcgttccattttcgcaagtgtcatcgaaaacaaccgccgaagagctgcttgagaaagaattgcctctgaagtttgtagaggtcgatgaggaacaaggcaggcttgtcctcagtaatcgcaaggcaatggcagatagtcaggcccagctaggta

SEQ ID NO: 63035 - DNA, 270 bp, Zea mays
gttattatagcatacttattggccccggcattgggtttctgcaatgcctatggtgctggccttactgatatcaacatggcctacaattatggaaaggtcgcgctctttattcttgcggcctgggctgggaaggactctggtgttgtagctggcctagtgggttgtggtttggtgaaatcactggtgtcaatatccgctgatctgatgcatgacttcaagactggacatcttacattaacatcacctagatcaatgattattgctcaggct

SEQ ID NO: 63036 - DNA, 276 bp, Zea mays
gatgaatccaatgatcctgctgcacaagctgctgctgattatcttatgaggctcgcactgaagaagggtaccgaggacaatatcactgtcattgtggttgacttgtaacctcgaaagaaggccaagagcaactcataacactgggatggatccatcacggtagagctgaccatgatatgtccaaaggcttctgctgctagttgttggtcgtccgcaagagacttgaccccacaggtttttttcgttgggcctcaagaactgtaggtgcattttcca

SEQ ID NO: 63037 - DNA, 273 bp, Zea mays; identical to SEQ ID NO: 53528

SEQ ID NO: 63038 - DNA, 280 bp, Zea mays
ctgacttcgaaggcattttccgtgctatggatggactcccggtgaccatccgactcttggaccctcccctccacgagttccttccagaagggaacatcgatgacattgtaagtgaattatgtgctgagacgggagccaaccaggaggatgccctcgcgcgaattgaaaagctttcagaagtaaacccgatgcttggcttccgtgggtgcaggcttggtatatcgtaccctgaattgacagagatgcaagcccgggccatttttgaagctgctatagcaat

SEQ ID NO: 63039 - DNA, 271 bp, Zea mays
ctggcattgtcactgagagagattatctccggaaaatcatagtgcagggaaggtcttccaagtcaactaaggttggcgacatcatgactgaagagaacaaactgatcacagtgaatcccgacaccaaggtcctgcaggcaatgcagctcatgacagaaaaccgcgtcagacacatcccggtgatcgacggcacggggatgctggggatggtctccatcggcgacgtcgtgcgcgcggtggtggccgagcacagggaggagctgaaccggct

SEQ ID NO: 63040 - DNA, 262 bp, Zea mays
gttcatcaccgccacggcagctgggaacaggctctacctcttcagtgtaactgcaaacggtctgcagtggaagaggcattacaaggacctcaaacagatagcacaatcatttcgagtcgtgtagggttccaattcctactactacttttttttacagcgcctagctcttgttgatatgattagaggacatgggagacggtaatacggagagaggacaagtgagcatcacttctgatgaccactctaactctcttaaggttac

SEQ ID NO: 63041 - DNA, 240 bp, Zea mays
cagcattcctatcctctccccgcccgcccgtgccgccgccgcggcttcccttcctactcccgagccaagatgaatgttgaaaagctcaagaagatggcaggtgctgtgcgcaccggggggaagggtagcgtgcgcaggaagaagaaggcagtccacaagactacaaccacagatgacaaacggcttcaaagcaccttgaaaagaataggagtgaacagcattcctggtattgaagaggtc

SEQ ID NO: 63042 - DNA, 266 bp, Zea mays
  unsure (1)..(266): unsure at all n locations
cggtggcgagatccaaatttggcttgcaatggcatatgaagccaataggaggcacaaggattgcatagcattgtacaaagagttggagagtagccaccccatgatcaacatcaggcgccaggcagctgagcttagatacattttagaggcacccaagttgaagatatcaaatgacgaggtggtcacaataccacaaattgggccgcactngggattggtatgctgggaacatggagtgacaaaatcaaggaacaagaggacaagaa

SEQ ID NO: 63043 - DNA, 269 bp, Zea mays
ctcaccaaggagtacggctacgtcgtgctggtgctggtggcctatgtcttcctcaacctttggatgggcttccaggtcggcaaggcccgcagaaactacaaggtgttctaccccaccatgtacgccatcgagtcggagaacaaggacgccaagctcttcaactgcgtgcagagggggcaccagaactctctagagtggatgcccgttttcttcgtcatactgctgctgggcggtctgcagcacccgaccatcgccgccggtctgggcgg

SEQ ID NO: 63044 - DNA, 274 bp, Zea mays
caacgacctgacgcagatgacctttgggtacagcagggatgatgtggggaagttcattcccgtctatcttgctcagggcatcctccaacatgaccccttcgaggtcctggaccagaggggagtgggcgagctggtgaagtttgctacagagaggggccgcacagctaggcctaacttgaaggtgggcatttgtggagaacacggtggagagccttcctctgtggccttcttcgcgaaggctgggctggattacgtttcttgctcccctttcagg

SEQ ID NO: 63045 - DNA, 234 bp, Zea mays
tgcggacaagtttcggcgggatttcagaaatataaagtgggttcgcgtgccacttatcatgtgggactacacaactgaaaaggtgctaaccctggagtatgcccctggtattaaaataaacaatttggatgtgcttgacaaccggggttatagtcgctcactaattgcatcacgtgcaatagaatcttacctaattcagatactgaagattggattcttccatgctgatcctca

SEQ ID NO: 63046 - DNA, 259 bp, Zea mays
agaaggagtccaccctccacctggtgctccgcctccgaggtggcgccaagaagcgcaagaagaagacgtacaccaagcccaagaagatcaagcacaagcacaagaaggtaaagctcgcacgtgctgcagttctacaaggtggacgacgccaccggcaaggtgacccgcctccgcaaggagtgccccaacaccgagtgcggtgcgggtgtcttcatggccaaccacttcgaccgccactactgcggcaagtgcggcctca

SEQ ID NO: 63047 - DNA, 264 bp, Zea mays
ggcatcctcaagcttctcgaatctcaccttgtgccgtcttccaccgctcccgagtccaaggtcttctatctcaagatgaagggtgactactacagataccttgctgagttcaagactggagctgagagaaaggacgctgctgagaacactatggtggcatacaaggctgctcaggacattgctttggctgagcttgctccaactcaccctattaggcttggactggcactcaacttctcagtgttctactatgagattctcaac

SEQ ID NO: 63048 - DNA, 278 bp, Zea mays
cgttcatagaagacaactcgttgccatcattctcaaaggctgttaatcagcgcgacgctgaccttgtctacttctggcagaagtaccggaaattggcagacagctcacatgagaaaaatgaagctcggagggagttgcttgaagtgatggcccacaggtctcatgttgacagcagtgttgagctcattggaagcctactctttggctctgaggacggtccaagggttctgaaagccgtccgtgcagcgggtgagcctctcgtcgatgattggagctgt

SEQ ID NO: 63049 - DNA, 275 bp, Zea mays
aaggaattctgcaaggcatgcagaggaaacaaagttgtgcctggaaggaaatcagtccgccttgacatactgcctggtttggataatgaggataccataaaggtggttcgatcaggtggagaagacccagatggccgtccaggtgatctttatgtgaccctcgaggttcgtgaggatcctgttttccgaagagagaaaggtgatattcatgttgatgctgtcctgaatgtgactcaggcaattttgggagggacagttcaagtcccaactctcag

SEQ ID NO: 63050 - DNA, 256 bp, Zea mays
attttaaagtggctcgggccccatggtagtgattgtggcatagtgaatgtgaacatacctactaatggtgctgaaattggtggagcatttggtggagaaaaagcaactggtggtggacgagaagcagggagtgattccctggaagcagtacatgaggagggcgacttgtacaatcactaatgggagcgagctacctctagcccagggaatcaattttggttaatcctgcagaaatgttgcgcgtggatctcggtgt

SEQ ID NO: 63051 - DNA, 277 bp, Zea mays
gcttagagactgatgaaatccctttggtcgtcaatgatttcagggtagctgctcgaaatgcgattgaagctggatttgatggtgtcgaaatccatggagctcacggttacctgattgatcagtttctaaaggacggggtcaacgaccgcacagacaaatacggtggcagtctggagaaccgctgccggtttgcactggaagtaactcaagccgtggtcgacgaaattggagctgacaaggtcgggataaggctgtcaccattcgctagctactcgga

SEQ ID NO: 63052 - DNA, 272 bp, Zea mays
cgcgagacttgtcccttccaccagtaaagctccattgcagcatgcttgccgaggatgcgattaaagctgctgtaaaagactacgaagccaagaagtcgaagatggggcagaagggtgaagacagcccttcagagaaggctgctgaagcatgaaagcgttctgccgtgaagtatattgtgctgatacgtttctcagtccatgactatccgccgcatattgtcaaagataaatgattctgtttgtgaggcgagggattgtgtgtaatgttcacg

SEQ ID NO: 63053 - DNA, 264 bp, Zea mays
gtaacttctcctcaaagaaattgggtgatttgcttgctgtagctcgtgtacctccagctgttgatcaggtggaatgtcatcctggttggcagcaaactaagctccatagcttttgtcagtcaactggtgttcatctaactgcttactcaccactaggttcacctggtacaacttggatgaatggtaatgtccttaaagaaccaataatcatctcaatagctgagaaaactcgggaaaacttctgcacaagtggctctgcgctgg

SEQ ID NO: 63054 - DNA, 266 bp, Zea mays
tctacacacatacatagtttctgctactacacgacgacaaacatggggaagcctgcgaagatcggagagtggggtggatacgccggcgatcgtcgggatctgagggctactccggaccggctgatcgaggtgaaggtcacggcggacaacagcagctgcatccgctccatctccttcatctacatcggagccgatggcaaaccgtacgaggaggggccatggggtttcggccatgctggcacggagtacaagattgatctgtgcag

SEQ ID NO: 63055 - DNA, 231 bp, Zea mays
gctgtctgtggtcgggtagcaggtgtgattgccaagaagtatggagacacaggttttgctggccagctcaacatcacgttcaatggaagtgcagggcagtcctttggttgtttcctgactcctggaatgaacattcggctagttggggaggccaatgattatgttggaaagggtatggctggtggagaactggtggtagttcctgtagacaaaacaggatttgtccctgga

SEQ ID NO: 63056 - DNA, 214 bp, Zea mays
caggcctcagaagggcttgaatttccaaatcctaacgaggattcacgtttcgatatcttgaagtctattcaagacaaatgaacttgatgcgtggcattgatctgaaaaagatcgcggaaaagatgaatggggcctcaggagctgagctcaaggccgtctgcacagaggctggaatgtttgctcttcgtgagagaagggtgcacgttacccagga

SEQ ID NO: 63057 - DNA, 256 bp, Zea mays
gatgaatctgctgcgctgataattattggatgaatttcgataattattagatctaagagatgcgccgacttgaagaggcgaggtaaggtgcaacatgtataagacgtgacatgctatagaggcctttgccatggtgggtgcgctcgcatggcaggccacggtactaaaagaagatatttttgtgtcctgggggtggagatcgcacgggggattgttttttggccccgggttctcctccctcgtggtgttccgtgtc

SEQ ID NO: 63058 - DNA, 211 bp, Zea mays
aaatttaagcagcaccctgctgtatgaaaacttttggaaggtggaacagctattcagtatggtgcacgtactctcaatgaaggtggtttccagtcaataccatatccaattttccctggaggtgcaattattggatgctctgcaggatttctaaatgttctcaaaataaaaggaacccatacagctatgaaatcatgtatgcttgcggcgg

SEQ ID NO: 63059 - DNA, 231 bp, Zea mays
ggcggagatgatcgaggtggtgctcaacgaccgcctggggaagaaggtgcgggtcaagtgcaacgtagacgacaccatcggcgacctcaagaagctggtggcggcgcagacggggacgcgccccgagaagatccgcatccagaagtggtacaacatctacaaggaccacatcaacctcaaggactacgaggtccacgacggcatgggcctcgggctctactacaactgaag

SEQ ID NO: 63060 - DNA, 284 bp, Zea mays
  unsure (1)..(284): unsure at all n locations
gttcactcaggtcgtcttcctgaaggtggacgtggacgaagtgaaggaagtcaccgcggcctacgaggtcgaggcgatgccgaccttccacttcgtcaagaacggcaagacggtcgcgaccatcgtgggtgccaggaaggacgagctcctggccctgatcgagaagcatgccgcgcctgcgcctgcgactgcgtctgcctaaatgagatcagatcagtcgtcgccgtcaataagggccagcacgtatggctgtaaatgttgtcngtatcagttctggctttgtc

SEQ ID NO: 63061 - DNA, 187 bp, Zea mays
gcaacaagtggaaacacaggcattggtcttgcttgcattgctgcttccaaaggatataagctgatactaacaatgccttcatcaatgagcatggagagtagagtcctcctcagagcttttggtgccgaacttgtccttactgatgctagcaaagggattataggggccttagatactgctacagaga

SEQ ID NO: 63062 - DNA, 259 bp, Zea mays
ggcgccgatggtgtagatcacaggaccagtgggcaatgagatgctcatggcctatgaccccaatgcaacagtgatcatgcgcgctacggggattcggtattgctccgtatccgtctcttcttgtggttgatgttcctgtatgagcaagaggactacaagttcaccggtcttgcgtggctgttcttgggagttccgacgagcgacagcctggtgtacaaggaggagtttgagaacactatggacatggcgccgggcaact

SEQ ID NO: 63063 - DNA, 247 bp, Zea mays
cggctacgcctcgtgctggaatgtcacacgtaccacatcgccgtgtagttctcggaactggtcaccaatatcgaccggcggtccggcaaggagctggagatcgcccccaagtttctcaagaacggtgacgccggcttcgtcaagatgatccccacgaagcccatggtggtggagactttctccgagtatcctccactggggcgcttcgcggttcgcgacatgaggcagacggttgctgtcggcgtga

SEQ ID NO: 63064 - DNA, 264 bp, Zea mays
cgtagcataactggatacggtagcgataccatgacatcaataggaggatagcatgccagcaataggagaacggtcgcaaacgtatatttactcggtttgacttctgtactttaatgttgaataaataagatatataatgtgcaatagccatttctatttttgtttttagcattgagtctgtaaaagttcataaaagataaatctcaaatttattatatatcttctcttcttaaataagattcggatacaaatttagagttttta

SEQ ID NO: 63065 - DNA, 294 bp, Zea mays
gaacagagtttcgataaccgacaggatgtgggcaaggcttctctcgtcgacgaaccagccaagcttcctttgcaacaaagtcgtcgaggaggcaaagaaggaacatgaaagagcaacgcgacttttagatggctcgccttcccatcgaaaaggttgacgtcgagaaggttgcggcttccaacttgggtcctactaccaactgaggtcgactgccgctgatatgtgcggcggatgaaccttttgcttaccacggtttcagtagctacggcgaccggtgtttctctcatccgagtt

SEQ ID NO: 63066 - DNA, 282 bp, Zea mays
accgtcgacaacgtcaaagccataatccaggacaacgaagggattcccccagatcaacagcgactgatattcgctcgctagtagctggaggatggacgcacgctggctgactacaacatccaaaaggagtcaactcttcattcggtcctcacgcttaggggtggaaccatgatcaaggtcagaactctcactgggaaagagatcgagatcgacattgaacccactgactcgattgacaggatcaaggatcgtgttgaagagagagaaggcattctcccgtgc

SEQ ID NO: 63067 - DNA, 216 bp, Zea mays
acggcgccgtcgctgcagacttctccttttcgatcccttcacaaagcgccgccgtcgccccatcgaacatggctccgaagaaggataaggccccggccccgtcgtcgaagcccgccaagtccggcggtggcaagcagaagaagaagaagtggagcaagggaaagctaaaggagaaggtgaacaacgcggtgctgttcgaccaggctacctacgaca

SEQ ID NO: 63068 - DNA, 191 bp, Zea mays
gtacaggctaaagtgccgtggaagatgcgccgtagaatcggttaacgagggccttgtatgagcccgctcagcggtcgagattgtagagacatgccacctggaccagcttctccatcctcagtttgacgacccgtcggcgtacaaggatcaagtcattgccactggtctgccagcctcacctggggctgctg

SEQ ID NO: 63069 - DNA, 282 bp, Zea mays
agcatctggattggcgaaactgaaaccagtttttaaaaaggatgggactacaactgcaggcaattccagtcaagtgagtgatggtgctggagctgttcttctcatgaaaagatctgtggctctgaagaaagggctgcccattcttggtgttttcaggagctttgcggctgttggagtggatccagctgttatgggcgttggtcctgccgtggccattcctgctgctgtgaagtctgcaggccttgagattggagacattgatttgtttgaactgaatgaggc

SEQ ID NO: 63070 - DNA, 287 bp, Zea mays
agcgaatcggcgaaaatggatgctggagacgaagctcaagagcttactcacgcggatcatacagccacggttagcaagcggtgagcacggaaacgatctgctgggcgtgatgctggactcctgcactgagaccaagcaaggagggaagcagcagcaagtggatcgtctgcgtctcagcttgagcatggaggagatcatacacgagtgcaagctgttcttcttcgctggccacgagaacacagcccttctcctcacgtggtccgtgtatttgctcagcatataccccg

SEQ ID NO: 63071 - DNA, 280 bp, Zea mays
gatcatcgccgcatacctcatgccccccatcgagtctggctcggttgatttcgccgaatttgagccccggctcgtttactgattctgtacaaagatttatccttgagttattcaccctgaaagacaagctgctggtgctttctgccgaaggggccttgaatgaatggtgaaaaccgctggatggttagaggatctgcatcttcttgtgttcttctgtaaaataatgagacttgggcagcataaaaagcttggcaaatttctgttgtgtggcatctccatg

SEQ ID NO: 63072 - DNA, 283 bp, Zea mays
actggacattacgagctgaggagattccagaggaagagaagaatcttggcccacatgaccgtttgattcatgtttatcattttatgaaagaccctaatcagaatcagcagattcagaatttcggagatccttttttgatggttatccgtgaagttgagactgctgcagaggtactggagcgcatccaaagaaaacttagagttccggatgaggacttctccaagtggaagcttgcattcatatccatgaaccggccagagtacctccaggacactgatgttgt

SEQ ID NO: 63073 - DNA, 283 bp, Zea mays
caagcaagcaagcagcgagtacatacatactaggcagccaggcagccatggcgcccaccgtgatgatggcctcgtcggccaccgccgtcgctccgttccaggggctcaagtccaccgccagcctccccatcgcccgccgctcctccagaagcctcggcaacgtcagcaacggcggaaggatccggtgcatgcaggtgtggccggcctacggcaacaagaagttcgagacgctgtcgtacctgccgccgctgtcgacggacgacctgctgaagcaggtggacta

SEQ ID NO: 63074 - DNA, 282 bp, Zea mays
ctttgttcactttgcagaaagatcaagtgcattgaaggcagtaaaaggaagtgaaaaatatgaaatcgatggtcaagtactggaagtgtccatggccaaaccattggcagataagaaacctgatcattcacacaggcctggaggaggccctaattatccccttcctccctatggtggtggtggctacatgggagatccatatggtgcttatggtggcggcggtcctgcatacaaccagccaatgatatatggcagaggaccagcaccggcaggaatgaggat

SEQ ID NO: 63075 - DNA, 276 bp, Zea mays
atgacggtgaatcaattttgaatgttgttgctgttcattcaactctccatcttccttttgaccacaatatgtatggccagaaccttactgttcagaatttcttcaattcatcagttcctgtttctgtgcaagcaaccttcccctacaagttcgttgtgagcaagttcttgcagcctggagcatatgatctggttggttacatagtgtatgagatcgaccagcacccttaccagaatgtattctacaatggcactatcgaggttgttgaggctggag

SEQ ID NO: 63076 - DNA, 279 bp, Zea mays
aagaaaatgatccgaaggaggttcaagtgtccgaactgtggagaattggggcacagaaaaaatagctccaaatgcccactaaatgggacaaagaagaggaaaagagcgccaaggaagaatacaactaaaggttggtttcctaaagaagtgcctacatcatcacaggcagcacccaatattactcctccaagtgatgatgtgcctgcatcttcagagattgtgctcacaatgcctcctccgccaggagaggatgtgcttgcatcttcacagatagtgcaa

SEQ ID NO: 63077 - DNA, 278 bp, Zea mays
agaggtacaggtattggtggtggaaatgatgaaagggaacagactctcaatcaactactaactgagatggatggtttcgagggcaacactggaattattgttattgctgccactaaccgggctgacatcttggattccgctttacttagacctgggcgttttgatagacaggtgtctgtcgacgttcctgatgtacgtggaaggacagagattctaaaagtgcatggtagcaacaagaagtttgattctgatgtttctcttgatgtcatagcaatgag

SEQ ID NO: 63078 - DNA, 277 bp, Zea mays
gtggtgggggatggcgctcaaggacgagtccaaccctcagatagcgcttctgccgctgcaccccgatgtacgggcaaggttcgacgaaagcgccgcgtgggaattcgcccggagcatgtgcgggaaaccctacggctaccacaacatgatatttagctggatcgatacggcgtcagacaattacccgcctcctcttgacgccaacctggtaatggccattatgtccatgtggaccagactgcagccgcgctatgcttccaacatgtggaacgaagca

SEQ ID NO: 63079 - DNA, 276 bp, Zea mays
gaacctttgcacagcaagtttcgtcttcaggaaacttttaggagaccacttcttagttctgatccagcaattactgtccaccaaatacagccaaatgataagttcatcatttttgcatctgatggactctgggaacatcttagtaatcaggaagtggttgacatggtccaaagtagcccgcgtaatggaatcgcacgaaagttagtaaagtctgcagtgcaggaagcagcgaagaagagggagatgcggtattcagacctcaagaaagttgatcgg

SEQ ID NO: 63080 - DNA, 274 bp, Zea mays
ataaaagatcccctcactgcattccctctgagcgccgccactccctgacatcgagaccggctgcccgaccccggtccggcgatccctctgcacccctttctttgcgctgccagccccaatctctcgcatccctgtcaaccatggcggcgtcacaggcggaggcgcggtgcggcgctgtcccagaaggagcaggacatacagatgatgctcgcggccgacgtccagctcggcaccaagaactgcgatttccagatggagcggtatgtctttaagc

SEQ ID NO: 63081 - DNA, 279 bp, Zea mays
caagaaggctgcagctgcaggcttcttgaagtccttcaacaaggaggagattgacaaggagattgaggacaagaagacagagctggagcccaaggtcgtggaggcctacgaagcatctcctcctgaggtcaaggctctgttcaaggataagaagcgagtcaaggtcagcaagaagaactcggctgcagtcaccaagttcctcgatgagctggctaagattgacttccctggagccaaggtggtgagcgaggcggtggccaagtccggcacctcgcccct

SEQ ID NO: 63082 - DNA, 277 bp, Zea mays
cgcagatgacctttgggtacagcagggatgatgtggggaagttcattcccgtctatcttgctcagggcatcctccaacatgaccccttcgaggtcctggaccagaggggagtgggcgagctggtgaagtttgctacagagaggggccgcaaagctaggcctaacttgaaggtgggcatttgtggagaacacggtggagagccttcctctgtggccttcttcgcgaaggctgggctggattacgtttcttgctcccctttcagggttccgattgctag

SEQ ID NO: 63083 - DNA, 273 bp, Zea mays
ctttatgcaaatgaccgggagtctatctctgttactgtgcaagaggtaactcctagagctgttggagcactgattgcactttatgaacgtgctgtggggatttatgcttctttggtaaatatcaatgcctatcatcagcctggtgttgaggctgggaaaaaggcagcaggagaagtattggcccttcagaaaagggttctgactgtattaaaggaggccatctgcgagaaccctactgagccattgactctagatgaaattgcagatcgctgc

SEQ ID NO: 63084 - DNA, 273 bp, Zea mays
gaagaggatccagaaggagctcaaggatcatctcaaggaccctcccacctcgtgcagtgcaggtcctgttggtgaagatatattccactggcaggcaacaataatgggtccatctgatagcccatattctggtggagttttcctagttacaatccattttcctcccgattatcctttcaaaccaccaaaggtggcattccgcaccaaggtgttccatccaaacatcaacaaatatcggagcatctgccttgacatcctgaaggaccagtggag

SEQ ID NO: 63085 - DNA, 272 bp, Zea mays
ccgggagcctgcgacatggggtacctccaggaggcccgggagaatcacgtcaagaagaaggtcgaggaagctctgaggagcaaaatgaaacaaaaggctcttcaggaatgtgatttctattgttcaaaatatgctgagtgtgcacgaggaagaacattttctgtggtatggcaatgccgcaaacaagcaaaagagttgaatgagtgccttcatcaatacacaaatgatgcaatcctggaagaaatgaagaaggcttatatgattgagcaaaa

SEQ ID NO: 63086 - DNA, 275 bp, Zea mays
aaaacagcaaccatcgctggccattccatacttgccgcgatcctatggagctgcgcgcgatcggtggacttgacgagcaaagccgcaataacgtccttctacatgttcatctggaagctgttctacgcggagtacctgctcatccctctggtgcgatgagcgcgaggcgaggtggtggcagacggatcggcgtcggcggggcggcaaacaactccacgggagaacttgagtgccggaagtaaactcccgtttgaaagttgaagcgtgcaccaccg

SEQ ID NO: 63087 - DNA, 264 bp, Zea mays
gttgttcggagcgggcagcagcacacagccccatcccaatcctagtcgatcttcttcccctcctcaaggaagaaaagaagctgaaccatggggaggagaaagtcagctgctaagccacctcctaagaagcggatggacaagcttgacactgtcttttcctgcccattctgcaaccacgggagtagtgttgagtgccgaattgacatgaagaatctgattggcgaagatcttgtagaatctgtcaggaaacttcagcacactgtt

SEQ ID NO: 63088 - DNA, 269 bp, Zea mays
gagcaagaaggctgtggagaactccccgttccttgagaagctgaagaagaggggctatgaggtgctgttcatggtggatgccattgacgagtattctattggacagctgaaggagtttgagggcaagaagctcgtctctgccaccaaggagggcttgaagctggacgagagtgaggatgagaagaagcgcaaggaggagctcaaggagaagtttgagggcctctgcaaggtcatcaaggaggtgctggcgacaagtggagaaggtggtg

SEQ ID NO: 63089 - DNA, 271 bp, Zea mays
gaacagagtttcgataaccgacaggatgtgggcaaggcttctctcgtcgacgaaccagccaagcttcctttgcaacaaagtcgtcgaggaggcaaagaaggaacatgaaagagcaacgcgacttttagatggctcgccttcccatcgaaaaggttgacgtcgagaaggttgcggcttccaacttgggtcctactaccaactgaggtcgactgccgctgatatgtgcggcggatgaaccttttgcttaccacggtttcagtagctaggcgac

SEQ ID NO: 63090 - DNA, 272 bp, Zea mays
tatggggagaaagtgcttattcagtttgaggattttgccaaccataatgcttttgatcttcttgcaagatatggcaccactcaccttgtattcaatgatgatattcagggaacagcttctgtggttcttgctgggcttattgcagcacaaacattacttggtggttcattggcagatcacacttaccttttccttggtgctggagaggctgggacaggtatcgctgaacttatagctcttgagatctcacgtcagacgaaagctcctataga

SEQ ID NO: 63091 - DNA, 271 bp, Zea mays
gcagcggctcatctttgctggcaagcagctggaggatggccgtacccttgcggattacaacatccagaaggagagcaccctccacttggtgctgcgtctcaggggcggcatgcagatcttcgtgaagacacttactggcaagacaatcacccttgaggtggagtcctcggacaccattgacaacgtcaaggccaagatccaggacaaggagggcatcccaccggaccaacagcgcctgatcttcgccggcaagcagctggaggatggtcgc

SEQ ID NO: 63092 - DNA, 266 bp, Zea mays
ggaagggttggtagccctatcttcgtgtcggaagttacagcgtgtgctcttctcttgtgttcgaatgacaaacacggcgctgatgacaatagcaaggtactgcccacggctaacgtccttcagactatgcattcgcaagcccaggtcagcaaacgccgtcacaggacagccactggacgaaggctttggggcgatagtgcggtcctgcagaggcctgaggcgtcttgccatgtccggcctcctcacggacagcgtgttcctgtaca

SEQ ID NO: 63093 - DNA, 265 bp, Zea mays
ggagagtgacgatggtggtgagggagagaatctcccccctggttcatatgtaatcttgcaactggaaaaggaggagattttagcaccacatactcatttctgcttgatctgtggtaagggtttcaaaagagatgctaacctaaggatgcacatgaggggccatggagatgagtacaagactccagctgctcttgccaaacccacaaaagattatggtgcagatcatgcaccggttacaaggtactcatgcccatttgtgggttgc

SEQ ID NO: 63094 - DNA, 266 bp, Zea mays
atgaaatgcccattatgttccctttttctgcaatactaaagaagctggatttgcaatacactttcctcaccactgaggaccattgccagctcattgcaaaatgcccgaacttactagttctcgcggtgaggaatgtgattggagatagaggattaggagttgttgcggatacgtgcaagaagctccaaaggctcagaatagagcgaggagatgatgaaggaggtgtgcaagaagagcagggaggggtctctcaagtgggcctgacg

SEQ ID NO: 63095 - DNA, 269 bp, Zea mays
gcaagcggttccgaacgcgcagtactgaggttgttcgattggtagagctacttgatgaggctaaatctcggagcaaatcagaactactacaacggctcactgaaaatggcaaaattgttgactggacggatgaggaattagagcaaacttcagaggcagttggatatggtgctgtgaagtatgctgatctcaagaataatcgtctgactaattacacatttagttttgaacaaatgctgagcgataagggaaatactgctgtgtacctt

SEQ ID NO: 63096 - DNA, 183 bp, Zea mays
gcagcggctcatctctgctggcaagcagatggcggatggccgtacccttgcggattactacatccagaaggattgcaccctccacttggtgcagcgtctcagctgcggcctgcgcatctaggcatgtacattggctggctagaacactacctgggcagaggaaacgtctgacccaacatcact

SEQ ID NO: 63097 - DNA, 271 bp, Zea mays
caatgttacgaatgttgctgtgaaggatcttaagcgtgggtatgtggcctccaactcccgggatgaccctgccaaggaggctgctagcttcacgtcccaggtcatcatcatgtaccaccctgggcagattggctacggccatgcgccagtgctggactgccacacctcgcacattgctgtcaagtttgcggactcattaccaagattgatatgcggcctggcatagagcttgggcaggagcccaaattcctcaagaatggtgatgctggta

SEQ ID NO: 63098 - DNA, 267 bp, Zea mays
ggcgaaaaaaatccgtgtgcacatccttactgatggacgtgatgttttggatggaagcagtattggtttcgtggagaccctagagaatgatcttttggagcttagagcgaagggtgttgatgcacaaattgcatctggtggtggaaggatgtatgttacgacggaccgttatgagaatgactgggatgtggttaaacgtggttgggatgcccaagtgcttggagaagcaccctacaaattcaaaagtgcacttgaggctgtgaaaac

SEQ ID NO: 63099 - DNA, 281 bp, Zea mays
cacttaaccgggggttagaacctgggcaaatgccagaagcaacagtagaggaaaccattgaaatcctcagaggactgagggaacggtatgagatccaccataaacttcgtgacactgatgaagctctgattgcagctgcaaagctgtgatatcaatatatcagtgatcggtttctcccagataaggcaattgacttgattgatgaagcaggtgcccgtgttaggctacagcatgcacaggtccccgaggaagcaagagagcttgacaaggagctcaaacaa

SEQ ID NO: 63100 - DNA, 276 bp, Zea mays
gatctttcccccgtcctccctcgccttcgcctcgccggcaggagatttccaccaccaccgccggaccaccccgaccctccttccctctcgcgctatggcccagactgttgtgctcaaggttggcatgtcctgtgagggctgtgttggagctgtcaagcgggtcctgggcaagatggaaggcgtcgagtcctacgacgtagacatcatggaacagaaggtcaccgtgaagggcaatgtgacacctgacgccgtcctgcaaactgtttccaagactgg

SEQ ID NO: 63101 - DNA, 271 bp, Zea mays
ctcgggtcaaaccctaagcagggagttgattactccgctgcagccatgagtaagttgcagtctgagtctgtcaaggatgccatctcccagattgttggggatgccaaggagaagaataggaagttcactgagactgtggaacttcagattggtctgaagaattatgatccacagaaggacaagcgtttcagtggctctgttaagttgccccatatccctcgtcccaagatgaaggtgtgcatgcttggtgatgcccagcatgttgaggagg

SEQ ID NO: 63102 - DNA, 277 bp, Zea mays
cttgtttcagtcattatatgcttcatggcgctactctccgatggctacgataagtttatgtttacttgctcaggcatacaatcacgcaagctgggttattcagtcactgggagaagaagacataaatgtgaattttttggttcaattagataaattgatccgtctcttagagactccagtatttgcttacttgcgtttacagcttctcgagcctggaaaacacacttggcttctgaaaactctttacggtctcctgatgcttttgcctcagcaaagt

SEQ ID NO: 63103 - DNA, 271 bp, Zea mays
gggatttcgttgctcttcccatttgtggatggccatcctccgctaggctggtatgacacgatatgctaccttgtattgcctgtgctacttgttgcttctcaatatgtctctatggagatcatgaagccacctcagagtgatgacccgtcacagaagaacacactcctcgttttgaaatttcttccatttatgattggctatttctctttgtcagtgccatcaggattgtctatttattggttcacaaacaatgtcctcagcacagcacagt

SEQ ID NO: 63104 - DNA, 265 bp, Zea mays
ttttgtttcaattgtcaggtggttgagattcctagaggcagcaaggttaagtacgagttggacaaggcatctggtctgatcaaggtggaccgtgttctttattcctctgttgtttacccacataactatggcttcattccacgcacactctgtgaggataacgaccccctggatgtcctcatactgatgcaggaacaagttgtccctgggtgtttcctgcgagctcgtgctattgggctcatgcctatgatcgatcagggcgaga

SEQ ID NO: 63105 - DNA, 255 bp, Zea mays
cgcctgcagtcttgcaaagcaggcttttgacgaggccatctcggaactggacaccctgagcgaggagtcctacaaggacagcactttgatcatgcagctccttcgtgataacttgaccctatggacttctgacatctcggaggaccctgcggaagagatcagggaggcgcccaagcacgactcgagcgaggggcagtaaagccggctttacgtgcctagaagctagtacctagtgtttgctgctgtctaatgaca

SEQ ID NO: 63106 - DNA, 242 bp, Zea mays
aacggccataattgcccaggtgaacgaagcgatcggggcagacgggatcatcagcacggagtgcaaggaagttgtgagccagtacggagagatgatcctcgacatgctcatcgcacagacggatccacagagggtgtgcagccaggttggtctgtggctgttcgatggcgctcgatctgtcagcgaggggattgaatctgttgtcgggaaagaaaacctgggctcagatgtcatatgctcgg

SEQ ID NO: 63107 - DNA, 273 bp, Zea mays
gatcagagtctgagacggaggccgatccaccaccgcagcgacgagcgggaggagatgaagatcatcattgacacggatcccggcatcgatgacagcgtggccatcctgatggcattccagatgccgggcgtccaggtcctagggctcaccaccatcttcggaaactgcaccacagagcatgccatacgcaacgccttgatcctgtgcgagaaggcaagccatctagaggtcccagtagctgagggcagccatgagcctctcaagggaggaaag

SEQ ID NO: 63108 - DNA, 269 bp, Zea mays
ctcgcagctgcacgtgatgctggccatctgctacagcgggcgatgggacatggtccaggcgtgccgggagctggcccgggaggcgcaggcgaaccggctcagtccggacgacatcgacgagtcgatcatcgccggcaagctcgcgacgagcgccgccggcgagttctcctgtcccgacctggtcatcagaaccagcggcgagatgaggctcagcaacttcttgctatggcagtcggcgtactcggagttgttcttcaccgccaagatgt

SEQ ID NO: 63109 - DNA, 263 bp, Zea mays
gcttgtcaagaacggtgtgatttctatgtcagcggcgactggatttcctaggtttgatctccagcttctgggcatgggacctgatggccacattgcgtctctcttccctgaccaccctcttgttaacgagaaagagaggtgggtcacatacattaaggattctccaaagccacctccagagagaattacattcacgtttccagtaatcaactcatccgcatacgttgcgatggtggtgactggagctggaaaggcggcacggt

SEQ ID NO: 63110 - DNA, 261 bp, Zea mays
  unsure (1)..(261): unsure at all n locations
caacagtggagtcctgctttaactatctcaaaggttctcctgtcaatctgctcacaacatccnganccaaaccctgatgatcctcttgtccctgagattgctcacatgtacaagaccgacagggccaagtatgagtccaccgcacgctcctggacacagaagtatgccatgggctagaagcaaggctaaaagctggccaaactggtgaatgtgccggaccccaaatcgttatcacctaaataaccagtcaagtcgcaagta

SEQ ID NO: 63111 - DNA, 273 bp, Zea mays
gaggaatccaatgactgtccggtgttcttgtgtttctctgtgaacacaagttgtcagtttgctggtgttgctgaaatggttggtcctgttgactttgataagactgtggagtattggctacaagacaagtggaatggttgttttccactcaagtggcacatagtcaaggatgtgcccaacaacactttgaagcatatgacactggataacaatgataataagcctgtgacaaacagccgtgacacacaagaggttaagctggaacaaggtctt

SEQ ID NO: 63112 - DNA, 258 bp, Zea mays
gaggaactgagcggtggggcccgcgcggccaagttatcctgttcgctaccgtgatgtttaccctagtccagagggtttatcttcgttcgtctcgtttgttgttgcccatctgtgtttttgattgcaaggtcgctctgtgtcagttgttagtgctgtgttcatcctcggctccagcagacccatgcatcaaccagcatggactgtggatcgatggatgctgttactcctgtcaggatttgttctaagttaatcctaagg

SEQ ID NO: 63113 - DNA, 263 bp, Zea mays
gaggaactgagcggtggggcccgcgcggccaagttatcctgttcgctaccgtgatgtttaccctagtccagagggtttatcttcgttcgtctcgtttgttgttgcccatctgtgtttttgattgcaaggtcgctctgtgtcagttgttagtgctgtgttcatcctcggctccagcagacccatgcatcaaccagcatggactgtggatcgatggatgctgttactcctgtcaggatttgttctaagttaatcctaaggaaaaa

SEQ ID NO: 63114 - DNA, 260 bp, Zea mays
cggcggaggaggtgtggaaggagatcactggcggaggtggcagtggggaagccgtggctcccgtggcggctcaggctgtcgctcccgatggtggcgctggcacaggcggcccggaggtgacgctggaggacttcctggccagggagagcgcggtgaaggaggatgaggttaagatttctgtcccccccgcgccggtcatggggttaccgggcggacggagggcgtgagtgtgcctggcggcggaggcgggagggaacgga

SEQ ID NO: 63115 - DNA, 261 bp, Zea mays
ccgcgtgcgaaccaagcagaccccagcagaagaagcgaagtcgtcgccggagcaggaggaagagcgagcagcaagatgtcgtggcaggcgtacgtcgatgaccacctgctgtgcgacatcgaaggccagcacctcagcgccgccgccatcgtcggccacgacggcagcgtctgggcacagtccgagaacttccccgagttaaagcctgaggaggttgctgggatgataaaggactttgatgaacctggaactcttgcacca

SEQ ID NO: 63116 - DNA, 276 bp, Zea mays
attcctctgtgcttgcgaactatggagatgggtagtgagctatccaaaactgtggcaactttcatcgtccagaagattcttctagatgatgttgggctgcgctacatttgtgccactgctgagcgtttctttgcggtagcagtggttttagcaaacgtggttggttcacttgctgatcagccctccacaacgctgctgaagcacatcattcggtgttacctccggctgtcatataaccctagggcttgtgctgcattgcagagctgccttccaaac

SEQ ID NO: 63117 - DNA, 274 bp, Zea mays
gtggattgttccaagaagtaatcatcacaaggaccatccctctgaaggaggagaagagttttccgcagctgactattgtttcggttgctaacctcttgggggaaacaatctggcgcgttcacgatgattgctcggttggtcatgagccatactccagcttggatattgactgatgcttaaggaatagttgtggcagctcgcaaccttctctttcttttcttttggcctcggtttttgtctgtgcgtgtaataagcaatgtttttgtggaattct

SEQ ID NO: 63118 - DNA, 276 bp, Zea mays
cgactttgtcactgcagaagatgtccagaagagcaggatcttctatatcctatggtccccatcctccgccaaggtgaagagcaagatgctttatgcaagctcaaaccaaaaattcaagagtgggctcaatggcattcaggtggaactgcaggctactgatgcaagtgaaatcagccttgatgagatcaaggatcgggctcgctaggcatcatcatgatcatgcatcatggacttggcctactactgtggatttgtatgccattatagacttggtgc

SEQ ID NO: 63119 - DNA, 278 bp, Zea mays
ggcacaaaccctgctaacgatgacaacacgttcatagaagacaactcgttgccatcattctcaaaggctgttaatcagcgcgacgctgaccttgtctacttctggcagaagtaccggaaattggcagacagctcacctgagaaaaatgaagctcggagggagttgcttgaagtgatggcccacaggtctcatgttgacagcagcgttgagctcattggaagccttttctttggctctgaggacggtccaagggttctgaaagccgtccgtgcagctgg

SEQ ID NO: 63120 - DNA, 279 bp, Zea mays
ttttgattcactgagcaccaacgtaacaactgagagcaagcaacatgaagagaagaagcctaccaacatgaatgcatttgatataatatctctatcaactggtttggacctctctggtttatttgaagaatctaacaagaagagagaatccaaattcacatctaccaacacaagctcgacaatcatatcgaagatcgaagatattgcaaagaatttgcggttgaatttgacaaaaaaggatggtggcttgttaaagatggaagcttcaaagcccggaag

SEQ ID NO: 63121 - DNA, 273 bp, Zea mays
gggtggtgcttcaggatctgcagctgtgactgactctgctatggcagaagctggtgcagttgaccctgacttggcattggctcttcaaatgtctgtccaggatgcaaacatgtccagtgacactgatatgagtaaggtgtttgaagacagaacgtttgtgtcatctatccttaattcgcttcctggtgttgatcccaatgatccatctgttaaagatttgctggcatcgttgcacagccagggagagcaagagaagaaggaagacacgtcaga

SEQ ID NO: 63122 - DNA, 267 bp, Zea mays
caacaacaagcaatatagaggtaagctggacaaagttgctgtcctgaaagcgatctgttcaggatttgaggagacaactgaacctgctatttgtttgagcgaagagattcaaacaaatgagtgtttggagaacaatgggggttgctggctggacaaagctaataatgttactgcatgcaaggataccttccgcgggcgtgtttgtgagtgccctattgtgagaggtgtaaaatttgttggtgatggatatacccattgtgaagcttc

SEQ ID NO: 63123 - DNA, 239 bp, Zea mays
tatgtcgttgcgccgaccccgatgctgacggcgttctgggacgaggtgcgctacgtggtgcactgcgatcaataaggactatccgtggtggcccgtgctggacacccgcgacatgctggtggagtctgctgaccaccatcatgtgggtcatctcctggcaccactcggccgtcaactttggccagtagcacttcgccggctacttccccaaccggtcgagcaccatccggaagaacatg

SEQ ID NO: 63124 - DNA, 277 bp, Zea mays
gctcccaggaagcagcttgccaccaaggctgcccgtaagtctgcccccaccactggtgtagtgaagaagcctcaccgctaccgccctggaactgtggctctccgtgagatccgcaagtatcagaagagcactgagctgctgatcaggaagctgtccttccagaggctcgtcagggaaattgcacaggacttcaaaacttatttgcgtttccagatccatgcggtgcttgccctccaggaggctgctgaggcataccttgttggcctgtttgatgaca

SEQ ID NO: 63125 - DNA, 274 bp, Zea mays
gcaccgtcaaaggcacctggctgagcaacccctccctctctccctcttatccccaaggcgaggagcggaggaagaggagggcccttctgcttgtttctccgctttgcaagatgtcgtccccgatcaagcgccgcgagatggaccttatgaagctgatgatgagcgactacttggtggagatggtgaacgacgggatgcaggaattcttcgtcgaattcaagggcccggccgaaagtatctaccaaggtggtgtctggaaggttcgggtagaact

SEQ ID NO: 63126 - DNA, 274 bp, Zea mays
caagtttttactgactactcaattgtctgttgagggccccatcaggatgaaagaggaatatgttgagggccttatagagattcccagaatcaatgaagaatcattgcctgaacagttaaagggcttgcttggccaaactgcaggagctctacaacaacttcctagccctataagggatgctgtttcagaggggcttaaattgccacttagtggatcatttcaacgcttattcatgatctcttacttggatgaagaaatattgattatcagagat

SEQ ID NO: 63127 - DNA, 274 bp, Zea mays
ggatgctggagaatgatgtaagtgaccttccctatttaacatttagcacggatcctgatgaggaaaaacatattctctatgagagtaccgaggttaccgattatgagctaaaaccgggtggtagaaacatcagacttactgaggaaacaaaacaagaatatgttgaccttgtatctgaacatatactgaccacagcaattcgtcctcaaatcaatggtttccttgaaggcttcacagagttagttccatgggatctaatatcgctattcaatga

SEQ ID NO: 63128 - DNA, 271 bp, Zea mays
ggagattatgggttcgatattgcaggtctgggaagggatcctgttgctttcgcaatctacttcaacttcgaaatcttacattgtcggtgggccatgcttgctgccctcggtgtggttgttcctgagctattagatctatttgggttagtgcattgtgtggagcctgtctggttgtaagttggttatgcataacttcagggtgataaccttgattaccttgggattcctggattccgaattgctggtggtcaaggcgtcgttgtaattgcaa

SEQ ID NO: 63129 - DNA, 273 bp, Zea mays
  unsure (1)..(273): unsure at all n locations
gcgatccattccacacaacctccaatgttttatncccagcccgccgcaggagttgccagatctgctccggacacaggagctccgactccgagccctctccaatggcggttaaggtctacgtcgtgtactattccatgtatggacatgttggcaaactagctgaagagatccagaaaggtgcctcgtctgttgaaggtgttgaagctaaaacatggcaggtccctgaaaccctccctgaggaagtgcttggaaagatgggcgcaccccctaagc

SEQ ID NO: 63130 - DNA, 270 bp, Zea mays
cccgtgtccccgccacaaggaggagcgtccgtgtagctgccgtcgtcgcgaccgaggccgcgcagatcgactacagctcaagcgtctcggtgttcccgatggaggcctgcgacctgctttgtggcgacgcgtgcaacgggcccatgttcccggaggccaagcccgcctcggcggcggctgcggcgagcaggagtgtggtcggggtggacagggactacctgtcctacgacgagccaaagacggtgttcccgggcgaggcgtgcgatgacc

SEQ ID NO: 63131 - DNA, 275 bp, Zea mays
tttttcttttatggctgttgaccactctctgaagagtgtaagtcgctctcatggtaatgttggtgataagcaagtgaagaaatacagcggaggcatgaaaagaaggctcagcgtggcaatctcattgattcgggaccctaaagttgtcttcatggatgagccaagcacaggaatggacccagcatcaagagataacctatggaatgttgtgaaggaggccaagaaaaaccgtgcaattattcttactactcactcaatggaagaggcagaggtat

SEQ ID NO: 63132 - DNA, 267 bp, Zea mays
gcagcggctcatctttgctggcaagcagctggaggatggccgtacccttgcggattacaacatccagaaggagagcaccctccacttggtgctgcgtctcaggggcggcatgcagatctttgtgaagacattgactggcaagaccatcaccttggaggtggagtcgtctgacacaatcgataatgtcaaagccaagatccaggacaaggagggcattccaccggaccagcagcgcctgatctttgctggcaagcagctggaggatgg

SEQ ID NO: 63133 - DNA, 267 bp, Zea mays
tgccaggtgtctcgagcgctatcatgggctgtattgtcaatggaccaggagatatggctgatgccgattttgggtacgttggaggcgctcccggaaagatcgacctttacgtcggcaagaccgttgtgcagcgcggcatcgccatggaaggtgccactgacgccttgatccagctgatcaaggaccatggccgatgggtggatcctcctgccgaggagtagggctgtaggctgtagccaagtctgtagtttatatatgctgtaaagc

SEQ ID NO: 63134 - DNA, 269 bp, Zea mays
caacaaacgtacttacggaccgtacggcagggacgagggcaccccgttccgtgtcaaggtgatgaacaacggccacgtcgctggcttctttggccgctctggagattgcctggacgcgatcgggctctacgtgaaccccaactaataactaaaacgatggatcggatcatctgcatgcatgcatatgcagtatgctgcttgcctgcctgtaacgaatatgaatgcataaaataacgcccctgctgctcccatatgcatcagcagtgtgt

SEQ ID NO: 63135 - DNA, 270 bp, Zea mays
ctttaattggtgcactgtttcgtcttgttgagccaactggagggacaataattatagactctatagacatcaccacaataggcttacatgacctgcgttcacgtttgggtatcattccgcaagatccgacactctttcaaggaaccataagatataatctagaccctcttgggcaattctctgatcaacaaatatgggaggttctaggcaaatgtcagcttcttgaagctgtccatgagaaggagcagggattggactcacttgttgtgg

SEQ ID NO: 63136 - DNA, 269 bp, Zea mays
cggactggccatacgagtgctgtagattggtgggcgctaggaattcttctatatgagatgttatatggttatacacccttcagagggaaaacaagacaaaggacatttgctaatattctgcacaaggatatcagatttcctgcgagcatacaggtgagcctggcggcaaggcagctgatataccggttgctacaccgagaccctgcaaataggctaggttcctatgagggcgctatggagatcaaacaacaccccttctttcgtggcat

SEQ ID NO: 63137 - DNA, 272 bp, Zea mays
gtaacttctcctcaaagaaattgggtgatttgcttgctgtagctcgtgtacctccagctgttgatcaggtggaatgtcatcctggttggcagcaaactaagctccatagcttttgtcagtcaactggtgttcatctaactgcttactcaccactaggttcacctggtacaacttggatgaatggtaatgtccttaaagaaccaataatcatctcaatagctgagagactcgggaaaacttctgcacaagtggctctgcgctggaacattcag

SEQ ID NO: 63138 - DNA, 268 bp, Zea mays
acctttgctggcccacgagcttggacaactcaagaggtgattactttgtgtgagaggttagctgggcaagatgccaatgtaaccactgtacctgttgcagtcttgagatttactcgtcagttgacacggtgcttccaatggacaaatgatgtggctgacagactggcattttcagaggtgctctcaagtgacacagttttctctgctccaatgaatgagacctaccagcttctcggggtggatgggaatgacatcctcagcttagaga

SEQ ID NO: 63139 - DNA, 269 bp, Zea mays
tttctcctgagcttggtaaccgcgtgcaaagagtccgtgtgcagcttcctggtctaagccaggagcttcttcaaaagttgagggagaagaacatcgattttgctgctcacagcaaccaggaggactctggttctcttctgttcaaccttattggcaatttggcatatcccgcttatccttatcggtggtctgtttttactttcaagaagggcacagggtggcctcggtggacccaatggtcctggctttccccttggttttggtcaatc

SEQ ID NO: 63140 - DNA, 267 bp, Zea mays
ataggctacgtggaggatgatctggtttccaccgacttcaccggtgacagcaggtcgagcatcttcgtcgccaaggccgtgattgccctgaacgaccacttcatcaagctcgtctctgggtacgacaacgagtggggctacagcaaccgcgtcgtcgactcgatccgccacatgttcaagacccagtagagagagatatttctgcctccctatcgagggtcgtccccgatggcctttggtcgcagacagcgtggctgcttgtctatg

SEQ ID NO: 63141 - DNA, 271 bp, Zea mays
tttgaattatgaagcaggcaaattttccaagagtaaaggtattggagtctttggtaatgatgcaaaggatacaaatattcctcctgaagtatggcgatactatttgcttatgaatcgccctgaggcatcagatacactctttacttgggctgatttgcaagccaaattgaacagcgagttgctgaacaacttgggaaacttcattaatcgtgtgctaagttttgttgcaaaaccagctggagctggatatggttctgttgtacccgatgca

SEQ ID NO: 63142 - DNA, 268 bp, Zea mays
gaaaggtattgcgattttgagggaatgggaggcctatttgccgctcttctggcaactggtaccgcccagtgaagaagactcgcctgaggcttgtgcagagtttgagagagtacttgccaagcaagcaaccacccaattgtctgcgaagtgatcgaatcagactacaggaaggtggtaggtgttttctatttgacacaaagtgatctcatcttaacacttcaagaaaatcgaagaccataaccggcgctctgaggcaccgaagtgcccg

SEQ ID NO: 63143 - DNA, 266 bp, Zea mays
ggaaaaggcctcgcgggtcgcaaaccgctctctgttgatttgggatttgggaggcgctcgagttttcaggtaaaccatagtttagtgacccatggctcgtactaagcaaactgctcgcaagtccactggagggaaggctcctaggaagcaacttgccaccaaggctgcccgtaagtctgcacccacaactgggggagtaaagaagtctcatcgttaccgccctggaactgttgctcttcgtgaaatccgcaagtatcagaagagca

SEQ ID NO: 63144 - DNA, 266 bp, Zea mays
gcgcgccccaacgtcaagctgttcaacgccgtggccgtggaggacctcatcgtcaggggagggcgcgtcggcggcgtcgtcaccaactgggcgctcgtgtccatgaaccacgacacgcagtcctgcatggaccccaacgtcatggaggccaaggtcgtggtcagctcctgcggccacgacgggcccttcggcgccaccggcgtcaagaggctccaggacatcggcatgatcagcgccgtgccggggatgaaggcgctcgacatgaa

SEQ ID NO: 63145 - DNA, 259 bp, Zea mays
gtgataccccaatgatcgagataagtgctcttactggggataatgttgatgaacttctggaaactgtcatgcttgttgcagagttgcaagaattaaaggcaaatccacataggaatgcgaagggcactgttattgaagcatgccttgacaaggccaaagggcctcttgctaccttagttgttcagaatggaaccctaaacaaagctgatattattgtgtgtggtgaagcttatggaaagatccgtgcattgtatgatga

SEQ ID NO: 63146 - DNA, 257 bp, Zea mays
ctgacagctgtgttccactacatacatttgattacatatataattatctgatgggaaccaatgtcagtttcattgattgcttcttcgatcctggcccacatggaactggaaggtatacgatggaaatgcttcctgaaatagaacagagggacttcaggaagggtgcccagtggtttgctataacacgaaggcatgctttattgattctggcagacaacctttactacaataagttcaagctgtactgcaagccagca

SEQ ID NO: 63147 - DNA, 267 bp, Zea mays
tggcaagcgacgccgcggcctcgatcggagtcggaggcgaacacccccatggcggcggctggcggcggcgcaggagggaaggtatccttcaacatcatcctcacctccgaccccaagctccctttcaaagtgttcagcgtgcccgaggcggcgcccttcaccgcggtgctcaagtacgccgcggaggagttcaaggtcccgccccagaccagtgccatcatcaccaacgatggaattggcatcaacccccagcaaagtgcaggcaac

SEQ ID NO: 63148 - DNA, 267 bp, Zea mays
cacgagcgtcgaggacctcggcccaccggagaaggctgcagagaaggtcctcggtcagtacctgacggagttcatgtccaccaggctgggcgttcggcgtgaatccaacgtcctatcggcgtcatccaaggtcgctgacgatggcaagctctactacgaggttgaggtgaacataaaatcctatgcgagcaacaacgagctggcggtgatgccacaggacagggtgcagagcttggagtgggaccgccgatacctgtcagtgctcgg

SEQ ID NO: 63149 - DNA, 266 bp, Zea mays
gcaccacaagcgagcgagggacccggggcggaagaagagagagaagacgtctctctcctctcggcgtccccgttccccaacctctcgtctgctgcctgcctgcctgcctgcctgcaaaaaggagtttgtcatggcgtctaagcgcatcctcaaggagctgaaggacctgcagaaagacccccccacatcatgcagtgcaggtcctgctggtgaggacatgtttcattggcaagcaacaattatgggaccacctgacagtccctatg

SEQ ID NO: 63150 - DNA, 261 bp, Zea mays
gaactacaacttaggcctcaacaggacaggaaagagctgccgcctgcgctgggtgaactatcttcaccctggcctcaagcatggccgcatgtcaccacaagaagagcgcattatcattgagctccatgctcggtgggggaacaggtggtctaggatagcaaggaggctgccagggcgcacagacaatgagatcaagaactactggagaacacacatgagaaagaaggcacaggagaggaagatgggcatgccatcaccttc

SEQ ID NO: 63151 - DNA, 265 bp, Zea mays
cgcaggcgaaggcgagggtgtgagggaaggagcaccagccatggtgcacgtcaacttctaccgcaactatggtaagacgttcaagaaaccaaggcgtccttatgagaaggagcgtcttgatgctgaactgaagctggtcggtgagtatgggctgaggtgcaagcgtgagctttggagggtccagtatgcactgagcaggatccgtaatgctgcaaggcacttgctcacccttgacgagaagaacccccgtcgtatctttgagggt

SEQ ID NO: 63152 - DNA, 266 bp, Zea mays
ggtggacctgtggctgcttccaaagagctcaaacagatggtcaaggcatttcataattctggaattgagtttacaaccatacaaatgaagctgatgatgttaacccttacatgacttcctttcgtggtattgataacaaggtctattacatgttagatctcaacaacagtgcacagctgctgaacttctcgggttgcgggaatacactaaactgcaaccatcctgttgtcaaggagcttgtacttgacagtttaagacattgggtt

SEQ ID NO: 63153 - DNA, 260 bp, Zea mays
aacgccagagggttgtggcagtagatcacctctctcccgattggggagcagggtccagcttgcagccaaatggcgtacaaaccggcaaagagcctgctaaggaggttcccaaggaaccatcttttacctgcccaatatgttggaataagatggaggagccatccacaacgacttgtggccatatcttctgcgacacgtgcatcaaacaggccatcaaggttcagaagaaatgccctacttgcaggaaggggctgaaaatg

SEQ ID NO: 63154 - DNA, 255 bp, Zea mays
agaggacctagctgcagagttcaggatgcgaacccaggactgtatcaatcggattgttactctggaaagcatggataggttatctggtgtgatggatgaccgtgggaagttcatctacatctccactgaagagatgaaggcagttgcagagtacatgaggaagcaagggagagtgagcatatcacatctggccaacaactcaaaccagttcatcgatctggagccgaagcccagtacgaggtggagagccagcag

SEQ ID NO: 63155 - DNA, 257 bp, Zea mays
atttgccaaagaatgttcagtgggttccaagaggagagcttttctatcaaggattctaacatcagtgtttccaatgaggctttcttccaccaattccttgcagtgcgagccatggatcctctggatgtcctgagccagaaccctgattcagtattcggaaagttctgtagaagtaagtaccttttgcttgtgcatcaaaaaatggaaggttctttcttcggcaacatggatcagaggaactacgtcatgagcggtgg

SEQ ID NO: 63156 - DNA, 264 bp, Zea mays
ggcctataaggctgctcaggacattgctctggctgagctggcacctacccatccgataaggctgggacttgctcttaatttttcagtgttctattatgagattctgaactccccagacaaagcttgcaacctggcaaagcaggcgtttgatgaagctatctctgagttagacagccttggtgaggagtcatacaaggatagcactctgatcatgcaactcctgagggataacttgaccctttggacatccgacctcacggagga

SEQ ID NO: 63157 - DNA, 261 bp, Zea mays
caagcacctgccaaacggtgcctcctttgcggcgatcggccttctcggcatgttcaactccggtggcgcggtgagggagctgagattcggtggtgaggatgccgacgtcgagctcagagtgcggggctcgggcacggtcggagcttattcctcgaccaagccaacgtgtgtcgccgtcgattccaaggcggttggtttctcctacgatgccacctgtggcctcatcagcttcgagctcggcattcccgaccaagaaatgta

SEQ ID NO: 63158 - DNA, 263 bp, Zea mays
atgaaactagctgaagatgttaatttggaactcatttcagaagatacccatggatatgttggtgctgatcttgctgccctttgcactgaggctgctcttcagtgcattcgtgagaagatggacatcatagatcttgaggatgagacaatcgatgcagagatattgaactcaatggctgttacaaatgaccatttcaagactgcgcttggaacaagcaacccatctgctcttcgtgaaactgttgtcgaagtcccaaatgtctc

SEQ ID NO: 63159 - DNA, 256 bp, Zea mays
ttcagacgcgacaaatatagaatgctcaatatccaggcaaggagattcatttgtgataaatggaaggaagtggtggaccagtggagctatggatcctaggtgcaaaatcctgatattaatgggaaagacagatttttctgcacctaagcataagcagcagtccatgattttagtggacatcaacactcctggggtgcagataaagagaccattgttagtctttggttttgatgatgcacctcatggacacgcagag

SEQ ID NO: 63160 - DNA, 269 bp, Zea mays
cttttatgcttgcaatcgttatgaatcagtaaagaaagagggagtttacgacgagactgatgcaaggagggaaagagctaaaaactctcttgagagatatatgcattactatgagcgctgggcatccaatcagacatcgaggcagaaggcccaagcagatctgctaaaagcggaaaaggaccagattgcaaatttaactgacattttcgggataccagagacccagcttaagttcataatcgaagcttggtcacagattatagaatgca

SEQ ID NO: 63161 - DNA, 263 bp, Zea mays
ccaagttgcaatcgggggacgggtggaaaccctttcttggggcaacagatgtcaagccagaaggactactctcatggcaacagcggatgttgtggacgccgaggtgagggaactcgtggagaaggcctactctagagcaaggcagataatcaccacgcacatcgacatcctccacaagctcgcccagctcctgatcgagaaggagaccgtggacggggaggagttcatgagcttgttcattgacggccaggccgagctgtttg

SEQ ID NO: 63162 - DNA, 260 bp, Zea mays
ggaggctggaactggtattgcagaacttattgctcttgagatttcgaaacagacgaatgctccaattgaagagtgccgcaagaaggtttggctggtggactcaaagggtttgattgttgactctcgtaaaggctcccttcagccattcaagaaaccttgggcgcatgagcacgagcccttgaaaaccttgtatgatgctgttcagtccatcaaacctacagttctgatcgggacatctggagttggaagaacattcacaa

SEQ ID NO: 63163 - DNA, 266 bp, Zea mays
ctcggcggtatgaggctgacattctccaaagtgcattgagggaaggcgttgataaaataaagtacagagcatggccgttggtaccgtcgatgtctgctaggatggatcaccaaccattggaggtttctccttcatctgactttgtccagataccagctgatgcagctgatgtttgggaagtcgatctcaggcttctcaaatttgaacaaaaattagcgtctggatcatttggtgatctataccatgggacgtactgtagtcaagat

SEQ ID NO: 63164 - DNA, 256 bp, Zea mays
ggccaagttgcgatcgggggaccgggtggaaaccctttcttggggcaacagatgtcaagccagaaggactactctatggcaacagcggatgttgtggacgccgaggtgagggaactcgtggagaaggcctactctagagcaaggcagataatcaccacgcacatcgacatcctccacaagctcgcccagctcctgatcgagaaggagaccgtggacggggaggaattcatgagcttgttcattgacggccaggccg

SEQ ID NO: 63165 - DNA, 266 bp, Zea mays
caattatgagtgtaatggggattaatctcaaaacactgcgtccggaaccttgtgttgaagggtattctacacctgggggttattctgcaagagctgtgcaccctatagcacttgctaaagtcatgcagatagcaaggatgatgaaagaagagtttgctgatggacagtctctctctgccattggtggtgtggagactggcaatgatgctgctgagtttatgcttcttggtgctgatacagtacaggtatgtaccggtgtgatgatt

SEQ ID NO: 63166 - DNA, 268 bp, Zea mays
cctctgtcatatttgatatggtacaggtcactctaccgtgcaatgaggactaacagtgctttcagttttggatggtttttcctgtgttacctgatccacattggtttttgcataattgctgccattgctccaccaattgtatttcatgggaaatcattaactggtattctggctgcgattgacactttctctgaacatgtgataattgggatcttttactttgtggggtttgcactgttttgtctggagacactgctgagcattgggg

SEQ ID NO: 63167 - DNA, 265 bp, Zea mays
gagagcatcaatgagaaggaccgctgtccagggtgcaagggtgagaaggtcattcaagagaagaaggttcttgaggttcatgttgagaaggggatgcaacacaaccagaagatcaccttccctggtgaagctgataagcgcctgatactgtcactggagacattgtattcgtcctccagcagaaggatcactccaaattcaaaagaaagggtgaagatctcttctatgagcacaccttgtctctgaccgaagcactatgtgggtt

SEQ ID NO: 63168 - DNA, 163 bp, Zea mays
aattgctttacttgagattcaagcaatgttggatgcttttgtgactgatcatctctgaagcttttgtgaatgatctagctagctatctgtaaatgatcttgttgtgaatgatattataattgtgatgttttttggaatatataattgtggtgcttttgtgttt

SEQ ID NO: 63169 - DNA, 267 bp, Zea mays
catcaaacattcttctcgactcagaattcaacgcaaaactttcagattttggcttggcaaaagctggtccaactggggataaaacccatgtatccacacaagtcatgggctctcatggatatgcagctccagagtcattgcaacaggccgcctctctgcaaaggcagatgtctatagcttcggggtggtgttgcttgaactgctcactggaagaagggctctggatagatcaaaaccaggctttgagcagaacctagttgactgggc

SEQ ID NO: 63170 - DNA, 244 bp, Zea mays
ctttgcgaccctagccaactggttgacatcctttggaataacaatgacagcaaatttgcttctgtcctggagtgctgcaggtacatttgccttctacatgatggtgagtgctttcactctcgtctttgtcatccttgggtgccggagacaaagggaagaactctcgaggagatacaatggtccttccagtaagctccagtattccatataaatatgcaattagggtggaaatcctccaaggact

SEQ ID NO: 63171 - DNA, 270 bp, Zea mays
tccgactccaccgccgtcacgccatctcgccgggggccattctcccgaccgcgagtatggggaacatcttcgtgaagaagcccaagatcactgacgtcgatagggccatcctcaccctcaagacgcagcgccgcaagctcgcccagtttcaacagcagcttgagaaggtaatcgaagcagataatgaagctgcacggcagttggttcatcagaagaagagagacagagctttgattgctctgaagatgaagaaagctcatgaagagctgt

SEQ ID NO: 63172 - DNA, 267 bp, Zea mays
ccaacgtcgcctacgacatcgtcaacggcaagtccacgcccgtccggaacgccgacgcgccggtctacgtcaccatcggcgacggcggcaacatcgagggcatcgccgacaacttcacgcgcccgcagccgggctctccgccttccgggaggccagcttcggccacgccacgctggacatcaagaaccggacgcacgcctactactcgtggcaccgcaaccacgacggcgccaaggtcgtcgccgacggcgtctggttcaccaacag

SEQ ID NO: 63173 - DNA, 265 bp, Zea mays
atggctgatcatgatgcttggagagaacttgctgaaacatacagttccttacaaatgtacaagcaagctgccttttgttatgaggagctaatattagcccaaccaactattccactatatcatatagcctacgcgaggttctgtacactatgggtagtctggaaaatctccaaacagctaagaagtattatgcatcaacaatccagttaactggaggcaagaatacaagagccctctttggtgtatgtctgtgtacttcggcaat

SEQ ID NO: 63174 - DNA, 262 bp, Zea mays
tacatggcgaactcgctgagcaggcggagaggtacgaggagatggttgagttcatggagaaggtagccaagactgttgactcggaggagctcactgtggaggagcgaaacctcttgtctgttgcatacatgaagtcattggagcccgccgcgcctcatggcgcatcatctcctccatcgagcagaaggaggagggccgaggcaatgaggaccgagtaacactcatcaaggattatcgtggcaagattgagactgagctgacc

SEQ ID NO: 63175 - DNA, 268 bp, Zea mays
gttttggactcggttaacatcaccctgggtgctgaggatgaactgaaggatgctgtcgagtcgagttcgccctagaatccagaaacggcgcacatcctggtggccttatgaagagaaggaaggtcgtggagcacatcatccgctcagagccaagcccaacatctcagacgctgaagagaaagacatgctggactacctatacacatcgcagtaccagatgcgagggatactcgcggtctcgctaggccgcatcaggaccccaacagcg

SEQ ID NO: 63176 - DNA, 266 bp, Zea mays
ctcctgctggaattttaacatttaacagaaatagcatgagcggtgttctcaactgatgctgacaatcagacccaagtgggtatctgtgtgttgcaaagtgagcatgaaatggccacatacaataaatgcctggggaatttgacctcatggacattccacccgccccaagaggcttgcctcagattgaggttacattcgacatcgatgccaatggaatcgtgactgtctcaaccaaagataaggctacgaggaaggatcagaccgat

SEQ ID NO: 63177 - DNA, 265 bp, Zea mays
aaggtgtcatattcactgctgatctttttctgtgggatgtttatcactgttgatggcttcaacaaaacgggcataccgaacacactatgggagttagtggaaccatattcacgaatcgatagtgctaaaggtgttgcacttcttgctgtggtgattcttatcctttcaaacgtggcctctaatgttcctacagtcctattgctcggtacaagagtggctgcatcagcggcttcgatttctcatggttcagagaggaaagcctggc

SEQ ID NO: 63178 - DNA, 260 bp, Zea mays
gacttgcagccttggattgctagagatgacgaacaaggtcagaagatgtggagagtcaaccagcgtatagtgaagcttatagctgagcttatgaggaaccatgacagccctgaagcgttggtgatactcgctatgcctccgaccttctacttcgtgctaccgatggaatgctcgtcgatggtgaagcttgtactttgccacagcttgagcttctggaagtgaccgctcgggctgtccatcttatcatcgaatggggagat

SEQ ID NO: 63179 - DNA, 263 bp, Zea mays
gtaaggccatgtgcattaactgcggaaccagctggagccgatctcatgtttgaccagggggacaacatcacaggaaagatatcaacggaagaagttgcccgtatttgtgtagcagctctggcaagcccagatgctgtgggcaaaactttcgaggtcaagagcactgttccattcagcgaaccgtatgtgattgaccctgcaaatcctcctcctgaaaaggactatgaagtatatttcaaagaactcaaagaaggcatcacggg

SEQ ID NO: 63180 - DNA, 261 bp, Zea mays
gccatacactaagagagcagttcatgcatatgggtcatttctcaagtcggcaaccacataccatcgacaggctcaagcaagcatcatggactaccttcaccagcgtgatataacaaaatcattggcaactaagagttagtttggttcctggcttctgctttgctggctctgcctgtcttcattatatacaggcttctagtagggaccttctgctccaaaaagaataaaaggcctcgtagtagtaatggtaaccatggccac

SEQ ID NO: 63181 - DNA, 267 bp, Zea mays
ggaggagctagggtttcgtcgcggcgagatgtcggcgtacgacgaggtggagatcgaggacatggagtggaacgcggagctgaaggcgtacacgtacccgtgcccctgcggcgacctcttccagatcacgctcgacgacctccgcctcggggaggagattgcgcgctgcccctcgtgctcgctcttcctcaccgtcgtctacaacgccgaggatttcgccgactccaaggagccgacccacaagccgtccccgagcccagtagccgt

SEQ ID NO: 63182 - DNA, 265 bp, Zea mays
gatgaaggccatgaaattgaacatgatggaaagcttataacagtcttctctgcgcctaattactgtgaccagatgggcaacaagggtgcatttattcgcttcacagctccagaaatgaaaccagatattgttactttctcagctgtgccacatcctgatgtgaagccgatggcatatgcaaataacttcctcaggatgtttcaatgacagaatataacaacattgtttagcaatttttatcagatgagtctgttgtttgtcagct

SEQ ID NO: 63183 - DNA, 260 bp, Zea mays
cgtcgttctgttcttctaccccttggatttcacctttgtctgcccgaccgagattactgccttcagtgacagatatgaggaattcgagaagttgaacactgaggttcttggtgtctctattgacagtgtgtctcccaccttgcatgggtgcagacagacaggaagtctggtgggcttggcgatcttaaatacccacttatttctgatgtcaccaaatcaatttcaaaggccttcggtgttctgatccctgaccagggtat

SEQ ID NO: 63184 - DNA, 277 bp, Zea mays
ctcatattcagacactatttatcgtgtccctgtgcaacaatcagctcttgtatcttattgaaaaggagttaatctggatatttggtcacgttcctgggttttctgccacccttccgtctgtgattgccagactccatgctgccaaggacaagtatctatcaccaccagccccagtctcaccgtcatcacaaatggaggagaaacagtggaatttctcttttacatctgtctggaactctatagtgtggcttgtgcttttgaacttcttcattaagat

SEQ ID NO: 63185 - DNA, 278 bp, Zea mays
ctttccccttccctccctccctctccccgcgggccgccagacggaatttcgccctcgattcgaccccgattcgtccgcccgcgaccgggattccctccgccaagcgcggatctgaacgctgcgctccgtgtcgccgctcgaatccgccatgaagggggccaaatccaagggcgccgccaaggccgatgccaagctggcggtgaagagcaagggggcggagaagcccgccaagggcaggaaagggaaggccggcaaggaccccaacaagcctaagaggg

SEQ ID NO: 63186 - DNA, 265 bp, Zea mays
cgaagcgacgagcagccgacgctaaagcttggtccggtgagcttcagagaaggggcgggtacgtcaagatgcagatcttcgtgaagaccctgacgggaaagaccatcaccctcgaggtcgagagcagcgatacaatcgacaatgtcaaggccaagatccaggacaaggaaggtatcccgccggaccagcagcgactaatcttcgcggggaagcagctcgaagacggccgcaccttggccgactacaacatccagaaggagtccac

SEQ ID NO: 63187 - DNA, 267 bp, Zea mays
gagcagtgcagtttgttgattggtgccctactggtttcaagtgtgggataaactaccaaccaccaactgtagtccctggaggggacctggccaaggtgcaacgagcagtctgcacgatcagcaacaacacagccgtggctgaggtcttctctcgtattgaccgcaagtttgatctcatgtatgccaaacgtgcattcgttcattggtatgtcggtgaagggatggaagaaggggagttctcagaggcaagggaggatcttgcagcac

SEQ ID NO: 63188 - DNA, 266 bp, Zea mays
gtttacctgcattggatgtaaaaactgtgccaatatttgccctggagtctttcaaattgaggaagactttgggaagtcaagagtctattcccagtcaggtagcacagagctaattcaagatgccattgatagttgcccagttgattgtattcactggacttccgctgcacagctgtcactcctcgagaacgagatgcgtagagtagagaggttgaatgttggtttgatgcttgctggtatgggagcttccatcaatgttttccgga

SEQ ID NO: 63189 - DNA, 275 bp, Zea mays
tgccgccaacggctccggacgtcgtgctcaggggcaagaaggtcagggccgcggagggcaaggatatgggcatagtggatgccgtctacccctctgcgctcgagacggcggaccaggccttcaagtttgccgagcagctcgcggcgaggaagtgggacggaggcgtctacgcgtccataaggatgtccatgtaccctgaggcctgcaggtcagttggaatcgtcgacgagagcgatgaggagaagcggaagcacttcgcttctaagctctaactt

SEQ ID NO: 63190 - DNA, 274 bp, Zea mays
aacacctgcctcaagacctggggcggccagccggacaaggtcaaggcggcgcaggacgcgctgctgctgcgcgccaaggccaactccctggcgcagctcggcaagtacacctccgacggcgaggccgccgaggccaaggagggaatgttcgtcaagaactacagctactaattaatcgcccggccatcacccgggataccgccgcccctccgagagatacgtgtgtactgatcatggttaagcacgtactccgatccattcccatcccatgaag

SEQ ID NO: 63191 - DNA, 271 bp, Zea mays
gggaaaggatagtagcaacagaagtaactgcttggtggaggtatccctttgaacatgtttcgcagctcccatcgaagaagccattctgcttcacgcagagataccaggacgtaaagaaagtccttgcagagacgttctttggtcctccggatgttggtgtgtatagtccatccgtacaaaatacgctatatttcatggccaaggaagtccttacaaggttcccagatatagcgtcagtccagcttagaatgccgaaccttcactttctgcc

SEQ ID NO: 63192 - DNA, 273 bp, Zea mays
ggccatcgctgcctacaacaagggcgagagcactgcagctaagaaggctcctgccaaggaggaagaggaggaagatgaagaggagtctgacaagtccaagtcggaggtcaatgacgaggatgatgaagagggtagtgaggaggatgaagatgatgacgagtgatggagctcctcgagacaatggaccgtgcttcatccaacaatggagcggctacacaaggccccgtggcgatcacaaaaaaggagcctatatccatgtactagaattattca

SEQ ID NO: 63193 - DNA, 271 bp, Zea mays
acaaggagggcatccccccggaccagcagcgtctgatcttcgccggcaaacagctggaggatggccgcaccctagcagactacaacatccaaaaggagagcaccctccaccttgtgctccgtctccgtggtggtcagtaagtcatgggtcgtttaagctgccgatgtgcctgcgtcgtctggtgccctctctccatatggaggtagtcaaagtatctgctgttcgtgtcatgagtcgtgtcagtgttggtttaataatggaccggttgtgt

SEQ ID NO: 63194 - DNA, 273 bp, Zea mays
tcggtgattagtggtctcaaattgcatatgtcactttcaaagatgcacaaggcgcagaaactgcacttcttctttcgggtgccacaatagttgatctttctttgatcattggacctgctccagagtatcagccaccccctattgcctctgctccaccaatgagtggaaccagagttccagttggtggagacaacaacgttgtccacaaggccgaggatgttgtgagcactatgcttgccaagggtttcgtgctaggaaaagacgcggttggca

SEQ ID NO: 63195 - DNA, 267 bp, Zea mays
ccggcgtcaagaggctccaggacatcggcatgatcagcgccgtgccggggatgaaggcgctcgacatgaacaccgccgaggacgagatcgtgcgcctcacgcgcgaggtcgttcccggcatgatcgtcaccggaatggaggtcgccgagattgacggcgcccccaggatgggcccgacgtttggcgccatgatgatctccggccagaaggcggcgcacctggcgctcaaggccctgggcaggcccaacgccgtggacgggaccatgt

SEQ ID NO: 63196 - DNA, 265 bp, Zea mays
atacaaaagacaaagcggccaacacaatagagcatgaggacattgaagatcttgatggatgtgtggttgagcatttttctgaagaccatgttcttcataatgatcaggaaaaggagctaataaagatatcagaagctaaaattcgcgaatggtctaggggaaaagaaggaaatattaggtcattgctttcaacactgcaatatgtcttatggcctgagagtggatggaaaccagttccacttgttgatataattgaaggagcagc

SEQ ID NO: 63197 - DNA, 260 bp, Zea mays
attttcagtaaatttggtatcgaacacacactgaacatccctgcaacttttgttgttaagaggttgtttgtttaggactataatctgtctagattatataatccaacaaataatgtgttatttgctggattatataatctggacagattatattctcaaacaaacacccgctaattcttccaggggacaatcggagcgtggaaacgatgcaaccaggacatactttacaaccagaacgtccaaagtgtagtgccgtacca

SEQ ID NO: 63198 - DNA, 268 bp, Zea mays
gttgttgtgagggcaatgtcgcagagaggtgcccaaggacttcccattgatctcacaggtaaaagagcatttatagctggagttgctgatgataatggttatggttgggcaattgctaaggctcttgctgctgctggtgctgagattcttgttggtacatgggtgcctgcgttgaacatatttgagacaagcttgagacgtggaaagtttgatgaatcacggaagctacctgatggatctcttatggagattgctaaagtatatccac

SEQ ID NO: 63199 - DNA, 263 bp, Zea mays
atgaagtcgggcatgcaatttgcggaactttgacacctggccatgatcctgtccaaaaggttaccttaatcccaaggggtcaagctcgtggtcttacatggtttatcccgatggatgacccaacactcatctccaggcagcaactttttgccagaattgttggcggccttggtggtagagctgctgaggaggtgatatttggagagcctgaggtgaccactggagctgctggtgacttgcagcaaattactggcttagccaag

SEQ ID NO: 63200 - DNA, 262 bp, Zea mays
caaggctgctatcgccgaaacttacaacctcacagattcagaatttctgaaagctgatagctgtcaaactcgagatgctggctcaactgcctcaacagctattattgtaggtgaccgtttgcttgttgcaaatgttggagattctagagccgttcttttcaaaggaggacaggcgattgcggtttcaagggatcacaaacctgatcagacagatgagagacaaagaattgaggacgcaggggcttggtaattgtgggctggg

SEQ ID NO: 63201 - DNA, 264 bp, Zea mays
tctttgagaaaggaattccgcagatcacaaataccgtgattcaagatttgattgaattgattagaacggagaagcaaagtgataacctctgtagctgatccatctacagaggcattcttttctagcactttgcggtacattgaatttcagaagcagaaaggtgggagcataggcgaaaaatatgaacagataaagacgagttcatgagtcagaactagcgcggcgccacgactggtttcgatactgttgagaattgggtcgttt

SEQ ID NO: 63202 - DNA, 273 bp, Zea mays
acatgaccccttcgaggtcctggaccagaggggagtgggcgagctggtgaagtttgctacagagaggggccgcaaagctaggcctaacttgaaggtgggcatttgtggagaacacggtggagagccttcctctgtggccttcttcgcgaaggctgggctggattacgtttcttgctcccctttcagggtttcgattgctaggctagctgcagctcaggtgcttgtctgaggctgcctcctcattggcaaccggattgcctgctgctggtggat

SEQ ID NO: 63203 - DNA, 269 bp, Zea mays
agcagtcaagctcctcctcctcctcccccccagtccctcccaggctcccaccccgccttgctcgcagcctccccaaaaccctagccctagccctagccctagctctcccacacccgcactgggagatggacggcggcggcacgcaccgcacgccggtcgacgtgttccgggatttccgcgcgcggcgggctggtatgatcacagcgctcaccaccgacgtggagaagttctaccagcagtgtgacccagagatcgagcatctgtgtttg

SEQ ID NO: 63204 - DNA, 261 bp, Zea mays
caggaaccaacaaaacaccagtatgactgggatgttgcgactacgtttgcttttctacagaagtacggtcttacaggagagttcaagattaatgttgagtgcaaccatgctactctatctggacacagctgccatcatgaattggagactgcacggattaatgggctgcttggaaatatcgatgcaaacactggtgatcctcaagttggttgggacacagatcagttcatgacagacattgcagaggctactttggttatg

SEQ ID NO: 63205 - DNA, 289 bp, Zea mays
gccatagtcgggccatcaggaactccataccatgatggtctgttcttcttcgatgtccgttttccttgcgaatacccaaagtgcccaccaaaagtatactaccattctggcggacttcggctgaacccgaacctgtacgagagcgggaaagtgtgcctgagccttctgaacacctggtggggcaaggggtgcgagaagtggggcaagtcgagctccagcatgctgcaggttctggtctccatccagggcctcgtgctgaatgacaggccatacttcaatgagccaggat

SEQ ID NO: 63206 - DNA, 290 bp, Zea mays
atcgatctacacacatacatagttgcttctactacacgacgacaaacatggggaagcctgcgaagatcggagagtggcggtggatacgccggcgatcgtcgggatctgagggctactccggaccggctgatcgaggtgaaggtcacggcggacaacagcagctgcatccgctccatctccttcatctacatcggagccgatggcaaaccgtacgaggaggggccatggtgtttcggccatgctggcacggagtacaagattgatctgtgcaggttcgacgatagcttgac

SEQ ID NO: 63207 - DNA, 284 bp, Zea mays
gcgagacgcccaggtcttcgccaacgacgagcatccgggttagagaggaagaaattgcaaccgaaacaatggcggcagattccggcgctcgcagacaaccaagcttcaccaaggtcgaccagctgcgccctggaacccacggccacaacctcatcctcaaggttgttgactccaagatggtcgtccagagaggccgcgagggagggccccagggaagacagatgaggattgcggagtgcttggttggtgatgaaaccggcatcattgtcttcactgcaagaaac

SEQ ID NO: 63208 - DNA, 282 bp, Zea mays
gcaagaacgagccgttgggagggagttcgcggacctcatcaacaacgcggccgagtctcactaccagttcctggcatagcgccagaggcgacatcgaggagatcaagacggcgtaccggcggctgtccaaggagtaccacccggacacgacgacgctgccgctcaaggtggcgtcgcagaagttcatccgcctgcgagaggtgtacaacgtgctgagcaaggaggagacacggcggttctacgactggacactggcgcaggaggccgagagccgccgcctgc

SEQ ID NO: 63209 - DNA, 285 bp, Zea mays
gcagcaggtcgctggagatctcctgaagcagtaccaggagaagtttaagggagggacactttcagtcacctggaattacttaagggactccatgggtacctacctgtcccagcctaatcctgtcactgcccgatgggagggcgaagatcatcttcgggatcctaatttccagctggatgcattcagataccgaacgtctcggttgctacacagtgtcgctgctcggctacagaaacacagcaagacgcttggaggtttcggtgcgtggaatagatgtctgaacca

SEQ ID NO: 63210 - DNA, 284 bp, Zea mays
gccatcgccaccacctccctccgcggctccgccttccgccgcgaacacgccgctgtctcgaccccttgtcctcctccttcagcaagatggcggagattgagataaaaacagcacctgctgacttccgcttccctacaacaaaccaaacaaggcattgttttactcgctatgtcgagtaccacaggtgtttgaatgccaaaggggatgatgctggtgtttgcgaaaaatttgccaagtactacaggtccctttgccctggagaatgggttgagaaatggaacgag

SEQ ID NO: 63211 - DNA, 283 bp, Zea mays
ctgcgatgtgaattttgaccagtccaaccacggacggagcctgaacaccatgattggcagggcagcccacatcgagttccttgagaccgacatctacgccaagttcatcatgtggtccttccctgacctgttccgatgacgacgacaacgccgctcgtctctgtaatactgccgcataccaaacctaccaaaccgatagcgcacactactgagtactgaccaggcaaggaaaagtaagcttgcataaaggctcccccagaatccaacaccgcgacaggcagag

SEQ ID NO: 63212 - DNA, 279 bp, Zea mays
ctggcatagctgacagagcgttcatccaactggagtggcttcatcagtgccatgatatcagacatctcattcacttacaggagcatttattccaagaaagctatgactgacatggatagcaccaacgtgtatgcttacatctcaataatcgctctaattgtttgcattccacctgcattgatctttgaagggcccaagctaatgcagcatggatttagtgatgccattgcaaaagtaggtttgacaaagtttgtcagtgacctattcttggttggactg

SEQ ID NO: 63213 - DNA, 279 bp, Zea mays
tacacacatacatagttgcttctactacacgacgacaatcatggggaagcctgcgaagatcggagagtggggtggatacgccggcgatcgtcgggatctgagggctactccggaccggctgatcgaggtgaaggtcacggcggacaacagcagctgcatccgctccatctccttcatctacatcggagccgatggcaaaccgtacgaggaggggccatggggtttcggccatgctggcacggagtacaagattgatctgtgcaggttcgacgagagctt

SEQ ID NO: 63214 - DNA, 283 bp, Zea mays
aagcaatgatctcacatccatttggcgttgctgatatcgcgttcaattccatagattcatcgatcaatgatatccaattcttaaacagaaattcccgggctccaggtcctgctcaacaacgtatgcgaacatacaccaaggtgcacaagcgcggcgctgttggaagatctatcgacatcaacagatattctgggtacgatgaactgaagcatgacgttgcccgtatgtgtggaattgaggggcagctcagcgaccagaacagagttggctggacactggttta

SEQ ID NO: 63215 - DNA, 273 bp, Zea mays
tggtgaaccacaatattcgggaatatcatttcagactgtgcttggagtgaggctctaaccatcccaattttgtggaatttgcatgggtctgcaatgcattggagaggcattggaggaaagattatccgtgctccttctggagtgatgcatgggataagctctccagtttattacgatgaggacgtaggaatggcatcgttcaatggcttgccaaaccctgttactgccgcgaggtaccacagcttggtcattgagcaagataccttcccacat

SEQ ID NO: 63216 - DNA, 277 bp, Zea mays
tggtgaaccacaagattcgggaatatcattgcagactgttcttgaattaggcccaaccatcccaatttttggagtttgcatgggtctgcaatgcattgtgagatgcatttggaggaaagattatccgtgctccttctggagtgatgcatgggaaaagctctccagtttattacgatgaggaattaggaaaggcattgttcaatggcttgccaaacccttttactgccgcgaggtaccacagcttggtcattgagcaagataccttcccacatgatgc

SEQ ID NO: 63217 - DNA, 325 bp, Zea mays
  unsure (1)..(325): unsure at all n locations
acagtaacctcctantnnaatctagcanntcggaactcaggccgagggccatagaagacaactcgttgccatcattctcaaaggctgttaatcagcgcgacgtgaccttgtctacttctggcagaagtaccggaaattggcagacagctcacatgagaaaaatgaagctcggagggagttgcttgaagtgatggcccacaggtctcatgttgacagcagtgttgagctcattggaagccttctctatggctctgaggacggtccaagggttctgaaagccgtccgtgcagctggtgagcctctcgtcgatgattggagctgtctc

SEQ ID NO: 63218 - DNA, 281 bp, Zea mays
gcgagatcgccgccccgtgtgggccctagatcccgatggcctcgcgccgccgcaccctgctcaaggtcatcatcctcggcgatagtggggttgggaagacttccttgatgaaccaatatgtgaacaagaagttcagcaatcagtacaaggctacgatcggcgcggatttcctcaccaaggaggtgcagttcgaggacaggctcttcactctgcaaatatgggacactgctggccaggaaaggtttcagagtctcggcgttgcattctaccggggagcagat

SEQ ID NO: 63219 - DNA, 281 bp, Zea mays
ctcatcgatctacacacatacatagtctcttctactacacgacgacaaacatggggaagcctgcgaagatcggagagtggggtggatacgccggcgagcgtcgggatctgagggctactccggaccggctgatcgaggtgaaggtcacggcggacaacagcagctgcatccgctccatctccttcatctacatcggagccgatggcaaaccgtacgaggaggggccatggggtttcggccatgctggcacggagtacaagattgatctgtgcaggttcgac

SEQ ID NO: 63220 - DNA, 277 bp, Zea mays
gcaaggccgataacacgccctgccccatcaagcagggtctctacttgggatctgttggagcagcattcaataaggacgctctcaagagtttgaacatcacccatatcttgatcgttgcaaagtcactggatccagtatttccagctgaatttaattacaagaagatcgaagatgaagctataagctctggaggcaatgttttggtccattgctttgctgggcggtcaatgagtgtgacaatcgttgttgcatatctcatgaagaagcatcaaatgag

SEQ ID NO: 63221 - DNA, 275 bp, Zea mays
ccaacctgggagtggcgcggacaacggtggccacgttcatcatgcccaccacggactgcctcatcggccccgccgccgagttcctcagcgacgacaacccgccgtgctaccgcaccctcaccttcggcgacttcaagcgcatctacagcgttgtcaagctgggctcgtcgctcaacctcaccacaaatctcaagaccgttcagaaggagctctgattatccatcaaactttgtagcctccctcgaattggcggcgaggaactagctagctagctg

SEQ ID NO: 63222 - DNA, 287 bp, Zea mays
agtttcaatggcatcacttactgagctgtcatacaactgtagcattgacgttttcactggaaagaagcttgaggatattgttccttcttctcacaactgtgatgttccccatgttgatcgcactgagtatcagctgattgacatcactgaagatggatttgtgagccttttgactgacagtggcaacactaaggatgacctcaggcttccgactgatgaagctctggaaggccagatcaagagcggatatgatgatggaaaggacctcctcctgacggtgatgtctt

SEQ ID NO: 63223 - DNA, 270 bp, Zea mays
catggtttaaacgaacttctcatgtgttgcattgtacaaggccttgtatccgtaaactgcttgtaccagtcttcgttttctgaacttgatgcagatatcagaaaggcatgctactatcacgtgcaagaataaggctttctatctgactgatctcgggagtgaacatggtacctggattaccgacaatgaaggtagacgttaccgcgtgccaccaaacttcccggttcgtttccatccttccgatgtcattgagtttggttccgataagaa

SEQ ID NO: 63224 - DNA, 276 bp, Zea mays
ccctagccgccatatctcacgatccactcgagcaccaagccgagggaaggtgaggagcgatggcgcgcggcgtggtgtcggcgaagggcggcgcggtcgcgggcaagaagaaggggtcggtttccttcacgatcgactgcaccaagccagtggaggacaagatcatggaggtcgcctcgctcgagaagttcctgcaggagcgcatcaaggtcgccggcggcaaggctggcaacctcggcgactccgtcaccatctctcgcgagaagaccaaggtca

SEQ ID NO: 63225 - DNA, 275 bp, Zea mays
ggcaaccattgaattcaaacccaacacagctgatgatccccatatgagaaagccagatatcaccaaggctaagcaactgctacattgggagccaaaggtctctctcaaagaaggccttccgctaatggttcaagatttccgtcaaaggatctcggatgagtaatcaaagcaattcttttttccccgaatgtgccatgcacgtgtttgtaatcagagcaatcgtatgatactggtgaccggtttgattctgaacgatgctgcaactacagtcagga

SEQ ID NO: 63226 - DNA, 271 bp, Zea mays
gacggctatttgatattctttgtacacgacgagaatacagggaaatctgaagtaaatgttatcgatgcaaagacaatgtctgctgatccagttgcggtggttgagcttcctaatagggttccttatggattccatgccttctttgtaactgaggaccaactggctcgacaggcggaggggcagtgaagatacggcacctgcagattctgcacacgcgggtacatgttggaagttattgcaggacatgtatatgtataggacaagtttatta

SEQ ID NO: 63227 - DNA, 270 bp, Zea mays
agcgcatcaagctcagcgccgagaaggcgatcttcatcttcgtgaagaacaccctcccaccaacagctgccctgatgtctgccatctacgaggagaacaaggacgaggacgggttcctctacatgacctacagcggcgagaacacctttgggctgctatgagtggcgccgcgccgccgtggatcgacgtcggacaatgcccctcctcctgtaaatacttaaaaaaaaaataggcgtctcaagaatccgtgtacataataatctggcatgt

SEQ ID NO: 63228 - DNA, 274 bp, Zea mays
cagcttgttgagatcagaaaaatgcaggctgccgctactgccgccgggttctcggccgtgctgcccgccaagggaggtccggcggcgagcaggagtgtggtcggggtggacaaggactacctgtcctacgacgagccaaagacggtgttcccgggcgaggcgtgcgatgaccttggcggcgagttctgcgaggcgccgtaccaggacggcgtctccaaggagctggcgcacgccttaagaccctgatccatccatttctgtccaccacgctatg

SEQ ID NO: 63229 - DNA, 266 bp, Zea mays
cgatctacacacatacatagtcacttctactacacgacgacaaccatggggaagcctgcgaagatcggagagtggggtggatacgccggcgatcgtcgggatctgagggctactccggaccggctgatcgaggtgaaggtcacggcggacaacagcagctgcatccgctccatctccttcatctacatcggagccgatggcaaaccgtacgaggaggggccatggggtttcggccatgctggcacggagtacaagattgatctgtg

SEQ ID NO: 63230 - DNA, 263 bp, Zea mays
agctagtgttgtagagcttgaaactgttgttgctgctttgtgaggcggttcatgatggaccagttggtcttttacgaatcaagagcagcagccgctgacccccacagggacatgagactggacatcgacaacatgagctacgaggacctgttggctttgggagaatctatgggcaatgtcaacacaggcttggccgatgagaaaatttcgaagtgcgtgaaagaagtggtctgctgcagttccgaccagacgcaaaccgatca

SEQ ID NO: 63231 - DNA, 265 bp, Zea mays
aatcgacacccggccgagatgggcgcaagttcttcgttggtggcaactggaaatgcaatggaaccgcagatcaggttgagaagattgtcaaaaccctgaatgaaggaaatgttccctcttcagatgttgttgaggttgttgtcagtcctccttatgttttcctcccggtggtcaagagccagctgcgccaagagttccaagttgctgctcagaactgctgggtgaagaagggaggtgcattcactggtgaaattagtgctgagat

SEQ ID NO: 63232 - DNA, 265 bp, Zea mays
cgtgggccggcgcgtcgaacggcggcgtcctcgtcgggctagctgcctgcggctgatgatgagcatcgtgtcgacggccgccgacctgatgcaggacttgaagaccgggtacctgacgctggcatcgcccaggtccatgttcatcagccaggtgatcggcacggcgatgggctgcgtcatcgcgccctgtgtcttctggctcttctacaaggccttcgccgacatcggcctcagcggcacgagtacccggcgccctacgccatcg

SEQ ID NO: 63233 - DNA, 264 bp, Zea mays
cgatctacacacatacatagtttcttctactacacgacgacaaacatggggaagcctgcgaagatcggagagtggggtggatacgccggcgatcgtcgggatctgagggctactccggaccggctgatcgaggtgaaggtcacggcggacaacagcagctgcatccgctccatctccttcatctacatcggagccgatggcaaaccgtacgaggaggggccatggggtttcggccatgctggcacggagtacaagattgatctg

SEQ ID NO: 63234 - DNA, 257 bp, Zea mays
gaacgggaaatgtgtgcgaggactatttactgcacaaacattgacaagaaggtcactcaggcagatctgaaattgttctttgagtctatatgtggagaggtctttcggctgaggttgcttggtgactaccatcattctactcgcatcgcttttgtggaatttgtgatggcagaaagtgctaccgctgccctgaactgcagtggcgtgatactgggatccttgccaataagggtgagccctcgaagactcccgtgcgt

SEQ ID NO: 63235 - DNA, 260 bp, Zea mays
agtcatccatcaccttttccctcaaatcccgcattatcatctcattgaggcgactgaggcagcaaaaccggttcttggcaagtactacaaagaaccaaagaagtcgggtcctctcccgtggcacctgtttggggtgctagcacaaagcttaaagcaagaccactatgttagcgacaccggagacgtagtgtactaccaaactgactcgaaaacgaacacctctgcacaaaaatctgattgacacagactatagaacgtag

SEQ ID NO: 63236 - DNA, 257 bp, Zea mays
atttttcttggataatctgttgagccagacaccggatcagcaacagactctggctgcaattggagaggacttatttgctatagcacaagatcaaccttttcggtttccatccacatttacatttgttataagggcattctctactcttgaaggaattggatacatattagatccagaattttcgtttgtcaaagttgcagcaccatatgctcaagaactgttagacttgaaacagagacgacaaactggacctcaat

SEQ ID NO: 63237 - DNA, 263 bp, Zea mays
  unsure (1)..(263): unsure at all n locations
cagatcctcaccgagaggggttactccttcaccacgacagccgagacggangttgtcagggacatcaaggaaaaacttgcctacgctgcacttgattacgagcaggagctggagacggccaggaccagctccaccgtcgagaagagctacgagctgcccgatggccaggtcatcacaatcggcgcagaaaggtttaggtgccctgaggtgctattccagccatccttcattggcatggaatctcctggcatccatgaagccac

SEQ ID NO: 63238 - DNA, 264 bp, Zea mays
tggcagcatctccgccgaccgcgtccccgacatggagaatcggcacttatgaacctcctcctcctctgcgccatctcgttgcccaccgtcggcatggtcgtctcctacggcgccttcttcgtccctgccggctccgggaacgccggcggcggtacctacgcgtaggacaagctgggcaacgacatcacggtggaggcgtggctcaacacgcacggtcccaacgaccgcacgctcgcgcaggggctcatgggtgaccccacgtac

SEQ ID NO: 63239 - DNA, 267 bp, Zea mays
cacccacccacccactcgcttcagccgcctccgccgcgcgtacaagcaggtcgagacaggatgccggctggccacggcctgcgctcgcggacgcgcgacctcttcgcggccccttccgcaagaagggctacatcccgctcaccacctacctcctcacctactacatcggcgattacgtcgatgtcaaggtgaacggcgccgtccacaaggggatgccgcactagttctaccacggccgcaccggtcgcgtctggaacgtcaccaagc

SEQ ID NO: 63240 - DNA, 260 bp, Zea mays
gcggccgaggcgtagttcgtcggcacgggcgcaacgctcgccgactccaggccgtcatgtccttccaccagtgcgtgtgcaacgtctgcgacacctgctacatcccgttgccgccatgggtgctggaggagataagcagtaacccggtcatcgtgtactcggacatatccggccgccggatccccgagtacatctccctcggctgcgacacgctgccggtgcttaagggccggactcccatccaggtctacaccgactac

SEQ ID NO: 63241 - DNA, 262 bp, Zea mays
cggcgttcgcgctggtgaacaaggcgaccggggaggccagcaagcactcgctggggcagtcccacccggtgcgcctggtgccctacaacccggacttcctggacgagtcggtgctgtggacggagagccgcgacgtcggcaacggcttccgctgcgtccgcatggtcaacaacatctacctcaacttcgatgccctccacggcgacaagtggcacggcggcgtccgtgacggcaccaacgtcgtgctctggaagtggtgcga

SEQ ID NO: 63242 - DNA, 262 bp, Zea mays
ctgtttaccactcgttgtatgatgattatgtttgggtggagaggtttggagaccccttgttccacaggcatgttgcagtggccagcgtttggggtctgattgcactgaaacttgctgacgacgagatcatacccttcaattacgtctcttatgcctccgaactggaggagtgcacaaaagatatcgtagataaatgtaaaggatttcctgtcagtttctctcctttgcagaactccatcaagcagctcgagagtgctgccac

SEQ ID NO: 63243 - DNA, 261 bp, Zea mays
caatcgttgaagatgtccgtgtgagaggtgatgcagcagttaagcactacacagaaaagtttgacaaggtcatgcttgatgatgttgtcgtctgtgttagcgatcttccagatgcagagcttgatccagctgtgaaggaagcctttgatgttgcatatgacaatatatatgccttccatgtttcacaaaaaatacctgagaagacagttgaaaatatgaaaggcgtaagatgtaagagaataactagatgcattggttctg

SEQ ID NO: 63244 - DNA, 151 bp, Zea mays
caacacgctagagttcgccgacaaggacggcagggagcagtgcttctccgcgcacttcctctgccgccccgccgtgtatggcaagtccatgctcctcgtgcgcttcggctccaccctcaggtcgccgctcgccaatgtgctcccgtcctgg

SEQ ID NO: 63245 - DNA, 262 bp, Zea mays
gtgattaggaggttcccccgaggttaatggtaaacttgcccgatgcatcaaatagggagaaaattctaaaagtaattttggcaaaagaagagctgggatctgatgttgatatggactcgcttgccaatatgactgatggttattcaggaagcgacctgaagaatctgtgtgtgaccgcggcgcattaccccatccgagaaattctggagaaggaaaagaaggagaagaatttggctaaaacagaaggtaggccggagcctgc

SEQ ID NO: 63246 - DNA, 265 bp, Zea mays
  unsure (1)..(265): unsure at all n locations
ctgggaatctgtaggaggggagaggggagcgcgctcagggtcagggaggcgaagatgatcgaggtggtgctgaacgaccgcctggggaagaaggtgcgggtgaagtgcaacanggacgacaccatcggcgacctcaagaagctggtggcggcgcagacggggacgcgccccgagaagatccgcatccagaagtggtacaacatctacaaggaccacatcacgctcaaggactacgagatccacgacgggatggggctcgagctct

SEQ ID NO: 63247 - DNA, 269 bp, Zea mays
atcaatcgcgagagtatcactaactcggttgccatgatccagccttccttgatatcattttcctttgattcacctccatctccggtgtttctagatgtggcatcattagcggcagatcgtatactgctacttgatgcgtactttagtgttgtcattttccatggcatgacaattgctcagtggagaaacatgggttatcagaaccaacctgagcatgagcaatttgcacaactattacaagcaccacacgaggatgcgcagatgataat

SEQ ID NO: 63248 - DNA, 259 bp, Zea mays
gcggccgaggcacgtgttcggcggcacgggcgcaacgctctccgactccaggccgtcatgtccttccaccagtgcggtggcaacgtcggcgacacctgcaacatcccgttgccgccatgggtgctggaggagatgagcagcaacccggacatcgtgtacacggacaggtccggccgccggaaccccgagtacatctccctcggctgcgacacgctgccggtgcttaagggccggaccccatccaggtctacaccgacta

SEQ ID NO: 63249 - DNA, 260 bp, Zea mays
cggccaagtctagggtttgggaatctgtaggaggggagaggggcgcgcgctcagggtcagggaggcgaagatgatcgaggtggtgctgaacgaccgcctggggaagaaggtgcgggtgaagtgcaacgaggacgacaccatcggcgacctcaagaagctggtggcggcgcagacggggacgcgccccgagaagatccgcatccagaagtggtacaacatctacaaggaccacatcacgctcaaggactacgagatccacg

SEQ ID NO: 63250 - DNA, 257 bp, Zea mays
caccgcgtgcgaaccaagcagaccccagcagaagaagcgaagtcgtcgccggagcaggaggaagagcgagcagcaagatgtcgtggcaggcgtacgtcgatgaccacctgctgtgcgacatcgaaggccagcacctcagcgccgccgccatcgtcggccacgacgcagcgtctgggcacagtccgagaacttccccgagttaaagcctgaggaggttgctgggatgataaaggactttgatgaacctggaactcttg

SEQ ID NO: 63251 - DNA, 260 bp, Zea mays
ctccttgcaaaggctaaggaaaagggcgtctcccttatgctgccaactgatgttgtcattgctgacaagtttgcccctgatgctaacagccagattgttccagcatctgcaattcctgatggttggatggggctggatattggcccagattctgtcgcttcattcaacgcagccctggatacaaccaagacggtcatctggaacgggcccatgggcgttttcgaatttgacaagttcgccgtaggaaccgaggctgtgga

SEQ ID NO: 63252 - DNA, 263 bp, Zea mays
ataatattagctatgttgcatgaagggccctagaataaactacttttgtattgatcagcagccgcaacttggatagggtacgtaagttaaaaagcgggatgacaagattgaccgcaagggttcagaaggtgagagacgagcttgaacaattattggatgacgacgacgacatggctgatctttatttgtctcgaaagttggctggggcatcttcccctgtcagtggttctggtggaccaaattggttccctgcctccccaact

SEQ ID NO: 63253 - DNA, 256 bp, Zea mays
tacaaaattcaagattggtctgatgataacgattttcttgtccagctgtgcaggaccactggaaaacttctcaagggcggggagcctgatctgacaacagcagccaagatggtacttcatgactggcagaggggtaaaatccccttctttgtaccccctccgcagcaaagcgacggcggtgcatctgaaagtgctgaacaacctattgggattaccaaagaggacggagtaagcagcgacaggactgccgcagcca

SEQ ID NO: 63254 - DNA, 260 bp, Zea mays
atttccatccaaaagagggtgttaagatagagacagatgagaaggctactagcctatcctctgcgtctgttgatgatgctgccgtcattgaagagcttattgcaaagctgcaagctatttctaaaacattgtcaccaggattccgtatgaaccctatacagtttgagaaggatgatgataccaatttccatatggacttgattgctggttttgctaacatgcgggccaggaactacagcatccctgaagttgacaagttg

SEQ ID NO: 63255 - DNA, 257 bp, Zea mays
gtcaaatgttgcacttacagtgtgggcaggttttatgggataaccatagctcatgttctggaacatggcaaaccccatgagagatcagccattattgagaagctaattggccaagttgtgcaaatgagccagcaaaagtttgcctcaaatgtcattgagaagtgcttagcctttggaaatcctgtagaacgtcaggttctgattggtgagatgcttggatccactagcgataggaacctcttgaggtaatgatgaaa

SEQ ID NO: 63256 - DNA, 257 bp, Zea mays
gctgatttgagtgatacattaatggaccgcatggttctgaatgaagctaaccttacaaatgctgttcttgtacggtcagtcctcacacgtagtgatcatggaggagccatcattgaaggtgctgacttcagtgatgctgttattgacctatcacagaaacaggcattatgcaaatatgcaagtgggaccaaccccatgacaggggtgagcactcgaaaaagcctaggatgtggcaatagccgtcgaaatgcatatgg

SEQ ID NO: 63257 - DNA, 255 bp, Zea mays
cgcaggaagctttatacattctatcctacgcttgggggaatgatgatacagttcaggagagcctcggtatccgcaaggggacaattggagcatggaaacgatacagccatgcattgccttacaattatgatatccagagtgtagtggattaccattcaaggctagccacataaggatacagggcgctgatatacagagcggcgaccacgatgctgttgtaccccatgttggcacacaagcatggattagatacct

SEQ ID NO: 63258 - DNA, 265 bp, Zea mays
agatgccctgtcagcataagttccactcgcactgcatactcccgtggctggagctccacagctcttgcccaatctgccggtttcagttgcctactgaggagacgaagaacaacccatgcgaatcagccagcaccgcagggaccgtgaacggcggtggagacaacgctgctgcaagcggcagcgatacagaaagtactaaccacaatgaagatgaccattccgatagccctatcttctctgctctgagcacactcttctctgatcc

SEQ ID NO: 63259 - DNA, 283 bp, Zea mays
ccacgctgcagagtatttgcggcggcgttcccatgctgtgctggcccttcttcgccgagcagcagaccaactgccgatacaagtgcacctgcgtgcgcgagggcccaacgcgctcgacggcacggatgggtttcgcttcacctgcctgccccggtttaaggatctcatcgccaggattaacgccgaggctgaggccgagggacaacccaccgtgacatgcgtcgtcggcgacagcaccatgaccttcgcgctccggccgcgcgagagctcggcctccgctgcg

SEQ ID NO: 63260 - DNA, 275 bp, Zea mays
acttcctctcaaaatggacaaaggtggacctcggactgcagcttttaggctatgcaagagtttacagtggccaattccagaatttgaatttgtggaacaaaggtttaggtatgccaagtaatacccaaacattactttcttgtaaaagaatgtcaaacttcattcacaagagctttggggattcatattcaggccccgtttggtttgagggactaaagattagtctctccattttagtcacatttcgtctctaaattgccaaacagtgggactaa

SEQ ID NO: 63261 - DNA, 276 bp, Zea mays
cacacccttggcatgatctggagataggtcctggtgctccaaccatattcaactgcgtcattgagataccaaggggcagcaaggttaaatatgaacttgacaagaaaactggactgatcaaggtggaccgtgtgctgtattcatcagttgtttaccctcacaactatggattcattcctcgcacgctttgtgaagacagtgatcctttggatgtactggttataatgcaggagcctgttatcccaggctgtttcctacgtgcgaaggccatcggcc

SEQ ID NO: 63262 - DNA, 273 bp, Zea mays
tccacccaatcgaaggacctagcgagtggcacggcggcggcgatcggagaagatggtgcgcaaggcgaaggttgagttcgacgagcagccgccggataacttcgacccgaagaacccgtatgccgacccggtggcgatgctcgagtaccgggaacacctggtgcgagagaagtggatccagatcgagaccgccaagatcatccgggagcgcctccgctggtgctaccgcatcgagggcatcaaccaccaccagaagtgccgccacctcgtcga

SEQ ID NO: 63263 - DNA, 276 bp, Zea mays
accgctttcccgttccccaccccgaccgactgctccccctcccccgcaccagcctcaagccctcaaggcctcaaggcatcgccggcgccgcaacttcgctgaggaagcccgcacccctgcccggatccgatggccaacagcaacctcccgcggcggatcatcaaggagactcagcggctgctcagcgagccagcaccggggatcagcgcgtcgccctcggaggagaacatgcgctacttcaacgttatgatccttgggccggcgcagtcgccctat

SEQ ID NO: 63264 - DNA, 272 bp, Zea mays
gcgcccgccacggccaaggcgaagaaggagtccaagaagcaggaggagggcgtcgtcaccaacctatacaagcccaaggagccgtacgtcggcaggtgcctcctcaacaccaagatcaccggcgacgacgcgccgggggagacgtggcacatggtcttcagcaccgaagcaagatcccgtacagagaaggccagtccatcggcgtcatcgccgatgcgtcgacaagaacggcaagccgcacaaggtcaggctctactccatcgccagcagcg

SEQ ID NO: 63265 - DNA, 273 bp, Zea mays
ctgcaaatctcacccaccttgcattcaattgtttctctttgaactctattgggcccatggttgaaatgttaagtggtcctagaagatatctagctgtttatttcagttcggcgctggcaggttcactgatgagctaccgttttagtgcgtcacctgctgttggtgcgtcaggtgccatttttggattggttggagcctatgcagtttatatgtggaggcatagaagattttttgggaattctagagagagtttagaacatattgggcgtgtgg

SEQ ID NO: 63266 - DNA, 274 bp, Zea mays
ggctgtcgctgaatgggtcgactggtgaggtgatccttggaaagcagccgctttccccaccagcccttagtggcgatctgggaactttcatggcctgggtggatgatgttagaaagctcaaggtcctggctaacgccgatacccctgatgatgcattgactgcgcgaaacaatggggcacaaggaattggattatgccggacagagcacatgttctttgcttcagacgagaggattaaggctgtcaggcagatgattatggctcccacgcttga

SEQ ID NO: 63267 - DNA, 272 bp, Zea mays
attattcacagggatggttatgaagcattacacatattccaatctttcagacaactcacagatgttgtttctgccttttttcatttactatcatctttagctgaaacatttgtgttcatctatatgggtttcgatattgccatggaagagcatagctggtcacatgttggcttcatcttcttctcaattatattcatagttgttgcaagggctgcaaatgtcttttcttgtgcatacttggttaacatgtctcggccagaacatcgccgtat

SEQ ID NO: 63268 - DNA, 277 bp, Zea mays
cttgattttggcatgatgagtgaaacaccagaggatgcgacgggtagccattataggacatgttgtccacttagtcaacagggactatgaagcaatggctcgtgattattatgcactagatttcttgggaccggatgtagatgtttccccgattgtgcctgctctcaagaatttctttgatgatgcactaaatgcaacagtgagtgagctgaacttcaagacaatagttgatggcctaggtgctgttctctatcagtacccgttcaatgtaccggca

SEQ ID NO: 63269 - DNA, 276 bp, Zea mays
gtcaaccctgctgctgaagcaaatattcttggagacccagaagcagctgacatagtttttacttcaggagcagatgtcattgtggttggcattaacataacaacacaagtctgtttgacagatgagggtctcttggagctaagaaactcaaaagggaagcatgcaccgttcttatctgagacgtgcaagttctacagagattggcatgtcaagtctgatggcttccatggaattttccttcatgatcctgtgagcttcactgccgtgcttcatccc

SEQ ID NO: 63270 - DNA, 271 bp, Zea mays
gccccaccgccgctcccatcaagcggcgctaaaggtttcctcgcccgcaacgcgatgccgaagaacaagggaaagggaggcaagaaccggaagcggggcaagaacgaggcggacgacgagaagcgggagctggtgttcaaggaggacgggcaggagtacgcgcaggtgacgcggatgctgggcaacggccgctgcgaggcgctctgcatcgacggcaccaagcgcctctgccacatccggggcaagatgcacaagaaggtgtggatcgccg

SEQ ID NO: 63271 - DNA, 274 bp, Zea mays
ccatcatccctcgtggccaggctggtggactcacattctttgctccaagcgaagaaaggctagaatctggattgtacagcaggagctatcttgagaaccaaatggctgtagcccttggtggcagggttgctgaggaggtgatctttggccaagacaacgtgacaacaggagcttccaacgacttcatgcaagtgtcacgtgtcgcaaggcagatggtcgaaagatttggattcagtaagaagatcggccaagttgcgatcgggggaccgggtgg

SEQ ID NO: 63272 - DNA, 274 bp, Zea mays
atgggcgcagagaatccccaagcaaacaaacagtgtagagggagaggagaggagaggagaggagaggttgggtctgggacaccatggctccgatgaagctgtacggggcggtgatgtcgtggaacgtgacgaggtgcgcaacggcgctggaggaggctggctccgactacgagatcgtgcccatcaacttcgccaccgccgagcacaagagccccgagcacctcgtccgcaacccgtttggtcaggttccagctctgcaggatggtgacttgta

SEQ ID NO: 63273 - DNA, 276 bp, Zea mays
ctataaaaaaggttcttcaagacaagagatacaagaatcgtgagctgcaaaccatgcgagtgcttgaccacccaaatgtggtggctctaaagcactgtttcttctcaaagactgagaaagaggagctttacctcaatttggtgcttgagtacgtaccggagactgctcatcgtgtcatcaaacattacaacaagatgaaccagcgcatgcctttgatttatgcacaactgtatatgtatcagatctgtagagccttggcatacattcacaacagca

SEQ ID NO: 63274 - DNA, 271 bp, Zea mays
tccagattcatcccaatcccgatggctatggccattcccttctacatcggtgcgtacttcgccatcgacatgtttgttgggacagttatccttttcgtctgggagagggtgaaccgcaaggagtgtgatgacttcgcaggtgcggttgcctctggcttgatctgtggtgatgggatctggactgttccttctgcgatactgtcaatccttaggattgacccgccaatttgcatgtacttcaagccatcccttagcagctaaagttgggaca

SEQ ID NO: 63275 - DNA, 272 bp, Zea mays
actaagcatctgcttggatatcctacagaaccagtggagtcctatatatgatgttgctgcaatcttgacttctattcagtccctgctgtgtgatccaaacccgaactcccctgcaaactcagaagccgcaagactgttcagtgagaacaagcgggagtacaaccgcaaagtccgcgagattgtggagcagagctggacagccgactagtgcaggaggatgctcatcgtgcccgaaagggcacaataaggaaccatgaaaaaacatccttgtg

SEQ ID NO: 63276 - DNA, 273 bp, Zea mays
cggcgacgtggggcgcgacctacggcaacagctggaggaccaccaacgacatcgccgacacctgggacagcatgatcgccacggcggaccagaacgaggtgtggtcggagtacgcgcgtcccggcggatggaacgatccggacatgctggaggtgggcaacgggggcatgaccaacagcgagtacgtcgtgcacttcagcctctgggcgatctccaaggcgcctctcatcatcggctgcgacgtcaggcatatgtcgcgggagacgtacgcca

SEQ ID NO: 63277 - DNA, 273 bp, Zea mays
agccaacgtccgtgaaatttttgacaaggctcgtcaatctgctccttgtgtcctcttctttgatgagcttgactcaattgctactcagagaggaagcagtgtgggtgatgctggaggtgcggctgatagagtgcttaatcagctactgacagaaatggatggcatgaatgccaagaaaactgtgtttattattggagctacaaacaggcctgacatcattgaccctgctctgctgaggccagggcgtcttgaccagctgatctacattccact

SEQ ID NO: 63278 - DNA, 221 bp, Zea mays
cgcaactaccggtagtgctgcggggatcaattttgcagtaataaaaaatctactatcaacgcggatggtactctgttgtttatagtccctgctgctaaccacccttgttgctggtgctgctggagaggcattgtacctgtccatgcatatatgatatatatatgttgtaacgttgtgaaagcaaacaatcttgggtaccaatgtttgttattctttcgctc

SEQ ID NO: 63279 - DNA, 269 bp, Zea mays
atacatagtttcttctactacacgacgacaaacatggggaagcctgcgaagatcggagagtggggtggatacgccggcgatcgtcgggatctgagggctactccggaccggctgaccgaggtgaaggtcacggcggacaacagcagctgcatccgctccatctccttcatctacatcggagccgatggcaagccgtacgaggaggggccatggggtttcggccatgctggcacggagtacaagattgatctgtgcaggttcgacgagag

SEQ ID NO: 63280 - DNA, 271 bp, Zea mays
atcgcgagcgcacgcacgtaagcacgttgtcggaagctcaagttagaagaagcaccagtgcctgatcgatggcggcccaggctctcctctccggccggcagctgctgggccgccccgtgcagtcggccgtctctaggtcgtcggcgaggaaggcgcccttcgtcgtcagggccagctccagccctccagccaagcaaggtgccgacaggagctgtggttcgcgtccaagcagtccctctcctacctcgatggcacgctgcccggcgactat

SEQ ID NO: 63281 - DNA, 271 bp, Zea mays
atcagatgatttgctgctgcaacaagatggatgcgaccactcccaagtattccaaggcccgttacgatgagattgtgaaggaagtttcatcctacctcaagaaggttggatacaaccctgacaagattgcctttgtccctatctctggttttgagggtgacaacatgattgagaggtccaccaaccttgactggtacaagggtccaaccctgcttgaggctcttgaccagatcaccgagcccaagaggccttcagacaagcccctgcgtct

SEQ ID NO: 63282 - DNA, 271 bp, Zea mays
agagtagctcttaacaatcagagggccatgtttggagacattcaagggaaagtgaagcagctgggtgaaaagttcccggtaatcagaggtcttcttggtgccatcaagcggaagaaatcaaaggacaccataatcctctcggcagtgatcgcggcctgcaccatcttcctgatcatttactggctttcgaaatgatgggtcgcacctgagagaagctcccgatctcccttggcccggattagctggttgatatcagatagctgtatcgtct

SEQ ID NO: 63283 - DNA, 270 bp, Zea mays
gtgtggaccggaaggacttcaactcatatggtagccgtcgtggtaatgatgaagtaatggcaaggggaacgtttgcaaacattaggatcgtgaacaagtttttgaacggagaagttggacccaagaccattcatgttcctactggggagaagctttctgtttttgatgcggccatgagatacaaatctgagggccatgctactataatcctcgctggtgctgagtatggaagcggcagttctcgtgattgggctgctaagggtccgatgc

SEQ ID NO: 63284 - DNA, 268 bp, Zea mays
ggactcacctccccaaccgtttgcctccgtctcgcgtgacttcattcccagctgccggcggcgacctccacgtggtgccattcgccggcaacgagcacccgcccaccaggatccaggtttgtgctgcgagagcgcctatccattcaccatgattaatttcgtgctcctgatcagccgccagggcaaggtgaggctcaccaagtggtattctccttacacccagaaagagaggaccaaggtcattcgcgaactcagtggactcattctt

SEQ ID NO: 63285 - DNA, 270 bp, Zea mays
gtcagtgggtgcattgctcggatatgctcagggtgcgaaccacaagcgtgtgattgccttcattggtgatgggagcttccaggttacagcacaggatgtgtcaactatgctgcgatgtgagcagaacatcataatcttcctgatcaacaacggtgggtacacgattgaggtggaaatccatgacgggccatacaacgtcatcaagaactggaactacactggctttgtggacgccatccacaatggcgagggcaagtgctggacctccaa

SEQ ID NO: 63286 - DNA, 276 bp, Zea mays
gatgccacgaaaaccttcaacgaagcattggacaccaccaagactgttatttggaacggccccatgggagtgtttgagttcgagaagtttgcagctggaactgaggcgattgccaagaagctagctgagcttacaaccacgaagggtgtcactaccatcatcggcggcggcgactctgtcgctgctgtcgagaaggctgggctggcggacaagatgagccacatttcgaccggcggcggtgcgagcttggaactcttggaaggcaagactctacct

SEQ ID NO: 63287 - DNA, 270 bp, Zea mays
catccccagcaaaatgatacaacgaacactccgggtatgttacctgtggaacctgcagaagaaccaatatatgttaatgcaaaacaataccatgcaatccttaggaggaggcaaacacgtgctaaattggaggcccagaacaagatggtgaaaaatcggaagccatatcttcatgagtcccgacatcgtcatgccatgaaacgggctcgtggatcaggaggacggttcctcaacacaaagcagctccaggagcagaaccagcagtatcag

SEQ ID NO: 63288 - DNA, 270 bp, Zea mays
tcctgagccacacccttctaataaccgagctttaccagcagcttaagttccctgttaagccagctgatatcaaggaaagaatagagagcttaatagaccgggagtacctggagcgggacaggagtaacccccagatctacaactatctggcttgacagagctttggaggatcattaaagagaccgctcactttattatcagaaaagacactgtaaattggtttgttttccagttccttgttctttcctgtttttcttctctgggagggag

SEQ ID NO: 63289 - DNA, 270 bp, Zea mays
gtgcgtcatggggtcgctcttcggcgggctgaagcccaagacccacatccccgtcctcgccaagaaatgcatggacaaggagctgcagctggacgcgctggtcacgcatgagcttggactgcaggacatcaacaaggccttcgacctgctcctgcaggggaaaagtctgcgctgcatcctctggatggacaaggacaagtaacggaaggagaggggcggccggaccaatccttcctgtctctgaataaatttgccctgttttttcagcga

SEQ ID NO: 63290 - DNA, 270 bp, Zea mays
ggctgatctgtggtcatgtggagttatcctgtttgttctgctagcagggtatttgccgtttgaggattctaatctcatgactttgtataagaacatatcaaatgcagaatttacatttccaccatggacatcttttcctgccaagaggttgttaacaagaatccttgatccaaatccaatgacgagaataacaatcccagaaatattagaggatgagtggttcaaaaagggctacaagcgcccagaattttgatgaacaatatgacacca

SEQ ID NO: 63291 - DNA, 266 bp, Zea mays
gtaatagttgatgatgttcttcctggaaactataaggttaaggctggtcaagatattatgatatctgtgtacaatatacataggtccccggaggtctgggatagagcagatgagttcattccagagaggtttgatttagagggacctgttccaaatgagtcaaacacagatttcatgtttattccattcagtgggggtcctcggaaatgtgctggagatcaattcgctctcctagaagcaatagtggcacttgcagttgtgttgca

SEQ ID NO: 63292 - DNA, 271 bp, Zea mays
cgggtatttctgggccacaaacagtacttcgtctcttcggatgtcggtgccggtaaaatgcaatggtatgcttttcacaaggaagaggctggtggcactgaccctgagaacggcaaaaagaaaagattgcttgagatatttgatgggtggtgtgataatgtcatcgatttggtaaacgcaaccgacgaagaagcgattcttcgccgagatatatacgaccgcccacctactataaattgggggaaaggtcgtgtcaccttgctcggcgatt

SEQ ID NO: 63293 - DNA, 272 bp, Zea mays
aactggagcagctactaatgtcatttttgggcttgctttgggttacaaatcagtcattatcccaatttttgctattgcgtttagtatcttcctcagcttcagccttgctgccatgtatggtgttgctgtggctgctcttggaatgctgagcaccattgccacaggtcttgctattgatgcatatggccctatcagtgataatgctggaggaatagctgaaatggctgggatgagccataggattcgtgagagaactgatgctctagatgctg

SEQ ID NO: 63294 - DNA, 265 bp, Zea mays
caaggcattcctatatctctcatgtatggaagagaagatccttggattagacctatttggggccttaaagttaaacagcaagtgcccgaagcaccttattatgaaattagccccgctggtcattgtcctcatgatgaggtccctgaggttataaactacttgctccgtgggtggctgaagaacctcgagtctgagggctcagtcgacctgccgtttctagaagaacgcagctatgctgagcgtggtgtatcagggagctggagtt

SEQ ID NO: 63295 - DNA, 263 bp, Zea mays
cgccattcccagagaatgactggaacgccatggtggttggcatcaagggcgaggtgatggttaactacaagaggcggaagcttgccgtggacaactaagattgtggccgcagtctctagatgcttgcttcttgttgattcaattgttttcacatgtttgtcagcatttgttcagtgcaagttctgctgtacgcaagccagccttgttaggggtgtttctgttgtttaggattttgaaatttgcttcactatggggccgccatg

SEQ ID NO: 63296 - DNA, 266 bp, Zea mays
gctgcgagacgagaagacgaggctcaaggctgagaaggagaggttggagcagatgctcaagggcgtcgtcagccacgccgcggtggctgctccggggcccttcgtcccgcaccctgctgcggtcgctccatctttccaccaccacccggcggtgtttgctcaggctggaaagttcgtcccgtaccccagctacccgccgccggctgcgttctggcagtggataccgccgacgtccctcgacacgaccaaggaccccgcacactggc

SEQ ID NO: 63297 - DNA, 267 bp, Zea mays
cagagaattagctccggatatctacaaagtggaacagcaatacaaggatcgtgcaatttgtgatgctgaatgttgacaacacgaagtgggagcaagagcttgacgagttcggggtggaaggcattcctcacttcgcctttctggataaggaaggaaacgaggaaggcaatgttgtcgggagacttccaaagcagtatttccttgacaacgtggttgcgcttgcttctggtgatcccgagataccgcacgcacgagtggtcggtcagt

SEQ ID NO: 63298 - DNA, 302 bp, Zea mays
cttgctcttcatagagatgatcgctatcttgatgaaccggcacttgatacagtgaaaaggatgaaactatattcagagtctcttgcgcgctttcaaggaggctcgccatatatctatccattgtatggtctgggtgagctaccacagggttttgcacgattgagtgctgtttatggtggtacttacatgttaaacaagccagagtgcaaggttgaattcgatatggaggggaaagtgtgtggtgtcacatctgaaggtgaaactgcaaagtgcaagaaggtggtctgtgatccttcgtattt

SEQ ID NO: 63299 - DNA, 284 bp, Zea mays
gcccaacccttgcgccggtaggtggtggcggtgaggatatcgggttacctgaggaggcagtgatggcggccacgattcagtacaaccggagcaacccggcggtgaagcggatcctgcaggaggtcaaggagatgcagtccaacccctcacccgacttcatgtccctccccctcgaggaggacatcttcgagtggcaatttgctatccttggtccgagagacagcgagtttgagggtggaatttatcatggcaggatccagctaccttcggattatccattcaag

SEQ ID NO: 63300 - DNA, 283 bp, Zea mays
ctcgccggggacagagagagagaccgacgcgccggcagatgccaagctcaccctagagggggaagagggcgaccgaaggcggtgatgggtttcatcatggacttcgcggagaatctgatcctccgtctgatggaggacccggacaagcgcgaccaggttcggcgggagcatgtctacaagatgaaggagcggtgcgagcgcactaaggcggcgtggagcctccctctgcgcccctacggcttctggaccttcgaccgcttcaactcgcagctctcctgggatc

SEQ ID NO: 63301 - DNA, 284 bp, Zea mays
cccaatcctctcttacgccgatttctaccagctcgcgggagttgtggccgtggaggtcaccggtgggcctgagattcccttccaccccggtagggaggacaagcctcagcccccacctgagggccgccttcctgatgccactaagggttctgaccacctgaggcaagtttttggcaagcagatgggcttgagcgatcaggacattgttgccctctctggtggccacaccttgggaaggtgccacaaagagcggtctggtttcgagggggcctggactacaaacc

SEQ ID NO: 63302 - DNA, 282 bp, Zea mays
gaggctctccaggaggcccttcctggtgacaatgttggcttcaatgttaagaatgttgctgtgaaggatctgaagcgtgggtatgtggcctccaactctaaggatgaccctgccaaggaggctgctagcttcacatcccaggtcatcatcatgaaccaccctgggcagattggcaacggctatgccccagtgctggactgccacacctcgcacattgctgtcaagtttgcggagtcattaccaagattgataggcggtctggcaaggagcttgagaaggagc

SEQ ID NO: 63303 - DNA, 284 bp, Zea mays
acgtgggtgggggaaatgctgcgtctcgggcggctcaggcattcgcgtaaacgatgcggagaagctcgtgacgatcggaggccatgtgctgcgcgaaggtgagtggctgtcgctgaatgggtcgactggtgaggtgatccttgggaagcagccgctttccccaccagcccttagtggtgatctgggaactttcatggcctgggtggatgatgttagacagctcaaggtcctggctaacgccgatacccctgatgatgcattgactgcgcgaaacaatggggcac

SEQ ID NO: 63304 - DNA, 279 bp, Zea mays
cacacggcgtgcccaaggtgcattataagggtcgtcagggtgactactatggcatgattatggatatgctggggcctagtttgtgggattcatggaattcattaggccaatccatgccatcggaaatggtggcttgcattgccatggagtccatttccatcttggaaagcatgcattctaaaggatatgtgcatggcgacgtcaaacctgagaactttcttctggggcagccttcaacgcctcatgaaaagaaactttatcttgtggatcttggattag

SEQ ID NO: 63305 - DNA, 236 bp, Zea mays
cagaagtgagacatttggaggcccttcaagggactggattggagggtatgaagaatgttccaaaattttatatgaagaacttgattacatcaatgaaggatggaatgctgacaagtgtcggcgggatgtcagaaatataaagtgggttcgcgtgccacttatcatgtgggactacacaactgaaaaggtgctaaccctggagtatgcccctggtattaaaataaacaatttggatg

SEQ ID NO: 63306 - DNA, 280 bp, Zea mays
gggtttcggccatgctggcacggagtacaagattgatctgtgcaggttcgacgagagcttgacggagatctccgggaccacgggcccagcctacaacattgacaatctggtcaagtctctcaaattcgtcaccaacaaacgcgcttacggaccgtacggcagggacgagggcaccccgttccgtgtcaaggtgatgaacaacggccacgtcgctggcttctttggccgctctggagattgcctggacgcgatcgggctctacgtgaaccccaactaataa

SEQ ID NO: 63307 - DNA, 278 bp, Zea mays
gaaggtttggctggtggactcaaagggtttgattgttgactctcgtaaaggctcccttcagccattcaagaaaccttgggcgcatgagcacgagcccttgaaaaccttgtatgatgctgttcaatccatcaaacctacagttctgatcgggacatctggagtcggacgaacattcacaaaagaaatcattgaggccatgtcttccttcaacgagaggcctatcatcttttcactgtcaaactcaacctcgcattctgaatgcactgctgaacaagcat

SEQ ID NO: 63308 - DNA, 279 bp, Zea mays
aagtaaatgggaaaacaactcagtagtaatgcttttcgaattataaattatttctatttcacacgatgcttctagggacgtgatgagtcctccaagccgggaagcagggcatggtaaagcactccaagctgctctttcatcgggaattctacagcgtgtagggactgatcactgcacattcaactccacacagaaagcttttggttctgatgattttcggaagattcccaatggtgtaaatggtcttgaggaacggatgcatatactttgggacagcat

SEQ ID NO: 63309 - DNA, 280 bp, Zea mays
ggaggatgcgtgttctgaggcgcctgctccgcaagtaccgtgaggccaagaagatcgacaagcacatgtatcatgacatgtacatgaaggtcaagggtaatatgtttaagaacaagagggtgcttatggagagtatccacaagtccaaggctgagaaggccagagagaagacactttctgatcagtttgaggccaagcgtgcaaagagcaaggcaagccgtgagaggaagattgctaggagggaggagaggctggcccagggcccaagagaaccaacagc

SEQ ID NO: 63310 - DNA, 272 bp, Zea mays
gtcccctgctccattctcagccgccgccaatcccttcccgtgctccgcaaccgctgagtgagaagaagagatggccggcaaaggcgatggcccggctatcggcatcgatctcggcacgacgtactcttgcgtcggcgtgtggcagcacgaccgcgtcgagatcattgccaacgaccagggtaaccgcaccacgccctcgtacgtcgccttcaccgactccgagcgcctcatcggagatgcggccaagaaccaggtcgccatgaaccccatca

SEQ ID NO: 63311 - DNA, 275 bp, Zea mays
cgggaggtttgttgctacatgatctcgtgtaaggattctgtgaacatagacgtcgtcatcgactggcttatcaagcactctagaacagcgaagtaggctttctgtgtgtttgtatcgcttgatgcacggtgttttatcttttgtgaatctgcgcttcccagaagcctggttccttggtccccatgttaaaagcggccaccttgtaatttatggtgtcgttagtgtcacagacgaactgcatggtatctagactagacacatgtattcccgttgta

SEQ ID NO: 63312 - DNA, 276 bp, Zea mays
acacattcttgggaaagccagagaacgagagtgagatatatccagattttgtggcaattgccaaagggttcaacattccagcagtccgtgtgacaaagaagagcgaagtccatgcagcaatcaagaagatgcttgatgctccagggccgtacctcttggatataatcgtcccgcaccaggagcatgtgttgcctatgatccctagtggtggggctttcaaggatatgatcctggatggtgatggcatgactgtgtattgatctaaagctcagcaag

SEQ ID NO: 63313 - DNA, 275 bp, Zea mays
gcaatcttgacttctattcagtccctgctgtgtgatccaaacccgaactcccctgcaaactcagaagccgcaagactgttcagtgagaacaagcgggagtacaaccgcaaagtccgcgagattgtggagcagagctggacagccgactaatgcaggaggctgctcatcgtgcccgaaagggcacaatataggaaccatgaaaaaacatccttgtgtttgtggttcgccagacctgtcgaaacattgaagaactctagttctagtctgtcgttgtc

SEQ ID NO: 63314 - DNA, 269 bp, Zea mays
ctgatggcctatgcgtttgagttcatcatcaacaatggcgggatcgacaccgagcaggattacccttacaagggcacggacggacggtgtcctgtcaacaggaaaaacgcgaaggttgtcaccattgacagctacgaacatatcccagcgaacgatcagaagagtctgcagaaggccattgcacaccaacctatcagtgtcgcaattgaggctgctggcacagcatttcagcctacaactcggtatcttcactagcaactctggaacag

SEQ ID NO: 63315 - DNA, 277 bp, Zea mays
gattgatctgtgcaggttcgacgagagcttgacggagatctccgggaccacgggcccagcctacaacattgacaatctggtcaagtctctcaaatttgtcaccaacaaacgtacttacggaccgtacggcagggacgagggcaccccgttccgtgtcaaggtgatgaacaacggccacgtcgctggcttctttggccgctctggagattgcctggacgcgatcgggctctacgtgaaccccaactaataactaaaacgatggatcggatcatctgcc

SEQ ID NO: 63316 - DNA, 278 bp, Zea mays
ggagcttctgaaggcaaagggcgtggtaggcaggttattgctgttgcaaagtcatcagatcttgtgctgatggttctggatgcctcaaagagtgaaggacatcgtcaaatattaactagagaactggaagctgttggactccgtcttaacaaaaggcctccccagatatacttcaagaggaagaagacgggtgggatttctttcaataccactgttcctttgactcatattgatgagaagctgtgctatcagattctgcacgagtacaaaattcacaa

SEQ ID NO: 63317 - DNA, 274 bp, Zea mays
ctcccatttgtctcacctcgctctcacgcctgcctgcgtcaccggaagcgaacccgcgggcgagcgatccgatccccttcgcggcctcgtcaacgacgccgagcattctgctgcagaacactgaggaatggctgaagaagatgtccagccccttgtgtgcgacaatggcactggaatggtcaaggcaggtttcgctggtgacgacgcgccgagggcagtctttcccagcatcgtaggcaggccacgccacactggcgtgatggtgggcattggc

SEQ ID NO: 63318 - DNA, 274 bp, Zea mays
tgaatatgttgtcacaagatggtatagagcaccagagcttttattgaactcctctgaatatactgctgccattgatgtgtggtctctgggctgtatatttatggaactgatggaccgaaaacccttgtttcctggaagagaccatgtccatcagctacgtctactaatggagctcattggaacaccgaatgaggctgatcttgattttgtaaatgaaaatgcaagaagatatatccgccaacttccctgtcatgctagacagtccttccctgaa

SEQ ID NO: 63319 - DNA, 274 bp, Zea mays
gcagcatccccgccgaccgcgtccccgacatggagcagcggaagctgatgaacctcctcctcctgggcgccatatcgctgcccaccgtcggcatggtcgtcccctacggcgccttcttcgtccccgccggctccgggaacggcggcggcgggacctacgccaaggacaagctgggcaacgacatcacggtggaggagtggctcaacacgcacggtcccaacgaccgcacgctcgcgcaggggctcaagggtgaccccacgtacctggtggtgga

SEQ ID NO: 63320 - DNA, 274 bp, Zea mays
ggaacaagctgaatgacaggttccttgaattggggtctacattagaaccagggaagccagtaaaagctgacaaagctgctatcctaagtgatgctactcgcatggttattcagcttcgttcagaagcacagcagctgaaggaaactaatggtagtcttgaagaaaagatcaaagaactcaaggccgagaaggatgaacttcgtgatgagaagcagaagctgaaattggagaaggagagtttagaacaccagatgaagctgatgacatcgactcc

SEQ ID NO: 63321 - DNA, 273 bp, Zea mays
ttctactacacgacgacaaacatggggaagcctgcgaagatcggagagtggggtggatacgccggcgatcgtcgggatctgagggctactccggaccggctgaccgaggtgaaggtcacggcggacaacagcagctgcatccgctccatctccttcatctacatcggagccgatggcaagccgtacgaggaggggccatggggtttcggccatgctggcacggagtacaagattgatctgtgcaggttcgacgagagcttgacggagatctcc

SEQ ID NO: 63322 - DNA, 286 bp, Zea mays
aaagatgcagagaagtgtcttgaactagaccccaccttcactaaagggtacacaaggaaaggtgcaattcaattcttcatgaaagaatatgacaaggccatggaaacctatcaggctggcctgaagcatgacccgaaaaaccaggaactgcttgatggtgttaggaggtgcattgaacaaattaacaaggctaacagaggtgaaataagtcaggacgaattgcaagaaagacagaacaaagctatgcaagacccagagatccagaacattcttaccgaacctatca

SEQ ID NO: 63323 - DNA, 269 bp, Zea mays
attaaggacaggggcccagtgttcgtgactgcgtttagcccgctctgcatgattttagtgactgtgctaggctccttcattctttctgaggtcgtcactttaggaaggctcattggtgcgacagtcattgttgttggactctatgcgctcatctggggcaagaacaaggaccatgtgaagtcgcaaaacagttttgacaagcacgacacatttgagctgccgttctctacttctgccgttaacaatacaaccggtcccgtcctggcaac

SEQ ID NO: 63324 - DNA, 289 bp, Zea mays
gtactatggacattgctcatgatagagctggtttctatatctgctggggatgcttggtatgggttccatccatatatacttcccctggaatgtaccttgtaaaccaccctttgaatttgggcccccagctagcactctcaattcttctagctggaatgttgtgcatatacataaactatgattgtgaccgtcagcgccaagaatttcgacggacgaatgggaaatgctcggtctggggcaaggctccatctaagattgttgcctcttatcagactacaaagggagaaac

SEQ ID NO: 63325 - DNA, 268 bp, Zea mays
gtgctggagctgttcttctcatgaaaagatctgtggctctgaagaaagggctgcccattcttggtattttcaggagctttgcagctgttggagtggatccagctgttatgggcgttggtcctgctgtggccattcctgctgctgtgaagtctgcaggccttgagattggcgacattgatctgtttgaactgaatgaggccttcgcctctcagtttgtctattgctgcaacaagttggggctggaccgttctaaagtaaatgtaaatgg

SEQ ID NO: 63326 - DNA, 240 bp, Zea mays
ctgcctgccgtttccatctccatccagttccacgccaccacccacccacccactccagtcctttccccaacccacggcggccgtggacgccagggtcttctacctcaagatgaagggggactaccaccgctacctcgccgagttcaagaccggcgccgagcgcaaggacgccgcggactccacgctcgccgcctaccaggccgcgtcagacatcgccgtctaagagctgcccccacgcat

SEQ ID NO: 63327 - DNA, 254 bp, Zea mays
cgttgaagtctgtcatggagagcgcctaccaaagctaataaggaatgctgaaacacaaaaggtgccactcatggcagttgttggtcctaaagaagttcaagccaggaccctgactatcaggtccaggcacaacggggagatcggcacgatgcccgtcgatgaattcatcaccaggcttcaacttgctgtcgcaaacaaatcatcactatagatccgttggtccgccaaatttcagtccagaatgtagaacattt

SEQ ID NO: 63328 - DNA, 256 bp, Zea mays
cacatacatagtttcttctactacacgacgacaaacatagggaagcctgcgaagatcggagagtggggtggatacgccggcgatcgtcgggatctgagggctactccggaccggctgatcgaggtgaaggtcacggcggacaacagcagctgcatccgctccatctccttcatctacatcggagccgatggcaaaccgtacgaggaggggccatggggtttcggccatgctggcacggagtacaagattgatctgg

SEQ ID NO: 63329 - DNA, 254 bp, Zea mays
gggcgattgctgaaggtgagctgaagtcaactaaggcgtatgagaaatggtctaaaaagatttcggagatggagccaccaacaaatccattagagaggagagcgaagagtaggaagaaaagtgaggagtacgatctgatcctggccatctcacagcgcagggctgagcggaaaaaccagttcaactccatcctctcgaacatcatgtccaagtgtgattccaaggcaagcagttctgagcccacagaagaggag

SEQ ID NO: 63330 - DNA, 259 bp, Zea mays
  unsure (1)..(259): unsure at all n locations
tganaatagagcaaagtgccagctggcactanaaagcaggtgtattttatgacaaagtatcaaacgtgactatttgggggaaccattcgacgactcaggttcctgatttcttgaatgccaaaattgatggaagaccagtgaaagaagtcattaaggataccaagtggttagaggaagagttcaccctcacagttcaaaagcgtggaggtgtgctcatccaaaaatggggcagatcatcagctgcatcgaccgctgttng

SEQ ID NO: 63331 - DNA, 249 bp, Zea mays
cttcgctccaaccttccccagccatggcgaccgcgacgcgaggctgctccccgcgctcctcaagaccctagctccagccggcgcgcgcggcctctccaccgagaaggctgttggtgcagccgccgtcgtcggcagccacaccgctaagtggatgcaggacacgagcaagaagtcgccaatggaactgatcaacgaggtacctccgatcaaggttgatggtcgcattgccgtctgtgaaggggcttctga

SEQ ID NO: 63332 - DNA, 254 bp, Zea mays
gtcgggcgttacaagcaaatcaagcgaacagaaggtgtctcgagcactgacatagttgggaggatattgctaacattcaggcagaaagatgctgacactgatttaagtgttgtcgttgctgagaagtctggagagaaatcaaatgatgaagtgaaaagtcagctatctcatttccttccaacttctcgccggatcatgcagttttcaaatgggcaggctccttcgccaggtgctcgtgttgtctatgtagatgg

SEQ ID NO: 63333 - DNA, 243 bp, Zea mays
gacgccgccgccgcaagccgtccgccttgcccttcacgaaggcttggtcctcctccttgtatctccactccccccttcacagatccgttcctccagctagggttagcgttcctctgcagcgatggcgatcaatcggactaatgcggagaagaagatcgcgtacgacaagaagctgtgcagcctgctcgatgagtacaccaaggtgctcatcgccctggccgacaacgtcggttccaagcagct

SEQ ID NO: 63334 - DNA, 226 bp, Zea mays
gctaaaaccctctccaccgtccacctcagctcccatcaccgctcccctacgtctccagcatctcccgcctccgtcgtctcgtctctgctcctcacctcgccgccagccatgggcaagatcaagatcggaatcaacggtttcggaaggatcggcaggctcgtggccagggtcgccctgcagagcgaggatgtcgagctcgtcgccgtcaacgaccccttcatcacac

SEQ ID NO: 63335 - DNA, 248 bp, Zea mays
aaaggctatagggccacaggatgtgttggccaccctgttgaataacttgaaggtgcaagaacgacagaaccgggtctgtacaactgtagctattgctatagttgctgaaacttgctcacctttcacagttttacctgcccttatgaatgagtaccgggtcccagagctcaatgtccaaaatggtgttctgaagtcactctctttcctctttgagtatattggtgagatgggcaaagattacatatatc

SEQ ID NO: 63336 - DNA, 251 bp, Zea mays
agaggattaaggctgtcaggcagatgattatggctcccacgcttgagctgaggcagcaggcgctcgaccgtctcttgccgtatcagaggtctgacttcgaaggcattttccgtgctatggatggactcccggtgaccatccgactcctggaccctcccctccacgagttccttccagaagggaacatcgaggacattgtaagtgaattatgtgctgagacgggagccaaccaggaggatgccctcgcgcaa

SEQ ID NO: 63337 - DNA, 244 bp, Zea mays
caagagctactactacagctcctcatctcaagtgtgtagacgagacagagagacactgagagagcgccatggccagcctccaagtcactcctacttcggcgttcactgagtggaacgagctgaagttcgaaggcctgtacctgttccacacgcccctgggctcaggcgccaaccaagctcgggtcatagacaacaaggcgccgattggcatcggtgccaccgtagttaacaacttgacagtgta

SEQ ID NO: 63338 - DNA, 238 bp, Zea mays
cactcatcgatctacacacatacatagtatcttctactacacgacgacaaccatggggaagcctgcgaagatcggagagtggggtggatacgccggcgatcgtcgggatctgagggctactccggaccggctgatcgaggtgaaggtcacgggcggacaacagcagctgcatccgctccatctccttcatctacatcggagccgatggcagaccgtacgaggaggggccatgggtttc

SEQ ID NO: 63339 - DNA, 235 bp, Zea mays
atctgggtgcaggcggcggcaagatgaacaggaagccaggagactgggactgcagggcgtgccagcacctcaacttcagccgtcgggatgcatgccagcgctgcagtgaaccacgtggagttggtgatcgtagcggcggtggtggcgacttgggtgggcgtggtgagctctccttcggcggtggctttggtgctggctctgatgtccgccctggtgactggtactgctcctgcgg

SEQ ID NO: 63340 - DNA, 250 bp, Zea mays
caacgtcaaggccaagatccaggacaaggagggcatcccaccggaccaacagcgcctgatcttcgccggcaagcagctggaggatggtcgcactcttgcggattacaacatccagaaggagagcaccctccacctggtgctccgcctcaggggtggcatgcagatctttgtgaagacattgactggcaagaccatcaccttggaggtggagtcgtctgacacaatcgataatgtcaaagccaagatccag

SEQ ID NO: 63341 - DNA, 249 bp, Zea mays
cacacatacatagtttcttctactacacgacgacaaacatggggaagcctgcgaagatcggagagtggggtggatacgccggcgatcgtcgggatctgagggctactccggaccggctgaccgaggtgaaggtcacggcggacaacagcagctgcatccgctccatctccttcatctacatcggagccgatggcaagccgtacgaggaggggccatggggtttcggccatgctggcacggagtacaaga

SEQ ID NO: 63342 - DNA, 246 bp, Zea mays
ctcgatctacacacatacatagtctcttctactacacgacgacaaacatggggaagcctgcgaagatcggagagtggggtggatacgccggcgatcgtcgggatctgagggctactccggaccggctgatcgaggtgaaggtcacggcggacaacagcagctgcatccgctccatctccttcatctacatcggagccgatggcaaaccgtacgaggaggggccatggggtttcgccatgctggcac

SEQ ID NO: 63343 - DNA, 251 bp, Zea mays
agttggatctgccattactttggaccagcttattgagcctgctcttttacccccaccacccatttcgtggtacttgagagggattacttcaaggacaactgagatgctggtgaacgatctgatagcggaaactgctcgattgcgcaccatctcaaacaacgcgaatgccaagcaaggtactgaagaaaccggtgatgctaacataggtgatccagttagagagtgtggtgacattaaggaaaggtggcgac

SEQ ID NO: 63344 - DNA, 242 bp, Zea mays
atcgattggatggtggctttcaaaaggatggcgatgaaatgcactcaccatcgactcgtccaatttttgaatatcttgagacagatccaccatttggtagagagcctttaacagacaaggtatcagttcttgcaagtagatttccagatttgacgaaattcagaagttgtgacctgctgccaaccagttggatgtctgttgcatggtaccctatctatagaatccctactgggaccacactc

SEQ ID NO: 63345 - DNA, 237 bp, Zea mays
ccagcatgcgaacgcagcttcttctctgtttcctactcgccgcctccgcgccgctaatcgtcgccacggccaagaaatccggggacgtgtcggagctccagatcggcgtcaagtacaagccggaatcatgcagcattcaagctcacaaaggtgacaaggttaaagttcactaccgtggaaaacttactgatggaacggtttttgattcaagctatgaaagaggtgaccggattgaat

SEQ ID NO: 63346 - DNA, 246 bp, Zea mays
cttcgaccgcgacaacgtggctctcaaaggatttgccaagtgcttcaaggaatccagcgacgaggagagggagcacgctgaaaagctcatggagtaccagaacaaacgtggaggcagggtgaggctccaatcgattgtgacgcctttaaccgagtttgaccaccctgagaaaggagatgctctgtacgctatggagctggctctggccctggaaaagctggtcaatgagaagctgcacaacctgct

SEQ ID NO: 63347 - DNA, 249 bp, Zea mays
tggtgctcatcggggactccggcgtctgctagtccaacctgctctcgcgcttcacgcgcaacgagttcagcctcgagtccaagtccaccatcggcgtcgagttcgccacccgcagcatccacgtcgacgacaaggtcgtcaaggcccagatctgggacaccgccggtcaggaaaggtaccgtgctatcacgagcgcgtactaccgcggagcagtaggggcgctcgtcgtctacgacgtcacgcggcatt

SEQ ID NO: 63348 - DNA, 245 bp, Zea mays
ctcggcacgcaggctagcagcacagcagcagccagagccatcccctctcctcgctacgcttcgcttcctcggcgccgattcctcctcctcctcctccaccctcgtccgtccccttccggcgcacgagctcgcccgagatggcgaacgcgagatcgggtgtcgctgtgaacgatgagtgcatgctgaagtttggcgagctgcagtcgaagaggctgcaccgcttcataactttcaagatggacgac

SEQ ID NO: 63349 - DNA, 241 bp, Zea mays
tctgcccgacgactaggccgccgccgccacggccccgccgccgccgccgtgcccaggtctttgtcggtccttgtccggcaacgagcaccctacagatggctgggaggcacaccattattctgatgcagccatctcaaaatagggcttctagaacatttatggattacaattcgattaatcatgcattggatggaatctgtgggctttatgaaaggaaaattagggatatcaacccaatgat

SEQ ID NO: 63350 - DNA, 247 bp, Zea mays
cgcgctcccgtttccgccgatccgagcgcgcagatcgcggaagcccagcggctcagagtccagggggagggagctcgcggcggctgaggaaggcgttcaccaccgtcgcggatttcattgaggaagagatggggctctcctttgggaagctgttcagccgcctcttcgccaagaaggagatgaggattctcatggtcgggctcgatgccgccggtaagaccaccatcctctataagctcaagctcgg

SEQ ID NO: 63351 - DNA, 207 bp, Zea mays
caagcaaggaatggcgctgggcaggtccgtggaccttaccagttcaacggctacacggagctggtggcggactggacgagatgttcgacttcaacggcgagctgaaaggctgtagcaaggagtggatggtcgtgtacaccgactacgaaggcgacatgatgctggtcggggacgacccctggaatgagttctgcagcatggtgcaca

SEQ ID NO: 63352 - DNA, 240 bp, Zea mays
agccaccacagcgtcgtcctcttcgtctccagtccaagcaagcgaagagcacccctcgagatctctccctccccgcgccgccatggacgcagttgactcggtagtcgacccgctccgggagttcgccaaggacagcatccgcctcgtcaagcgctgccacaagccggaccgcaaggagttcaccaaggtcgccgcgcggactgcgatcggcttcgtcgtcatgggattcgtcggcttctt

SEQ ID NO: 63353 - DNA, 239 bp, Zea mays
gccgcgccatggctccaatttttgctgatatggccaagaagtccccaaatgttgttttcctgaaagttgatgtggatgaaatgaagaccattgctgagcaattcagcgtagaggccatgccaacattcctgttcatgagggagggcgacgtcaaggacagggtcgttggcgcagaaaggaagagctagcaaggaagcttgaactacacatggcctcgtagatcagtgatgccgtaatgt

SEQ ID NO: 63354 - DNA, 235 bp, Zea mays
cactcatcgatctacacacatacatagtatcttctagtacacgacgacaagcatggggaagcctgcgaagatcggagagtggggtggatacgccggcgatcgtcgggatctgagggctactccggaccggctgatcgaggtgaaggtcacggcggacaacagcagctgcatccgctccatctccttcatctacatcggagccgatggcaaaccgtacgaggaggggccatggggt

SEQ ID NO: 63355 - DNA, 237 bp, Zea mays
gcttgacgtcactcctctctctctgggtctggagactgccggaggagtgatgaccgtccttatcccgaggaacaccaccatccccaccaagaaggagcaggtgttctccacctactcggacaaccagcctggtgtgttgatccaggtgtacgagggtgagaggacccggacccgcgacaaccgcctgcttgggaagttcgagctctccggcatcccaccggctcctcgtggtgtccc

SEQ ID NO: 63356 - DNA, 286 bp, Zea mays
cacggtgtctggcgtcggcaagtacctcaagacgcagaaccccagcgtcaaggtcatctgcgttgagcctgccgagagcccagttgtttcaggcggggaaccaggcagccacaagatccagggaatagggccgggattcataccggaagtgctggacacctcggtcatcgacgaggccgtcacggtgaccaccgaggaggcgatggcgggcgcccggaggctggccagggaggagggcctgctcgtcggcatctcttccggggccaacctggcggcctgcttgaag

SEQ ID NO: 63357 - DNA, 295 bp, Zea mays
gttggagcgcaccgccgagcagctgcaaagccaggccgccgccgaggcccccgaggagtcggaggaggagaagcgcgagcgaagtccgccgcgagctccagaaggtagcgaaggagcaagcggagaggagggagacggcgaacaaatgtttgagttgggtcaaaaggcgtacgggaaaggaatgtatggacgatcaattgaagttcttggaggctgcgctcactatcatacgtccctcctctctactcggtggcgagatccaaatttggcttgcaatggagtttgaagccaatag

SEQ ID NO: 63358 - DNA, 284 bp, Zea mays
catcaagtgactcttatccgtcaagttgctgagaaagtgttcgccaatgtgggcaagactatcgggtacaaagttggaacaatgattgagatccccagggcagctctggtggctgatgagatagcggacaggctgaattcttctccttcggaacgaacgacctgacgcagatgacctttgggtacagcagggatgatgtggggaagttcattcccgtctatcttgctcagggcatcctccaacatgaccccttcgaggtcctggaccagaggggagtgggcgag

SEQ ID NO: 63359 - DNA, 283 bp, Zea mays
acacctccaggttatgttgggtacactgagggaggcccctaactgaagcagtccgtcgtcgcccgtacacagttgttctctttgatgagattgagaaggcacatccagatgttttcaacatgatgcttcagatcttagaagatgggctgttaactgatagcatcgggcgcacagttgatttcaagaacacactattgatcatgacatctaatgtcgggagcagtgtcattgagaagggaggtcgcaagattgggttcgaccttgattatgatgagaaagacac

SEQ ID NO: 63360 - DNA, 289 bp, Zea mays
cgcacaacggcgagtatcttccctatctgtcctagacgtcgagaaccccgagttcaagatgaagcttgacaggatggttgagatcaaccagaatatcattgccgtcggagagtccgatgaaatccccgctagtgaagaacctgaagaggattcgacttgacgcctctcaggtgtccgagatcatcgccgcatacctcatgccccccatcgagtctggctcggtagatttcgccgaatttgagccccggctcgtatactgattcggtacgaagatttatccttgagttat

SEQ ID NO: 63361 - DNA, 285 bp, Zea mays
ggccgacccccgcgcctacgtcttcggagaggacgtcgggttcggcggcgtcttccgctgcacgacaggcctcgccgatcggttcggcaagagcagagtgttcaacacgccgctgtgtgagcagggtattgctggatttgccatcggcctagcagcgatgggcaatcgagctatcgcagaaatccagtttgcggactacatctttccagcctttgatcagattgtcaatgaagcagctaagttcagatatcggagtggaaatgaatttactgtggaggcttacga

SEQ ID NO: 63362 - DNA, 289 bp, Zea mays
catcgatctacacacatacatagtttcttctactacacgacgacaaacatggggaagcctgcgaagatcggagagtggggtggatacgccggcgatcgtcgggatctgagggctactccggaccggctgatcgaggtgaaggtcacggcggacaacagcagctgcatccgctccatctccttcatctacatcggagccgatggcaaaccgtacgaggaggggccatggggtttcggccatgctggcacggagtacaagattgatctgtgcaggttcgacgagagcttga

SEQ ID NO: 63363 - DNA, 281 bp, Zea mays
cagcaatatggcgtccctgtctgtggtagagacattcttggggatcttatgctcaaagagtgtgttaaagcccacactaactggcctacatttccacaaatatttatcaaaggagagtttgttggggggtctgacatcatattaagcttgcaccagaagggtgatcttaaggatcttcttggggatattgcacaaagagacgaacaaaaagtgcatgctcacgattcatgaagcaatcaacagtaggttcttttactatgcgctatctactctgccactaa

SEQ ID NO: 63364 - DNA, 281 bp, Zea mays
cagttcctcaaccgtctcgatgagatgatcgtgttcaggcagcttaccaagctcgaggtcaaggagatagcggacatcatgctccaggaggtctttgacaggctgaaggccaaggacatcaatcttcaagtgaccgagaagttcaaggagcgggtggtggacgaaggctacaaccctagctatggtgcacgcccgctgaggcgagccatcatgaggctgctggaggacagccttgctgagaagatgctcgcaggggaggtaaaggagggcgactctgccat

SEQ ID NO: 63365 - DNA, 178 bp, Zea mays
gtgagagagagatcaacagagttcttcagtttgctatctctctctgcatgtttggcgtcagtctttgtgctcatgtacgtacgtgtgtctacctgcatgttggttgatccgattgcatctgctgtaaccatatattaattggtccacgatgatatgatttgatactatatatatacta

SEQ ID NO: 63366 - DNA, 267 bp, Zea mays
agctgattatgattcagatccgaatgtcattgctgaacatctctaatgagactaacgctgaagaagagaaagaagaattatcaggaatacattgtgagaagctagcaattgcttttgcaatttcaaattcccctcctttcagaagcatacggatactaaagaccttaaggatgtgtagccattgtcacatctttgccaagctagtttcagaaaaatacgagcggcagatactaatcaaggagttaatattgtttgcacaagttgagg

SEQ ID NO: 63367 - DNA, 283 bp, Zea mays
cttatttgcaaagacgccaatgctaagtttaattttggagaacaaggttatttggcatttgaacatataacatgggctccataccagaccaagctgatagacaccgagcttctgacccctgttgagatcgactgggtgaacacgtaccactcagactgccggaagatcttggagcctcatctgaacgagcaggagaagcaatggctgatgaaagctactgagcccgtagctgcaagaggctgagccttttcgtcaacgttgcatgccaccgagcgccaggctc

SEQ ID NO: 63368 - DNA, 280 bp, Zea mays
attgactgcaccggaatgtcgtttcgggattttatgcaaggaaagcttccacaggctcctggggagttgcccactcttaacgattgggagaaccatctaacaacaatttttcctgaggttaggctaaagaggtaccttgagatgagaggtgctgatggtggcccatggaggagattgtgtgcgttgcctgcattttgggttgggctgctgtacgacgaggaatcgttacaaagcattttagacatgacttttgattggacaaaggaggaaagagagatgc

SEQ ID NO: 63369 - DNA, 279 bp, Zea mays
gggatattgatcaggcaatatgtgtctcacatacaagcaaagagaacactgtcttgaggtctgggatatctccagagaaggttttcatggttcctaatgcagttgacactgcaatgtttactccctctcccaagcgcttaaactgtgatgaaatagttattgttgtggtcagtaggttagtataccgaaaaggcgccgaccttcttgttgaagtcattccagaagtgtgtcggctatttccaaaggttcactttattgttggtggtgatggtccaaaac

SEQ ID NO: 63370 - DNA, 279 bp, Zea mays
ctcaatttgaaatattgcgggaactgattcacttttcatttgctcaggcatgaagctgagcttgctgcagcagctgcacaacctcttcctgatgacgatgatgatctgattgagtagaaaggatcatgagtcttgaacttgagcaggagttgtgccttgcgtgttttaagttgttctagggtgaactcttgagttctcattgtctggatcatctttttctccttggatgtgttgcatcttttgagtgtggaaatggatggtactcctcgccatgaattt

SEQ ID NO: 63371 - DNA, 286 bp, Zea mays
ctgcagatgagaaggcattctttgatgactacaaagaggcccacctcaagctctccgaactggggtatgctgatgcttaaatggcccatatcctggagcgggatacaaaatgctgcctgtatggactcgtgcgatcttttgcatttggattcagggtgtaccaccagattgtctagtgtcttctctgtaataaatttatctgttcttggtactttgtctatggttgaatcggaacccattttccgtttgcctagattcttaatttctggtgctgtatccaactgaa

SEQ ID NO: 63372 - DNA, 278 bp, Zea mays
gcctgacacttctgtatataactcccttatcggcgcacatctgcattcacgagacaagactaaggctttggccaaagctctcggctattttgagaagatgaagtgtatagagagatgtcagccgactattttgacatacaacattctgctaagggcttttgcacaggctggtgacacaaagcaggtagacatgttgttcaaggatctggatgaaagtgtagtatcgcctgacgtatatacttacaatggggtgcttgacgcatacgggaagaatggca

SEQ ID NO: 63373 - DNA, 278 bp, Zea mays
catatatcctgggctattcgacagcgaagtagaggctgcaagggcgtacgacaaagccgcgatcaaatgcaacggtacagaggccgtgacgaacttcgagcccagcacgtacgacggggagctgctactgactgctgaagctagcgcagaagttgctgacgacgttgatctgaacttgagcatctcgcaaccggcatcgtcccagagccccaaaagagacaagaactgcctaggtccgcagctccaccaccaccatgggcggccgtttgacggctccg

SEQ ID NO: 63374 - DNA, 278 bp, Zea mays
tatcacctggtgccagctcgggatccatgacaaaccagttgggttgctgaacgtcgacggctactacgacccgctgctcgccctgttcgagaaaggcgccgccgagggtttcatcagcaccgactgcagccagatattcgtctcggcgccaaccgcgagcgagctgctcacaaagatggagcaatacacccgggtgcaccaggaggtagccccagcgacgagctgggagatctcggagctcggctacggcagaggaggagtacgaggagaaggagacg

SEQ ID NO: 63375 - DNA, 280 bp, Zea mays
caggcacagaaatgcccagatggcaagcagagcatcagttgaactccatacccacatatatttgaagacaaggttaactgacactgaagctaggatagtaaagatcaaggcaaatggtttcatagtatttgtcccaaagtttggcatagaagggcccatctaccttactccgaagggcgacaaaggcggtgattgggttgttgacgaggtgcaccagagagtaaccaagcccggaacaaacatcagctatgctatcctccagactgtcaggattcatatg

SEQ ID NO: 63376 - DNA, 285 bp, Zea mays
cgggtttcgcgccgccgccgccgccgccgccgcagccgcaacaatgccgtcgcacaagaccttccggatcaagaacgaagctggcgaagaagatgcgccagaaccgccccatcccctactggatccgcatgcgcactgacaataccatcaggtacaacgccaagcgcaggcactggcgccgcaccaagctcggcttctgagcgtcgggattggccggctgctgcgtcggaaggctagggtctaagagctatcttccttctgttttatcaatgtgtcagtttttct

SEQ ID NO: 63377 - DNA, 275 bp, Zea mays
cggagatctccgggaccacgggcccagcctacaacattgacaatctggtcaagtctctcaaatttgtcaccaacaaacgtacttacggaccgtacggcagggactctggcaccccgttccgtgtcatggtgatgaacaacggccacgtcgctggcttctttggccgctctggagattgcctggacgcgatcgggctctacgtgaaccccaactaataactaaaacgatggatcggatcatctgcatgcatgcatatgcagtatgctgcttgcctg

SEQ ID NO: 63378 - DNA, 264 bp, Zea mays
ggacgcgtctgggatgacggacgccgagatggccgccttcatcccgagcgtgtcgcgcctcggctacgtctggcagttcatcacgctcgccgggttccacgccgacgcgctcctcaccgacacgttcgcgcgggacttcgcacgccgcggcatgctggcctacgtggagaggatccagagggaggagaggatcaacggcgtggagacgctggagcatcagaagtggtcgggcgccaatttctacgacatggtgctcaaggctgt

SEQ ID NO: 63379 - DNA, 273 bp, Zea mays
gaggcactactttcagaacacacagggacttatttttgttgtagacagcaacgacagggaacgtgttgttgaggctagagatgagctccacaggatgctgaatgaggatgagctgcgtgacgctgtgctgcttgtatttgcaaacaaacaagatcttcccaatgctatgaatgctgctgaaattactgacaagcttggtctgcattccctgtgacagcggcactggtacatccagagcacttgtgctacatctggtgaagggttgtatgaggg

SEQ ID NO: 63380 - DNA, 124 bp, Zea mays
gcgttcttcaaagattgtgctgaatcacacaagaaactctctgagcttggcttcacgcctcgcagcacagcaccatccaaatcagatcttccaaccgccgccgtgcttgcacagagtgcctttg

SEQ ID NO: 63381 - DNA, 276 bp, Zea mays
tcgacgtcgccgactgccgcgccatcgccggccacatcaagacggagttcgacaagcggtacggcgtcgggtggcagtgcgtggtgggcgccaacttcgggtgcttcttcacccacagcagcggcaccttcatctacttctccatggagcgcctctccttcctcctcttcaaggccgccgtcgtcgcagccgccgccgctgccgtcgcctcctaatcaaccaagtcttcgtccatcacaccgtgcactttgtactgctagctagtatctatctata

SEQ ID NO: 63382 - DNA, 275 bp, Zea mays
ctcacgactgcagttacctcagttcatgaaatggagaatggctttcaaatatggtccttcactggcaagcatctttacaaggtgtcaaaggatcatttctatcagtttatatggcgcccgagaccgccctcactactgacggccgagaaggaagacgagatctcaaggaacctgaagaagtatagcaagaagtacgaacaagaagaccaggatgcattcaatcagttgagcgagcaggaccgcaagaggcggacacagcttcaggaagaatggga

SEQ ID NO: 63383 - DNA, 276 bp, Zea mays
ctcgagccgctcgagccgtgacgccatccgcaatctattcagcagtggcaccgagaatgcgttccacatgtccactcttttcgtgttcttcactgcgatttactgccttggccttgtgacatacggtattgctgttccatctggtctcttcatccctgttatacttgctggggctacgtacgggcgcatagtggggacccttcttggtccaatttcagaccttgatcctggactattcgcacttcttggcgcggcatctttcctcggtggaacaat

SEQ ID NO: 63384 - DNA, 279 bp, Zea mays
ctcaccggcgttggcccgttccagaacctgctcgaccacctcgccgaccccgtcaacaacaacgtgctcaccagcctcaagttccactagaacgttggtgcatcagcatacctgctgcctccgccgccagttgtttgctgtggagagctagatgcatgcgtgttgtaaaggaacctgcagcgttgcatcggtcatgattcatgcatggccagcctgctgcctgtaacaacaaactagtattgatcttattgagaccggaaactgtattgcacatggtaa

SEQ ID NO: 63385 - DNA, 273 bp, Zea mays
cgaaaatttggacatttccatcaattgccttagaagacatcattgttgcgataaacgacttctctgattttaacatgcttggaaaaggtggattcggaaaagtttacaaggcaatgttggaaggtggcaaggaagtagctgtcaaaaggctcagtaaaggctctacacagggggtcgaggaatttagaaatgaagtagttctgattgctaaactgcagcacagaaacttaggtagacttcttgattgctgcattcataagatgagaagttact

SEQ ID NO: 63386 - DNA, 275 bp, Zea mays
agtcgttgccatcattctcaaggctgttaatataccgcgacgctgaccttgtctacttctggcagaagtaccggtaattggcagacagctcacctgagaaaaatgaagctcggagggagttgcttgaagtgatggcccacaggtctcatgttgacagcaacgttgagctcattggaagccttctctttggctctgaggacggtccaagggttctgaaagccgtccgtgcagctggtgagcctctggtcgatgattgagctgtctcaagtccacgg

SEQ ID NO: 63387 - DNA, 274 bp, Zea mays
gacgaaggtcttccatccaacatcaatagtaatggaagcatatgtcttgacattcttaaggagcagtggagccctgctttgacaatctctaaggttttgctttctatctgctccctgcttactgatcccaacccagacgaccctcttgtccctgagattgctcacatgtacaagacggatcggcctaagtacgaggcgacagcccgcagctggacccagaagtacgccatgggatgaaatgttcggcgttactggtaaatgcagacgattgtgg

SEQ ID NO: 63388 - DNA, 274 bp, Zea mays
gctggtctgaatgtaaaccagtccttacaaggtgtcttttcgctggactgtgtttccatgcataccaacaggttccttacatgattttggcgatggtgtctcctgtcactcattctgtgggcaactgtgttaaacgtgttgtggtcattgtaacatcagtgctgttcttcaggacacctgtttctcctatcaactctctcggtactgcgattgcacttgccggagttttcctgtactcacagctcaagcgacttagcccaagccgaagacggct

SEQ ID NO: 63389 - DNA, 278 bp, Zea mays
tgcagttgtgcttcagtgtggtgctgattcattgtctggggataggttgggctgcttcaacctctcaatcaaaggtcatgcggaatgtgttaggtatatgaggtctttcaacgttccattgttgctccttggtggtggtggatataccataagaaatgttgcacgctgttggtgttatgagactggagttgctcttggccaagagcctgaagacaagatgcctgttaatgagtactatgaatacttcggtccagattacctcttcatgttgcaccaag

SEQ ID NO: 63390 - DNA, 304 bp, Zea mays
gtcgcaggcacgcgtagcagaatcgggctcgagctcgttgccatcattctcaaaggctgttaatcagcgcgacgctgaccttgtctacttctggcagaagtaccggaaattggcagacagctcacatgagaaaaatgaagctcggagggagttgcttgaagtgatggcccacaggtctcatgttgacagcagtgagtgagctcattggaagccttctctttggctctgaggacggtccaagggttctgaaagccgtccgtgcagctggtgagcctctcgtcgatgattgagctgtctcaagtcc

SEQ ID NO: 63391 - DNA, 270 bp, Zea mays
gagaggatctcgcggtgcatcgacgacgaggaggagcgcaccaagagctagggcgagatgggcgtgcggtacgttgtcctcgacatgggtgccatcggtagcatcgacacgagcgggacgtgcatgctggacgagctcaacaagtccttggacaggaggggaatgcagatcgtgctggcgaacccgggcagcgagatcatgaagaagctggacagctccaaggtgctggagcagatcggccacgagtgggtgtcccgacggtgggcgagg

SEQ ID NO: 63392 - DNA, 270 bp, Zea mays
acggcgcccacgctcacgtcaccggccggaagaaggaggccgacaagctgcagaccgccgacggctgggccaagttcaccggagggttcttcttcggtggtatctccggcgtgctctgggcatacttcctcctctacgtgctcgacctcccctactacttcaagtagaatacaaattcataaagatgcatatatataatatagctccgcctccgatcctcctctctgcgtgcaaaggtatgccatttcagcagtacgagcatcgtggata

SEQ ID NO: 63393 - DNA, 276 bp, Zea mays
tttggaacagcccacaggggcatgcatcgaccgagggagttaccaagtttttgcagccttctgttgcagggttccttctgcagaaggaactcgactaccttgtcggagctgtttcaagccctaaacgcccttttgctgccatcgtgggtggttcaaaggtgtcatccaagatcggggttattgagtccctgttggagaagtgtgatatccttctcttgggtggtggtatgatcttcacgttttacaaggcacaaggttccctgttggtgcttcatt

SEQ ID NO: 63394 - DNA, 271 bp, Zea mays
agggaaatcctgaataaagaggcctaccgagctttctgtttggccaatctatgggtggagcagttgcattgaaggttcacttcaagcaaccaaatgaatggaatggtgcaatactggtggcaccgatgtgcaagatagcagacgatgtggttccaccttggcccattcagcaagttctaatttttatggccaaacttctgccaaaagaaaagcttgttcctcaaaaggatttagctgagttggcattcaaaggaagaagaaacaagagcag

SEQ ID NO: 63395 - DNA, 267 bp, Zea mays
ggtggctgatgagatgcgtagaggctgaattcttctccttcggaacgaacgacctgacgcagatgacctttgggtacagcagggatgatgtgggaaagttcattcccgtctatcttgctcagggcattctccaacatgaccccttcgaggtcctggaccagaggggagtgggcgagctggtgaagcttgctacagagaggggccgcaaagctaggcctaacttgaaggtgggcatttgtggagaacacgtggagagccttcctctgt

SEQ ID NO: 63396 - DNA, 269 bp, Zea mays
tccacttccacactcacaccacggaaccctaaccaagaatccgacccggcgctagacgattcggacggaaggaagacgagaaggccccgaggcgagcgggggatcaaagaagaagatgaaggtccgtgcggcggtgaagcgcctgtgccggttctgcaaggtggtgaagcgccggggaatcgtcttcgtccaatgcacggccaatgccaagcacaagcagcgccagggcttctccaccatcgccgaagcagcgccgtctcgtgcgttca

SEQ ID NO: 63397 - DNA, 277 bp, Zea mays
acgcatcagagaaaataaatcatctgtaaaacaaaggctggaagaagaaaagaaaaggcgtcaaaaggaagctgaatttaagttactggaagaggagcttgctagaagggtcgaagaagctataaggaaaaatgtcgaggaacgtctgaaatctgaagaggtgaaacgtgacatagaacaccgaattgaggagggtattagaaagttatttgatgaggttgacgctcagctacaaaaagagaaagaagtggccctttagaggccaggcagaaagcag

SEQ ID NO: 63398 - DNA, 257 bp, Zea mays
atccccaaaccctagctcccgatctcgatggcgaaccctcgcgtcttcttcgacatgaccgtcggcggcgccccggcgggccggatcgtgatggagctgtacgccaacgaggtgcccaagaccgcggagaacttccgcgcgctgtgcacgggcgagaagggcgtgggcaagtccgggaagccgctccactacaagggctccaccttccaccgcgtcatccccgagttcatgtgccagggcggcgacttcaccgcggc

SEQ ID NO: 63399 - DNA, 263 bp, Zea mays
ttatccgtcccgaagggtccaagtgagattgggtcgatgccatttcctcctggcgtgggtgcacgttctaatggtgaaattggcaacaacgaaaactatgaagttattaccgctgatagcgcaatcgacgaaagcaatgtgggtaaccgtattctacgcaacctgggttggcaagagggactgggtctcggaaaggatggcagcggtatcaaggaaccagtccaggcaaaatccgtggacgtcagggcggactaggaagtcag

SEQ ID NO: 63400 - DNA, 266 bp, Zea mays
gcgacggatcaaactaacttcttccgccttatgcaagtcttctcagggttcattgctgcagggaaatggtttgctgatgtttgtcagtggaaaaacccatacaccacagtgctggtccatgtgctctttatcatgcttgtgctctatccagaccttatcctgccaacaattttcctctacatgttcttgatagggctgtggaattaccggttccggccacgcttcccaccacacatgaacacaagaattcttacgctgatgttgca

SEQ ID NO: 63401 - DNA, 268 bp, Zea mays
atgcattcctacacattcctaagcaccaagatatcgattccgcgcctttgattcttgtgcgatagcagattggagctctagttgagtggtgaactcattgagttgtattgtgagctctcgttgtgacttgtgtgcgtggtgttgctgtgatttcttgagtgcgttgctaatccctcccttgctccgtgtttctttgtgatcttaaagtgtaagggcgagaggctccaagttgtggagattcctcgcaaacggattgagaaaaagcaag

SEQ ID NO: 63402 - DNA, 181 bp, Zea mays
tgggacagatatacattgataggcagctccataacagacagatttatccacctattaatgtcctgccatctctttcacgattgatgaagagtgctattggtgagggcatgacacgtcgagaccattcggatgtatctaatcagctttatgccaactatgctattggaaaggatgtcaagcc

SEQ ID NO: 63403 - DNA, 270 bp, Zea mays
gctcgatctcacctccacgagttccttccagaagggaacatcgaggacattgtaagtgaattatgtgctgagacgggagccaaccaggaggatgccctcgcgcgaattgaaaagctttcagaagtaaacccgatgcttggcttccgtgggtgcaggcttggtatatcgtaccctgaattgacagagatgcaagcccgggccatttttgaagctgctatagcaatgaccaaccagggtgttcaagtgttcccagagatatggttcctcttg

SEQ ID NO: 63404 - DNA, 269 bp, Zea mays
cgagcaggaggcggacaaggtaagcagcaatcgcaggaaccctagcgccgccgcacccgcaggaatgggtatcgacctcgtcgccggtgggaggaataagaagaccaagcgcactgcgcccaagtctgacgatgtctacctcaagctcctcgtcaagctctaccgtttcttggtcaggaggaccaagagcaatttcaacggcgtcattcttaagaggcttttcatgagtaaaaccaaccgaccaccaatctccatgcgccgccttgtca

SEQ ID NO: 63405 - DNA, 262 bp, Zea mays
ggatagagcaggagccatcgacacgatcgcgagcgcaacacgtacgttgtcggaagctcaagttagaagaagcaccagtgcctgatcgatggcggcccaggctctcctctccggccggcagctgctgggccgccccgtgcagtcggccgtctctaggtcgtcggcgaggaaggcgcccttcgtcgtcagggccagctccagccctccagccaagcaaggtgccgacaggcagctgtggttcgcgtcaagcaaaccctctcct

SEQ ID NO: 63406 - DNA, 263 bp, Zea mays
ctcaagtggcttatgacaatcgtcagcttgcatctggagacaacgacaatggactttttgtttggaatccacattcagtacaaccagtactgaagtatactgagcacacagcagctgtcaaagctattgcctggtcacctcatctccacggtctgcttgcgtctggtggaggaactgcagatagatgcatacgattctggaatacgaacacaaatacacacttgagttgtgtggacactggcagcaggtctgcaatcttgcgt

SEQ ID NO: 63407 - DNA, 261 bp, Zea mays
gaaggacgaccgtggtggcccgtgctggacacccgcgacacctggtggagacgctgaccaccatcatgtgggtcacctccggccaccactcggccgtcaacttcgggcagtaccacttcgccggctacttccccaaccggccgaccaccatccggaagaacatgccggtggaggagggcgggccgggcgaggagatggagaagttcctcaagcagccggagacgacgctgctggacatgctgccacgcagatgcaggccat

SEQ ID NO: 63408 - DNA, 262 bp, Zea mays
ctgagacgggagccaaccaggaggatgccctcgcgcgaattgaaaagctttcagaagtaaacccgatgcttggcttccgtgggtgcaggcttggtatatcgtaccctgaattgacagagatgcaagcccgggccatttttgaagctgctatagcaatgaccaaccagggtgttcaagtgttcccagagataatggttcctcttgttggaacaccacaggaactggggcatcaagtgactcttatccccaagttgctgagaaa

SEQ ID NO: 63409 - DNA, 270 bp, Zea mays
atcgaaaacaaccgccgaagagctgcttgagaaagaattgcctctgaagtttgtagaggtcgatgaggaacaaggcaggcttgtcctcagtaatcgcaaggcaatggcagatagtcaggcccagctaggaattggatcagttgtcttgggaactgtagagagcctaaaaccttatggcgccttcattgacatcggtggaatcaacggccttctccatgtgagccagattagtcatgaccgtgttgcagatatctcaacagttctgcaacc

SEQ ID NO: 63410 - DNA, 273 bp, Zea mays
gcaacactgttccagcaactttcagatgtcaaccaacagttcagtactgcagtcacagacaacagaatcctcaaatccgatgtagaagcgttaagaattaaggtaaagatggcagaggatatggtagcgagaagtgctgtatcgtgtggcctaggcgaccttggcctggcaccatacgtgaactcaaggaagatgtgccaagctttgaatgtgctcacagggttggatttactagggagtgatgcgttcaggggtccaaccgcagtacacgag

SEQ ID NO: 63411 - DNA, 276 bp, Zea mays
cggaccccggcgtgctcaccgtgctcgcgcaggacggcgtcgggggcctgcaggtgaagcaccaggatgaggacggcaaaatctcctgggtggatgtgaagcccgtgcccggagcgctcgtcatcaacgtcggggacctcttgcagataatgtctaatgacgagtacacgagcgtcgagcatcgggtggtcatgaacacgcgtgaagaacccagggtttccatcggcatcttcttcagtcctgggaagagaggggactcggtgttctatgggccgc

SEQ ID NO: 63412 - DNA, 270 bp, Zea mays
gcatcgtcttattgatgacatggttgcgtacgcgcttaagagcgaaggaggctatgtgtgggcttgcaagaactacgatggagatgtgcagagtgatttcttagctcaaggttttggatctttgggtttgatgacatcagtgttggtgtgccctgatggaaaaaccatcgaagctgaagctgcccatggcacggttacccgtcatttccgtgtccaccagaaaggaggcgaaaccagcacgaacagcattgcttcgatctttgcatggac

SEQ ID NO: 63413 - DNA, 271 bp, Zea mays
  unsure (1)..(271): unsure at all n locations
gggaggactcgctgtatccactgctgagggaagtcagcattggcatagatccttacgtggtctttcaagatgtagattgggcccttcttattggcgctaagccccgaggtcccggcatggagcgagctgcgctactggatatcaatggccaatntttgctgaccaggggaaagcacttaatgcggtcgcctcgcggaacgcgaaagtcttagttgtcggaaatccctgtaacactaatgcgctgatttgtttgaaaaatgccccaaacata

SEQ ID NO: 63414 - DNA, 272 bp, Zea mays
cttccctccctccctctccccgcgggccgccagaggcaatttcgccctcgattcgaccccgattcgtccgcccgcgaccgggattccctccgccaagcgcggatctgaacgctgcgctccgtgtcgccgctcgaatccgccatgaagggggccaaatccaagggcgccgccaaggccgatgccaagctggcggtgaagagcaagggggcggagaagcccgccaagggcaggaaagggaaggccggcaaggaccccaacaagcctaagagggc

SEQ ID NO: 63415 - DNA, 245 bp, Zea mays
tgatttcggtttagcaaaagctggtcctcagggtgataaaactcatgtatctactcgggttgttggcacctatggttatgctgcaccagagtatgtaatgacagggcacttgacatctaagagtgatgtttatagcttcggagttgtgctactcgagatgttgactgggagaagatcaatggacaagaagcggcctacgggggagcagaacctggttgcatgggcaaggccttacctaaatgatc

SEQ ID NO: 63416 - DNA, 271 bp, Zea mays
cactcatcgatctacacacatacatagtttcttctactacacgacgacaaacatggggaagcctgcgaagatcggagagtggggtggatacgccggcgatcgtcgggatctgagggctactccggaccggctgatcgaggtgaaggtcacggcggacaacagcagctgcatccgctccatctccttcatctacatcggagccgatggcaaaccgtacgaggaggggccatggggtttcggccatgctggcacggagtacaagattgatctg

SEQ ID NO: 63417 - DNA, 270 bp, Zea mays
atccgccatggcgaccgctacgctactgagctcctccttcgccatgcccgccgccgcccgtaggcctcctccccttcctccgcctcattgagcttcgccacgtcgcagctcgccggcctctccctctccgccggcgttgcaactccaaccgccgtcgccctcctccccaagaggcagcagctccagcccattgtcgcgcggcgtgtgtgcccgttcacggacaagaagacgaaccgggcgaacaaggtgtcgttttccaaccacaagacg

SEQ ID NO: 63418 - DNA, 276 bp, Zea mays
gccgtacatccaatcaggaatctgatagacttgaagagaagattgggcattggtcgccgatgctttgggtacttccatccagcaataccaggggaaccactgattttcattgaagttgctttactcaaagatatggaagcatctatacaggaggtcttgtcggatgaccccccaactcctgaatctgaagctagttgtgcactattttactcaatatcgtcaacccagccgggtttatcaggtattaatctagggaagtttcttctcaagcgtgtg

SEQ ID NO: 63419 - DNA, 260 bp, Zea mays
cgggtctcctccccctcttatcaagtcctcctcgggttagggttccatagggttttgtggctgggcgatggcggcggctgatgtggagtaccggtacttcgtcggcggacttgcctgggccaccagcaacgagtcgcttgagaatgccttcgcctcctacgctgagatcctcgactccaaggtcatcaccgaccgggagacggggaggtcccgcggcttcggcttcgctaccttctcctctgagaactccatgctcgacg

SEQ ID NO: 63420 - DNA, 215 bp, Zea mays
cacgaagatttgcaagttcttgtgatcatatcgagaccgcctgctaagatatttttatatgatgattggagcatgcctcatacagccgcggtactgaaattccccttcgtctgggatgaggactgcttcgaagcagcaaaagacgaactctaggtcacaagtgtttcctgcaatttatctgcttcatcaatgatcctgctagtgctggactacta

SEQ ID NO: 63421 - DNA, 269 bp, Zea mays
gtgaagtggctatacatggatgtcactcagaaactggaagctaaagactactcaacactgcaagaaccccatgcctgtactgctggtttgaaggctgtgacaacatctgcaacagctgatgccattgaagaatgtagaaagctctgtgaaaggaataattacctgaacagcagtgggcttcctgaattgtttgctgtctatgttcctgcttgcacttatgaaggagacaatattgttctgcttttgcaggttgcaaggattctaatgaa

SEQ ID NO: 63422 - DNA, 268 bp, Zea mays
gggatggttagattcttcctatgtgaactcaggtgtcaacggaagcgttgaagacgatgaacatgagaagctggctaggtacaagagggaggctgtatccataatacacgaatactttttctctgatgatacaacagaggtcatccgtagctgtcaagagcttggttatccggaatacaatccgatcttcgtcaagaagctcataacaattgctaatggaccgcaagaacagggagaaagaaatggcatcggttcttctcccttcatt

SEQ ID NO: 63423 - DNA, 271 bp, Zea mays
ccggagggcgtcacggtcacggtggccgccaagctggtcacggtggagggcccccgcggcaagctcacccgcaacttcaagcacctcaacctcgacttccagctgcaggaggccggccgcaagctcaaggtggacgcctggttcggcacccgccgcaccatggccgccatccgcaccgccatctcccacgtccagaacctcatcaagggggtcaccaagggctaccgctacaagatgaggttcgtctacgcccacttccccatcaacgcct

SEQ ID NO: 63424 - DNA, 271 bp, Zea mays
  unsure (1)..(271): unsure at all n locations
cagcgacgatggaaggggtatcgatgcacatgtagagttttgttctgtaataaagacaaaattgggtgcccatcggattgtcatgggtgctgagatggactgctgtgatgcaactgatgatggcaggaggttctatgtggagctgaaaacaagcagcgagctggaataccatacagtggaagcatatgaaagaanagctacttaccttttggattcaatcgtttcttgccggtgttccttatgttgttgtgggattcaggaatgatgctgg

SEQ ID NO: 63425 - DNA, 265 bp, Zea mays
gttggagtcaaggttttggactcggttaacatcaccctgggtgctgaggatgaactgaaggatgctgttggtctggttcgcccagttagcgttgccttcgaggtgatcactggtttcaggctgtacaagagcggagtttacactagcgaccattgtggaactacaccgatggatgtgaaccacgctgttctggctgttggctacggtgtcgaagatggtgtcccctactggctcatcaagaactcatggggcgctgactggggcg

SEQ ID NO: 63426 - DNA, 273 bp, Zea mays
gtgccatttgaaccccccacgtctcctcgcctcgttccccatttgctgcgtctccttgcccgcgccgccgctcgccgtttgcccctcgtctccgcaccgcgcgctgttgtccatccttgtgcagcaaaaatgacggctggctacattgttggctcactggtcggatcctttgccattgcatacctgtgtgacacatttatctctgacaagaaggcatttggaggtagcacccccaagactgtttctgagaaggagtggtggcaaccacagaca

SEQ ID NO: 63427 - DNA, 274 bp, Zea mays
gaagatgtaccagcgaacgatgagaagagtctgcagaaggcagttgcaaaccagcctgtcagtgtcgcaattgaggctgctggcacagcatttcagctctacagctcgggtatcttcactggaagctgtggaacagcgctggaccatggtgtcacggccgtcggctacgggacagagaacggcaaggactactggatcgtgaagaactcatggggcagcagctggggcgagtccgggtacgtgaggatggagcgcaacatcaaggcgtccagcg

SEQ ID NO: 63428 - DNA, 260 bp, Zea mays
ggcatctcactggagagtttgagaagaaatatgaaccaaccattggtgtggaagttcatccgttggatttcaccactaactgtggtaagatcaggttctactgctgggataccgcagggcaagagaagtttggtggcctcagggatggatactatatccatggcccgtgtgcgatcatcatgtttgatgtaacttcaaggcttacttacaagaatgttccacgtggcttagggactgtgcagggctgtgaaacatcccca

SEQ ID NO: 63429 - DNA, 266 bp, Zea mays
ttaggctgtcaggcagatgattatggctcccacgcttgagctgaggcagcaggcgctcgatcgtctcttgccgtatcagaggtctgacttcgaaggcattttccgtgctatggatggactcccggtgaccatccgactcctggacactctcctccaggagttccttccagaagggaacatcgaggacattctaagtgacttatgtgctgagacgggagccaaccaggaggatgccctcgcgcgaattgaaaagctttcagaagtaa

SEQ ID NO: 63430 - DNA, 264 bp, Zea mays
cccacgacgggctcctggtctgggactccatcaagcagtgggcgtccgagtacgtcaacgtctactacaagtccgacgaggccgtggccgccgaccccgagctgagggcgttctgggacgaggtgcgcaacgtggggcacggcgacaagcaggacgagccgtggtggcccgtgctggacacccgcgacagcctggtggagacgctgaccaccatcatgtgggtcacctccggccaccactcggccgtcaacttcgggcagtacc

SEQ ID NO: 63431 - DNA, 269 bp, Zea mays
ggagcaggcagggcatcagttagcgccgacgctgacggcgacggctacatcgacgacagcgaggtcgatggcctcatcgagctccatcctgcacatgctcaacctcgccaacctggccgaagaggtgcagatcgcgcaccgccgccgctacagcaaactcaagaaaggtggcttcgccgacgaaggctccgccaccaccgagtccgacatcgaggagacgctcaagcgcctcgtgtccgaggtcggcaagtcccccgaggaggtgttcg

SEQ ID NO: 63432 - DNA, 267 bp, Zea mays
ccagctcaagacgcacgcgcactgttcgagccgcaggaggtggacgacggctgcgaggcggaagaggacgagcaggccgtcatcggcttcgccagcggcctcttctggctcgccttcaacaccgtgctcatcgccatcctgtccgagtacgtggtcggcacgatcgagcctacctccaaatcctggggtttgtccggcagcttcatcagcatcatacttctacccatcgtggggaacgccgcggagcacgccggagcaatcattttt

SEQ ID NO: 63433 - DNA, 268 bp, Zea mays
tgaaggcgggagtgcttgatgagtaagacgggcttctggggtcgatttgcttctgagttgtctattttatatcgtcgcaatttcgtggttgtcgtttggttattctgtgaagcagccatgccaggctattgttatgaaaatttgtcgtctgtaagcatgtgaacttccgatgttgccacatgctggatcagtctgaataagtaagtcttctgctctaggtagtcagctgcgtcttccacaatgagcatgaacgtatggagaaatatct

SEQ ID NO: 63434 - DNA, 266 bp, Zea mays
gtagttcaggacccagagctaggccaggtcattcagctccaaggtgaccagcgcaagaatgttgctactttcctagttcaggctgggattgcgaagaaagagaacatcaagattcacgggttctaagggacctgtaaatgcttgtgccctatattgtgtgcctcaacatattggggagcttgaagcatcgacagttgctagtcattgcttacttatataagaacataagtagtatttgctattgtcaagtgtgccttgcttgatgc

SEQ ID NO: 63435 - DNA, 264 bp, Zea mays
gctcgtgcaatgactgatatgaatggaatgctatgttcttctaggtctatgcgtattgggcctgctgcaaacaagaaagctactgttgttcaggagaaagtaccaggtgctcatggagttcagtctgacaatgatcctaacaatacgaccatttatgttggtggtcttgaccccaatgtcactgaagatatgttgaagctagttttcacccctaatggggaggtagtcgatgtgaaagattcctgtgggcacaagatgtggttt

SEQ ID NO: 63436 - DNA, 278 bp, Zea mays
atcgaaaacaaccgccgaagagctgcttgagaaagaattgcctctgaagtttgtagaggtcgatgaggaacaaggcaggcttgtcctcagtaatcgcaaggcaatggcagatagtcaggcccagctaggaattggatcagttgtcttgggaactgtagagagcctaaaaccttatggcgccttcattgacatcggtggaatcaacggccttctccatgtgagccagattagtcatgaccgtgttgcagatatctcaacagttctgcaaccaggagata

SEQ ID NO: 63437 - DNA, 226 bp, Zea mays
  unsure (1)..(226): unsure at all n locations
gcaacactgttccagcaactttcagatgacaaccaacagttcagtactgcagtcacagacaacagaatcctcaaatccgatgtagaagcgttaagaattaaggtaaagatggcagaggatatggtagcgagaagtgctgtatcgtgtgagcctagagcgaccttgagacctggcaccaatacgtgaaancatcaaggatcagatgtagccaagcttatgcacatgt

SEQ ID NO: 63438 - DNA, 276 bp, Zea mays
cggaccccggcgtgctcaccgtgctcgcgcaggacggcgtcgggggcctgcaggtgaagcaccaggatgaggacggcaaaatctcctgggtggatgtgaagcccgtgcccggagcgctcgtcatcaacgtcggggacctcttgcagataatgtctaatgacgagtacacgagcgtcgagcatcgggtggtcatgaacacgcgtgaagaacccagggtttccatcggcatcttcttcagtcctgggaagagaggggactcggtgttctatcggccgc

SEQ ID NO: 63439 - DNA, 274 bp, Zea mays
  unsure (1)..(274): unsure at all n locations
ggaggactcgctgtatccactgctgagggaagtcagcattggcataganccttacgtggtctttcaagatgtagattgggcccttcttattggcgctaagccccgaggtcccggcatggagcganctgcgctactggatatcaatggccaaatctttgctgaccaggggaaagcacttaatgcggtcgcctcgcggaacngaaagtcttagttgtcggaaatccctgtaanctaatgcgctgattngttgaaaaatgccccaacatccggnaaa

SEQ ID NO: 63440 - DNA, 263 bp, Zea mays
tgatttcggtttagcaaaagctggtcctcagggtgataaaactcatgtatctactcgggttgttggcacctatggttatgctgcaccagagtatgtaatgacagggcacttgacatctaagagtgatgtttatagcttcggagttgtgctactcgagatgttgactgggagaagatcaatggacaagaagcggcctacgggggagcagaacctggttgcatgggcaaggccttacctaaatgatcggcgaaggctctatcagc

SEQ ID NO: 63441 - DNA, 265 bp, Zea mays
cactcatcgatctacacacatacatagtttcttctactacacgacgacaaacatggggaagcctgcgaagatcggagagtggggtggatacgccggcgatcgtcgggatctgagggctactccggaccggctgatcgaggtgaaggtcacggcggacaacagcagctgcatccgctccatctccttcatctacatcggagccgatggcaaaccgtacgaggaggggccatgggggttcggccatgctggcacggagctacaagat

SEQ ID NO: 63442 - DNA, 279 bp, Zea mays
atccgccatggcgaccgctacgctactgagctcctccttcgccatgcccgccgccgcccgtaggcctcctccccttcctccgcctcattgagcttcgccacgtcgcagctcgccggcctctccctctccgccggcgttgcaactccaaccgccgtcgccctcctccccaagaggcagcagctccagcccattgtcgcgcggcgtgtgtgcccgttcacggacaagaagacgaaccgggcgaacaaggtgtcgttttccaaccacaagacgaagaagcag

SEQ ID NO: 63443 - DNA, 280 bp, Zea mays
gccgtacatccaatcaggaatctgatagacttgaagagaagattgggcattggtcgccgatgctttgggtacttccatccagcaataccaggggaaccactgattttcattgaagttgctttactcaaagatatggaagcatctatacaggaggtcttgtgggatgaccccccaactcctgaatctgaagctagttgtgcactattttactcaatatcgtcaacccagccgggtttatcaggtattaatctagggaagtttcttctcaagcgtgtgattg

SEQ ID NO: 63444 - DNA, 279 bp, Zea mays
ggcttctcctccccctcttatcaagtcctcctcgggttagggttccttacggttttgtggatgggcgatggcggcggctgatgtggagtaccgttgcttcgtcggcggccttgcctgggccaccagcatcgagtcgctggctaatgccttcgcctcctacggcgagatcctcgactccaaggtcatcaccgaccggtagaccgggatgtcccgcggcttcggcttcgttaccttctcctccgagaactccatgctcgacgctatcgagaacatgaacgg

SEQ ID NO: 63445 - DNA, 269 bp, Zea mays
ctgaagtggctatacatggatgtcactcagaaactggaagctaaagactactcaacactgcaagaaccccatgcctgtactgctggtttgaaggctatgacaacatctgcaacagctgatgccattgaagaatgtagaaagctctgtggcgagcatggttacctgaacagcagtgggcttcctgaattgtttgctgtctatgttcctgcttgcacttatgaaggagacaatattgttctgctttgccaggttgcaaggattctaatgaa

SEQ ID NO: 63446 - DNA, 274 bp, Zea mays
gggatggttagattcttcctatgtgaactcaggtgtcaacggaagcgttgaagacgatgaacatgagaagctggctaggtacaagagggaggctgtatccataatacacgaatactttttctctgatgatacaacagaggtcatccgtagtgtcaaagagcttggttatccggaatacaatccgatcttcgtcaagaagctcataacaattgctatggaccgcaagaacagggagaaagaaatggcatcggttcttctcccttcattaagcatg

SEQ ID NO: 63447 - DNA, 224 bp, Zea mays
ccggagggcgtcacggtcacggtggccgccaagctggtcacggtggagggcccccgcggcaagctcacccgcaacttcaagcacctcaacctcgacttccagctgcaggaggccggccgcaagctcaaggtggacgcctggttcggcacccgccgcaccatggccgccatccgcaccgccatctcccaggtccagaacctcatcaagggggtcaccaagggcta

SEQ ID NO: 63448 - DNA, 275 bp, Zea mays
cagcgacgatggaaggggtatcgatgcaaatgtagagttttgttctgtaataaagacaaaattgggtgcccatcggattgtcatgggtgctgagatggactgctgtgatgcaactgatgatggcaggaggttctatgtggagctgaaaacaagcagagagctggaataccatacagtggaagcatatgaaagaaaagctacttagattttggattcaatcgtttcttgccggtgttccttatgttgttgtgggattcaggaatgatgctggcata

SEQ ID NO: 63449 - DNA, 270 bp, Zea mays
gccgcctcgcatctcctcctccgccccacgcagctgaggagctgatcctcaccggcgtcgccatcgtaatcgccttggacagcggcaccagaacctctgcctccgcagggtgcttgctggtatcattacaatctggtagttttagtggttgggcttgacttcctactattcagaaacacagtaccgagaagtctttaggtggggtcaaagatggtgtcgctgaagttgcaaaagcgccttgccgcgagctacctcaagtgtgggaaaggc

SEQ ID NO: 63450 - DNA, 264 bp, Zea mays
gttggagtcaaggttttggactcggttaacatcaccctgggtgctgaggatgaactgaaggatgctgttggtctggttcgcccagttagcgttgccttcgaggtgatcactggtttcaggctgtacaagagcggagtttacactagcgaccattgtggaactacaccgatggatgtgaaccacgctgttctggctgttggctacggtgtcgaagatggtgtcccctactggctcatcaagaactcatggggcgctgactggggc

SEQ ID NO: 63451 - DNA, 279 bp, Zea mays
aagccatttgaaccccccacgtctcctcgcctcgttccccatttgctgcgtctccttgcccgctccgccgctcgccgtttgcccctcgtctccgcaccgcgcgctgttgtccatccttttgcagcaaaaatgacggctggctacattgttggctcactggtcggatcctttgccattgcatacctgtgtgacacatttatctctgacaagaaggcatttggaggtagcacccccaagactgtttctgagaaggagtggtggcaagccacagacaccaag

SEQ ID NO: 63452 - DNA, 247 bp, Zea mays
gaagatgtaccagcgaacgatgagaagagtctgcagaaggcagttgcaaaccagcctgtcagtgtcgcaattgaggctgctggcacagcatttcagctctacagctcgggtatcttcactggaagctgtggaacagcgctggaccatggtgtcacggccgtcggctacgggacagagaacggcaaggactaatggatcgtgaagaactcatggggcagcagctggggcgagtccgggtacgtgagga

SEQ ID NO: 63453 - DNA, 271 bp, Zea mays
cccacgacgggctcctggtctgggactccatcaagcagtgggcgtccgagtacgtcaacgtctactacaagtccgacgaggccgtggccgccgaccccgagctgagggcgttctgggacgaggtgcgcaacgtggggcacggcgacaacaaggacgagccgtggtggcccgtgctggacacccgcgacagcctggtggagacgctgaccaccatcatgtgggtcacctccggacaccactcggccgtcaacttcgggcagtaccacttcgc

SEQ ID NO: 63454 - DNA, 264 bp, Zea mays
ggagcaggcagggcatcagttatgccgacgctgacggcgacggctacatcgacgacagcgaggtcgatggcctcatcgagctccatcctgcacatgctcaacctcgccaacctggccgaggaggtgcagatcgcgcaccgccgccgcaacagcaaactcaagaaaggtggcttcgccgacgaaggctccgccaccaccgagtccgacatcgaggagacgctcaagcgcctcgtgtccgaggtcggcaagtcccccgacgaggtg

SEQ ID NO: 63455 - DNA, 274 bp, Zea mays
ccagctcaagacgcacgcgcagctgttcgagccgcaggaggtggacgacggctgcgaggcggaagaggacgagcaggccgtcatcggcttcgccagcggcctcttctggctcgccttcaacaccgtgctcatcgccatcctgtccgagtacgtggttcgcacgatcgagcctacctccaaatcctggggtttgtccgtcagcttcatcagcatcatacttctacattcatcgtgggaacgccgcggagcacgccggagcaatcatttttgctct

SEQ ID NO: 63456 - DNA, 269 bp, Zea mays
agaaggcgggagtgcttgatgagtaagacgggcttctggggtcgatttgcttctgagttgtatattttatatcgtcgcaatttgcgggttgtcgtttggttattctgtgaagcagccatgccaggctattgttatgaaaatttgtcgtctgtaagcatgtgaacttccgatgttgccacatgctggatcagtctgaataagtaagtatgctgctctaggtggtcagctgcgtctaccacaatgagcatgaacgtatggagaaatatctg

SEQ ID NO: 63457 - DNA, 275 bp, Zea mays
gtagttcaggacccagagctaggccaggtcattcagctccaaggtgaccagcgcaagaatgttgctactttcctagttcaggctgggattgcgaagaaagagaacatcaagattcacgggttctaagggacctgtaaatgcttgtgccctatattgtgtgcctcaacatattggggagcttgaagcatcgacagttgctagtcattgcttacttatataagaacataagtagtatttgctattgtcaagtgtgccttgcttgatgcaagttgtgt

SEQ ID NO: 63458 - DNA, 164 bp, Zea mays
cccgacaatgacagctggcccaaagtatgagtacacatgggctgatggtgtgcagataaagaaacccatagaggtatcagcaccaaaatatatggagtatctgatggattggattgaaggccagcttgacgatgaatccatatttcctcaaaaacttggcacac

SEQ ID NO: 63459 - DNA, 274 bp, Zea mays
ctcaagcttggcatccatgaggactcgcagaacaggaccaagatcgccgagcttctgagataccactccaccaagagtggtgatgagctgaccagcctcaaggactacgtgaccaggatgaaggagggacagaatgacatctactatatcactggtgagagcaagaaggcagtggagaactcccccttccttgagaagctgaagaagaggggctatgaggttctgtacatggttgatgccattgacgagtatgctgttggtcagctcaaggagt

SEQ ID NO: 63460 - DNA, 272 bp, Zea mays
acgagaagtttgcagctggcactgaggcgattgccaagaagctagctgagcttacaaccacgaagggtgtcactaccatcatcggcggcggcgactctgttgctgctgtcgagaaggctgggctggccgacaagatgagccacatttcgaccggcggcggtgcgagcttggaactcttggaaggcaagacttcaacctggtgtccttgccctggatgacgcctagatcggctgcggctgctgctactcaggtcctgcaagcttgcgggtcaa

SEQ ID NO: 63461 - DNA, 178 bp, Zea mays
gctaaggatggatgttggcacgttcgatatcaagtatctcgatgatgaccatgagtgggtaaagttggcgtgcaatgcagacttggaagaatgcatggagatctcgcggctttctggcagccatgtcattaggctactggttagcgatattgcagcacactttggcagttcttgtgga

SEQ ID NO: 63462 - DNA, 263 bp, Zea mays
cttcctgggtgtcaaccccaacagcttcgacgggcacggcaacaacagccttggcctccgtgaccagggcgtgttcccggagatcccgtacgaggtgggcgggaagaagaacggcatggacgtgtccatcgtcaccagcgccaagacggacaacgaggcgttcaggctgctggtcctcctcggcatgccattctcggagaacatcaagaccgacgtggtgatccggaagaagaggttgaagcgccaccacttcctgagcaagg

SEQ ID NO: 63463 - DNA, 261 bp, Zea mays
catcgatctacacacatacatagtctcttctactacacgacgacaaacatggggaagcctgcgaagatcggagagtggggtggatacgccggcgatcgtcgggatctgagggctactccggaccggctgatcgaggtgaaggtcacggcggacaacagcagctgcatccgctccatctccttcatctacatcgggagcgatggcaaaccgtacgaggagggggcatggggtttcggcatgctggcacggagtacaagattg

SEQ ID NO: 63464 - DNA, 172 bp, Zea mays
aatattaccattatgggcttgctgcttctctttacactcatttcacttctcccatacgcagatatgcagatgtagttgttcatagattgctagctgcagctctgaatattgctaagctcccaccaatcttatatgatggtccacaacttacaggcattgctgacaacctgaa

SEQ ID NO: 63465 - DNA, 270 bp, Zea mays
aaaagtcaaggctgttcaagaaaaagtccaatcaatgcgcaaagctgtcatagctaatttcaaatcaatgcttcgagaaagtaaagatataacttcaactagccgatgggcaaaagttaaagaaaatttccgtagtgatccaaggtacaaagccatgaagcatgaagaaagggagactatatttaatgaatacatagtggaactaaaatctgctgaacaggaagcagagcaagctgccaaggccaaagtggatgagctagccaagttaaa

SEQ ID NO: 63466 - DNA, 266 bp, Zea mays
agcgcccctcctcctctcctccatccgtacccaatctaatcgacacccggccgagatgggccgcaagttcttcgttggtggcaactggaaatgcaatggaaccgcagatcaggttgagaagattgtcaaaaccctgaatgaaggaaatgttccctcttcagatgttgttgaggttgttgtcagtcctccttatgtgttcctcccggtggtcaagagccagctgcgccaagagttccaagttgctgctcagaactgctgggtgaaga

SEQ ID NO: 63467 - DNA, 264 bp, Zea mays
ctcaaatgaaatagttgcagcagctatggttgctgctcatgcttctgagttatttcgtcggtccaggccatgccttaatgcactctctgcactaatgagatgcaagtgggatgctgagatttcgaccagggcatcatctctctaccatttgattgacttgcatggtaaaacagtttcctccattgtgaacaaagctgagcctcttgaagctcacctgacccttacaccagtaaagagggataatcaacatcaccgtgaggaaag

SEQ ID NO: 63468 - DNA, 259 bp, Zea mays
gccacctaaagttgatacttcataaggtagcagattcttcaaagttttggagtatttccgcttaataggtcaagtgatcgcaaaagtcctgcaagatggcagacttttagatttgcctttatcaacagcgttttataagcttatacttggacaggaacttgatttgtttgacatagtgtcatttgattctgagtttgggaagacattgcaagaactgcaagttcttgttgaacgatagcagttccttgaatccacttct

SEQ ID NO: 63469 - DNA, 167 bp, Zea mays
caccccgcagccgccctagcacccgcgacgagcaggatctgcccagttgctcttgcggtagttcccccaactgtcaccatgcagaacgaggagggtaagactgtggacctctatgtccccaggaagtgctcggccacaaacaggatcatcactgccaaggaccatgc

SEQ ID NO: 63470 - DNA, 166 bp, Zea mays
gatggaacgaacgtggaagatgccttccagtgtattgtaaagaatgctctgaagaatgaaccggaggaagaattgtatgtgccagataccgtggatgtggtaggtggcaaccgggcccagagatcatctggctgctgttaagacatgaggcatccacgaggcgtgg

SEQ ID NO: 63471 - DNA, 158 bp, Zea mays
gtgtggtataacatggtgaaacaaggtctcatcagcgaccctgttttctctttctggtttaaccgacatgctgatgaaggagaaggtggtgaaattgtgtttggtggaatggattctagccactacaagggcgatcacacgtttgtcccagtcattcg

SEQ ID NO: 63472 - DNA, 251 bp, Zea mays
cgttggatggcgactgtgcaagctgtatgagtcaggcaaaatgacaccaggccggtctagtttaggcaaggcatggacgtccaagaaggccagggaggtggtttctcttgggcgagagctactgggtggcaatggcattttggttgattttcttgtcgccaaggcattttgtgacgtggaacccattttctcgtacgaggggcactatgacattaatagcctggtggctggcagagagatcagcgggatcg

SEQ ID NO: 63473 - DNA, 150 bp, Zea mays
agtgagaatgatctgcctggtcagactgacactgagaagccaaatctgaggggtcccaatagggcctccacgatcagaaagctgttcagccctaacaaggatgatgatgtacgcaagcacgtgaacacataccgcagacatgcactacca

SEQ ID NO: 63474 - DNA, 151 bp, Zea mays
gttctctgggatctgcgccctcttggcttgactggcaataaagttgagatgctatgtgacctatgcaacattacactgaacaaaaatgctgtctttggtgacagcagtgcattatcacctggcggtgtgcgcattggtacacctgctatga

SEQ ID NO: 63475 - DNA, 263 bp, Zea mays
atctcgattctcgtctcgtggggaagtttcgctctcgccggcgtcgacggcctagggttcgaggaacgtccgtccgtccgtccggggaaggagcggtagggaggcggagatgatcgaggtggtgctcaacgaccgcctggggaagaaggtgcgggtcaagtgcaacgaggacgacaccatcggcgacctcaagaagctggtggcggcgcagacggggacgcgccccgagaagatccgcatccagaagtggtacaacatctaca

SEQ ID NO: 63476 - DNA, 259 bp, Zea mays
agtaatctaacacagtagagtgagatgatgagtgagtttcccctggatctacaaatgtcaaagatgcttgtcatcagtccaaagtacaactgttcgaatgagatcttatcaatatctgccatgctgtcagcacccaattgcttcctccggcctatggaagctcaaaaggctgctgatgaggccaaggctcgatttggccatattgatggggaccatctgacgcttctgaatgtataccatgcatacaagcaaaacaatg

SEQ ID NO: 63477 - DNA, 115 bp, Zea mays
gcgctggccagcgacgacgtgctcaggacgctgagggagatgcaggcgcgctcggccatgggcggcttcgagttcatggcgcctcccacatccgactactacgacggcgtgaggt

SEQ ID NO: 63478 - DNA, 252 bp, Zea mays
ccagtccacaccttgtaaaaggtgtcacactgcttaatgcaacaccgttttggggattctttcccaaccctgctacatctccccgattgtcaaagattttcccatgggctgggacatttccgcttccatcatttgtgaggaaaattactgaagcagtttggcaaaagataagtgacccatatagtattcaggacatactcaaacaagtatacgctgaccattcaacaaatgtggacaaagtattctctcgta

SEQ ID NO: 63479 - DNA, 253 bp, Zea mays
cttgaaagggatataaaccatggggagactatttggaatactgctgttgtttggaaacaacggcaacataattggcattcatcgaaagaatcacattccaagagttggtgatttcaatgagagcacatactacatggagggtaacactgggcatccagtgtttgaaacagcttatggcaaaataggagtgaacatttgttatggaagacatcatccccttaattggcttgcgtttggtctcaatggagctgaa

SEQ ID NO: 63480 - DNA, 171 bp, Zea mays
cgcttcgcctcatcctcttatcaagtcctcctcgggttagggttccctagggttttgtggacgggcgatggcggcggctgatgtggagtaccgttgcttcgtccgcggacttgactgggccaccagcaacgagtcgctggagaatgccttcgcctcctacggcgagatcct

SEQ ID NO: 63481 - DNA, 257 bp, Zea mays
cgaggatgcgtgttctgaggcgcctgctccgcaagtaccgtgaggccaagaagatcgtaaagcacatgtatcatgacatgtacatgaaggtcaagggtaatatgtttaagaacaagagggtgcttatggagagtatccacaagtccaaggctgagaaggccagagcgaagacacttactgatcagtttgaggccaagcgtgcaaagagcaaggcaagccgtgagaggaagattgctaggagggaggagaggctggcc

SEQ ID NO: 63482 - DNA, 246 bp, Zea mays
caacagtggagtcctgctttaactatctcataggctctcatgtcaatctgcgcactgctcacgagaccatacactgatgatcctcttgtccctgagaatgctcacatgtgcaagaccgaccaggccacgtatgagtctaccgcacgctcctggacacagaagtataccatgggctagacgcaaagctaaaagctggccaaactggtgaatgtgccggacgccacatcgatatcacctacataacca

SEQ ID NO: 63483 - DNA, 139 bp, Zea mays
agatctcgcttcacgcttgctccagtattcaccaaatctaagatgcactgctcttgaagcgtgtgcacatccattctttgacgatttgcgagaaccacatgcgaggttgccaaatggacggccatctcctccactgatc

SEQ ID NO: 63484 - DNA, 257 bp, Zea mays
ccgcgacctcgccgtcgccgcagccttggccatgtcgatcttcgagtataatgggtccgccgtggtggcgatggtggggaagaactgtttcgcgatcgccagcgaccggcggctgggcgtgcagtatcagaccatcgcgacagacttccagcgggtgttcaatgtccacgacaagctttacatcggcctctctgggctcgccactgacgcccagacgctgtaccagcggttggtgttcaggcacaagctgtatcagc

SEQ ID NO: 63485 - DNA, 148 bp, Zea mays
caggctctccaggaggcccttcctggtgacaatgttggcttcaatgttaagaatgttgctgtgaaggatctgaagcgtgggtatgtggcctccaactctaaggatgaccctgccaaggaggctgctagcttcacatcccaggtcatca

SEQ ID NO: 63486 - DNA, 152 bp, Zea mays
ctttgctcttagaaaatgtgtggagccggctcatgagaaaattggagttgttgatgctcaatggattgttcatcaatcagttccttcacttggcaaccagggcaagtcagataatggaagaccaccatgggaaggggtaagagcacgctgca

SEQ ID NO: 63487 - DNA, 166 bp, Zea mays
gattacacaagtgcaaaggttctaacaatggagtggattgagggtgtaaaattaaaccaacaagcagttattgaaagtcaaggattgaaggttctggatttggtcaacattggtatccagtgtagcttgagacagcttctggagtatggttactttcatgcagacc

SEQ ID NO: 63488 - DNA, 142 bp, Zea mays
ctccttcgtgataacttgaccctatggacctctgacatctcggaggaccctgctgaagagattagggaggcgcccaagcgcgactcgagtgaggggcagtaaagccggctttatgtgcctagaaactagtagctagtgtttg

SEQ ID NO: 63489 - DNA, 251 bp, Zea mays
gaaccgttgagctgagccgagcagggagaaggacgcgagagcagcatggagacggcggagaggggcatcaccgtgtgcgtgaccggcgcggggggctttgtggcatcgtggctcgtcaagctcctcctctccaccggccgctacaccgtcctcggcaccgtgcgtcatctcggtgatggcaagaatgcccatcttaagacactggaagatgctgaggagatgttgcagttggtcaaggctgacatgctgga

SEQ ID NO: 63490 - DNA, 285 bp, Zea mays
gttctgtccatgatcaagatctatagctggaggaagtgggaaaccttagcaggtccaattgctgctgaggaattgaaagctaggagaaccaaggtgatgagaaggcagtcaacctttgtttttaacaatgcttctcatccatggagcaaaaataaaatcttatttggatgctttgctttttgcgccaattcaagggctccataataaggtcagactatgtggcactgaggttgggctttgtcacatatcacaagctaccacattcatatgactaccataaataca

SEQ ID NO: 63491 - DNA, 291 bp, Zea mays
gtgggacaaactaccgctcgccgcatgggatcccgccagacttccttgaccggctactgattatcacgacgcatccctacacggaggatgagatccggaagatcctggatatccggtgcgacgaggaagacgtggagatgtccgcggacgctaaggtctgctcaccaagatcggtgtggagacctctctgcggtatgccatcaaccttatcacatctgccgcgctagcctgccagaggcgcaaggggaaggtggtcgagatggaggacattagccgggtgtaccagctgtt

SEQ ID NO: 63492 - DNA, 290 bp, Zea mays
tttaagagtaataaaggcgaatctaaaaataaaactaaggcaaacgatgatacgaagaaacagcaaagaccatttctcatgcaattcttctcaccaattttcataaaggcattttctattacattctttggtgagtggggtgacaagagccagattgcactattggcttggctgctgatgaaaacccatttggtgttgtcctgggtggaatcatagcgcaagcactctgcactactgctgctgttcttggtggaaagagcctagcctcccagatatccgagaagatggtc

SEQ ID NO: 63493 - DNA, 240 bp, Zea mays
gcgggagggccccaacctcttgaagctggcgcgcaaggagcagtgcctggcgctcggcaccaggttgcgctccaagtacaagatcacctaccagttctaccgcgtcttccccaacggcgaggtgcagtacctccaccccaaggacggcgtctacccggaaaggtcaatcccggcagggagggcgtcggccagaacttccgcagcatcggcaagaacgtcaaccccatcgaagtcaagttc

SEQ ID NO: 63494 - DNA, 286 bp, Zea mays
cttgccgcaggaccaacaagcgccgtatcatgcagcaggctgtcttcacggaactctgcaacatgttagatcccgggaagccttctttcactcccaaaaagggcaagccaagcgtagtcatgtttgttggtctgcaaggttcgggtaaaactacacttgttcaaaatatgcttattatcatcagaagaaaggattcaaaccagcgctggtttgtgccgatacatttagagctggtgcttttgatcagttaaagcaaaatgccacgaaagccaagattcccttttac

SEQ ID NO: 63495 - DNA, 284 bp, Zea mays
gcttggtatgggttccatccatatatacttcccctggaatgtaccttgtaaaccaccctttgaatttggacccccagctagcactctcaattcttctagctggaatgttgtgcatatacataaactatgattgtgaccgtcagcgccaagaatacgacggacgaatgggaaatgctcagtctggggcaaggctccatctaagattgttgcctcttatcagactacaaagggagaaactaaaaccagtctactcttgacttctggatggtggggcttgtcacgtc

SEQ ID NO: 63496 - DNA, 283 bp, Zea mays
gcgggcagtggctgagcagcaccacgcggcacgtccgcatctacgctgcgtacatcgacccggtgaccaacgcgttcgaccagacgcagatggacaagctgacgctcatgctcgacccccaggacgagttcgcctggaccgacgaggcctgccaatggtcttcaacgagttccaggacctcgtcgatcactacgagggggctgagctgtcggagtacacacttcggttgatcgggtcagaccttgagcactacatccgcaaactgctgtacgacggggtgatc

SEQ ID NO: 63497 - DNA, 133 bp, Zea mays
gcaaggtgcggctgaccggcttgggcgcccgtgacagtctccgactggaggcaggcctgtgcctgtacggcaacgacatggagcagcacatcacgccagtggaagccggcctctcatggacgatcggcaagac

SEQ ID NO: 63498 - DNA, 269 bp, Zea mays
gcttggtatgggttccatccatatatacttcccctggaatgtaccttgtaaaccaccctttgaatttgggcccccagctagcactctcaattcttctagctggaatgttgtgcatatacataaactatgattgtgaccgtcagcgccaagaattcgacggacgaatgggaaatgctcggtctggggcaaggctccatctaagattgttgcctcttatcagactacaaagggagaaactaaaaccagtcttctcttgacttctggatggt

SEQ ID NO: 63499 - DNA, 286 bp, Zea mays
  unsure (1)..(286): unsure at all n locations
gaagacgagaggcagcgaaggaaacagtagttcttcagttaggcaggagggcacaggaggaggaagatggcgtcgaagaggatccagaaggagctcaaggatcttcagaaggaccctcccacctcgtgcagtgcaggtcctgttggtgaagattattccactggcaggcaacaataatgggtccatctgatagcgcatattctggtggagttatcctagttacaatcgattgtcctcgcgattatgctttcanactaccagaggtggcattccgcaccaaggtgtt

SEQ ID NO: 63500 - DNA, 282 bp, Zea mays
accgcgtgcgaaccaagcagaccccagcagaagaagcgaagtcgtcgccggagcaggaggaagagcgagcagcaagatgtcgtggcaggcgtacgtcgatgaccacctgctgtgcgacatcgaaggccagcacctcagcgccgccgccatctcggccacgacggcagcgtctgggcacagtccgagaacttccccgagttaaagcctgaggaggttgctgggatgataaaggactttgatgaacctggaactcttgcaccaactggtctttttgttggaggt

SEQ ID NO: 63501 - DNA, 282 bp, Zea mays
agctgatgaagcgcctgataccgtcactggagacattgtattcgtcctccagcagaaggaccactccaagttcaaaagaaagggtgaagatctcttttatgagcacaccctgtctctgaccgaagctctatgtgggttccaatttgttcttcacatctggacaacaggcagcttctgatcagatcaaaccccggcgaagttgttaaacctgaccaattcaaggcgataaacgacgaggggatgcctatttaccagaggcccttcatgaaggggaagctctac

SEQ ID NO: 63502 - DNA, 282 bp, Zea mays
ggaattggctgatcgcgtggcaagttatgttcatctttgcacgctgtactggtggctcaggccttttggctgcggcgttattcttggaggttatgatagggatgggccacagctctacatgatagaaccctcaggagtttcttataaatatttggtgctgcattagggaaggggagacaggctgcataaactgagatagaaaagttgaaactttcagagcttacgtgccgggaaggcattgttgaagttgcaaagataatttatggagtacatgacgaagcg

SEQ ID NO: 63503 - DNA, 283 bp, Zea mays
gtcacggcggacaacagcagctgcatccgctccatctccttcatctacatcggagccgatggcaaaccgtacgaggaggggccatggggtttcggccatgctggcacggagtacaagattgatctgtgcaggttcgacgagagcttgacgagatctccgggaacacgggcccagcctacaacattgacaatctggtcaagtctctcaaattcgtcaccaacaaacgcgcttacggaccgtacggcagggacgagggcaccccgttccgtgtcaaggtgatgaa

SEQ ID NO: 63504 - DNA, 280 bp, Zea mays
gcagaaaggaatgaagaaagctctgataccttattttgagctcacaaatgctgtcagggttggggaccttgaactgttcagggctgttgcagacaaatttgcaagcacattcagcgcagacaggactcgtaatttgattgtgaggctgcgcataatgtcattcgaactggactgcgcaacatcagcatttcttactcaaggatctcccttgctgacattgctaagagctaagactagactctgagaacctattgctgatgcggagagcattgtagccaag

SEQ ID NO: 63505 - DNA, 284 bp, Zea mays
ataccatccatttggagtgcatgaacgagatgagagcacaccatcacttctcatgcccagtgtgctcgaggtccgcctgcgacatgtcggccacatggcggaagctcgacgaggaggtcgcggccacgccgatgcctgacatctaccagaacacatggtgtggatcctgtgcaacgactgcagcgcgacctcgagcgtgcggttccacgtgctggggcacaagtgccccgcgtgcagctcgtacaacacccgggagacgagggctgcgtgccccaggatctgag

SEQ ID NO: 63506 - DNA, 280 bp, Zea mays
gaagaaggccgcgcccgagttcgtcgaggccgcggcggagtccggcgaggccgcccacggctgcagctgcggtggcaactgcaagtgcgacccctgcaactgctgatcacatcgatcgacgaccatggatatgattattatctatctacttgtggtggtggttgaacaataataagcgaggccgagctggctgctatacataggtattgtgtggtgtgtgtgagagagagagaaacagagttcttcagtttgctatctctctctgcatgtttggcgtcag

SEQ ID NO: 63507 - DNA, 196 bp, Zea mays
gtgagattcagagaaccatgttggagttgttaaatcagctggatggttttgattcaagaggagatgttaaagttattctagcaacaaatcgtattgagagtcttgatccagccttgcttcgcccaggtcgaattgacagaaagattgattccctttacctgatgtcaagactaggcggcgcatcttccagatacac

SEQ ID NO: 63508 - DNA, 277 bp, Zea mays
cgagggcaccccgttccgtgtcaaggtgatgaacaacggccacgtcgctggcttctttggccgctctggagattgcctggacgcgatcgggctctacgtgaaccccaactaataactaaaacgatggatcggatcatctgcatgcatcatatgcagtatgcatgctgcttgcctgcctgtaacgaatatgaatgcataaaataacgcccctgctgctcccatgcatcagcagtgtgtaccactatgttatatatatatatactgtatgtcgctaccg

SEQ ID NO: 63509 - DNA, 278 bp, Zea mays
aaatcaaggattctgttgtggctggtttccagtgggcatcgaaggagggtgcactggctgaagagaacatgcgcgggatttgcttcgaggtctgtgatgtcgttcttcatgccgatgctatccacaggggtggtggccaggtcatccaactgccaggagggtcatttatgcttctcagctcacagccaagccgaggctgctggaaccagtttacctggtggagatccaggccccagaaaatggcacttggtggcatatacggtgttctgaaccagaag

SEQ ID NO: 63510 - DNA, 277 bp, Zea mays
cgtcgatctacacacatacatagtttcttctactacacgacgacaaacatggggaagcctgcgaagatcggagagtggggtggatacgccggcgatcgtcgggatctgagggctactccggaccggctgaccgaggtgaaggtcaggcggacaacagcagctgcatccgctccatctccttcatctacatcggagccgatggcaagccgtacgaggaggggccatggggtttcggccatgctggcacggagtacaagattgatctgtgcaggttcga

SEQ ID NO: 63511 - DNA, 188 bp, Zea mays
ggagatctccgggaccacgggcccagcctacaacattgacaatctggtcaagtctctcaaattcgtcaccaacaaacgcgcttacggaccgtacggcagggacgagggcaccccgttccgtgtcaaggtgatgaacaacggccacgtcctggcttctctggccgctctggaaatgcctggacgcgatc

SEQ ID NO: 63512 - DNA, 272 bp, Zea mays
tgtatattgcatatgagcacctgaaagttgacgattcttctttgtttgcttgcattgggattgctggcgctgaatctggtgaagatacaaacgatgacgagcctgatgtggatcttcatggcatgggtcccatgggaggccggggctttcaacaatgaccagaccaaccacatgatcaccattgggatggcaaacccttccaagggattaaccttgctccccaagacagggagtcacatggccctaggagactgcatgttgactgtcgtttc

SEQ ID NO: 63513 - DNA, 275 bp, Zea mays
gatggggctggtagggcaggagccggtgctgttcaacgacacgatccgcgccaacataacgtacgggaagcacggcggcgccacagaggaagaggtggtggcggtaccaaggcggccaacgcgcacgagttcatatcgggcctccccaagggtacgacaccatggtgggcgagatagggatccagctgtccggcgggcagaaacagcgggtggcgatcgccagggccatagtgaaggacccgaggatactgctcctcgacgaggcgaccagcgcc

SEQ ID NO: 63514 - DNA, 274 bp, Zea mays
aaagaagcggctcatctgttttgtgttagaattgctcagggccttgttcacctcggaaagggcttgttgaccctttctccgtaccattctgatagatttcttctttccccgatggcacttggagggcttgtaactgttctgcagcgtgtcttgatatgaagtccactatcctagggaaatatcactacatactttacattattgtcctggcaatgcagcccaggatgcttttaactgtcgatgtagatctgaagcccctctcagtacctgtccg

SEQ ID NO: 63515 - DNA, 272 bp, Zea mays
gggttttcttcgccgctacctccctacgaggcgggcgtgcagccatggcgctggtgcaggcgggcatgggccttacccgggtcgttatcctcgtcggctccggcgttgcggctccgtcgtcctccgcaacggccgcctcgccagatcctcggcgagctccaggagatactcgacaaggggaataaggtgaaggatggaggagggggagacggggaatccgatctcaacgaagctcttacctcgcaggtgcgtcgccttgccatggaggtccg

SEQ ID NO: 63516 - DNA, 294 bp, Zea mays
gctggagcagttcaaggctgaggccctgcggatgcagccctgtcaatgcaggcatatgatgtctactccaagagagcgagggaggtcttgctggaagcctctgagaagctgaagatacaggcagacaaagcacaaaaggacctcagcgtgatcgctaccgaggttagtcaggagggacaggaatatctggtgatggcagctcggaactccccagactcgatcaaggatattgcaacaacgttcagggctcttgggagattgaattggccatcagagtatgaggattatcatgtg

SEQ ID NO: 63517 - DNA, 289 bp, Zea mays
cacatacatagtttcttctactacacgacgacaaacatggggaagcctgcgaagatgggagagtggggtggatacgccggcgatcgtcgggatctgagggctactccggaccggctgaccgaggtgaaggtcacggcggacaacagcagctgcatccgctccatctccttcatctacatcggagccgatggcaagccgtacgaggaggggccatggggtttcggccatgctggcacggagtacaagattgatctgtgcaggttcgacgagagcttgacggagatctccg

SEQ ID NO: 63518 - DNA, 293 bp, Zea mays
cctgggacctggtagatttggttcagaggcgatttttgttcccaagcatccaggtgtgtctggagaagaagatgacggctatttgatattctttgtacacgacgagaacacagggaaatctgaagtaaatgttatcgatgcaaagacaatgtctgctgatccagttgcggtggttgagcttcctaatagggttccttacggattccatgccttctttgtaactgaggaccaactggctcgacaggcggaggagcagtgaagatacggcacctgcagattctgcacacgcgggt

SEQ ID NO: 63519 - DNA, 292 bp, Zea mays
ctagaagcttttaatgagaagaaagctgcaatgaacttggatggaaaagaagtgtctaatgaggatattgtcaggcctagagtcccattggaggcatgcttggcaagtttttcagggccagaggagattccagatttttatagcactgcattaaattcaaagactaccgtcactaactggtttcactacctttcctgattaccttgtgctgcacatgcgtaagtttgtaatggaaacaggatgggtgccaaagaaactcgatgtttatatagatgtgccagatacaattgat

SEQ ID NO: 63520 - DNA, 288 bp, Zea mays
gcaccgtcaaaggcaccaggctgagcaacccctccctctctccctcttatccccaaggcgaggagcggagggacgaggagggcccttctgcttgtttctccgctttgcaagatgtcgtccccgagcaagcgccgcgagatggaccttatgaagctgatgatgagcgactacaaggtggagatggtgaacgacgggatgcaggaattcttcgtcgaattcaagggcccggccgaaagtatctaccaaggtggtgtctggaaggttcgggtagaactgcctgatgcatac

SEQ ID NO: 63521 - DNA, 290 bp, Zea mays
ctggaaaccaacctgttggttcaatggcttacatgggcaatgtacaatatctgatgcaatgcaaatgtgctgttaacactgctgaagattggcttaaccctgttgccatacaagaggcgtttgaagccagggctctcaggatggcagtaaactgtgcccagaacataggccaagcagcaaaccaagaagaaggtttctatgagcggtcccctgatttgctagaggctgcagtagctcacatcacattggtccttgtaaccaagttcatttcgaaggtgcagcaggacatt

SEQ ID NO: 63522 - DNA, 296 bp, Zea mays
cacacatacatagtttcttctactacacgacgacaaacatggggaagcctgcgaagatcggagagtggggtggatacgccggcgatcgtcgggatctgagggctactccggaccggctgatcgaggtgaaggtcacggcggacaacagcagctgcatccgctccatctccttcatctacatcggagccgatggcaaaccgtacgaggaggggccatggggtttcggccatgctggcacggagtacaagattgatctgtgcaggttcgacgagagcttgacggagatctccgggaca

SEQ ID NO: 63523 - DNA, 290 bp, Zea mays
gctcctgcaaggcaagccgctctgggtgcagggataccaaacactgttgtttgcaccactgttaacaaagtctgcgcatctggcatgaaagctactatgttcgccgcacagtcaattcagctgggtatcaatgatattgttgtggcaggtggcatggaaagcatgtccaatgccccaaagtacattgctgaagctaggaaagggtctcgttttggacatgacacacttgttgatgccatgcttaaggatggactttgggatgtatacaatgactgtgccatgggaatgtg

SEQ ID NO: 63524 - DNA, 290 bp, Zea mays
cagactttggacttgcaaagcttttagaggatgaagaatcacatattactacaatagttgcaggaacatttggctatcttgcaccagagtatatgcaatttggcagagccaccgagaagactgatgtctacagttttggggttttggtactcgaaatactcagtggaaagcggcctactgatgcatccttcattgagaagggactaaacattgttggatggttaaattttcttgctagtgagaaccgggagagggaaattgtcgacctgaactgtgaaggagtgcagact

SEQ ID NO: 63525 - DNA, 286 bp, Zea mays
gctgcgtctgcagccatgagtatgcttaggctacagaagaggcttgcctctagcgtcctccgctgtggtaaaaagaaggtgtggttggaccccaatgaaaccaacgaaatcgccaatgccaactctcgtcaacagatcaggaagctgatcaaagatggcctgatcatccggaagcctgtgactgtccattcccgggctcgatgccggaagaacaccttggcccgacggaagggcaggcatatgggcatagggaagaggaagggtactgccaacgctcggatgcccg

SEQ ID NO: 63526 - DNA, 285 bp, Zea mays
ggaaaaacttgaatcattctatttaccaatgtattcaccatcggttggtgaagtggaggccatactaaagcaagttgggttgttcaacatgaatcatgtaaaagtattccagacaaattgggatccctacgatgacttggaaagtgatgttgtgcataacagtattaggagcggtgaaaatgttgctaagtgcctacgagcagttatgcagccgctagtcgcaagccaatttggagaacccattctcgataagttattcaaagagtacgctcgccgtgttgccaa

SEQ ID NO: 63527 - DNA, 297 bp, Zea mays
cgcgctacagcggcggcgtactacgtgcgagcggatggcatgcgcagacgccgagggctacgctaccggtcgtccccgtacgggatgtcgcaggtgaacatcgagggcaacgggtgcgggcgggcgctaccgccgcagccgaccgtgaaggtgtactgccgcgccaaccccaactacgccatgagcgtccgcgacgggaaggtggtgctggcgacggcgaaccccaaggacgagtaccagcactggatcaaggacatgcggtggagcacgagcatcaaggacgaggaaggttacccg

SEQ ID NO: 63528 - DNA, 289 bp, Zea mays
cacctccaggttatgttgggtacactgagcggaggccaactaactgaagcagtccgtcgccgcccgtacacagttgttctctttgacgagattgagaaggcacatccagatgttttcaacatgatgcttcagatcttagaagatgggcggttaactgatagcaaggggcgcacagttgatttcaagaacacactattgatcatgacatctaatgtcgggagcagtgtcattgagaagggaggtcgcaagattgggttcgaccttgattatgatgagaagacacagctat

SEQ ID NO: 63529 - DNA, 297 bp, Zea mays
cggagtacaagattgatctgtgcaggttcgacgagagcttgacggagatctccgggaccacgggcccagcctacaacattgacaatctggtcaagtctctcaaattcgtcaccaacaaacgcgcttacggaccgtacggcagggacgagggcaccccgttccgtgtcaaggtgatgaacaacggccacgtcgctggcttctttggccgctctggagattgcctggacgcgatcgggctctacgtgaaccccaactaataactaaaacgatggatcggatcatctgcatgcatgcata

SEQ ID NO: 63530 - DNA, 287 bp, Zea mays
cagcgaacagaaggccagggacgcagtgctctaccactacaagaacgccgccagcgcgttctccgcgaagtcaccccccagcaggtcaaggatctcaaggagcaaccaggtgttctccaggttgtgccgagccagacttaccagctacatggccctgggtctggcactcaccagggcacgacacacaccttgggccttatgtgaaggcgtatgagaatcaagaagactttgtttagtatggctgtatggcacaggtctgacgaatgtgtatagtacagtactatgta

SEQ ID NO: 63531 - DNA, 287 bp, Zea mays
gttttcgtacattggcacaaaccctgctaacgatgacaacacgttcatagaagacaactcgttgccatcattctcaaaggctgttaatcagcgcgacgctgaccttgtctacttctggcagaagtaccggaaattggcagacagctcacatgagagaaatgaagctcggagggagttgcttgaagtgatggcccacaggtctcatgttgacagcagtgttgagctcattggaagccttctctttggctctgaagacggtccaagggttctgaaagccgtccgtgcag

SEQ ID NO: 63532 - DNA, 282 bp, Zea mays
ggatgcacagggagttgcatgacataaaaccattatacaaatatctgcatgcaacccaccatatttacaacaaggagaataccttgtctccatttgctggacttgcatttcatccactggatggtattctgcaagcaataccgcatgtgttcgcgctcttcctctttccaacacacttcaggacacatattgcactcttgttcctagaggctgtgtggacaacaaacatccacgactgcattcatggcaagatatggccagtcatgggcgctggatatcaca

SEQ ID NO: 63533 - DNA, 282 bp, Zea mays
ctgaagaaagggctgcccattcttggtattttcaggagctttgcagctgttggagtggatccagctgttatgggcgttggtcctgctgtggccattcctgctgctgtgaagtctgcaggccttgagattggcgacattgatctgtttgaactgaatgaggccttcgcctctcagtttgtctattgctgcaacaagttggggctggaccgttctaaagtaaatgtaaatggaggcgcgattgcccttggacaccctctgggtgcaacaggtgcccggtgtgtg

SEQ ID NO: 63534 - DNA, 276 bp, Zea mays
ccgccgctccttccacttcgttgcgccgaggacactgccgagtagcaagggaggaggaggaggaggcgatggcggggggcggggatacggtggactacgtcttcaaggtggtgctcatcggcgactccgctgtcggcaagtcgcatttccttgcgcgcttcgcccgcaacgagtttcgcctcgactcgaaggccaccattggggtcttgttccagactcggacgcttttcatcgaacacaagtccgtcaaggcgcagatctggggacacgccgggc

SEQ ID NO: 63535 - DNA, 283 bp, Zea mays
cacacatacatagtttcttctactacacgacgacaaacatggggaagcctgcgaagatcggagagtggggtggatacgccggcgatcgtcgggatctgagggctactccggaccggctgaccgaggtgaaggtcacggcggacaacagcagctgcatccgctccatctccttcatctacatcggagccgatggcaagccgtacgaggaggggccatggggtttcggccatgctggcacggagtacaagattgatctgtgcaggttcgacgagagcttgacgga

SEQ ID NO: 63536 - DNA, 297 bp, Zea mays
gatcttgtgaccctccctcagccgcgtcgcgtcgcatcctacgatccaaagctctctctgctcgcagccatggcgaagaactacccgaccgtgagcgccgagtacagcgaggctgtggagaaggccaggcgcaagctccgagccctcatcgccgagaagagctgcgccccgctcatgctccgcctcgcgtggcactccgcggggacgttcgacgtgtcgtcgaggaccggcggtccattcggcacgatgaagcatcagtcggaattggctcacggcgctaacgcggggctggacatc

SEQ ID NO: 63537 - DNA, 263 bp, Zea mays
ccctgagcaagatagacgggaatgaacttccccacatcatccctgctgtacccaaaggtcatctgcgtcaggtcgtggtgatcaacagtattattacagagccatgctatgtgaacattactagtagcagtgctcataaaagctacaatcccatgtcctttttttccccagtcatgtaaaacttccaaactgctccatggttcaaaactctgttcttcaatacatcatcaattatcgattatatacgtggcaagtttttttcc

SEQ ID NO: 63538 - DNA, 283 bp, Zea mays
gtcccttacaagtatgatctgagtaagttctgtccattcaacaccgtcctcttggatcatggcgacccgtcagtgaacacagttctaactgcgccaactgataagcctggcgtcgcgttgcttgattttgtaatattcccacccagatggctggttgctgagaatacattccgcccaccctactaccaccgcaactgcatgagcgaattcatgggcctcatctatgggatgtacgaggctaaggccgatggttttcttcctggtggcgccacttcacagctgc

SEQ ID NO: 63539 - DNA, 285 bp, Zea mays
  unsure (1)..(285): unsure at all n locations
gttgaatgttaagcatctgttttcgtacattggcacaaaccctgctaacgatgacaacacgttcatagaagacaactcgttgccatcattctcaaaggctgttaatcagcgcgacgctgaccttgtctacttctggcagaagtaccggaaattggcagacagctcacctgagaaaaatgaagctcggagggagttgcttgaagtgatggcncacaggtctcatgttgacagcagcgttgagctcattggaagccttctctttggctctgaggacggtccaagggt

SEQ ID NO: 63540 - DNA, 282 bp, Zea mays
gtaaaaaaaggtcctagccggttatggagaaacttgttgagcgtcggatgaagatgtgcgtgaagttcgtataatacctgccaagtgctcgacaaattgtcttgttgggactatgcttcgtcgccgaaggtcttgtaggaagaagcagcttcggctgaagctgtccgcatgagacgaccgatgatcctcttcgtgaagcttcggaattacaaaccaacttaaaagtagaatgaccttttagtccataaatgtttgagtcgctgttgtaatcccttataaggg

SEQ ID NO: 63541 - DNA, 285 bp, Zea mays
ctctgcctggccgacgaccccgaggccttcgccgagctcaaactgaaggagctcaagaacggccgcctcgccatgttttccatgttcggcttactctcgtccaggccatcgtcaccggcaagggcccgctcgagaacctcgctgaccacatcgctgacccagtcaacaacaacgcatgggcctacgccaccaacttcgtccccggcaactaagctcaacggctatgctatgcaacttcattgtctttcggatcggagagggtgtacgtacgtggattgattgatg

SEQ ID NO: 63542 - DNA, 281 bp, Zea mays
ggatgaatgggttgcaaatgaccgcttgttggaattgacggaggaaaacgtgcgcaaacaacaagagcttgataagaatcaggtagttgacaaaacaatgaagtctggacggtcaacacagcataaaccaaaagtctccaatgcggatgcaaaagctgataaagatgacactaagagtctcatttcagtgaaggggaagaaacgtaaaagtcagcttgggactgagtttcctttgccactgaagaagcaacttgtggatgattgggagtttgttacgcaga

SEQ ID NO: 63543 - DNA, 273 bp, Zea mays
cttttgttgagaagagaaagctcaatgctgagacaagcaaggcgccaaaaccgtgacagggagaagcttttcctagcaaaccaggaaaagttccatgctggtgcagataagcaatactggaaggcgatatctgaacttatcccacatgagattgctaacatcgagaagagaggggcaaggaaagacaaggagaagaagcctgggatcgtggtgatccagggaccgaagcctgggaagccaacggacatggcacggatgcggcagatattgctg

SEQ ID NO: 63544 - DNA, 278 bp, Zea mays
agccatcagacccagagaatttccatttgttgtgcttggtaacaagatcgatgttgatggtggtaacagccggactgtttctgagaagaaggctaaagcatggtgtgcttcaaagggaaacatcccctactttgagacgtcggctaaagagggcttcaatgtagaggctgcatttgagtgtatagcgaggaatgctgtaaaaaatgagccagaagaagatatgtatcttcctgatacgattgatgttgggggcgctggaaggcaacaacgttcgtcag

SEQ ID NO: 63545 - DNA, 207 bp, Zea mays
ggctggactacctgagggtgttgtgaatgtcgtttctggttttggccctactgctggtgctgctcttgctagtcacatggatgttgataagatcgcatttactggatctaccgatactggaaaaattattctcgagttggctgcaaagagcaaccttaagacagtgacactggagttaggaggcaagtcccctttcatcataatgga

SEQ ID NO: 63546 - DNA, 278 bp, Zea mays
ataattacttcgagtattctggaccagacttcaaactgcatattagtccctcaaacatgacaaaccagaacactccagaatatatggaaaagataaaacagcgtttatttgaaaatctgcgaatgttaccacatgcgcctggtgttcaaatgcaagctattccagaagatgctgttcatgaagacagtggtgatgaggatggagaagaccctgacaagagaatttctattcgagcatcagacaagcggatagcttgtgatgaagagttctcagattct

SEQ ID NO: 63547 - DNA, 278 bp, Zea mays
cgcggtcgacgaaattggagctgacaaggtcgggataaggctgtcaccattcgctagctactcggaggcgccggactcagacccggaagctctgggcatgtacatggcgaacgcgctgaacgagttcgggattctctactgccacatggtggagccgcggatggtgaaactcggtgaaaagttcgaaaccccctacagccttcgcccgataagggacgctttcaggggaacgttcatcgttgccggcggctacggcagggaggatgggaatcgcgcga

SEQ ID NO: 63548 - DNA, 278 bp, Zea mays
cacaactcgcagctgcacgtgatgctggccatctgctacagcgggcgatgggatggtccaggcgtcccgggagctggcccgggaggcgcaggcgaaccggctcagtccggacgacatcgacgagtcggtcatcgccggcaagctcgcgacgagcgccgccggcgagttttcctgtcccgacctggtcatcagaaccagcggcgagatgaggctcagcaacttcttgctgtggcagtcggcgtactcggagttgttcttcaccggcaagatgtggcctg

SEQ ID NO: 63549 - DNA, 278 bp, Zea mays
  unsure (1)..(278): unsure at all n locations
cccagcgccggcagtcgccgtcatcgatcgatcgccggaaaactaacccctaacgatgtctggagccggcgaggaggacaagaagcccgcggagggcggcgcccacatcaaccttaaggtcaagggacaggatggcaatgaggtgttctttcgcataaagaggtccacccagctgaagatgctgatgaacgcttattgtgatcgctagtctgtggacatgaatgccattgcgttcctgtttgatggccgcagtntcgcggcgagcagacccctgatga

SEQ ID NO: 63550 - DNA, 278 bp, Zea mays
cccggctggccggctccccacctgctcgcctctcgcgcatcctaccaggagggtgggagacccaggcagcggaggtgtgcgaactcgcttcgcaccacgcgctgcggcctgcgggggagagatcgaggcctgagctagggtctggtggcggagatgtcgacgccggcgaggaagcgcctgatgcgggacttcaagcgccttcagcaggacccgcccgccggcatcagcggcgcgccgtacgacaacaatatcatgctctggaacgccgtcatattcgg

SEQ ID NO: 63551 - DNA, 279 bp, Zea mays
ggagactactgcaaataggaaattggctaaggagctggttgataaatggagtcgaccaatattcaacaagagcacgagatttgaggacatgaagagatatgatgatgaaagagcaccttacaggcggccacaaatgaagaaaccttcatcgagtagctctggaatggaatccagagatgatgatcttgatgctgacttttcacaacgcaagtctgggcaaagtagttcaaggcagcacgcttctaggccggaagcctcgcctttggactttgtcattcg

SEQ ID NO: 63552 - DNA, 277 bp, Zea mays
gcactctcgcggactacaacatccagaaggagagcacccttcaccttgttctccgcctcaggggtggtatgcagatctttgtgaagaccctgactggaaaaaccataaccctggaggttgagagctcggacaccatcgacaatgtgaaggcgaagatccaggacaaggagggcatccccccggaccagcagcgtctgatcttcgccggcaaacagctggaggatggccgcaccctagcagactacaacatccaaaaggagagcaccctccaccttgt

SEQ ID NO: 63553 - DNA, 279 bp, Zea mays
gtttcttctactacacgacgacaaacatggggaagcctgcgaagatcggagagtggggtggatacgccggcgatcgtcgggatctgagggctactccggaccggctgaccgaggtgaaggtcacggcggacaacagcagctgcatccgctccatctccttcatctacatcggagccgatggcaagcgctacgaggaggggccatggggtttcggccatgctggcacggagtacaagattgatctgtgcaggttcgacgagagcttgacggagatctccg

SEQ ID NO: 63554 - DNA, 274 bp, Zea mays
ctgcgtttcctcttctgaagggagttgttgctacaactgatgttgtggaagcctgcactggggtcaatgtggccgtcatggttggtggattccccaggaaggagggaatggaaaggaaagatgttatgtcgaaaaatgtttcaatctacaaatcccaagcatctgcccttgaagcccatgcagctcccaactgcaaggttctggtggttgccaacccagcaaacaccaatgctcttatcttgaaagaatttgctccatctattccagagaagaa

SEQ ID NO: 63555 - DNA, 274 bp, Zea mays
cagtttttaaaaaggatgggactacaactgcaggcaattccagtcaagtgagtgattgtgctggagctgttcttctcatgaaaagatgtgtggctctgaagaaagggctgcccattcttggtgttttcaggagctttgcgactgttggatagaataaagctgttatgggcgttggtcctgccgtggccattcctgctgctgtgaagtctgcaggccttgagattggagacattgatttgtttgaaatgaatgaggccttcgcctctcagtttgt

SEQ ID NO: 63556 - DNA, 274 bp, Zea mays
gccactctcatggacgccatgatggacgcgtcgagggagttcttcaggcagccgctccaggagaagcagaagcacagcaacatgatcgacggcaagcacttccagctccaagggtacgggaacgaccgggtggcgtcggaggaccaggtcctggactggtgcgaccgcctttacctcttggtggagcctcaggaggacaggagccttgacctatggcccgcatgtctaagggacgttctgcacgatttcaccacagagtgcacgagagtgaagg

SEQ ID NO: 63557 - DNA, 278 bp, Zea mays
ggcgccgccgacgccgcaggaggagacgcatcgaggttagcacgcgaagaagcgaccatgagggccaagtggaagaagaagcgcatgaggaggctcaagaggaagcgcagaaagatgaggcagagatccaagtaggcagatcgagatggattgtggacctgatgacatgcgtgggtacatacatttcttcggatgcgttggtgtgcctgtggagagatgtcaacctgccatggtgtcacggtccgccatcagttgaacgtcttgcctgcacttcagta

SEQ ID NO: 63558 - DNA, 277 bp, Zea mays
tgcctcacacagccaaaaatgtatcaggtgattaagaaccatcccagctcattgaagctttatgagcagaaactgctaggaacgagtgaagtcatgaaagaagatgtccagaggatccatgacaaggtgaaccgaatcttgaacaaagagtttgctaagagcaaagactacgttcccaacaagagggattggctctcagcttactggactggctttaagtcaccagagcaaatatcacgtgttcgcaacactgggtcaggcaattactacactgcct

SEQ ID NO: 63559 - DNA, 276 bp, Zea mays
cttattgactgtggttttgcattcaacaatttcggatgcaacggaggccttccatcccaggcctttgaatacatcaaatacaatggtggccttgacactgaggaatcttacccttaccaaggtgtcaatggaatctgcaagtttaagaatgagaatgttggagtcaaggttttggactcggttaacatcaccctgggtgctgaggatgaactgaaggatgctgttggtctggttcgcccagttagtgttgccttcgaggtgatcactggtttcagg

SEQ ID NO: 63560 - DNA, 272 bp, Zea mays
ggcgggcgaggagggtgaggcttaaggtcctcggcctgcaggtgagcccgttcgtgctccgcgtgtgcttggcgctgaacatgaaaggagtgagttacgagtacgtcgaggaggacgtatccaacaagagtgagctcctgctcaagtccaacccggtgcacaagaaggtgcccgtgctcatccacaacggtaagcccatctgcgagtcacccgtcatcatgcagtacgtcgacgagctgttcgccggccggccgatcctcccaaccgacccc

SEQ ID NO: 63561 - DNA, 276 bp, Zea mays
ctcgccgactacaacatccagaaggagagcaccctccacctggtgctccgcttgcgaggtggtatgcagatctttgtgaagaccttgactggcaagaccataaccctggaggttgagagctccgacaccatcgacaacgtgaaggcgaagatccaggacaaagagggcatccccccagaccagcagcgtctgatcttcgctggcaagcagctggaggatggccgcaccctagcagactacaacatccagaaggagagcactctccacctggtgctc

SEQ ID NO: 63562 - DNA, 272 bp, Zea mays
gccgcggagacgccggagcaatcatttttgctctcaagaacaagctggacattaccctcggagtagcgttggggtcggcgaccagatctccatgtttgtggtgccgctgagtgtcattgtagcttggatcgcgggtattcaaatggatcttgacttcaagctcatagagaccggctctctcttcgtctcagtaatagtgacagcattcaccctccaggatggttcgtcacactacctcaaggggatccttctgctgctgtgctacattgtga

SEQ ID NO: 63563 - DNA, 273 bp, Zea mays
atcattttcccaactattcccactattggggtttggtaatctgcctcagctggtgaaggtggaggaaatatcacaaaccattgattctgagaacttcacagtgcaaaactgtatcaagttttcaggacctttggctacaacctcagttgccactaatgcaaaatttgaaattagaagccccaagcgtgtgcagatcaaatttgatgaagggattgttggtacaccacagttgaccgactccattgtgctaccagagaatttgagttatttgga

SEQ ID NO: 63564 - DNA, 274 bp, Zea mays
ccttgatgaaccaatatgtgaacaagaagttcagcaatcagtacaaggctacgatcggcgcggatttcctcaccaaggaggtgcagttcgaggacaggctcttcactctgcaaatatgggacactgctggccaggaaaggtttcagagtctcggcgttgcattctaccggggagcagattgttgtgtcctagtctatgatgttaattctatgaaatcatttgacaacctgaacaactggcgagaagagtttctaattcaggctagcccatcaga

SEQ ID NO: 63565 - DNA, 274 bp, Zea mays
gaagcatgctgcaaggagggaacatttggatgcgttgcttgaggaatactgagtgagatgttcttcgcttgagtcggttaattccaccgttgcagtggttgtatatactcggaaacataggggggcaggcacatcatccttgaaaggcttcactgccactcactcactctgcagataactatacatgtacatctgtgacgatcagtaggcatgcatagttaaagcatctgtggctgcaaaatcgtcaaggcgatccaacaaaaggagaaccttt

SEQ ID NO: 63566 - DNA, 272 bp, Zea mays
caggtatttgtccatgttccttcagaaattgctgctcatgaagttgaggaaattggagttgaacaccttttaagggacgtaaaggacacaaccataagcacacttgctacagaggtcactagcaagcttgcagccttgaagggactagatgcaaggctcagggagatccgaagctatttggatcttgtaattgaagggaagctcccactgaatcatgagattttgtatcatttgcaggatgtctttaatctccttccaaatctgaacgtaaa

SEQ ID NO: 63567 - DNA, 270 bp, Zea mays
ggtaatccaacgatcatgatgcttgttatggtttagtagtagcttatctatgcttttgtgctcgcttttacctgtggttgcatatcaagtattattaaaatgccttgttgtctaaatatgatatattgtgttgggggccttcggcttccgaaggtcctcaaaaacatgatttaacaatgtttctggagtataatgtgtgaacaggtatcttcggacttgaatcagaaagggagaagctcaaaagatacgaaggttgacacagtgccgaag

SEQ ID NO: 63568 - DNA, 271 bp, Zea mays
cgaggatctggaattgggtgatgaagaagaagagactaaagaaaccaaacaggagttcactctcctatctgattgggttaaacaacagcttggcgacaaggttgcgaaggtccaaatatcaaagcgtttaagttcatctccatgtgttctcgtatctggcaagttcggttggtccgccaatatggaaaggctcatgaaggctcaaacacttggtgacacatcaagtttggaattcatgaggggaagaaggatctttgaaatcaaccctgac

SEQ ID NO: 63569 - DNA, 271 bp, Zea mays
ctccgtgggaggtgtcggcggggaagggcggcatcgactacgacaagctcgtggaccagttcggctgccagcgcatcgacgacgcgctcgtggaccgcatcgcacgcctcaccgcccgaccaccgcactgcttcctccgccgaggcctcttcttcgcccaccgtgatttgaacgagatactggatttgtatgagaacgggcagaagttctacctctacacggggagggggccctcgtcggaggcactgcacctcggccacctcatcccctt

SEQ ID NO: 63570 - DNA, 219 bp, Zea mays
ctgagactgtggaacttcagattggtctgaagaattatgatccacagaaggacaagcgtttcagtggctctgttaagttgccccatatccctcgtcccaagatgaaggtgtgcatgcttggtgatgcccagcatgttgaggaggccgagaagatgggacttgactacatggatgttgaggctctcaagaaaatgaacaagaacaagaagcttgttaaga

SEQ ID NO: 63571 - DNA, 269 bp, Zea mays
gtttaatgatgccttttgggagagtttggatgttgtcgttaatgcattggacaatgtcactgcaagaatgtacattgattccagatgtgtatattttcagaaaccacttcttgaatcgggtactcttggtgccaagtgcaacacacagatggtcattcctcacctaacagaaaattatggggcatccagggatccaccagaaaagcaggcacctatgtgcactgtacattcatttcctcacaatattaaaataaaattacgtgggccag

SEQ ID NO: 63572 - DNA, 269 bp, Zea mays
tgatgaagagggtagtgaggaggatgaagatgatgacgagtgatggagctcctcgagacaatggaccgtgcttcatccaacaatggagcggctacacaaggccccgtggcgatcacaaaaaaggagcctatatccatgtactagaattattcagtttcactccacatcgtgatgttttatttttacttttgtcgtgctataacggatagcgctcctcgttggcgccactggcgggtggttctgcctctggtctggtgtgtttgtgtgtg

SEQ ID NO: 63573 - DNA, 271 bp, Zea mays
gcgagaagttgatggtggaattgaaaccatctgccttgatctgccagcagtgatcaccacggatttaagacttaaccagccaagatatgcaactttgcccaacataatgaaggcaaaatccaaagttattaagaaagtcgccgctgaagaccttggcgtagatattagatcagacatggaggtgattgaggtcaatgaaccaccaaaacgaaaagcaggggtgattctttcatgtgtcgacgagctccttgacaagttgaaaaatgaagca

SEQ ID NO: 63574 - DNA, 270 bp, Zea mays
tgaaattgaatccattctgaaagatatatcagaaagggccaagggtaagggaaacttcagctacagccgattctttgcagttggcttgttccgtttgcttgagcttgcaaatgcaacagaaccaacagtactagacaagctttgcgctgcgctaaatatcaataaaagaagtgtggatagggaccttgatgtttaccgcaacatactctcaaagctggttcaagccaaggaacttctcaaggaatacgtggatagggaaaagaagaagag

SEQ ID NO: 63575 - DNA, 268 bp, Zea mays; identical to SEQ ID NO: 60637

SEQ ID NO: 63576 - DNA, 267 bp, Zea mays
gcctgcgaagatcggagagtggggtggatacgccggcgatcgtcgggatctgagggctactccggaccggctgatcgaggtgaaggtcacggcggacaacagcagctgcatccgctccatctccttcatctacatcggagccgatggcaaaccgtacgaggaggggccatggggtttcggccatgctggcacggagtacaagattgatctgtgcaggttcgacgagagcttgacggagatctccgggaccacgggcccagcctacaa

SEQ ID NO: 63577 - DNA, 266 bp, Zea mays
gagcacttggtgactggcatctcgagggcatgaaaggagctggtgcgacaggtggtcccctgagtgctgacccagagctcaagatgaccacgctgacgaaggatgacgagttcttgataattggcagcgacgggatctgggacgtcttctcgaaccagaactcggtggacttcgctcggaagcgcctccaggagcacaacgatgtgaagttgtgctgcagggaaatcgtcgaggaggcgatcaggcggggggctactgataacttg

SEQ ID NO: 63578 - DNA, 268 bp, Zea mays
ctccggaccggctgaccgaggtgaaggtcacggcggacaacagcagctgcatccgctccatctccttcatctacatcggagccgatggcaagccgtacgaggaggggccatggggtttcggccatgctggcacggagtacaagattgatctgtgcaggttcgacgagagcttgacggagatctccgggaccacgggcccagcctacaacattgacaatctggtcaagtctctcaaatttgtcaccaacaaacgtacttacggaccgta

SEQ ID NO: 63579 - DNA, 259 bp, Zea mays
agttcttcaggcagccgctccacgagaagcataagcacagcaacatgatcgacggcaagcacttccagctccaagggtacgggaacgaccgggtggcgtcggaggaccaggtcctggactggtgcgaccgcctttacctcttggtggagcctcaggaggacaggagccttgacctatggcccgcatgtctaagggacgttctgcacgatttcaccacagagtgcaccagagtgaaggactgcctgcttcgagaatggcg

SEQ ID NO: 63580 - DNA, 258 bp, Zea mays
cgcgaggtgagtgattctactataggctcctcgctacgggagacacattccagatttctttggatgtcattgattttcctgttcatcagcagaagacctataggggcttggagctacatattgaagacaatgtctggatgcttctactttgtaattgttggccaccatgataatccagtttttgaaatggaatttttgccacctgggaaatcagaatccaaagatgatcaccgtcatctgagaccatttatagctcat

SEQ ID NO: 63581 - DNA, 149 bp, Zea mays
ggcaggactcgcttcaagctcctcatctcgcacatgggggtcgcctgagatcacagagacaattgtgaaggcagttgctgtcctcgccggcactgatgtcaagggcaccatcttcttttcacaggatggggatcgtccgagcaccgtga

SEQ ID NO: 63582 - DNA, 276 bp, Zea mays
aaaattcttcatgggtcatgaagacagatacaccatatacgtgcatgcatcaagagatataccgagtcattcaagtccaatattcgctggcagggatattcgaagcgaaaaggtgatatggggcacgatttctatgcttgatgctgaaaagaggctcttggcccatgccctacaagatcctgaaaaccagcattttgtcttgctttctgagagttgtgtgccacttcataacttcgattatatatatagttatctcatggagacaaacgtcagttt

SEQ ID NO: 63583 - DNA, 274 bp, Zea mays
gccgtcgccagtcgctacttgccctccgatcctcgtcgccgacgcatccacccgaagcttctccgcgacctcgtcgtcgccgcagccttggccatgtcgatcttcgagtataatgggtccgccgtggtggcgatggtggggaagaactgtctcgcgatcgccagcgaccggcggctgggcgtgcagcttcagaccatcgcgacagacttccagcgggtgttcaaggtccacgacaagctttacatcggcctctctgggctcgccactgacgccc

SEQ ID NO: 63584 - DNA, 261 bp, Zea mays
ctgctgcctgcctgcctgcctgcctgcaaaaaggagtttgtcatggcgtctaagcgcatcctcaaggagctgaaggacctgcagaaggacccccccacatcatgcagtgcaggtcctgctggtgaggacatgtttcattggcaagcaacaattatgggaccacctgacagtccctatgctggtggtgtttttttagtgaacattcatttcccgccagattaccccttaaaacctccaaaggtttctttgaggacaagggtc

SEQ ID NO: 63585 - DNA, 272 bp, Zea mays
gctgcgcgaaggtgagtggctgtcgctgaatgggtcgactggtgaggtgatccttgggaagcagccgctttccccaccagcccttagtggtgatctgggaactttcatggcctgggtggatgatgttagaaagctcaaggtcctggctaacgccgatacccctgatgatgcattgactgcgcgaaacaatggggcacaaggaattggattatgccggacagagcacatgttctttgcttcagacgagaggattaaggctgtcaggcagatga

SEQ ID NO: 63586 - DNA, 277 bp, Zea mays
ctggcatccgcagagagcttgttccgtccaggcaaccaaaaagcaagttgccccgccgcgcagaggaagaagagagcagaggaggatggctcgtacgaagcagaccgcccgcaagtccacgggaggcaaggccccccgcaagcagctcgccaccaaggcggcgaggaagtcggcgccgacgaccggcggcgtgaagaagccccacaggtacaggcccggaaccgtggcgctgcgcgagatccgcaagtaccagatgagcccggacttgctgatccgc

SEQ ID NO: 63587 - DNA, 269 bp, Zea mays
ggaaaaacttgaatcattctatttaccaatgtattcaccatcggttggtgaagtggaggccatactaaagcaagttgggttgttcaacatgaatcatgtaaaagtattccagacaaattgggatccctacgatgacttggaaagtgatgttgtgcataacagtattaggagcggtgaaaatgttgctaagtgcctacgagcagttatgcagccgctagtcgcaagccaatttggagaaccattctcgataagttattcaagggtacgct

SEQ ID NO: 63588 - DNA, 145 bp, Zea mays
tcgagctctggctgaaggtagatgatgaactaaggcagaaaggaccgacaagcgacatgctattcaagattccttttctgataagctatatcagttccatcatgacattaatggagggtgatgtgatactaacaggtactcctga

SEQ ID NO: 63589 - DNA, 269 bp, Zea mays
attgggagcagctgggattggtatgctggaacatggagtgacaaaatcaaggaacaagaggacaagaaaaggaagatgagtgctgctagcaaccaagttcaaccttctccaaacatctttggagacctctctttcttgcgaccgccaaatgaatggaagaagagtgcatgggtggttgttaccttgtggatccttttgataggaacagcaatctatctgcaatcatgaatggctcctgcagctctgaaacaagccattcacatctctgc

SEQ ID NO: 63590 - DNA, 132 bp, Zea mays
gtcacgaacaaagcgaattctgaagcccacttcagattgaccgggcctgagatctggaaggacacggcaggcaaggtggatgtattcgtagccggttcaggcacaggaggcactgtttctggcgtcgggaag

SEQ ID NO: 63591 - DNA, 276 bp, Zea mays
caggtggctcacgtgaatatatgggaagaggccctccaccaggcacaggtcgttgtttcaactgtggaatggatggtcactgggcaagagactgtaaggctggtgactggaaaaataaatgctaccgttgtggagaaagagggcatatagaaagaaattgccagaacagtcctaggagcgtcaggcgtgaaaggagttaattcacgctccccatctccacgccgtggaagaagtcgcagtccaagctataggcagagcaggagccggagccggagc

SEQ ID NO: 63592 - DNA, 270 bp, Zea mays
cctgcttgctccaagatttacccctccctcggtgcctgatacctctatcctccgcatccgtctctaaagacaaggcagtcgtcaagaaagggagtttgaccaagagcctgtggtgtccgtcggctgccatccatggcaggggaggccaagaagctcttcttcgcatccgaggttactctccacgcctccaggaaggactgctgggtcgtcatcggcggcaaggtgtatgatgtgaccaagttcttggaggaccaccctgggggagaggat

SEQ ID NO: 63593 - DNA, 218 bp, Zea mays
tgaagagattcatcagcactggaaacataaagaggttgtgaaagtaattacaaaacagaatcaaactcgacagatcatgtacaccgcgagtctgctcgaggttgagacaggtggaatattaatagcagtagaaaagctcacaaccagccatgccataatactttaccgtggaaaaaactatcgccggccagcaaaatcatcatttagtaatctcctaa

SEQ ID NO: 63594 - DNA, 257 bp, Zea mays
agagattgaaggagttctctttgaaggaaacagggttggaccagtatgctgttgcgaaatttgctgaaagctttgaaatggttccaagaaccctggcagaaaatgccggacttagcgcaatggatgtaatatcctctctttatgctgagcatgctagtggcaatgtgaaagttggcattgacctggaggaaggtgcctgcaaggacatcacgaccttgaaaatatgggacctttatgtcacaaagttctttgcccta

SEQ ID NO: 63595 - DNA, 265 bp, Zea mays
tttaaaagataccaagtgagatttagaaggcggcgagagggtaaaactgactactatgcacggaaacgattggtgatccaggacaaaaataagtacaacacaccgagatacaggatgatagttcgtgtaacgaacagagacatcatctgccagattgcatatgcccgtatagaaggggatatgatcgtctgtgcagcatatgcacatgaacttccaaaatacggtgtgaaggttggcctgacaaactatgctgcagcctattgca

SEQ ID NO: 63596 - DNA, 190 bp, Zea mays
aaacaatcaagaggtgccacaagtagaacaacatgttggcatcagcaactcttattcagagccgttggaccttgcaaagtacagttcatctgcagaattggaggtgcttggtctggagaagctaaaaatagagctgcaatctcgcggattaaaatgtggtggaactttacaggagcgtgctgcccgactc

SEQ ID NO: 63597 - DNA, 259 bp, Zea mays
ttctgctgcaatggtacagtggtccaggacccagaacttggacaggtcattcagctccagggtgatcagaggaagaacgtctcgaatttcctcgtccaggccggcattgtgaagaaggagcacatcaagattcatggtttctgagcaaccgccgggtccatagcaaaccaaccctgcatgcagggccagcttattatatataatatctgaggtggagcatatctatctggctgtgtactacaagcaggcctagtacgcc

SEQ ID NO: 63598 - DNA, 264 bp, Zea mays
tggagtcaaggtttcggactcggttaacatcaccctgggtgctgaggatgaactgaaggatgctgttggtctggttcgcccagttagtgttgccttcgaggtgatcactggtttcaggctgtacaagagcggagtttacactagcgaccattgtggaactacaccgatggatgtgaaccacgctgttctggctgttggctacggtgtcgaagatggtgtaccctactggctcatcaagaactcatggggcgctgactggggtga

SEQ ID NO: 63599 - DNA, 265 bp, Zea mays
ctcgcatcgcattcgcagcctttgctgcatcacaccaccgcgaaaccccagcagccgcatcgatggcgcccaaggcggagaagaagccggctgcgaagaagccagcggaggaggagcccgctgccgcgaaggccccggcggggaagaagcccaaggccgagaagcgcctcccggcggccaagtcgtccggcaaagaaggcggcgacaagaagggtaagaagaaggcgaagaagtcggtggagacctacaagatctacatcttcaa

SEQ ID NO: 63600 - DNA, 185 bp, Zea mays
gtgcagtactgattttaattcaaaatctttgtcaaagaagaaacataaagtgaaaaacatcaaagaacgtgactcgtatcagagaaactacatacatgctagcgaggttattttatccatcctgctggacaaggacaggagcagctcgacaatcctctcgctgaaaaaggctggtcctgagatca

SEQ ID NO: 63601 - DNA, 259 bp, Zea mays
cacaaacctgatcagacagatgagagacaaagaattgaggacgcagggggctttgttatgtgggctgggacatggcgagtgggtggtgttcttgctgtctctcgcgcatttggtgataaactcttgaagcagtatgttgtcgctgaccctgaaatcaaggaggaggtggtcgacagctcccttgaattcctcatcctggctagtgatggactctgggaagttgtcactaatggggaagctgttgccatggtcaagccta

SEQ ID NO: 63602 - DNA, 226 bp, Zea mays
tgaaggacggcaatgtcgcgggaggcgaggcgcagttccagactgaggttgagatgatcagcttggcgctgcacagaaaccttctcaggctctatgggttttgcacgaccgccaccgagaggcttctggtctacccatacatgtctaacggaagcgtcgcgtcgcgcctgaaagggaagccgcctttggactgggcgaccaggaggaggatagctctgggcgcaag

SEQ ID NO: 63603 - DNA, 182 bp, Zea mays
gagggtttatcttcgttcgtctcgtttgttgttgcccatctgtgtgtttgattgcaaggtcgctctgtgtcagttgttagtgctgtgttcatcctcggctccagcagacccatgcatcaaccagcatggactgtggatcgatggatgctgttactcctgtcaggatttgttctaagttaatc

SEQ ID NO: 63604 - DNA, 261 bp, Zea mays
gtgaatgggatcttctacagaaaaacctacctgaatctatatacgttagagtctatgaggacaggactgatctgctgagggctgccatagtcgggccagcaggaactccataccatgatggtctgttcttcttcgatgtccgttttccttgcgaatacccaaagtgcccaccaaaagtatactatccttctggcggacttcggctgaacccgaacctgtacgagagcgggaaagttgcctgagccttctgaacacctggtg

SEQ ID NO: 63605 - DNA, 264 bp, Zea mays
gtttgcctcaaggaggacgacctcgagcggatcgtccagcgagcgataataagctagggcgtgttcggctggctacaagacgacactgttgcagctgtttggattgctgcagctgcaatccatagagagaaaaatactgtagaagccgcagccgcagccggattgcagccgcagcaagccgcagcgaacaagctgctagctaggagtagtcgtcaactcgtcatgtagtaccacacagactcagttttagtacgtgtgccaaga

SEQ ID NO: 63606 - DNA, 281 bp, Zea mays
cgcttggggcggcccgctgtacatcggcacgggatgcttccataggagggagaccctgtgcggcaggaggttcaccgaggactacaaggaagactgggacagaggaaccaaggagcagcagcagcaccgccaccgcgtcgacggcgagacgaagcgaaggccaagtcgctagcgacctgcgcctacgagcacgacgacgacacgcggtggggagacgaggtggggctcaagtacggctgctcggtggaggacgtcatcacggggctggcgatacactgcag

SEQ ID NO: 63607 - DNA, 275 bp, Zea mays
acgccggcgatcgtcgggatctgagggctactccggaccggctgatcgaggtgaaggtcacggcggacaacagcagctgcatccgctccatctccttcatctacatcggagccgatggcaaaccgtacgaggaggggccatggggttcggccatgctggcacggagtacaagattgatctgtgcaggttcgacgagagcttgacggagatctccgggaccacgggcccagcctacaacattgacaatctggtcaagtctctcagattcgtcacca

SEQ ID NO: 63608 - DNA, 285 bp, Zea mays
cccaaagtgcccaccaaaagtatactaccattctggcggacttcggctgaacccgaacctgtacgagagcgggaaagtgtgcctgagccttctgaacacctggtggggcaaggggtgcgagaagtggggcaagtcgagctccagcatgctcaggttctggtctccatccagggcctcgtgctgaatgacaggccatacttcaatgagccaggatccaagaactcggctgaaacgacaggtggtgagaggtgttccctggcttacaatcagacggccttcgtcaga

SEQ ID NO: 63609 - DNA, 261 bp, Zea mays
ctctggtcccatactacttggaagaagaggctaactggaaccttgactttgcagacatccgacaagcagtggccgaggcacgttcgaagggaatcactgttcgagcgacggtgattataaatccaggaaatcccactggccagtgccttgtgaagcaaatataagggaacttgtgcgatattgctaccatgaaaacttagttctgcttgcagacgaagtgtatcaccagaacgtagtaccagatgagcgcccattataagc

SEQ ID NO: 63610 - DNA, 278 bp, Zea mays
gacactttgattctggccaatctctctggcctgctgcttcctgataatctaccagttccccagtcttgctccttggagtcctccctccatctccagcattgtgttctgattcacctgctccaatggctgttctttctgctgctgatgttccccggtctcagctatcgggtttgagggctatgagaagcgccttgagatcacattctctgaggcacctgtctttgtggaccctcatgggcgtggtctgcgtgcctctcaggggcccagatggactctgt

SEQ ID NO: 63611 - DNA, 278 bp, Zea mays
cagaaatatcaatgtgaatgctattgcaccagggtttattgcatctgatatgactgccgaacttggagaagagcttgagaagaaaatcttgtcaaccattccattagggagatatggccaaccagaggaagttgcagggttagtcggttcctggcccttagccctgcagctagctatatgaccggacaggtgcttacaattgacggagggatggtaatgtaaggttcgagttggcttgatgcacttctacttttgcttaacatttaggcgacgttggt

SEQ ID NO: 63612 - DNA, 276 bp, Zea mays
caactatgcatggcgccttccctccagatattcctgctccccctgttctaatgcctgtgcctggtgccggtccgcttggaccgtttattcccgcaccgccggaagttgccatgcatatgttgagggatcagggtgcgccacctcctttgagcccagtggaggtccacatcctaggaaagcagggacgggcagcggcggtcctccaatgcgtggtccgtccccagtcttcagtgctcctccgcctcatcatatgcatgaccctcgtcgaatacgaag

SEQ ID NO: 63613 - DNA, 272 bp, Zea mays
gttggagctccacaagtcaactaccgtgaaagtatttccaaagttgcggaaatacaatatgtccacaaaaagcaatctggtggatctgggcagtttgcagacattattgtgcgttttgaacctttggaagctggaagtgggtagagttcaagagtgaaatcaagggaggggcagtgcccaaagaatatgtaccaggggtgatgaaaggattggaagaaagcttacccaatggtgtcctagccggttacccagttgtggacttccgggctgtg

SEQ ID NO: 63614 - DNA, 277 bp, Zea mays
ggaggatttcacaaaaaggtatggtggtgggaaagctgctactgctgcagctaacagcctcaatcgagagtttggatcaaaacttaaagaacacatgcagtattgtgtggatcaccctgaagaggttagcaagctggccaaagtgaggcgcaggtttcagaagtcaagggtgttatgatggaaaacattgaaaaggttctggatcgtggagagaagattgagctgcttgtcgacaagaccgagaatcttcgctcacaggcacaagatttcagacagc

SEQ ID NO: 63615 - DNA, 279 bp, Zea mays
gatcaattgaattcttggaggctgcgctcactatcatacgtccctcctctctactcggtggcgagatccaaatttggcttgcaatggcatatgaagccaataggaggcacaaggattgcattgcattgtacaaagagttggagagtaccaccccatgatcaacatcaggcgccaggcagctgagcttagatacattttagaggcacccaagttgaagatatcaaatgacgaggtggtcacaataccacaaattgggagcagctgggattggtatgctgg

SEQ ID NO: 63616 - DNA, 278 bp, Zea mays
gctctctgttcctacgccgtttcctctcccgactctctcctcgccggcgacgccgcggagtaggtgcaacagaaactgctcgaggcggaggcggacctgcggctgcacagacatgggtgatcacgaggcgcgcggtgatgacttgagaagaaggcggagaagaagctctcgggctggggcctcttcggctccaagtacgaggacgccgccgacctcttcgacaaggctgcgaactccttcaagctcgccaagaactggagcagcagctgcatcagttt

SEQ ID NO: 63617 - DNA, 271 bp, Zea mays
actcatcgatctacacacatacatagtttcttctactacacgacgacaaacatggggaagcctgcgaagatcggagagtggggtggatacgccggcgatcgtcgggatctgagggctactccggaccggctgatcgaggtgaggtcacggcggacaacagcagctgcatccgctccatctccttcatctacatcggagccgatggcaaaccgtacgaggaggggccatggggtttcggccatgctggcacggagtacaagattgatctgtg

SEQ ID NO: 63618 - DNA, 267 bp, Zea mays
atgttggaaagggtatggctggtggagaactggtggtagttcctgtagacaaaacaggatttgttcctgaggatgctactatagttggaaacacttgtctgtatggagctacaggtggtcaggtatttgtgagaggcaaggaggagaaagatttgctgttagaaactctctatgtcaggcagtggttgagggcaccggagatcattgctgtgagtacatgactggtggctgcgtagtcgtacttggcaaagctgggaggaatgttgc

SEQ ID NO: 63619 - DNA, 276 bp, Zea mays
aacaacggcggaatcgacaccgaggaggattacccttacaagggcacggacggacggtgtgatgtcaacaggaaaaacgccaaggttgttactatcgacagctatgaagatgtaccagcgaacagtgagaaaagtctgcagaagcagttgcgaaccagcccatcagtgttgcaattgaggctggtggcagagcatttcagctctacaactcgggtatcttcacaggaacctgtggaacagcgttggaccatggtgtcacggccgtcggctacggca

SEQ ID NO: 63620 - DNA, 270 bp, Zea mays
  unsure (1)..(270): unsure at all n locations
ctcactaatgaaaaggacggatattgagttcaatgtagtagtaacccaaatgaatgggaaggattactcgtcgaattctgttcatgtatttcacattggaaagctgagaataaaacttcgaaaaggatggtccacaaaacaagagagcggtattccactacgatgaagttatgcgggagccgtggtggtggtaatgctgcagctagggcagttttctggcaccctaggaaaggctcgtcctanaactctagccttcgaacagacaaggga

SEQ ID NO: 63621 - DNA, 266 bp, Zea mays
cccacctgagggacgaccacaaggtggacatgcacagcggctgcaccttcgaccacagatacgtgaaatccaacccgcgggaggtggacaacgccacctggatgctgacggtgttccactgcttcggccactacttctgctgcacttcgaggcgttccagctcgggatggcgcccgtgtacatggccttcctccgcttcatgggggacgagaacgaggccaagaactacagctacagcctcgaggtcggcgccaacgggaggaaga

SEQ ID NO: 63622 - DNA, 276 bp, Zea mays
gcggctcctccttcctcgaccccaagggccgcggcggctccaccggctacgacaacgcagtcgcgctccccgccgagggcagaggtgacgaggaggagctccagaaggagaacatcaagaacgccgcctcctccaccggcaactcacgttgagcgtcaccaagagcaacccggagaccggcgaggtcatcggcgtcttcgagagcgtgcagccgtccgacaccgacctcggggccaaggcgcccaaggatgtcaagatccagggggtctggtacgc

SEQ ID NO: 63623 - DNA, 269 bp, Zea mays
cgacatacccgaatcctctccaatacgacccggcgtattcattcgtcaagcagtatttcgtcaacccagacgtcaccgtcacgcacaagattgatattcataagaccagtgccaggggcacccacttccggcgtgccgggcacggcagcgggtgtacttccagtccgatgaggtgaacgccgccattgtcacctgtggaggcctctgcccgggattgaacacggtcatccgcgagcttgtttgcggcttgtatgatatgtatggcgtct

SEQ ID NO: 63624 - DNA, 267 bp, Zea mays
agctggcctcccgcttcaccgatgccatcttcatcaaggtcgacgtcgacgagctcgcggaggtcgcaaggacatggaaggtagaggcgatgccaacgttcgtgctggtcaaggatgggaaggaggtaggccgtgtgttggggctaagaaggacgagcttgagaggaagatcaggatgttcgtcacgtcatcttcctcgtcctaacttagcagtgcatacactcccaccttcttactggtttctcgactccagtggttcacctggga

SEQ ID NO: 63625 - DNA, 265 bp, Zea mays
cggcaacggatatctcggctctcgcatcgatgaagaacgtagcaaaatgcgatacctggtgtgaattgcagaatcccgcgaaccatcgagtttttgaacgcaagttgcgcccgaagccttctggcggagggcacgtcgcctgggcatcacgcgcgcgctctcctcttccacgagtccgtcagcctgctaagtcttaagatggcgtcaagcaatggtcagacagaagctccagcaccatctgtccccaaaaatcctgctatggcat

SEQ ID NO: 63626 - DNA, 274 bp, Zea mays
gccagcacatttggcatcatttggctatgtttttccgagatgaactgttatcttggtcgtggaggcggcctctgggcattccatcagtccctgtcgctgctggaatgatcaacccatcagatttccaacagaaggtggtaacaatgtggagcatgtcatcagtcgtatcaagtcaatatcgccacattgtctggctgaggaggaggagaatgcaaccgagccacctcagtcggtacaaagaggcgtcaccgagctggtggaagcggcattgtcg

SEQ ID NO: 63627 - DNA, 268 bp, Zea mays
tttgggttaatgactttgcctccttgtattcctcttcgagtgattaagaaccctcgtgtatgtgatgactgccacagttggatgaaatgtacctctaaagtcacaagaagagaaattgtattacgagatgtgtacagactcaccattttaacagtggcagctgttcatgtggagattactggtgaattgggctgttgcaaagtgtttacagcacttttttttatagaaaaatccccccagtgctattcctaatggttttcattttaag

SEQ ID NO: 63628 - DNA, 267 bp, Zea mays
cgcgcactgggagtggagagatggcgggagtagcatgtaccctcctggcatagtagcacgcctggtagggtaatgtgctctcgggtggcgcggacctgttcatgtagtggaggactccgtgggaacggttgacatatcaagggttaagtgctacatatgtcgtgtggttagagatccccagctgggtataatcggttcgaatcgtcgttgctcctcggttatggagactcatccctgtgaccatcatcgtagttagcaagtgaaata

SEQ ID NO: 63629 - DNA, 264 bp, Zea mays
gcagtgtgggtgatgctggaggtgcggctgatagagtgcttaatcagctactgacagaaatggatggcatgaatgccaagaaaactgtgtttattattggagctacaaacaggcctgacatcattgaccctgcctaggaagtcccctgtggcgaaggatgtggacttgaatgctcttgctaagtacactcaagggttcagtggagcagatatcacagaaatttgccagcgtgcgtgcaaatatgcaatcagagagaacattgag

SEQ ID NO: 63630 - DNA, 264 bp, Zea mays
cgtggcatagggacctgtgcagggtctgtgaaaacatccccattgtcctctgcggtaataaggttgatgtgaagaacaggcaggtcaaagccaagcaggttactttccacaggaagaagaatctgcagtactataaatttctgccaagagcaactacaactttgagaaacctttcctgtacctcgcaaggaagctggctggtgatccgaaccttcactttgttgaagctgttgctcttaagcctccggaagttaccatcgacat

SEQ ID NO: 63631 - DNA, 264 bp, Zea mays
gaaaacactaccagctccagaggcagcattgaactattacctgaatgaggacctttacttatttgatgagtttcagacaacaagaattccatgttctaggaggcctaaaatagataacttgtatgatgtattcgcaatatacgagatgacgaggcagagcactgcaagacaatgaaggcatgtcaaacacatggaactcttcgttctctcactcaatgccgaactgcttagaagctgctacagaatgtgtaatacctgaaaacg

SEQ ID NO: 63632 - DNA, 241 bp, Zea mays
gtcggcaacggtttccgctgcgtccgcatggtcaacgacatctacctcaacttcgacgccctccacggcgacaagtggcacggcggcgtccgtgacggcaccaacgtcgtgctctggaagtggtgcgagggcgacaaccagcgctggaagatccagccctactactgaaccaacggatgatatgaccatcgcgcccatcggtcgtgcacatgcatgcatacggtactagcagagatacagg

SEQ ID NO: 63633 - DNA, 246 bp, Zea mays
  unsure (1)..(246): unsure at all n locations
ggccagcagttcctcgtcgccggtgacgacgcggcgctcgggctttgggatccagctaaggcgatctccttggtttggtcagaaggccacgtctggacggcgaacacggatttgccggcgaacaggtcgatcgagttcaagttcttgctgcaagatgcctcggggcatgcgcattggcagcatggcgctaacagaactctgcgaattactactgaaaccccaaacaccgnagattgtgcacgaaga

SEQ ID NO: 63634 - DNA, 186 bp, Zea mays
ggataatggaagcctgtggttttgggactggaagagtggtcataactttcaacaagatcagactatagtccagcctggatcactggagagtgaggcatgcatatatgccctctcatatgacgtgagcggatcaaggcttgtgagctgttaggcggttaagactataaagatgtggaaataggactt

SEQ ID NO: 63635 - DNA, 255 bp, Zea mays
ctcggacaccatcgacaatgtgaaggcgaagatccaggacaaggagggcatccccccggaccagcagcgtctgatcttccgccggcaaacagctggaggatggccgcaccctagcagactacaacatccaaaaggagagcaccctccaccttgtgctccgtctccgtggtggtcagtaagtcatgggtcgtttaagctgccgatgtgcctgcgtcgtctggtgccctctccatatggaggatttcgaagtatctg

SEQ ID NO: 63636 - DNA, 103 bp, Zea mays
gaaaaatatagcaagagccatcttgttttcaatgatgatatccagggcacagcatcagtggtccttgcaggtttgttagcagcactcaagatggttcgtggga

SEQ ID NO: 63637 - DNA, 256 bp, Zea mays
ccgacaagccctacgggattgggggtgccctgatcgtcgacgtcgacgccaacgggagaaagggcaagggcaagggcgtgtaccagttcgtcgacaagtacggcgcgaacgtcgacggatacagcccaatctacaacgaggatgactggtctcccaccggcgacgtctacgtcggtggaaccactgggcttctgatctgggccgtcaccctcgctgggatcctcggcggcggcgcctcctcgtctacaacaccagc

SEQ ID NO: 63638 - DNA, 180 bp, Zea mays
gtgcgaaccaagcagaccacagcaaggaagcgtagtcgtcgccggaaggaaatgcgcggacaagatgtcgtggcaggcgtacgtcgattagcacctgatgtgcgagatcgaaggacaacatctcagcgccgccgccatcgtcggtcacgacggcagcgcttgggcgcagtccgagagctt

SEQ ID NO: 63639 - DNA, 128 bp, Zea mays
tcgtcgacgtcgacgccaacgggagagatggcaaaggcaaggtcgtgtaccagttcgtcgacaagtacggcgcgaacgtcgacgcatacagcccaatctacaacgaggatgactggtctcccaccggg

SEQ ID NO: 63640 - DNA, 284 bp, Zea mays
cggtcttccgtgctcaccttcgagagatcaagttgctgctgcggtagtccccaaccatcatcatgcagaacgaggagcgtaagacggtggacctctacgtccccaggaagtgctcggccacgaataggatcatcactgccaaggatcatgcctctgtccagatcaacattggccacttggatgcgaatggcctgtacgatggtcacttcaccacgtttgctctctctgggtttgtccgtgctcagggtgatgctgacagttcgtctgacaggcatgtgcagaag

SEQ ID NO: 63641 - DNA, 164 bp, Zea mays
ctgacaactctgggtcggtggatttgtagttggtttgggttttttagttgtagaacggtgttgccctcctagagagggatgaacacattatgcatgcgatgtgtcagttcggtcggtgctatgctcgttgggatttgattgtcggaaataaaacatgggtgatg

SEQ ID NO: 63642 - DNA, 231 bp, Zea mays
aagctgctctcgtccctagaaataaagcagctcctccgcggggcggcgaactgctactcatcgccaaaaccctagccccgatccggtcgaggagcactacttcttggcatggcgggcacccctagccaggcaagcctcctgctccagaagcagctcaaggatcttgcgaagaaccccgtggatgggttctccgcagggcttgtagacgatagcaacgtcttcgagtggcag

SEQ ID NO: 63643 - DNA, 261 bp, Zea mays
cgacaagccctacgggattgggggtggcctgatcgtcgacgtcgacgccaacgggagaaagggcaagggcaagggcgtgtaccagttcgtcgacaagtacggcgcgaacgtcgacggatacagcccaatctacaacgaggatgactggtctcccaccggcgacgtctacgtcggtggaaccactgggcttctgatctgggccgtcaccctcgctgggatcctcggcggcggcgccctcctcgtctaaacaccagcgccctc

SEQ ID NO: 63644 - DNA, 259 bp, Zea mays
caaaccgtacgaggaggggccatggggtttcggccatgctggcacggagtacaagattgatctgtgcaggttcgacgagagcttgacggagatctccgggaccacgggcccagcctacaacattgacaatctggtcaggtctctcaaattcgtcaccaacaaacgggtttacggaccgtacggcagggacgagggcaccccgttccgtgtcaaggtgatgaacaacggccacgtcgctggctctttggccgctctggag

SEQ ID NO: 63645 - DNA, 259 bp, Zea mays
cattgccaaggtataatctacagagacttaaagccagagaacattttacttcatagagatgggcacatttcattgacagactttgatttgtcttgcttgacatcctgccgaccacaagtgtttcttccacacgatattgatacgaagaaaaagaggaggaagagcaggagtaatcccatattttttgctgaaccaatgcgagcatcaaattcttttgttggagattattaccggagttggcatacgagtgctgtagatt

SEQ ID NO: 63646 - DNA, 280 bp, Zea mays
ccagattcgtgcacaaagtatacactgcttgagaggttttcaacagcttataccaaaagactggattgatatgttcaatgaacatgaaattcaggttcttatatctggctctttagaaagcttggatattgatgacttgcggtcgaacaccaactattctgcaggatatcatccagatcatgagcttgttgagatgttttgggaggtcttgaagagcttaagttcagacaaccagaaaaaatttctcaagtttgtgactggtgttctcgtggccccctcc

SEQ ID NO: 63647 - DNA, 275 bp, Zea mays
aagatccggcagttgtagcgagggaggctattcaggaagcaacccggaacaaatcagatgttgttctggttgacactgctggacgtatgcaggacaatgagccactcatgagggcactctccaagctaatcaatctcaatagcccagacctggttttatttgttggagaagcattggttggaaacgatgctgtggatcagctcactaaatttaaccagaaattagcagacctatctgctgttcccactgctagattgacgatggtatcctgctca

SEQ ID NO: 63648 - DNA, 256 bp, Zea mays
ctgacttatatcagcaagacgttcagaagtatggaaacattgagtacatgagatgcggtccagaaaatggattttttcctgatctgtcaactgtccctaggacagatattattttcttttgttcacccaacaatcctactggtgctgctgcatctcgggaccaactaaccaaattagtaaaatttgcaaaggacaatgggtccatcatagtctgtgattctgcttatgcaatgtacatatagatgacagcccaaag

SEQ ID NO: 63649 - DNA, 259 bp, Zea mays
ctttgcactgggatatatgagaaatctgtgggttcctccttccacgcttgtgtttgcaccgattgatgagcattttccggatgatgctccattgatttcctctagctttcgtgtcataccacttgatatgaaaacagatggtgtatcctctggtaggacactagatttggcatctagtcttgatgtgggttctgctgcaccccaagcctcaggggatgcatctccagatgactgtaatttgagtatgtgctgacaatcg

SEQ ID NO: 63650 - DNA, 260 bp, Zea mays
ttgctgagagcatgtggctgcacacacatctaatccaggatatgcttgctatcgtgtcgacagacattcaaaggtgctgtgcactatgcctggacaagtgttccaacatatcccagtggtgtcattggatttttgctatgtgcaaaagaaggtcgtgcagtgaacttcttaactcctgtgaatccaattgagaaaatagaaggatcagcaaaagctggaagggaactcagattgtacaattccagatccatagggctgct

SEQ ID NO: 63651 - DNA, 261 bp, Zea mays
ctcggagggcgggctggactacctgggcaaccccaacctggtgcacgcgcagagcatcctggccgtgctcggcttccaggtcatcctcatgggcctcgtcgagggcttccgcatcaacggcctcgacggcgtcggcgagggcaacaacctctaccccggcggacagtacttcgacccgctgggcctcgccgacgaccccgtcaccttcgccgagctcaaggtcaaggagatcaagaacggccgcccgccatgttctccatg

SEQ ID NO: 63652 - DNA, 277 bp, Zea mays
gtcactattgacagctacgaagatataccagcgaacgatgagaagagtctgcagaaggcagttgcaaaccagcctgtcagtgtcgcaattgaggctgctggcacagcatttcagctctacagctcgggtatcttcactggaagctgtggaagggcgctggaccatggtgtcacggccgtcggctacggcacagagaacggcaaggactactggatcgtgaagaactcatggcgccaacccgccgaaccctggccccacccgccgtccccgaccccgg

SEQ ID NO: 63653 - DNA, 273 bp, Zea mays
  unsure (1)..(273): unsure at all n locations
cgcgttgnccatcttncagganaggggantgcatnttgtgatcntccggnaganaccatgctaccaggagaagtgtagtttagttacagaagcancagcagtggnatgcatnttgccaatacattagctgagacttgaaacatcngcntgcgagatgcagcaactacttatntatangtgtatattcaatanttatgccacncgaatttgactaanaagnagnagngggnggganggnggggntgngagagntgntgggnnggcnggntgggg

SEQ ID NO: 63654 - DNA, 257 bp, Zea mays
ctggtcccccacccctcagcgcgacgaaggtaagatgttcctgcggaggatcctgaccggcgggggcggcctggcggccctgatggcggcgcgcgccgtgaaggagacgacggggatcgtgggccttgaggtggtgcctaacgcgcgagaggttctggtagggctctacgagcgcacgctcaaagagatcaaggccgtccccgaagacgagggttaccgcaaggccgttgaatccttcacggtcaccgcctccagat

SEQ ID NO: 63655 - DNA, 257 bp, Zea mays
gcctgcgaagatcggagagtggggtggatacgccggcgatcgtcgggatctgagggctactccggaccggctgatcgaggtgaaggtcacggcggacaacagcagctgcatccgctccatctccttcatctacatcggagccgatggcaaaccgtacgaggaggggccatggggtttcggccatgctggcacggagtacaagattgatctgtgcaggttcgacgagagcttgacggagatcccgggaccacgggccc

SEQ ID NO: 63656 - DNA, 229 bp, Zea mays
attcttctccttcggaacgaacgacctgacgcagatgacctttgggtacagcagggatgatgtggggaagttcattcccgtctatcttgctcagggcatcctccaacatgaccccttcgaggtcctggaccagaggttagtgtgcgagctggtgaagtttgctacagagatgggccgcaaagctaggcctaacttgaaggtgggcatttgtggagaacacggtggagag

SEQ ID NO: 63657 - DNA, 250 bp, Zea mays
ctcgtcgatctacacacatacatagtttcttctactacacgacgacaaacatggggaagcctgcgaagatcggagagtggggtggatacgccggcgatcgtcgggatctgagggctactccggaccggctgaccgaggtgaaggtcacggcggacaacagcagctgcatccgctccatctccttcatctacatcggagccgatggcaagccgtacgaggaggggccatggggttcggccatgctggcacg

SEQ ID NO: 63658 - DNA, 243 bp, Zea mays
ggcgtatcgacatggtggaaaacaggctggtcggcatgaagtcacgtggggtctatgagacccccggtggcaccatcatggcagccgcggtacgcgagttggagtccctgaccctggacagggagaccatgcagtggaaggacatcattgccctcaagtacgccgagctggtctatgctggccgctggtttgacccgctccggcagtcctttgatgccttcatggagaaggttaccgcgacga

SEQ ID NO: 63659 - DNA, 281 bp, Zea mays
caaggtcgtaggctccagcaaggtggtgctgttcatgaagggtcccaaggacttcccgcagtgcggcttctcccacaccgtcgtgcagatcctgcgctccctcgacgtgcccttcgagacgctcgacgtgctcgccaacgaggcgctccggcaggggctcaaggagtactccagctggcccaccttcccgcagctctacatcgacggcgagttcttcggtggatgtgacatcaccgttgaggcatacaagagtggagaactgcaggaaactctagagaaag

SEQ ID NO: 63660 - DNA, 274 bp, Zea mays
gagtatgcagcgtctggcaagctcacagaaaaatttgatgtattttctttcggagtcatgcttcttgagcttattactgggcggcgaccaattgacacaacccaattggcactgcttgctataagcacatatgtacttccatttgcatgttgtataatactaataccaattgcaaaattatagttattttttctacccttgttagttaataagcatatttctggtcaataggttgtattctgattcttgtaaccgtgttaattaatgttatgga

SEQ ID NO: 63661 - DNA, 278 bp, Zea mays
caacttccggctggacttcgcggtgagccgggagcagacgaacgcggccggggagaagatgtacatccagacgcgcatggcggagtacaaggaggagctgtgggagctgctcaagaaggacaacacctacgtctacatgtgcgggctcaagggcatggagaagggcaccgacgacatcatgctcgacctcgcagccaaggacgggatcaactggttggactacaagaagcagctcaagaagagcgagcaatggaacgtcgaagtctactgatgatgat

SEQ ID NO: 63662 - DNA, 271 bp, Zea mays
gcggtggagcacgagcatcaaggacgaggaaggttacccggcgttcgcgctggtgaacaaggcgaccggggaggccatcaagcactcgctggggcagtcccacccggtgcgcctggtgccctacaacccggacttcctggacgagtcggtgctgtggacggagagccgcgacgtcggcaacggcttccgctgcgtccgcatggtcaacaacatctacctcaacttcgatgccctccacggcgacaagtggcacggcggcgtccgtgacggc

SEQ ID NO: 63663 - DNA, 273 bp, Zea mays
ccagaacaaggattgacaatgtatggtgtcacaaagactgctctctttggtctcacgaaggctcttgctggtgagatgggacccgatactcgtgttaactgtatagcccctggttttgttcctacacggtttgctagtttcctcacagaaaatgagaccattaggaaagagcttaacgagaggaccaagcttaagagattgggtactgtggaagacatggctgcggctgcggcttttctggcgtctgacgacgcatcatacattacggctgaa

SEQ ID NO: 63664 - DNA, 283 bp, Zea mays
  unsure (1)..(283): unsure at all n locations
gttatctggtgcacatgcatagccgtctgaggtctttgggacaaggacaggtgcatgtgggcccgataccttgggaggttctgccacagctggtatcgaagcaggattaagtatatacggttacatacgtattttcaaaacaaaagttttggtttcgaaaaacctattttcaactaaacacattgtttggctttgaaaaacagttttgaaaaactataatgttagcgacatcctctgttaagccctanattaaggactaataggtggcttatctaaaaaccac

SEQ ID NO: 63665 - DNA, 270 bp, Zea mays
gttagctgatgcgaaggatgttatggaagcagttcggactatggggggtgtacgttttcctgtattgactccaaaccttaagggatttgaggcagctattgcagcaggggcaaaagaaatcgcaatatttgcatcagcttctgaaggattttccaagtcaaacataaactgcaccattaaagagagcattgcccgttataatgacgtggctcttgctgcgaaagagaaagaaattcctgtccgagggtacgtttcttgtgtggttggatg

SEQ ID NO: 63666 - DNA, 272 bp, Zea mays
caccattcctcctccggatttcgcagtcagcggtggtgaaggtagcgggcgcggaggaagatggggctcgcgttcgggaagctcttcagccggctcttcgccaagaaggagatgcggattcttatggtcggactcgacgcggccggtaaaaccaccatcctctacaagctcaagctcggcgagatcgtcacaaccatccccaccatcggtttcaatgttgaaactgttgagtacaagaacattagcttcacggtctgggatgtcgggggtca

SEQ ID NO: 63667 - DNA, 271 bp, Zea mays
ggaagagcactgccagtttgcatgccccctttgctccaagtcggtttgtgacatgtcgaaggcatgggaaaggctcgacatggagctggcaactctgtctgactcctgtgatcacaaaatggtccgcatattatgcaacgactgcggggcaatatcagatgtgcagttccatttgattgcgcacaagtgccagaattgcaagtcatacaacacccgccagatttgaagtaagaatcgcaagtcacacaacaccgtcagatctgaaatagca

SEQ ID NO: 63668 - DNA, 274 bp, Zea mays
ttctaaaagtgcatggtagcaacaagaaatttgattctgatgtttctcttgatgtcatagcaatgagaacacctgggttcagcggagcagacttggcaaaccttctgaatgaagcagccattctggctggaagacggggaaggacagcaatttcttcaaaagagattgatgattctattgacagaattgtagctggtatggaagggaccgtgatgacagacgggaagagcaaaagtcttgttgcttaccatgaagttgggcatgcaatttgcgg

SEQ ID NO: 63669 - DNA, 236 bp, Zea mays
gcagaagcaggacccaaagagttgtgattttggtgggcttgggatgataacataccttgacccatctatgggcgaatgccgctttcttgttggtgttgatgatagcaagagctctgcagtcgcctcttgtggcggtggatgctgcggggtctgctgtggactctgggttttagctttgtgggtgctcacgtaccttagaatgatgggttccgctgattctcaattgatataccttg

SEQ ID NO: 63670 - DNA, 266 bp, Zea mays
cgcttatcatccgcgcctctacatttcttctctctctgctcctccgcctccgcctccgcctgatccatccaagacagggatcgccatgtcggactcggaggagcaccacttcgaatcgaaggccgacgctggggcgtccaagacctacccgcagcaggctggcaccgtccgtaagaacggcttcatcgtcatcaagaaacgtccctgcgaagttgtggacgtttctacctccaagactggtaagcatggccacgccaaatgccact

SEQ ID NO: 63671 - DNA, 267 bp, Zea mays
ctgggccagtcgagggagagcccgctgagtgttgcagtgtcagctggttttcaaggactaccaactctgctgaagctgacgcaagtcatggctgcgaagaagcaggagtggcaagttatgaagcagcttcctgtccccatagacatcgggccagaattccagtatcattctgtctttgtgtgcccggtgctcagggagcagtccagtgacgagaatcccccaatgcggatgccttgtggacatgttgtctccaagcagtccatcatg

SEQ ID NO: 63672 - DNA, 263 bp, Zea mays
ctggtcccgcacccctcagcgcgacgaaggtaagatgttcctgcggaggatcctgaccggcgggggcggcctggcggccctgagggcggcgcgcgccgtgaaggagacgacggggatcgtgggccttgaggtggtgcctaacgcgcgagaggttctggtagggctctacgagcgcacgctcaaagagatcaaggccgtccccgaagacgagggttaccgcaaggccgttgaatccttcaccggtcaccgcctccagatctgcc

SEQ ID NO: 63673 - DNA, 268 bp, Zea mays
caaaaggacaatgaaccggaaatgttctcattgttactcttgttgatgcggagacagaaagtagcataaacgctaccatgcttgaggaagggcttgcccggctcgaaagaagcaagagatgggacactagggagaggaagacggctctccagaacctggaacagttccaggacaaggcaaagaaggaaaggctgcggatttggcagtacggagatgttgaatcggacgaggacgagcaggccccgcctgcaaggaagcctggaggtcg

SEQ ID NO: 63674 - DNA, 142 bp, Zea mays
ctaccagaaagcaccgtttcccgtccgatcaactgtagttaagcaggtaagagcctgaccgagtagtgtagtggggttgggcaaggtagtcaaaccaaaatttgttgcaacatatcaaaattctcgtgacatttcaaggttt

SEQ ID NO: 63675 - DNA, 272 bp, Zea mays
  unsure (1)..(272): unsure at all n locations
gtatggacattcccacagggaaccggaacatcagggggaagctgtgtatggtttgaccgaacttaaacgagatgacataagaaatgcaaacctggtagcaaatccagggtgttatcccacatctattcaacttacgctcanaccattngtaaaggcaatacnaatcaagctaaccaacattattactgatgcanaatctggagtcagtggtgcaggacgtggggctaaggaagcaaatctttacactgaaatcgctgagggtatccatgctt

SEQ ID NO: 63676 - DNA, 277 bp, Zea mays
gatctacacacatacatagtttcttctactacacgacgacaaacatggggaagcctgcgaagatcggagagtggggtggatacgccggcgatcgtcgggatctgagggctactccggaccggctgatcgaggtgaaggtcacggcggacaacagcaactgcatccgctccatctccttcatctacatcggagccgatggcaaaccgtacgaggaggggccatggggtttcggccatgctggcacggagtacaagattgatctgtgcaggttcgacga

SEQ ID NO: 63677 - DNA, 271 bp, Zea mays
atctacttcaaataatggtgggtttactagtataaggacaaagaattttactgtcccagaggacctgtcagcatatgatggtattgagttacgagttaatggtgatgggcgacggtataaactcattatacggactagctatgaatgggatactgttggctatacagcaagttttaacacaactaaggggggatggcaaagtgttaaagtacctttctcttctctgaaacctgtattccgtgctcgtactgtgactgatgctccacccttc

SEQ ID NO: 63678 - DNA, 274 bp, Zea mays
ccctcgcctcgcctagaagaggaaggaagaacagagataagcgacaacgcgtccctcctcgccttcctcccgcctcgagctcttcccggagcaaccggagccacagacgtcaggacagcctagcgcgttccacgccggtatgcagaaccagatcatgtgccatgttttccggacccttctgctctacccgcgtggcgcgtccagcgtctgctgcgcggtttgccaggccatcaccaccgtgccgccaccaggattggagatggctcagcttata

SEQ ID NO: 63679 - DNA, 271 bp, Zea mays
catactcaaacaagtatacgctgaccattcaacaaatgtggacaaagtattctctcgtattgtggagataacacaacacccagcagctgctgcatcgtttgcctccattatgtttgctccaaggggtcagatatccttccaagaggccatctctaggtgccaagaccaaggcattcctatatctctcatgtatggaagagaagatccttggattagacctatttggggccttaaagttaaacagcaagtgcccgaagcaccttattatgaa

SEQ ID NO: 63680 - DNA, 271 bp, Zea mays
agcaaaagcaaccaactttcttctccgtcacctgactcacacctccactcacctccggtccaccaacccctgccggccatggcggctgcggcggcgcagaagctcctcgaggcgagcacgaagatcatcggcgtcgggcgcaactacatcgcccacgccgaggagctcggcaacccggtccccaaggagcccgtactattcctaaagccgacctcgtcgttcctccacgctggcgtggccaccgccgccgtcgagatcccggagccgctcg

SEQ ID NO: 63681 - DNA, 270 bp, Zea mays
cacatggctaatttgaagcgagctgagtatggtaaagttgatttggactatgttcttggaattggaggatttgatctggagaggattgagagtgctgttgctgaaaagtcacatgaagatcacgcagagcatgatcatgaacaccatgagcatgagcatgagaatgaacacgaccatgaccatcatcaccatcatgatcatgatcatgatcatcatgcacatgaccacactcatgatcctggtgtttcttctgtgagcattgtttgcgaa

SEQ ID NO: 63682 - DNA, 264 bp, Zea mays
ctggagtgcttggcgtcccgcggcttcctggtgtcgtttgggcagtcgtcaggcaaacctgacccaatcccaacgagcgacctggcttccaagtccttgttcctcactcgtcctagcctcatgcattacactgctacccgtgatgagctgctggagtcagccggcgaggtgtttgccaatgtcgctaacggggtgctgcacgtccgggtgaaccacacgtatccattgtcggaagctgcccaggcccatgcagatctggagggc

SEQ ID NO: 63683 - DNA, 270 bp, Zea mays
atgcgtttgagttcatcatcaacaacggcggaatcgacaccgaggaggattaccttacaagggcacggacggacggtgtgatgtcaacaggaaaaacgccaaggttgttactatcgacagctatgaagatgtaccagcgaacagtgagaaaagtctgcagaaggccgttgcgaaccagcccatcagtgttgcaattgaggctggtggcagagcatttcagctctacaactcgggtatcttcacaggaacctgtggaacagcgttggacca

SEQ ID NO: 63684 - DNA, 267 bp, Zea mays
caaccatctaccagcgactcagcgagcgagagcagcacacacgcagctagctaggagcagcagcagagcagcggcgatggcggcctccatgatctcctcgtcagctctggcggtggcgcctcagggcctgccgcccctcggccgccgcgcctcctccttcgccgtcgtctgctccaagaagaagatcaagaccgacaagccctacgggattgggggtggcctgaccgtcgacgtcgacgccaacgggagaaagggcaagggcaaggg

SEQ ID NO: 63685 - DNA, 269 bp, Zea mays
ctcatcgatctacacacatacatagtttcttctactacacgacgacaaacatggggaagcctgcgaagatcggagagtgtggtggatacgccggcgatcgtcgggatctgagggctactccggaccggctgatcgaggtgaaggtcacggcggacaacagcagctgcatccgctccatctccttcatctacatcggagccgatggcaaaccgtacgaggaggggccatggggtttcggccatgctggcacggagtacaagattgatctg

SEQ ID NO: 63686 - DNA, 266 bp, Zea mays
cattgcaattctaaatgatggtaccataatgactatatccaaggatcgtgtaaagccatccccattaccttacagctggaagttggctgaaattttcacaactttagttgtccttggtggatatcaggcaatgatgactgtcatcttcttttgggctgcatacaagacaaactttttcccaaaaatatttcatgtggaaagccttgagaagacagctcaagatgatttccaaaagcttgcatctgctgtttacctgcaagttagca

SEQ ID NO: 63687 - DNA, 265 bp, Zea mays
cagaaaagtagtgaaggtagttgggcgagcttatcaatggaccaagttgtgaagctccggttgggtgaatgtggcccttgtcgagcttttgccttgttggcctactaactagtgtttatgtcatgtgagggttgcaacgcgcaagatttgttggccgctggaggagaacgctttccgcccaatcctcaacaactacgacggcctttaattcaggctggagctcagtgtccctgaggcgctctcccttcttgatatatttgcggag

SEQ ID NO: 63688 - DNA, 269 bp, Zea mays
cttcacacagcttgagtggttatccttctgcacaaagttacacaagccttgagtctagtgcttctctcagcaaggacccatccacatttgcccctcaaaataatcctccatgccctactctttttgttgcgaacctggctccagcttgttcagagcaacagctgatagatgttttctcaagttgtgcgggatttgtgaaactcaagatgcaaaacaagcttggagctccagttgcatttgttgatttcaaggatgcaatcagttcaact

SEQ ID NO: 63689 - DNA, 268 bp, Zea mays
tggaccactatgcaaattataggcgcattgtggtcccagaaggcacggcggtggcatgattttatcatcctgacttgttcgcagtcccccctcactcgagataacaccgcggtggcacaactgatcaggagctgcttctcgtctttcctggggcctttgtttgatgggcgctcctgctccgtagcaaacagaggagttgcgaatctgctggggcagagttctgatgaaaaagcacacaggcttgctgtagctccagggtttctctaca

SEQ ID NO: 63690 - DNA, 267 bp, Zea mays
catcgatctacacacatacatagtctcttctactacacgacgacaaacatggggaagcctgcgaagatcggagagtggggtggatacgccggcgatcgtcgggatctgagggctactccggaccggctgatcgaggtgaaggtcacggcggacaacagcagctgcatccgctccatctccttcatctacatcggagccgatggcaaaccgtacgaggaggggccatggggtttcggccatgctggcacggagtacaagattgatctg

SEQ ID NO: 63691 - DNA, 267 bp, Zea mays
cgacaaacatggggaagcctgcgaagatcggagagtggggtggatacgccggcgatcgtcgggatctgagggctactccggaccggctgaccgaggtgaaggtcacggcggacaacagcagctgcatccgctccatctccttcatctacatcggagccgatggcaagccgtacgaggaggggccatggggtttcggccatgctggcacggagtacaagattgatctgtgcaggttcgacgagagcttgacggagatctccgggacca

SEQ ID NO: 63692 - DNA, 266 bp, Zea mays
cgccgtcgtgctctgggagtggtgcaagggcgacaaccagcgctggaagatcctcccttggtgaacgaacgaaagaaactactagctggtaccctaataataattctgctggctgcggcgatcccaaaataaaagaggccgggtgcgatacatctcggacttctcgagtggtgactgcgtcagacagccagccactgtggggctagtgttccaacatttgtcagcctgcttgcgcgaggaaggggggtcactgactcaagagaagg

SEQ ID NO: 63693 - DNA, 266 bp, Zea mays
gggcaggccaactaccagcaagccggggacgcgataggcgaggacctggtgaacaacccggacctggtgtcctcggacgcggtggtctccttcaagacggccatctggttctggatgacggcgcagtcgcccaagccgtcgtgccacgacgtgatcctcggcaactggacgccgtcgagcgccgacgcggcggcggggcgggttcccggctacggcgccatcaccaacatcatcaacggcgccaaagactgcggcgtggggcaaaa

SEQ ID NO: 63694 - DNA, 263 bp, Zea mays
gcttgtcaagaacggtgtgatttctatgtcagcggcgtctggatttcctaggtttgatctccagcttctgggaatgggacctgatggccacattgcgtctctcttccctgatgaccctcttgttaacgagaaagagaggtgggtcacatactttaaggattctccaaagccacctccagagagaattacattcacgtttccagtaatcaactcatccgcatacgttgcgatggtggtgactggagctggaaaggcggcacggt

SEQ ID NO: 63695 - DNA, 154 bp, Zea mays
tttggcactttgatctaaaaaaattcagaccaaatgaagttccaagggttaagataagcttagcatgtgtgtttgcattcatggcgattggatggcccttgatcattctcaaatcaggactagctggatggtttaagttctggttcatgccatg

SEQ ID NO: 63696 - DNA, 182 bp, Zea mays
acgaagcgcaccctggccaagccgcactgggctttccctggcaacacagctgctgacggcatgaagagcagcgcatgagaaaaacgcagcatggcattaggccgccaacagccagcatgattagagcccccctgcatgcagaatgatcacccggtcccgtagttcacgacgaaagcatggct

SEQ ID NO: 63697 - DNA, 289 bp, Zea mays
cgttaatcatgaaactagagtggttgacccgaagaagttcagcgttctgggtaactggcagcgtgattactcaatggaatacatcctaacccatctcaagaaagagatgacatcgccacagaaccgcaagctagttcagcctccggaagggacattcttctaaagatggcagcaactcatgtccatccatggtgactcggaaacagcttccgcacctggttcctatatgttatatacctagtctgatctcccagttatctgtaaaccaccgagatcgagtacaagcaga

SEQ ID NO: 63698 - DNA, 292 bp, Zea mays
cgttaatcatgaaactggagtggttgacccgaagaagttcagcgttctgggtaactggcagcgtgattactcaatggaatacatcctaacccatctcaagaaagagatgacatcgccacagaaccgcaagctagttcagcctccggaagggacattcttctaaagatggcagcaactcatgtccatccatggtgactcggaaacagcttccgcacctggttcctatattttatatatttagtctgatctcccagttatctgtacaccaccgagatcgagtgcaagcagactt

SEQ ID NO: 63699 - DNA, 292 bp, Zea mays
caaagactggctactccagacacattcatttggccttgcaaatgacaacgagctgcacgtagttacaaggcttgggtgtggagctgtggcgggaaccattggccagactgttgcatacccgcttgatgtcatcaggagaagaatgcagatggttggttggagccatgctgactctattgttactgggcaaggcaaagaagcactccagtacaatggcatgatcgatgcattcaggaagactgttcgtcatgaaggagttggtgctctctacaagggtcttgtagcgaactca

SEQ ID NO: 63700 - DNA, 277 bp, Zea mays
cagaagataggcacattgttgttctcaagcacaatgtttggcgtgtaaaaggactaattcaggtttgtagatcaatcaatgtgcaaccactacaaccacatgaccagtttctcatatttgcatctgatggactttgggagcacttaaccaaccaagaagctgttgatattgttcacagtagcccccgcagtggctgtgctaggaggctgataagagcggcgctgcaagtggcagccaagaaaagggagatgaggtactcagacctcaagaagatcga

SEQ ID NO: 63701 - DNA, 284 bp, Zea mays
gggtggtgcttcaggatctgcagctgtgactgactctgctatggcagaagctggtgcagttgaccctgacttggcattggctcttcaaatgtctgtccaggatgcaaacatgtccagtgacactgatatgagtaaggtgtttgaagacagaacgttcgtgtcatctatccttaattcgcttcctggtgttgatcgcaatgatccatctgttaaagatttgctggcatcgttgcacagccagggagagcaagagaagaaggaagacacgtcagacaaaacagaag

SEQ ID NO: 63702 - DNA, 286 bp, Zea mays
gatggactatgcgtttgagttcatcatcaacaatggcggaatcgacaccgaggaggattacccttacaagggcacggacggacggtgtgatgtcaacaggaaaaacgccaaggttgttgctatcgacagctatgaagatgtaccagcgaacagtgagaaaagtctgcagaaggcagttgcgaaccagcccgtcagtgttgcaattgaggctggtggcagagcatttcagctctacaactcgggtatcttcacaggaacctgtggaacagcgttggaccatggtgtc

SEQ ID NO: 63703 - DNA, 281 bp, Zea mays
gaaggggacaagggtgaagtgagtggcaagggtcacatggctacagaggataggaaaggggaagcacaaggtggcgcagatggcaagctggaggaagcaaatgtgatgtcggcggacaagatgatggaggaagcaaatgcgacgtcggcagacaagatggaggaagcaaatgccacgtcggcggataagatggaagaagcagatgccacgtcgtcggacaagatggaagaagcagatgccacagtgccggacaagatggaggaagcaaatgccatgtcgcc

SEQ ID NO: 63704 - DNA, 275 bp, Zea mays
gtcgcagatgcttctaaggctttgtcccgtgctatttgcattgctgtacgatacagcgccatccgaaagcagtttggctctcaagatggtggccctgagactaaggtccttgattacaagactcaacacagcagactctttccgttgctggcttcagcatatgcatttagatttgtgggtgactcgctgaagtggctatacatggatgtcactcagaaactggaagctaaagactactcaacactgcaagaagcccatgactgtactgctggttt

SEQ ID NO: 63705 - DNA, 273 bp, Zea mays
gccgagattgacggcgcccccaggatgggcccgacgtttggcgccatgatgatctccggccagaaggcggcgcacctggcgctcaaggccctgggcaggcccaacgccgtggacgggaccatgtcgccgccgttgcgcgaggagttgatgattgcgtacaaggacgacgaggtcgtggacgcctgagtgcggcaagcagagaggaggatcgacgccagcagcgtcttatcttaattgccttgttgttcaatgatgaatcgatcgaattccctt

SEQ ID NO: 63706 - DNA, 284 bp, Zea mays
ctgaatttgtggagatgtttgttggtgttggagcttccagagttcgtgaccttttcaagaaggccaaggagaatgctccttgcatagtgtttgttgatgaaattgatgctgttggaaggcaaagaggtacaggtattggtggtggaaatgatgaaagggagcagactctcaatcaactactaactgagatggatggtttcgagggcaacactggaattattgttattgctgccactaaccgggctgacatattggattccgctttacttagacctgggcgtttt

SEQ ID NO: 63707 - DNA, 277 bp, Zea mays
ccaagttgcaatcgggggaccgggtggaaaccctttcttggggcaacagatgtcaagccagaaggactactctatggcaacagcggatgttgtggacgccgaggtgagggaactcgtggagaaggcctactctagagcaaggcagataatcaccacgcacatcgacatcctccacaagctcgcccagctcctgatcgagaaggagaccgtggacggggaggagttcatgagcttgttcattgacggccaggccgagctgtttgtcgcttgagatgtc

SEQ ID NO: 63708 - DNA, 278 bp, Zea mays
gtggagagaaggcaaggcttgcattttgcaagttcatggtgactccatctactctactcatcttggatgaaccgacaaaccatcttgatatcccatcaaaagaaatgcttgaggaggcaatatcagaatatactggcaccgtcataacagtttctcatgaccggtacttcataaaacaaattgtcaacagagtcatcgaagtgaaagatcagactatccaagactatcaaggagattacaattactaccttgagaggaaccttgaagcccgagacagg

SEQ ID NO: 63709 - DNA, 273 bp, Zea mays
aggactcctaaggtcacagttgacgagacatggttttctgatccacaaatttgtgaaacaaatcagcaatggtatattttgtccaagacgctggcagaggaggctgcttggaagttctcaagggataatggacttgaaatcgttactataaacccagcgatggttattggtcccctgctgcagcctacactaaataccagtgctgaagcaatcctgaagttaatcaatgggtcatcgtctacatatcccaatttttgctttggatgggttaat

SEQ ID NO: 63710 - DNA, 240 bp, Zea mays
cccgtgtccccgccacaaggaggagcgtccgtgtagctgccgtcgtcgcgaccgagggcgcccagatcgactacagctcaagcgtctcggtgttcccgatggaggcctgcgacctgcttggtggcgacgcgtgcaacgggcccatgttcccggaggccaagcccgcctcggcggaggcggcagcgagcaggagtgtggtcggggtggacagggactacctatcctacgacgagccaaaga

SEQ ID NO: 63711 - DNA, 279 bp, Zea mays
cgcaggcgacggcgggctcgtcttcgagcccagcccgttcaccgtcaaggccggcgacaccatcacattcaagaacaacgccggcttcccgcacaacgtcgtcttcgacgaagacgaggtgccgagcggcgtcgacgccaccaagatctcgcaggaggactacctcaacgcgccaggcgagacctactccgtcaccctcaccgtgccgggaacctacggcttctactgcgagccgcatcaaggagccggaatggtcggcacgatcaccgtcaactaatt

SEQ ID NO: 63712 - DNA, 270 bp, Zea mays
gaaaaaactggataaaggctatgatccttacagcatcactttttccattcttgtgtttctcgattggattgttgttaaacactattgctatcttctaccgatcattagcagctataccatttggcacaatggttgtcatgtttattctttggggtttcatctccttcccgttggttctattggggactgtagttggtagaaattggagtggtgctcccaacaactcgtgtcgtgtgaaaacgatcccgcgcccaattcctgaaaagaagt

SEQ ID NO: 63713 - DNA, 281 bp, Zea mays
gccgccgacgccgcaggaggagacgcatcgaggttagcacgcgaagaagcgaccatgagggccaagtggaagaagaagcgcatgaggaggctcaagaggaagcgcagaaagatgaggcagagatccaagtaggcagatcgagatggattgtggacctgatgacatgcgtgggtacatacatttcttcggatgcgttggtgtgcctgtggagagatgtcaacctgccatggtgtcacggtccgccatcagttgaacgtcttgcctgcacttcagtaggccac

SEQ ID NO: 63714 - DNA, 275 bp, Zea mays
gagaagggagctggatggcccgaccatattcacttggctggccgtaacgatcgggatgctggccgtgttttctgctgcctgcctcccggcagtcggcccgttgaaatgggtgctcgacgtgcacctgtttgttttccgctcgatgctcgtgatccggctggtcttggtggtagcgatcgcactgcatgctggcgaagcgtgtacgcctggttcttggcgagaagggttgacccgaggaacgctgccgggtggttctggcagaccttcgctctggg

SEQ ID NO: 63715 - DNA, 269 bp, Zea mays
ggagcagactctcaatcaactactaactgagatggatggtttcgagggcaacactggaattattgttattgctgctcactaaccaggctgacatattggattccgctttacttagacctgggcgttttgatagacaggtgtctgtcgacgttcctgatgtacgtggaatgacagagattctaaaagtgcatggtagcaacaagacatgtgattctgatgattctcttgatgtcatagctatgagcacacctagggtcagcggacagact

SEQ ID NO: 63716 - DNA, 252 bp, Zea mays
cgcttcgccatgctcggcctcgtcgcgctcgccttcactgagtacctcaccggcgcaccgttcatcaacgcgtataggcggttcagtcccagccagtgcttatatattttggaagttggaactgtgtatgctagtcagctatagcggcaccatgcccgtagtaggagcctagctacagttggacgagctactttttattgggatttactagtcttgggccatttacgtctcttctaaaaaaaacactaaggt

SEQ ID NO: 63717 - DNA, 269 bp, Zea mays
attttgaagagatgaaattcagtttgtattttctaggttacgaggatgtgaccttagcccctgatgatcatatcaagcggactgaatggacttttaggcaaaaagctactcttgagctcacccacaactggggcacggaaaatgaccctgaattcaaaggttaccataatgggaactcagaccctcgtggttttggtcatataggagtaactgtggatgatgtccacaaggcatgtgaacgctttgaacgtcttggggttgagtttgtg

SEQ ID NO: 63718 - DNA, 270 bp, Zea mays
gtggggtggatacgccggcgatcgtcgggatctgagggctactccggaccggctgatcgaggtgaaggtcacggcggacaacagcagctgcatccgctccatctccttcatctacatcggagccgatggcaaaccgtacgaggaggggccatggggtttcggccatgctggcacggagtacaagattgatctgtgcaggttcgacgagagcttgacggagatctccgggaccacgggcccagcctacaacattgacaatctggtcaagtc

SEQ ID NO: 63719 - DNA, 274 bp, Zea mays
tgagaatgttggagtcaaggttttggactcggttaacatcaccctgggtgctgaggatgaactgaaggatgctgttggtctggttcgcccagttagcgttgccttcgaggtgatcactggtttcaggctgtacaagagcggagtttacactagcgaccattgtggaactacaccgatggatgtgaaccacgctgttctggctgttggctacggtgtcgaagatggtgtcccctactggctcatcaagaactcatggggcgctgactggggcgat

SEQ ID NO: 63720 - DNA, 277 bp, Zea mays
ggagcttacaattcttcaaatttgcagctggccaactcaatgatggactacgacccttcatatgattctgaagaagcttccacagtaatgccatcatctttccatgatatcagtgatgttgagttccaagacaattgggccagggtttgggtggaccttggaacctcggattaccttggcttggatgtattactaaactgcgtaacacagttgagctcagagcacgtgggtatcaaacaagtggtttttggaggcaagaaaatgggtgactgggaag

SEQ ID NO: 63721 - DNA, 267 bp, Zea mays
ggcagattgggcccttgctggtgtcgatggtagcgacgacgacaacaactgcagtgctcgaggaacggcgttcaagatgacgcacggcgaggacgtctgggatgtcctcgcgcgcgacgcctttctgggcgacttcttcaacggcgcgctcgcgtcagagactcggttcctcatggacatagccatccgcggatccccccaggtgttcgagggaatagcatcgctagtggacgccggcggtggctccggcgcacagcccaagcggtg

SEQ ID NO: 63722 - DNA, 268 bp, Zea mays
tttgggcctgtgcagtcgatcctcaagttcaaagacctcaatgaggttatcaagagggcaaacgcgagccagtatggattggccgccggcgtgttcaccaacagcctggacacggccaacaccctgacgcgcgcgctcagggccgggaccgtctgggtgaactgcttcgacgtcttcgatgctgcgattccgtttggtgggtacaagatgagcggcatcgggagggagaagggcgttgacagcctgaagaactacctgcaggtgaagg

SEQ ID NO: 63723 - DNA, 268 bp, Zea mays
agaggcacccaagttgaagatatcaaatgacgaggtggtcacaataccacaaattgggagcagctgggattggtatgctggaacatggagtgacaaaatcaaggaacaagaggacaagaaaaggaagatgagtgctgctagcaaccaagttcaaccttctccaaacatctttggagacctctctttcttgcgaccgccaaatgaatggaagaagagtgcatgggtggttgttaccgtgtggatccttttgataggaacagcaatctat

SEQ ID NO: 63724 - DNA, 269 bp, Zea mays
cacataagtgggtcagtcaccgaaaccatcgagggaacatctgcggagttgatttcatatggcttttaaatcctgataagtgcaggaagcccctgaagaccagctggaatgaagctgtttttggtatcattaagtacttcctccaagttgcattcctttccgaggagaatgcatttgcactcctgaaggcagacagcctttatgatcacatcacatattcaagtttctaccgggcattgtgtcagttaggaatggtccatcctgataga

SEQ ID NO: 63725 - DNA, 275 bp, Zea mays
agagacaacaagtctattggtagcttccggcttgatggaatccctcctgccccacgtggtgttccacagatcgaagtcaagtttgatattgatgctaacggtatcctctctgtcagtgctgtggacaagggtacagggaagaagcaggatatcacaattactggtgctagcactctgccaaaggacgaggtggagaggatggttggcgaactgagaagtttgccaaggaggacaaggagaagcgagacgccattgacaccaagaaccaagccgag

SEQ ID NO: 63726 - DNA, 132 bp, Zea mays
gcgcgggcctgtcggttgtcgatggcaccagcttcgtctccccaaagtgggtgccgcagctagccgacgcagaggaggtgctgaagggtataaagcaggagccaggcgtgcggtacccggtgctaacaccta

SEQ ID NO: 63727 - DNA, 338 bp, Zea mays
  unsure (1)..(338): unsure at all n locations
tgaggggcaaatttcctccaacaacattgaaatcggaattattcgagctgatcgtgagttcaaagttttaagcccagcagagatcaaggatttcttggaagaggtggagtaagctgtctgttgatgatactagttcagacaacaatagcagtgtcacttatgtggnagccagcctgaagattgtcttggttttattactctgtaaactgatttgctccagcgccatgtggtggttacatttgaaccctcctcaacgcatactgtagacaatgagataacgtaggatgaatgctgtatttgacatactttgcagcttgtttatgtgtcacgttcttgcg

SEQ ID NO: 63728 - DNA, 339 bp, Zea mays
gaaaggtattgcgattttgagggaatgggaggcctatttgccgctcttctggcaactggtaccgcccagtgaagaagactcgcctgaggcttgtgcagagtttgagagagtacttgccaagcaagcaaccacccaattgtctgcgaagtgatcgaatcagactacaggaaggtggtaggtgttttctatttgacacaaagtgatctcatcttatcacttcaagaagatcgaagaccataaccggcgctctgaggcaccgaagtgcccgtctgaagactgcaactttgtggaggctctgcgcaggcaatctgtttgagttgagaacagaacccgaggtct

SEQ ID NO: 63729 - DNA, 297 bp, Zea mays
caaagctgtcagcaagattcttccagaaaatctgggatacatgttatctcatcctgaaacaaaagaacgagtgcagtcatgttctgatgcttctgatgttcttagatatgcttttactttgacagaagatgcaatcgatcatcagtacgagggatgtacaggcacagcacttcttatttggtttgatcaaaataaagattgttttgcccagtgtgctaatcttggtgattctgcttgcgtaatgagacgatcgatatgactgaagatcaccgggtagctagcgcaactgaaagagct

SEQ ID NO: 63730 - DNA, 326 bp, Zea mays
ccggagtcttcgtcgacggccccggcgccggcaagcacatccaggccggcgcgaagaaggtgatcatcacggctcccgccaaggaccccgacatcccgacctatgtcgtcggcgtcaacgagggcgactacgaccacagcgtcgcggacatcatcagcaacgcgtcctgcacgaccaactgcctcgcgccattcgtcaagatcttggacgaggagttcggaattgtcaaggggaccatgacgacgacgcactcgtacaccggcgaccctctggaggacttctgcaaggacaaccccgagaccgacgagtgcaaggtgtacgaagca

SEQ ID NO: 63731 - DNA, 312 bp, Zea mays
cacacatacatagtttcttctactacacgacgacaaacatggggaagcctgcgaagatcggagagtggggtggatacgccggcgatcgtcgggatctgagggctactccggaccggctgatcgaggtgaaggtcacggcggacaacagcagctgcatccgctccatctccttcatctacatcggagccgatggcaaaccgtacgaggaggggccatggggtttcggccatgctggcacggagtacaagattgatctgtgcaggttcgacgagagcttgacggagatctccgggaccacgggcccagcctaca

SEQ ID NO: 63732 - DNA, 270 bp, Zea mays
ctcatcgatctacacacatacatagtttcttctactacacggagtacaagattgatctgtgcaggttcgacgagagcttgacggagatctccgggaccacgggcccagcctacaacattgacaatctggtcaagtctctcaaattcgtcaccaacaaacgcgcttacggaccgtacggcagggacgagggcaccccgttccgtgtcaaggtgatgaacaacggccacgtcgctggcttctttggccgctcctggagattcctggacgcga

SEQ ID NO: 63733 - DNA, 292 bp, Zea mays
gataattcattcaaatgagagatgtgcagctggtattatacaagctattggacacttcaagctaggacctaatatttctcctagagacctgcagtttccttatgcaaaggaagcctctttcaaacctacagatgctgtagtgaagttctacgttctctatgagaagtggcgcagggctgaggttccaaagtctgattcagttataaagtacttcaaaaacatcactcatgcaaatggagttaccatccatcctgctgggcttgaactctcactccatgcatccattgatgcg

SEQ ID NO: 63734 - DNA, 271 bp, Zea mays
cgcctctcttctcagtgccagccgccgtgcgctcgctctctctgtccctcaaggccttcgccggcgaagagcgcctagtcacccaccaggatgaagtttgttgctgcttacctgcttgctgtccttgctgggaactccagcccctctgctgaggacttgacggccattctggagtcagttggctgtgaagttgacaatgataagatggagctcctgctgtcccaactgagcggtaaggacattaccgagctcattgctgcgggcagggaga

SEQ ID NO: 63735 - DNA, 260 bp, Zea mays
gtggcaagatcgaggctgaactgagcaatatctgtgatggaatcttgaagctgcttgactcccacctagtgccttcttctactgctgctgaatcaaaggtcttctacctcaagatgaagggtgactatcacaggtatcttgcggaatttaagactggtgctgagaggaaggaatctgctgagagcacaatggtggcctataaggctgctcaggacattgctctggctgagctggcacctacccatccgataaggctggga

SEQ ID NO: 63736 - DNA, 301 bp, Zea mays
gcagatgcagcatccttgcaatgagtgcaaggggactggagagagcatcaatgagaaggaccgctgtccagggtgcaagggtgagaaggtcattcaagagaagaaggttcttgaggttcatgttgagaaggggatgcaacacaaccagaagatcaccttccctggtgaagctgatgaagcgcctgatactgtcactggagacattgtattcgtcctccagcagaaggatcactccaaattcaaaagaaagggtgaagatctcttctatgagcacaccttgtctctgaccgaagcactatgt

SEQ ID NO: 63737 - DNA, 287 bp, Zea mays
tgcaaaacctctaggatttgatgttcagaagaaaaattacaagttgaggctcgaaaaggtaaatgcagggaggaagggaaacctcaacgttgctactgagatactgcaagttgcaccctctctccacatggtagaagtccgataagcaaagggtgacaactctggaatttcataagttctacaagaacctttccaagaccttgaaggacgtcgtctggaaatccgacgatcttcaaacgcaacatgcttcttagcagaacctcagagaggaggaatggcaaactatt

SEQ ID NO: 63738 - DNA, 338 bp, Zea mays
caaacatggggaagcctgcgaagatcggagagtggggtggatacgccggcgatcgtcgggatctgagggctactccggaccggctgatcgaggtgaaggtcacggcggacaacagcagctgcatccgctccatctccttcatctacatcggagccgatggcaaaccgtacgaggaggggccatggggtttcggccatgctggcacggagtacaagattgatctgtgcaggttcgacgagagcttgacggagatctccgggaccacgggcccagcctacaacattgacaatctggtcaagtctctgaaattcgtcaccaacaacgcgcttacggaccgt

SEQ ID NO: 63739 - DNA, 284 bp, Zea mays
ccgtcgtcgcagcaatcacagcagcccggagaacggccaggtccgataagatgcagatcttcgtgaagactctgacagggaagaccatcagcctcgaggtcgagagcagcgacaccatcgacaatgtcaaggccaagatccaggacaaggaagggatccctacggatcatcagcggctgatcgtttccgggaagcagcttgaggatggccgcagccttgcggactataacatccagaaggagtctacgctccactcgtgctcaggctccgcggtggcatcattg

SEQ ID NO: 63740 - DNA, 199 bp, Zea mays
  unsure (1)..(199): unsure at all n locations
cttgggcaaagtgaaaaagagattgagtatgaccgtactgagtcgaataatcanaggacaggatgtatctcttcccaagagcaaatatgaagaggatgtgttcattaataatcacacgagcgtgtggggttcatggtggaaagatcatcaatggggctacaagtgctgcaagcagactatcaagaatagttactgtact

SEQ ID NO: 63741 - DNA, 280 bp, Zea mays
atcccccatctcttcgactcctttcgtgagcagctagggttccgtgctcgatccgatccgccgagtgcacaccaccttttcccactccgatcgaatcgatggccgccgagggcgagaagaagatgataaccctcaaaagctccgatggcgaggagttcgaggtggaagaggcggtggcgatggagtcgcagaccatccgccacatgatcgaggatgactgcgccgacaacggcatccctcttcctaacgtcaactccaagatcctatccaaggtaatcga

SEQ ID NO: 63742 - DNA, 180 bp, Zea mays
tgctgctggattctacacatattccatatttgcacttatgttttgggaaacaaggcgttcagactttggagtgtcaatgtcacatcatgttgctactgtcgtcctgattgttctctcttacgtgttcagatttgctagagttggctctatagtattggcaattcatgatgcaagtgatgt

SEQ ID NO: 63743 - DNA, 273 bp, Zea mays
aggacctatgctcgggactgggtcacctggaagcagattttcttgctggttgatgtgatctgctgctgtgctgtgctcttcccgattgtgtggtccatcaagaacctccgggaggctgctcgctcggatgggaaggccgctgtgaacctcatgaagctcaccctcttccgccagtactatgtggtcgtcatctgctacatttacttcacgcgtgttgtggtgtatgcgctacagaccatcacctcataccggtacctgtggactagcgtcgtg

SEQ ID NO: 63744 - DNA, 335 bp, Zea mays
aggaatgggagattgggcaggctttatggacaagattcatgaagtcgtacctacggatcaacaacctgagcttctgcagaaactgtctgaaggaagctttactctcaggcttatgtatgagcagttccaaaacattctgaaaatgggtcctattggacaggtcttctctatgttgcctgggtttagcgccgaactaatgccaaaaggacatgagaaggaaagccaggctaagattaagcgctacatgacaatgatggattccatgactgatgcagagcttgacagcacaaatcctaagctgatgactgaatcacggtcattctgattgcacgggg

SEQ ID NO: 63745 - DNA, 286 bp, Zea mays
ctcctctttggtgaatctacactctctgatgtgctctccaactttgattcaaatcttgggatcccatacagttcagtcctcaatgatgctgtcagagtgagctatgctgttcacctgatgcttgtgttccccatgatattccatgcattgaggcttaatttggatgggctcctcttcgcctctgcaaggcctctgtcttctgacaacagaagattcggcataattacagcatcgctcctcctagtgatttttgggtctgcaatcttcattcctagtatttgggatg

SEQ ID NO: 63746 - DNA, 303 bp, Zea mays
ggccgtaagagagcccttctaatcggaggaggaatcgctaacttcacagatgttgcttctacatttagtggcatcattcgggctttaagagagaaggagtccaaattaaaggctgcaaggatgaacatttatgtccggagaggtggtccgaactaccaaactggactcgccaaaatgcgcaccctaggcgccgaacttggcgttccaattgaggtctatggaccagaggcgaccatgactgggatctgcaaagaagccattgattgcatcatggccgcgtaaatcacaaatgtggttgtccat

SEQ ID NO: 63747 - DNA, 290 bp, Zea mays
cctgtgcagtcgatcctcaagttcaaagacctcaatgaggttatcaagagggcaaacgcgagccagtatggattggccgccggcgtgttcaccaacagcctggacacggccaacaccctgacgcgcgcgctcagggccgggaccgtctgggtgaactgcttcgacgtcttcgatgctgcgattccgtttggtgggtacaagatgagcggcatcgggagggagaagggcgttgacagcctgaagaactacctgcatgtgaaggcggtctcaccccaatcaagaacgccgcg

SEQ ID NO: 63748 - DNA, 185 bp, Zea mays
gcctgaccgagtgggacgagttcaataccctggactaccagaagatcttcgacaacatgcagaagcccgccttcgtcgtcgacggccgcaacatcgtcgactccgagaagctgagggacatcggcttcatcgtctactccatcggcaagccgctcgacgcctggctcaaggacatgcccgcggtc

SEQ ID NO: 63749 - DNA, 159 bp, Zea mays
gggaattcggctcgagatcccagtatacattgcagagatatctcctcataacatgagaggagcccttgacgctgtgaacccgttgtctgcaacctttggtgtcctgctttcctatgtgcttggcttgtttttcccttggaggcttcacgcattaatagg

SEQ ID NO: 63750 - DNA, 190 bp, Zea mays
cgacggtcctaaagaagttctacgccttgaaaatcgccgatatgattgctcctcctggagtggagatcatagactttctccatgcaccttcttcgccgattccctggatgacagacgaagaactgggacagtacgccgagaagttcgagaagactggcttcacaggacccctcaactactaccgcatgct

SEQ ID NO: 63751 - DNA, 328 bp, Zea mays
  unsure (1)..(328): unsure at all n locations
tggtatgatctacacattttacaaggcacaaggatattctgttggaaaatctctcgtggaagaggataaacttgagctcgcaacttctcttattgagaatgcgaaggcaaagggtgtgtctcttttgcttcccactgatattgtagtagcggacaagtttgcagccgatgctgagagcaagattgtccctgccactgctatccctgatgactggatgggtcttgatgttggctctgatgccacgaaaaccttcaacgaagcattggacaccaccaagactgttatgtggaacggccccatgggagtgtntgagtcggaagtttcagct

SEQ ID NO: 63752 - DNA, 322 bp, Zea mays
gtggttgctcttgccaacggatgtccgcacctgcgctcgctgggcctctacttctgccagaacatcacggaccgcgccatgtactccctcgcaaacagccgcgtgaagagcaagcgtgggaggtgggatgcagtgaaagacgggctcgcgaacctcaacatcagccagtgcaccgccctgacggtcccggctgtgcaggccgtctgcgactccttcccggcgctgcacacctgccccgagaggcactccctcatcatcagtggctgcctcagcctcacgtcagtccactgcgcctgcgtcctccaccacaccggtgcggaga

SEQ ID NO: 63753 - DNA, 305 bp, Zea mays
gccatagcgcgcgtcgctagtgacggcggcgggtgggacggcgagaccgtggtgtatgcgcaccgcacgcgggagctagtgcgacttccgcggggcgtcgcgctgcccgtgacgctaggcccgctccagtatgaggtgttccatgtgtgctcgctccgcgccgtcgtgccgggggtctcgttcgcgcccgtcgggctgctggacatgttcaacgccgggggcgccgttgaggagtgcgacgtgatcagcgatgctggcggcaaggccatggctctcagggttcgcgggtgcggtcggttcggcgc

SEQ ID NO: 63754 - DNA, 263 bp, Zea mays
cttctcgccgcctcgaaagcgctagctgatcaggccacacaggacaacttcgagaagggctccatcttcccacccttcaccagcatcagaaagatctctgcgcacatcgctgcagccgtggctgcaaaagcctacgagctcggtctggcgacccgtctgcctccccccagcgacctggtgaaatatgcagagaactgcatgtacactcccgtctaccgcaactaccggtagtgctgcggggatcaattttgcagtaataaaaa

SEQ ID NO: 63755 - DNA, 304 bp, Zea mays
  unsure (1)..(304): unsure at all n locations
cgcagatctccgggaccacgggctcagcctacaacattgacaatctggtcaagtctctcaaatttgtcaccaacaaacgtacttacggaccgtacggcagggacgagggcaccccgttccgtgtcatggtgatgaacaacggccacgtcgatggcttctttggccgctctggagattgcctggacgcgatcgggctctacgtgaaccccaattaataactanaacgatggatcggatcatctgcatgcatgcatatgcagtatgctgcttgcctgcgtgtaacgaatatgaatgcataaaatat

SEQ ID NO: 63756 - DNA, 290 bp, Zea mays
catgcagcgcgtcacacagtggaacctcgatttcatggatcacagcgagcaaggtgataggtaccgtgaattggcccatagggtggatgaggctcttgggttcatgactgcagcagggcttacagttgaccacccgataatgacgactactgacttctggacctcgcacgagtgccttctcttaccctacgagcagtctcttacccgtaaagactccaccagtggccttttctacgattgttcggcgcacatgttgtgggttggtgagcgcactcgtcaactcgatggag

SEQ ID NO: 63757 - DNA, 328 bp, Zea mays
aaaagggtggttggaaggcggcttgatcctgtaacagggagaatatatcatttgaagtattctccgccagagaatgaagaaatcgcttcaaggcttacacaaagatttgacgatacagaagaaaaggttaagttgaggctggagacttattaccaaaatatcgagtccttgctatcaacatatgagaacattattgtcaaagtgcaaggagatgccacagtggatgctgtctttgctaagatcgacgagctgctgggttctatcctggagaagataaatgaaatggttccagcacatgagcaatgtataaatgatgggtgcagtgcag

SEQ ID NO: 63758 - DNA, 307 bp, Zea mays
gctcgtgcaatgactgagatggatggcatgctatgttcttctaggcctattcgtattgggcctgctgcgaacaagaaagctactgttgttcatgagagagtaccaagtgctcagggagttcagtctgacaatgatcctaacaatacaaccatttttggttggtggtcttgaccccaatgtcactgaagatatgttgaaacaagttttcagcccttatggggacgtagtcgatgttaagattcctgttggcaaaagatgtggtttggtcaatatgctaacagatcttcggcagaggaggcattggtaa

SEQ ID NO: 63759 - DNA, 247 bp, Zea mays
gtccgattcattggttcatgcacaaagccacctcagttttacataattacagagtgcatgtctagaggaagtctgtttgatttcttgcacaatgagcataatgtgttggacctcccaacgcttctgaagtttgcactagatgtatgccaagggatgtcctacttgcatcagaaaggcattatccacagagatttaaagtctggcaaccttttattggataaaaatgatgttgttaaagtagccgatt

SEQ ID NO: 63760 - DNA, 281 bp, Zea mays
cttcgccccagcatggccgcctcgtcgaccgccacctccgtccacgacttcatcgtcaaggatgcgagcggcaaagacgttgacctcatcacctacaaggggaaggttcttctcattgtgaacgttgcatcccagtgtggcttaactaactccaactagactgagctggcccagctctacgaagtactaggaccacggctttgaaatcctggctttcccatgcaaccagtttggtgggcaggagcctggtaccaatgatggttgtgcagtctggctgcaca

SEQ ID NO: 63761 - DNA, 279 bp, Zea mays
gacgaaggtcttccatccaaacatcaatagtaatggaagcatatgtcttgacattcttaaggagcagtggagccctgctttgacaatctctaaggttttgctttctatctgctccctgcttactgatcccaacccagacgacctccttgtccctgagattgctcacatgtacaagtcggatcggcctaagtacgatgcgacagccgcagctggacccagaagtacgccatgggatgaaatgttcggcgttactggctaatgctgacgattgtggtgttg

SEQ ID NO: 63762 - DNA, 281 bp, Zea mays
atcttgtgaaggatagggaaactggtaactcaaaaggctatgcattctgtgtttaccaggacctcaccgtcactgacatcgcttgtgctgcactaaatggtatcaagatgggtgacaaaacccttactgtcagacgagcaaaccagggggcatctcagcccagaccagagcaggaaagtatcctattgcaggcacaacaacaggtgcagttgcagaaacttgtgtatcaagttggagcgcttcctacaaaggttgtatctcacacaggtggtaactgcaga

SEQ ID NO: 63763 - DNA, 289 bp, Zea mays
gctcgagcagagcatcaatgagaaggaccgctgtccagggtgcaagggtgagaaggtcattcaagagaagaaggttcttgaggttcatgttgagaaggggatgcaacacaaccagaagatcaccttccctggtgaagctgatgatgcgcctgatactgtcactggagccattgtactcgtcctccagcagaaggatcactccaaattcaaaagaaagggtgaagatctcttctatgcgcacaccttgtctctgaccgaagcactatggggttccaatttgttcttacac

SEQ ID NO: 63764 - DNA, 283 bp, Zea mays
tattgcatggcacctttggagaaacgagccaaagtgagttggctgcattcacgtcatatgcactggcatttccaaattccttcctggccttggttgacacatatgatgtcatgagaagcggagtgccaaacttctgtgctgttgctttggccctcaatgatatggggtataaggcagtcggaattaggttggactctggtgatttagcatacctatccgttgaggcccgcaagttcttccatgcagttgaaaaagaatttgtgttgttggctttgggaaaaca

SEQ ID NO: 63765 - DNA, 283 bp, Zea mays
gttttatatgaagacaggcagctgcaaatatggttctatttgtcgcttcaatcatcctgatcggccagttgtggatatagcttttatggctccagttcaagctactcttccttttccagcacccattgtccctgcagtggcgttaaatccggctgcaaattttctgcaaagctttgatttccatgcaactcacgtgccggttgagcctatgccaatgatctatcctcaaagacctggagaaattgtttgtgatttttactgaagacaggatcttgcaagtatg

SEQ ID NO: 63766 - DNA, 295 bp, Zea mays
attcggctcgagacatgctgcggttttatgtgcggcgatgggtgtgatggaggctatcctatagaggcatggcgctactttgttcaaaatggtgttgttacggatgagtgtgatccatacttcgacccggtcggttgcaagcatcctggatgcgaacctgcttatcctacaccaaagtgtgaaaagaaatgcaaggagcagaaccaagtttggcaggaaaagaagcatttcagcattgatgcgtacagaatatattcagatccacatgacatatggcagaggtctacaaaaatgg

SEQ ID NO: 63767 - DNA, 275 bp, Zea mays
  unsure (1)..(275): unsure at all n locations
cagtccgatattctgcagcgacagngagtacatcataggcccaggatatgggcgtctgggaagacattttcctgtgtgaccaagggtgttcctcgtccctccgttccaagacaaaacaaacctcgccgtgtggacttgtactactctacctggtgcatccgtccagttgagtcgagaaaaggcgacggtgctatgagtgcatgcgatgtgctcttgttccaccacgaggacatggggattccatgggagatccgaagcttggcgtccggcagggg

SEQ ID NO: 63768 - DNA, 285 bp, Zea mays
cgtcgatctacacacatacatagtttcttctactacacgacgacaaacatggggaagcctgcgaagatcggagagtggggtggatacgccggcgatcgtcgggatctgagggctactccggaccggctgaccgaggtgaaggtcacggcggacaacagcagctgcatccgctccatctccttcatctacatcggagccgatggcaagccgtacgaggaggggccatggggtttcggccatgctggcacggagtacaagattgtctgtgcaggttcgacgagagct

SEQ ID NO: 63769 - DNA, 80 bp, Zea mays
tacaaatccatttctcagatgcattgatattgaacatgtatcaaatatgtgccaaagcaagggaccgtggcttggaatgg

SEQ ID NO: 63770 - DNA, 277 bp, Zea mays
tgacgatgaaaggggtgggggtttaagacaaaaggaggtccagctgtctcgtgaaattatcaacctttcacctctgtcaactgcaattatctctcatagaacagacgatggccatgagtgcaagactggctatgttagattagcttccttttatcagactgcagcagctgaaatggaaaatgccgtaaaaaggatggaggatatcggtgtccagtcttatattctagatctgcggaataacccaggaggtttagtaaagctggtcttgatgtggctc

SEQ ID NO: 63771 - DNA, 276 bp, Zea mays
tattctgcaaccctcagtattgttcaggtcttctggggtttagataaaaagctcgctcaaaggaagcatttcccatctgtgaattggctcatttcctattcgaaatactccaaggcccttgagtccttttatgagaagtttgatccagatttcattgatattaggacaaaagcacgtgaggtgttgcagagggaggacgatctaaatgaaattgtgcagcttgttggtaaagatgcgctggcagaatctgacagattacactggagacagcaaagc

SEQ ID NO: 63772 - DNA, 156 bp, Zea mays
ggctgcagctacggcgactccctggtgcaagggagagcaggtcacctcagagaagaaggttcgtgaggctcatgttgagaaggggatgcaacgcaaccagatgatcaccttccctggtgaagctgatgatgcgcctgatactgtcactggagacat

SEQ ID NO: 63773 - DNA, 281 bp, Zea mays
gagcaagaaggctgtggagaactccccgttccttgagaagctgaagaagaggggctatgaggtgctgttcatggtggatgccattgacgagtattctattggacagctgaaggagtttgagggcaagaagctcgtctctgccaccaaggagggcctgaagctggacgagagtgaggatgagaagaagcgcaaggaggagctcaaggagaagtttgagggcctctgcaaggtcatcaaggaggtgctgggcgacaaggtgagaaggtggtggtctccgaccg

SEQ ID NO: 63774 - DNA, 279 bp, Zea mays
gtaggacatggcgtcgacctcctgaaatctgaagcgtcaatggagtatctatgcaacttaccaccacataggtatgaagctgttttcgcgaaagaaattccggagacgatcactggcgatgcgtttttagagaagtatggagaccacaacgatgcggtaacagaagttgacccaaagcggtcttactgtgtcaaggctcctactagacatcccatatacgagaacttccgagtcgaggccttcaaagcgttgctacagctgccaaaacagacgagcagc

SEQ ID NO: 63775 - DNA, 264 bp, Zea mays
ataaggaagtacagtgtctggatcggtggctctattttggcttctctcagcacttttcagcagatgtggatctccaagggagagtatgacgaaactggtccgggcattgtccacatgaagtgcttctaagtttttttgggaaatttttccaaaaaaaaaaaagaagtttctggggaatttcgacatggtacgtcaggcgttaccggctcattgtgaaccaatacatgaactgccatgataaggttatagcagaaataacagtag

SEQ ID NO: 63776 - DNA, 276 bp, Zea mays
aacgaggtggcctccgaactgaaatcaagagggctacgtgttgaagtctgtcatggagagcgcctaccaaagctaataaggaatgctgaaacacaaaaggtgccactcatggcagttgttggtcctagagaagttcaagccaggaccctgactatcaggtccaggcacaacggggagatcggcacgatgcccgtcgatgaattcatcaccaggcttcaacttgctgtcgcaaacaaatcatcactatagatccgtggtccgccaaatttcagtcca

SEQ ID NO: 63777 - DNA, 273 bp, Zea mays
ataggatgcaagatctgtgctaacgtgtgttctaaggtcttcgaaatcgaggaagatttcgggcgggcaagagtttatgaccaatcaggcagcacagaactgattcaagaagctattgatagttgcccagttgactgcattcactggacttcagctgcgcaagctgtcgctccttgaggatgaaatgcgcagagtggagagagtaaatgttggattaatgcttgctgggatgggaggctcaattgatgtgttcggatggcaagttcacgctgg

SEQ ID NO: 63778 - DNA, 271 bp, Zea mays
tgctgttggtctggttcgcccagttagcgttgccttcgaggtgatcactggtttcaggctgtacaagagcggagtttacactagcgaccattgtggaactacaccgatggatgtgaaccacgctgttctggctgttggctacggtgtcgaagatggtgtcccctactggctcatcaagaactcatggggcgctgactggggcgatgagggttacttcaagatggaaatgggcaagaacatgtgcggtgtgctacgtgtgcatcctacccta

SEQ ID NO: 63779 - DNA, 277 bp, Zea mays
cagttgccatccgctgggcgtcggcgtcggcgtcccaaaagaggggcctgctgctgacgacggtcacgggcggcggagtcgcgccggtgaggtcgagcgggatcgagacgacgtcgacctcggtgggagctgaggccgtcaccgggcaggtcacggaggtcaacaaggacaccttctggccgatcgtcgatgccgccggcgacaaggtcgtcgtcctcgacatgtacaccgaatggtgcgggcgttgcaaagtgtggctcccaagttccaggagatg

SEQ ID NO: 63780 - DNA, 273 bp, Zea mays
gtgatttatctcgttggaaaagccatttgggtgcaatcagaaatcggcagggaattccaacacggatttcttcctgccatcctttcactgtcgacgaagtttgtgcccactgtaatgaacatcctgaagagattagccgacgagggtcaagcacctgcagccgccccagagaggcagagagagatggagctccaaccaaaacccaccaggaacggttcttcatacaccaacgcgacgtcggcggggtcatcgcgtaaccacttcggagatcgg

SEQ ID NO: 63781 - DNA, 190 bp, Zea mays
atgtagatggaggtcccttactgcattgttaaaggaaaggctcgccttggatcgattgttcacaagaagaatgcatcagtcttgtgtcttaccactgtcaagaacgaggataagcttgagttcagcaagattttggaggctattaaggcaaacttcaacgacaagttcgatgaggtcaggaagaagtggg

SEQ ID NO: 63782 - DNA, 271 bp, Zea mays
tggtatgatctacacattttacaaggcacaaggatattctgttggaaaatctctcgtggaagaggataaacttgagctcgcaacttctcttattgagaaggcgaaggcaaagggggtttctcttttgcttcccactgatattgtagtagcggacaagtttgcagccgatgctgagagcaagattgtccctgccactgctatccctgatgactggatgggtcttgatgttggccctgatgccacgaaaacctcaacgaagcattggacacca

SEQ ID NO: 63783 - DNA, 270 bp, Zea mays
cacacatacatagtttcttctactacacgacgacaaacatggggaagcctgcgaagatcggagagtggggtggatacgccggcgatcgtcgggatctgagggctactccggaccggctgatcgaggtgaaggtcacggcggacaacagcagctgcatccgctccatctccttcatctacatcggagccgatggcaaaccgtacgaggaggggccatggggtttcggccatgctggcacggagtacaaattgatctgtgccagttcgacga

SEQ ID NO: 63784 - DNA, 270 bp, Zea mays
tgagagagtacttgccaagcaagcaaccacccaattgtctgcgaagtgatcgaatcagactacaggaaggtggtaggtgttttctatttgacacaaagtgatctcatcttatcacttcaagaaaatcgaagaccataaccggcgctctgaggcaccgaagtgcccgtctgaagactgcaactttgtggaggctctgcccaggccatctttttgagttgagctaacagaaccgagggttcttctcgacgccgtgcacctaggtaacccctg

SEQ ID NO: 63785 - DNA, 276 bp, Zea mays
  unsure (1)..(276): unsure at all n locations
ggaggtcacaattcntctcatttgttcctnttcaagtcaatgatggactacgacccttcatatgattctgaagaagcttccacagtaatgccatcatctttccatgatatcagtgatggcgagttccaagacaattgggccagggtttgggtggaccttggaacctcggattaccttggcttggatgtattactacactgcttaacacagtcgagctcagagcacttgggtatcaaacaagtggtttttggaggaagaaaatgggtgactgggaag

SEQ ID NO: 63786 - DNA, 275 bp, Zea mays
gcaacactgatccagcaactttcagatgccaaccaacagttcagtactgcagtcacagacaacagaatcctcaaatccgatgtagaagcgttaagcattaacgtcaagatggcagaagatatggtcacgagaactgctgtaacgtgtggcctacagcgacttgggctggcagcatacgtgaactcccggaaggtgtgccaagctttgaatgtgctcacagggttggatttactagggagtgatgcgttcagggtccaaccgcaggtacacgagta

SEQ ID NO: 63787 - DNA, 143 bp, Zea mays
gctcgtgcaatgactgagatgaatggcatgctatgttcttctaggcgtatgcgtattgggcctgctgcaaacaagaaagctactgttgttcaggagaaagtaccaagtgctcagggagttcagtctgacaatgatcctaacaa

SEQ ID NO: 63788 - DNA, 286 bp, Zea mays
gcggacatggcaagattctcaaggacttcaagaagggcttggtgcaaaacaaggacatagagaacctgagggcggaggtcgagaagttcgccacttcatttgacatgcctggcttcaggtgtctgacatgaagtacacagactagactgctgctgacttgggtgcaaaccgttgctcctgttacagtaacactggcaggctggtgcaatgcaaaccgttcttctgttacggtaatattaacgcctctgaaatgtcacgtgaatggtggtaaacctgaatttcacac

SEQ ID NO: 63789 - DNA, 276 bp, Zea mays
gttttgcaatctatgatgcaatgatgcgtatgaaaactgagatccacacactttgtataggagctgcagcaggccatgcatgtcttgtgcttgcagctggaaaaaaaggcaaacgtatatgttccctcatgccaaagctatgattcagcaaccacgtattccttcttatgggatgatgcaagcatcagatgttgttattcgtgcaaaggaggttgtgcacaacaggaacacattggtcaaacttttagcaatgcatatggagcatgttctgaaggc

SEQ ID NO: 63790 - DNA, 277 bp, Zea mays
agcttctgtccaagcatatacgtcctctggagagtaaaaatgattcgaaaccagaagcaaagaaattgaagccacagggtgatgaaccaatttcttcagttgaaactgatgttaacaacttccccttatggtttctgatgcgcttgctaccttttttggtaccggagaaagagaaatggtccattctgaggctgttaagcgtgtctgggatcacattaaaagcaatgatttagaggatccagagaatcctacggtgatactgtgtgactcgaagctt

SEQ ID NO: 63791 - DNA, 278 bp, Zea mays
atggcggtgtgattgctggcttagcagcctgcggtgtattgatgtccatcgtgtccactgcagccgatctcatgcaggactttaagaccggttacctcacactctcttcccctaggtcatgttcgtgtcgcagttgatcgggaccgcccttggttgtgtcattgctccactcaccttttggctctactggtcggctttcgatattggtaaccctgacggcgcattcaaagctccatatgctgtaatcttccgtgagatgtcaattcttggcgtggaag

SEQ ID NO: 63792 - DNA, 274 bp, Zea mays
caggtggcttccgcagcagcggtggttatggtggtggcggctatggtggtggtggtggtggctatggtggcggtggctatggtggcggctatggtggtggtagcggtggctatggcgcggcggcagtggtgactatggtggcggcagcggtggctatggtggcaactacggcgacagggctgatggtggctatggtggtggtggtgattatggagttgcaggtggggctgaaggcagttttgctgctggaggtagcgacagctttggcagcagt

SEQ ID NO: 63793 - DNA, 275 bp, Zea mays
cagctccataacagacagatttatccacctatcaatgtcctgccatctctatctcgattgatgaagagtgctattggtgagggcatgacacgtagagaccattcggatgtgtctatcagctttatgccaactacgcaattggaaaggatgttcaggccatgaaggcagtcgttggagaggaggcactctcgtctgacgatctgcttgacttagagttccttgacaagtttgagaagaaatttgtgacactaggagcatacgacacacggaacatc

SEQ ID NO: 63794 - DNA, 273 bp, Zea mays
atggcggtgtgattgctggcttagcagcctgcggtgttatgatgtccatcgtgtccactgcagccgatctcatgcaggacttcaagaccggttacctcacactctcttcccctaggtccatgttcgtgtcgcagttgatcgggaccgcccttggttgtgtcattgctccactcaccttttggctctactggtcggctttcgatattggtaaccctgacggcgcattcaaagctccatatgctgtaatcttccgtgagatgtcaattcttggcg

SEQ ID NO: 63795 - DNA, 276 bp, Zea mays
gaacagtggagtcctgctttaactatctcaaaggttctcctgtcaatctgctcagtgctcacggacccaaaccctgatgatcctcttgtccctgagattgctcacatgtacaagaccgacagggcctcgtatgagtccaccgcacgctcctggacacagaagtatgccatgggctagaagcaaggctaaaaaccggccaaactggtgaatgtgccggaccccaaatcgttatcacctaaataaccagtcaagtcgcaagtatgaatggacttttga

SEQ ID NO: 63796 - DNA, 277 bp, Zea mays
ggcgtgggcaagtccgggaagccgctccactacaagggctctaccttccaccgcgtcatcccccacttcatgtgccagggcggcgacttcacccgcggcaacggcaccggcggcgatccatctacggcgagaagttccccgacgagaagttcgtccgcaagcacaccggccccggggtgctctccatggccaacgccggccccaacaccaacggctctcaattcttcatctgcaccgtggagaccccctggctggatggcaagcacgtcgtcttcgg

SEQ ID NO: 63797 - DNA, 275 bp, Zea mays
gtggtgagatgctgcttggagcacgccgcgtcggtggccaagaccttgctgacatcagatgttgtggtcgtcgatatcaaggagccggaggtgcacctgtcgcaaacccgatgacaactctggctatggatactgatgagatgctatggccatgccccatgggacgaaggtgatcaccatattaattttttggtaggcgaggagtcgggtcgaggtagctttttagacgaccgaaaggcgaaaataagttgaggatctgcatcccaaatttgtga

SEQ ID NO: 63798 - DNA, 276 bp, Zea mays
tgtaaatgcaactataaccatagactgttataatcacttaatcagaagttttagcacgtagtattccatccatcgatttcagatctgaaacagttaaggtgtttagtttctagggctaaattttagtcctacattttattatattttagtctctaaattgtcaaatacggaaattagaactctattttagttttcgtatttagcaatttatggactaaaatagaataacattgagggactaaagaatagtctctagaaactatacacctcctaaga

SEQ ID NO: 63799 - DNA, 272 bp, Zea mays
ctcagatttggtggaagggctgatgacgctcatggaaggggagcacattgggccgttcaacctcggcaaccctggagaattcagcatgctggagctggctaaggtggtccaggcaccatcgacccagaggcgcacatcgagttccgtccgaacaccgcagatgatccgcacaagcgcaagcctgacatcagccgcgcgaaagagctcctcggctgggagcccaaggttcccctccgtgagggccttccccgcatggtcactgacttccgcaa

SEQ ID NO: 63800 - DNA, 275 bp, Zea mays
gagattcttgatctgcagcatagcgtacgattcggtcggggcatcactgcgcgcagatcttgcataggacccttggcatcaacgcaagtgttcgtgcgagtcttcacttctacacacaaaagacgaggtggataccttcgtcgacgcgcttaaagccaccgttgatttcctcacggatcgatactagtgcggttcagttcagttcccttgtttttgccagtttcatcgttctctcgtttgaactgttgtatgcacacacaaaaaagtatgcatat

SEQ ID NO: 63801 - DNA, 275 bp, Zea mays
gccagtatatgggggagcttggattgaacttcgaagtataccgcaatgatgaactgaccatagaagatgtgagaaggaagaacccaaggggaatacttatttctccaggacctgtgaaccacaagattcgggaatatcattgcagactgttcttgaattaggcccaaccatcccaatttttggagtttgcatgggtctgcaatgcattggagaggcatttggaggaaagattatccgtgctccttctggagtgatgcatgggaaaagctctccag

SEQ ID NO: 63802 - DNA, 274 bp, Zea mays
gatccgtgaagccgacgtggacggtgatggccagatcaactacgaggagttcgtgaaggtgatgatggccaagtgagatgatgtgcctgttttgaagctagttcctctcttgatggtagtagctagtctagtgttggagactgactgcatttggtccgccttgttcctctcgctgcatcaatggacatatccgtttgttttctcccaagggattttaccatgtcggtaatttcgttcaaatttgtttatggttgtattaacatttgtgtaatct

SEQ ID NO: 63803 - DNA, 272 bp, Zea mays
gtaacatgaaattctctctgaatggttgtgttatcattggcacccttgatggagctaatgttgaaataagagaggaggtttgagaagataatttcttccttttcggtgccaagccgatgaagttgctgggctgaggaaggacagagaaaatggcctgttcaaaccagacccacgttttgaagaagcctagcagtttataaggagtggcgcttttggcatctatgactatgaacctctcttggattcccttgaagggtattctggatttgggc

SEQ ID NO: 63804 - DNA, 270 bp, Zea mays
gtcgaagatggtgtcccctactggctcatcaagaatccatggggagctgactggggcgatgagggttacttcatgatggaaatgggcaagaacatgtgcggtgttgctagtgtgcatcctaccctattgtcgcatgaggcccttacgaagtgttacatggtctgtttggcatcactaatgcatgtttaacctgagcttggcgatgggttatacagaacggaaactctgtttgtgaatagcaaatcatgaagggaaggagttgaccggacc

SEQ ID NO: 63805 - DNA, 265 bp, Zea mays
cttgggatagtgtgtttaaggtgtctgttgtgttgtacatagtaggaacggtggtttggaatgtcttttcaactggagagaaaattctcgaataagctgtggacattccatatgccactatacggaactgtgtgattttgatgatgtcattttggcaaacaaaataaattttagaagagatacatctggaagaaaactccattttatgcaagaggtgtacctgaatctgatgtttgggctatcggaagaaccagatcaaattagg

SEQ ID NO: 63806 - DNA, 272 bp, Zea mays
gaaaccctagccgccatatctcacgatccactcgagcaccaagccgagggaaggtgaggagcgatggcgcgcggcgtggtgtcggcgaagggcggcgcggtcgcgggcaagaagaaggggtcggtttccttcacgatcgactgcaccaagccagtggaggacaagatcatggaggtcgcctcgctcgagaagttcctgcaggagcgcatcaaggtcgccggcggcaaggctggcaacctcggcgactccgtcaccatctctcgcgagaagac

SEQ ID NO: 63807 - DNA, 274 bp, Zea mays
gtaaagctctgaaccgacctgatcacctggtcggttcagagctttactcaattgatcagtatcgttgagtaaagctctgaaccgacctgatcacctggtggtgttcaagcttcggcggagtggaacgaaccctgcaaggcgatgaagaaaccgttcagggacatggccagggcacacaaagatgtaggccgtattctgcttggtggacatcgacaagctttaagatgctgtggtgcagagttccaagtggaggcgctgccgacgttcgtgctgt

SEQ ID NO: 63808 - DNA, 273 bp, Zea mays
agacaatcttatgattctgatgaatctcttgagggattcgagtaaaaatatccaaatcgaggcatttcacgtgttcaagctgtttgctgcgaataaaaacaaaccacctgaggtcgtgaacatactggtcaccaatagaaacaagctacttcgtttttttgctggattcaagattgacaaagaggatgaacagtttgaagcagacaaggagcatgtcataaaagaaatatcggcgctttgagtatgtctgaggttgtaattagtcattctgat

SEQ ID NO: 63809 - DNA, 271 bp, Zea mays
cggcaagaaggtcatggccgtccgcatcatgaagcacaccctggagatcatccacctgctcactgacgccaatcccatccaggtggtcgtggacgccattatcaacagtggaccacgtgaggatgccacccgtattggttctgctggtgttgtgagaaggcaggctgtggatatctcacccctgagaagggtgaaccaggccatctacctcctcaccactggtgccagggagagcgctttcaggaacatcaaaaccattgctgagtgcctt

SEQ ID NO: 63810 - DNA, 268 bp, Zea mays
cttattcaaagggaaacagcgaacacatacatgtctggcatgggaatcatcaccaccattacagacagactgtaagagctgagcatgcagttgaagatagctcccacctagtcatgcttctgaagggaagtcgcatccaaaagggagtgttctggcaccgatggctggcttggttgtgaaagttttgcttgaagacggggctcaggtggacgcagggcagcctgtcatggttatggaagcaatgaagatggagcatgttgtgaaggcg

SEQ ID NO: 63811 - DNA, 267 bp, Zea mays
ggtgaacagacaaatacaatctcgtttcagactgaatttcagcctaatctattctgggcactggaaaaggtcgcacaaaacgtcactgctaagacgtaccaacagatagatgccagagcaaagggcagattcgacggcgtggcgccagagccacgggaaggggtaaggagtgggcatataccaacaatagtctgagttccgttccccgagatgttcgacggcgcaccaccgagccttctcctccccgccgacgagctgcggcggaag

SEQ ID NO: 63812 - DNA, 269 bp, Zea mays
cagacgctgagcaggaaaggtcgcccgtctgtgtcgattaaggaccgtaccgattgttggcctgatgatctaggacctttaactggccacatacctcgtcatgggtaacctgaacccggctattccatacgtgaaaagacaaccgcgcactgggcgtgggagatggtgggagtagcagttaccctcctggcaagaggctgaatggtagggtaatgtgctcccgggtagcgcggaccagttcatgtagtggaggatccgtgggaatggtt

SEQ ID NO: 63813 - DNA, 286 bp, Zea mays
ggagacgcaaagagcccctccctgatagtgcacccaataaggttaagctgatgtgctcctactgcaaacatcatactgagtctgaagttccagatccttattatggaggccctcagggatttgaaaaggtgctggacttattggaagatgcttgcgagtcgctgcttgatagtatcgtcgcaaacaatgcaagcatttctgggtgacatcgatgtaaatctccacatacagacatctattttcagacgcaccgaaggctgtagcatccatgcacaaccggagtaat

SEQ ID NO: 63814 - DNA, 271 bp, Zea mays
cggtaagccgtcgccgccctacggctcagatcttcgtcgtcatcttctccggcaacgagcacccaaagatggtggtccttcaaccagatcggttcctgagcgagctgacgagcatgtacgagcggacacggagaagggctccgtctgggtcaccatgaagcgatcaactctcaagggcaaggcacagttgcggaagatggagaataaggggcaggaggtagagcacaggtgcctcgtccgcgcctccaatggcaagaagaacatctccacc

SEQ ID NO: 63815 - DNA, 174 bp, Zea mays
gcggctccgttcaccaagagaggtctgctgctcaagttcctgctgctgggcggcggctcacttctggcctacgtcagcgcgtcggcgtcaccggacctcctgccgatcaagaagggacctcaggagccgccgcagccgggcccgcgcggcaagatctaagctcagcttctccat

SEQ ID NO: 63816 - DNA, 274 bp, Zea mays
agctgatgatgttgcaggaatcatctcgtcgatggctggcctcaagtatctgggccctgatgttgatgctatgaaagctgtggccgatgcctactccaaaaggtctctgaagtacttcgaaactgctctccgtgattacaaagctcagctggaagaagatcctattgtccacaggcacctttcctcgctgtatgacactctcttggagcagaacctctgcaggctgattgagccctactcaagggtggagattgctcacatagcagagatgatt

SEQ ID NO: 63817 - DNA, 270 bp, Zea mays
gttcgtcaccgtctagtacgactgtgcgagggaggaagaggcgaggagaagatgcagatcttcgtgaagaccctgacggggaagaccatcaccctcgaggtggagagcagcgacaccgtcgacaacgtcaaagccaaaatccaggacaaggaagggattcccccagatcaacagcgactgatattcgctggcaagcagctggaggatggacgcacgctggctgactacaacatccaaaaggagtcaactcttcatttggtcctcaggctt

SEQ ID NO: 63818 - DNA, 265 bp, Zea mays
tggatccacacctgaatctaaacaaaagcaaattctcaaggttgttgtcacggaagttcttggtggtgggaagttttatgttcagacaatgggtgaccagagggtggcttcaattcaacagcagcttgcatctttgaaacttaaagatgcgccggtcattggtgcttttaatcctgtgaagggagagatagtcctcgcacaatttagcgttgacaactcctggaacagagctatgattgttaatggacctcgttctgttgaatct

SEQ ID NO: 63819 - DNA, 268 bp, Zea mays
cgagggcaccccgttccgtgtcaaggtgatgaacaacggccacgtcgctggcttctttggccgctctggagattgcctggacgcgatcgggctctacgtgaaccccaactaataactaaaacgatggatcggatcatctgcatgcatgcatatgcagtatgcatgctgcttgcctgcctgtaacgaatatgaatgcataaaataacgcccctgctgctcccatgcatcagcagtgtgtaccactatgttatatatatatatactgtat

SEQ ID NO: 63820 - DNA, 278 bp, Zea mays
atttcagctctacaactcgggtatcttcacaggaacctgtggaacagcgttcgaaccatggtgtcacggccgtcggctacggcacagagaacggcaaggactactggatcgtgaagaactcttggggcagcagctggggcgagtccggctacgtcaggatggagcgcaacatcaaggcgtccagcggcaagtgtggtatcgccgttgagccgtcgtaccctctgaagaagggcgccaaccccccgaaccctgggacgaccccgccttcccccaccccg

SEQ ID NO: 63821 - DNA, 267 bp, Zea mays
ctctcagatgatacctgttgggtgcattcctgaagcatgcacttctgttggtgcagctaaatatgggaggccaattggtttagatgaaagccttaaggtggatttgattgtgattgggtcagtggcagttgatccaagttcaggagcacggttagggaagggagagggatttgcagagctggaatatggaatgcttcgctatatgggagctatagatgattcaaccatgatagtaactactgtgcatgacaagcagttagttgatga

SEQ ID NO: 63822 - DNA, 270 bp, Zea mays
tgtcggtggtcggtgggtgacggagcagagatggcggtgccgctgctgacgaagaagatcgtgaagaagcgggtcaagcagttcaagaggccccacctcgaccgctacaagtgccttaagccaagctggcgcaggccaaagggtattgactcccgtgtcaggaggaagttcaagggatgcaccttgatgcccaacattggttatggttctgacaagtcgaccaggcactacctccccaacaagttcaagaagtttgtggtccacaacgtt

SEQ ID NO: 63823 - DNA, 264 bp, Zea mays
gccggacagagcacatgttctttgcttcagacgagaggattaaggctgtcaggcagatgattatggctcccacgcttgagctgaggcagcaggcgctcgaccgtctcttgccgtatcagatgtcttacttcgaaggcattttccgtgctatggatggactcccggtgaccatccgactcctggaccctcccctccacgagttccttccagaagggaacatcgaggacattgtaagtgaattatgtgctgagacgggagccaacc

SEQ ID NO: 63824 - DNA, 265 bp, Zea mays
acaaagttgatgtagatggtgggaacagccgtgtggtgtcggagaaaaaggcaaaggcatggtgcgcctctaaagggaacatcccgtactttgagacgtctgctaaggatggaacgaacgtggaagatgccttccagtgtattgtaaagaatgttatgaagaatgaaccggaggaagaattgtatgtgccagataccgtggatgtggtaggtggcaaccgggcccagagatcatctggctgctgttaagacatgaggcatccacg

SEQ ID NO: 63825 - DNA, 264 bp, Zea mays
ctggactgtattttgctttgacccagctgacccacagaaacatctctcagaatcataagttccaggctgttggtcttggttgggcttttgctgattcagttttgcaccgactggcacctctctggattggggcaagagggcttgaatttacatgggagcacatatttcaaggacttgaagcgaatgctaatcttgtgatgaccctctcccttgctgcattggggtccttgatgtggcttaggaagaacaagcctaggactttgg

SEQ ID NO: 63826 - DNA, 266 bp, Zea mays
cttggaggaagctaatggtgatattcttgttttcatctcatcattcaacccaatgaagaacagcatatccaacagcaggagaagactatcatgaaactggtagttgatgctgaaactgacaaagtacttggtgcatccatgtgtggaccagacgcacctgaaattatccagggcatcgctattgcggttaaatgtggagccaccaaagcagacttcgacagcactgtcggaatccacccttccgctgctgaagagttcgtgaccat

SEQ ID NO: 63827 - DNA, 265 bp, Zea mays
gcgcgacgctgaccttgtctacttctggcagaagtaccggaaattggcagacagctcacatgagaaaaatgaagctcggggggagttgcttgaagtgatggcccacaggtctgcatgttgacagcagtgttgagctcattggaagccttctctttggctctgaggacggtccaagggttctgaaagccgtccgtgcagctggtgagcctctcgtcgatgattggagctgtctcaagtccacggttcgtacttttgaggcgcaatg

SEQ ID NO: 63828 - DNA, 278 bp, Zea mays
ccaagaagcagtaagggagacagatggatattttatcaaaagtggaattgtcacggtgattaaagatgctttaattcctagtggaacaatcatataaagtcagccaacaccatgtatataaggttgggttgcatcatatggtgatcgccaatgtgcatcaagttctctcatcccttgcgagaccatgcttatttccattgcaaaatcatcaagctctgcatcaacttgttgtggataataatgacataataaatggtgccattccatggcaacatttt

SEQ ID NO: 63829 - DNA, 267 bp, Zea mays
ggacaaggagggcatccctccagaccagcagcggctcatttttgccggcaagcagctcgaggacgggcgcacgctggccgactacaacattcagaaggagagcaccctccacttggtgctgcgtctcagaggtggcatgcagatctttgtgaagaccttgactggcaagaccataaccctggaggttgagagctccgacaccatcgacaacgtgaaggcaaagatccaggacaaagagggcatccccccagaccagcagcgtctgat

SEQ ID NO: 63830 - DNA, 264 bp, Zea mays
ctcagaaatatatagtgaagctcgttcttcagctttagaatcaagtctgaagaacttgggcgttgaaaaacttagcaaagatgaagtgcagaaaatgccgtgggaaattttggagtctaaaatagggaattggattcatttcatgcgaattgctgttaaacttctttttgctggggagcgccaactttgcgaccaagtttttgagtgcagtcaatcgttgagggataagtgctttgctgcaataacaaagaacagtttggctac

SEQ ID NO: 63831 - DNA, 265 bp, Zea mays
atcaatggaaccacaagttgaaagagaacttatgcttataaaagtaaatgcagagcgagaaaagttacctgagataatgggtttggttcgcattttcaaagcagaagtggttgatctttcagactacacactaactattgaggtaactggagttcctggaaagatggttgcaatacagaagactctgagcaaatatgggatcagagaaattgctagaactggcaagatagctttgcgccgtgaaaaaatgggagaaactgctcca

SEQ ID NO: 63832 - DNA, 264 bp, Zea mays
accacatctacatctcatgatttttgagctggtgaagaactcccttcgcgcagtacaggaacggtatatggattctgataagcttgcacctccggttcgaatcatagttgctgatggagcagaggacgtgactattaagattactgatgaaggtggtggaataccaaggagtggtctctcaagactttttacgtatctctatagtacagcagaaaaccctcctgatcttgatgtacataatgaaggagtaactatggctggata

SEQ ID NO: 63833 - DNA, 286 bp, Zea mays
cagacaagctgttggatttttggttatacaccaaaaaagaaaaaagacgcttgaggagatcaagcaagatctttgcccgtccttgagtgttcgccaaatctatagaatatgcacgatgtattgggatgacaaatacggtacccaaggcatttcaaccgaggtggttgctgcaatgcgggagatggtcaacaaagatacccagaatcttgtgtcaaattccttcttgttggatgatgacttaagtataccattctctaccgaggatctatcaatggcaatcccgtca

SEQ ID NO: 63834 - DNA, 286 bp, Zea mays
cggacaccttcaggggagacctcgttggtgtcttcatatgccttgtgatcggatgctacctgctccaagagcacatcaaggcgtcaggtggattcaggaacgccttcaggaagggcaatggtgtgtcgaactccatcggcatcctcctgctcttcatctaccctgtctgggccggtgtgctgcaagtcctgtaggcacccaccattgcctcagtgtttcccctgtgcggtccaggcgtccagctccgttcccgttcgtgcccgtgcaaatgctccctctatggtga

SEQ ID NO: 63835 - DNA, 286 bp, Zea mays
catgtaccaggattctcgtcactgcgttcgtcgggacggcagttgcttttgcatgcctctctggcgctgccatcatcgccaagcgcagggaatacctgtacctcggcggtctgctttcatctggcctctccattcttctctggctgcagtttgctacttcaatctttggccacaccagcgcgaccttcatgtttgagctctactttggcctcctggttttcctgggatatatggtgtttgacacccaggagatcatcgagagggcgcaccgtggggacatggacta

SEQ ID NO: 63836 - DNA, 283 bp, Zea mays
gctaccgcggctcctccttcctcgaccccaagggccgcggcggctccaccggctacgacaacgccgtcgcgctccccgccgggggcagaggtgacgaggaggagagccagaaggagaacatcaagaacgccgcctcctccaccggcaacatcacgttgagcgtcaccaagagcaacccggagaccggcgaggtcatcggcgtcttcgagagcgtgcagccgtccgacaccgacctcggggccaaggcgcccaaggatgtcaagatccagggggtctggtacgc

SEQ ID NO: 63837 - DNA, 187 bp, Zea mays
agccgcgggaagggtatctcatcgtcggcgcttccctacaagaggacgcctcctacctggctcaagaccgctgcctccgacgtggaggagatgatcacaaaggcagcgaagaagggacagatgccgtcgcagatcggcgtcctgctccgtgaccagcacggtatcccccttgtcaagagcgtcaccg

SEQ ID NO: 63838 - DNA, 187 bp, Zea mays
gagaagaagaggctcgtcgcttaccatgaggatggccatgcccttgtcggcgccctcatgccagagtatgatccagtagccaagatttccatcatccctcgtggccaggctggtggactcacattctttgctccaagcgaagaaaggctagaatctggattgtacagcaggagctatcttgagaacc

SEQ ID NO: 63839 - DNA, 284 bp, Zea mays
agcaacttcagtgatgacaatattgtcggcagaggagggtttgggactgtgtacagaggcattctgtccaatcaagtggttgtggcgatcaagaaggcgcacgagttgatcaaacccagacggaacaattcatcaacgagatgatcattctttcacaggcgaaccacaaaaacgtggtccagctattaggctgctgtctcgagactgaggttcccttattggtctatgagttcatcaccaacggggcccttttccgacatcttcacaatacgtcggtccccatg

SEQ ID NO: 63840 - DNA, 286 bp, Zea mays
ctcctggtcgcttgatggatctgttggagagggctagagtctcacttcaaatgataaagtatttagctcttgatgaagctgatcggatgcttgatatgggttttgagccacagatacgtaaaattgttgagggcatggacatgcctcaacgtggtgagaggcagacaatgttgttcagtgcaacattcccaaaagagatacagaggatggccgcagatttccttgctgattacatctttcttgctgttgggagagttggttcaagcaccgatttgattgttcagag

SEQ ID NO: 63841 - DNA, 266 bp, Zea mays
gcgcagagtggggacgtcatcatgagaatgatggcaaggaactccatgtcagagaagctcgcggaggacattgattcggccgtgaagcagttgtcggatgaggcctacgagatcgctttgaggcacattagaaacaacagggaggccattgacaaaatcgttgaggtgctcattgagaaggagacagtgaccggagacgagttccgggcgatcctttctgagtttgccgagatccctgttgagaaccgggttcccccagccacacc

SEQ ID NO: 63842 - DNA, 284 bp, Zea mays
agttgctgaggatgccctggccaaggaagttaaagaagctgctggcgagcagctttcccacagatcagcattagactgtatcaagaaatggtatctagcgtccaaaggaactgaaggtgatggtgaaatgtggaatgatgatgaatctttctttgcttggaaggatgatcccaaaaactatgagaattatcttgaggagttgaaggctgaaagagtatcgaactggttctcgcatcttgctgaaagttcagacgtgaaagctctaccaaacggtctttcgctgc

SEQ ID NO: 63843 - DNA, 282 bp, Zea mays
gggatacctcaaaaacatttctttgtggagaagtcgatgaagccagtaaacgacttgtgaaggttactgaagagtgcttgctcaggggcatatcaacatgcaaacatggtaccagctttaagaagattggcagaagaataagtgagcatgctgagaggaacggttttggtgttgtggagtgttttgttgggcatggagtcggcagggtatttcactcagaaccaattatctatcaccagaggaacaacagaccgggccagatgattgaagggcagactttca

SEQ ID NO: 63844 - DNA, 283 bp, Zea mays
cgttggatggcgactgtgcaagctgtatgagtcaggcaaaatgacaccaggccggtctagtttaggcaaggcatggacgtccaagaaggccagggaggtggtttctcttgggcgagagctactgggtggcaatggcattttggttgattttcttgtcgccaaggcattttgtgacgtggaacccattttctcgtacgagggcacctatgacattaatagcctggtggctggcagagagatcaccgggatcgcgagcttcaagcctgctgtgtcagcaaaatca

SEQ ID NO: 63845 - DNA, 182 bp, Zea mays
tgagatagcggacaggctgaattcttctccttcggaacgaacgacctgacgcagatgacctttgggtacagcagggatgatgtggggaagttcattcccgtctatcttgctcagggcatcctccaacatgaccccttcgaggtcctggaccagaggggagtgggcgagctggtgaagtttgc

SEQ ID NO: 63846 - DNA, 282 bp, Zea mays
agatgggctactccatctacgggctatgggcgcccaactcgctgcctacgctgtactacgccgtcgtcccttcgctgtgcctgctcaagggcacccctctgttccctgagctcacgagtccgtggatcgcgcctttcgtctacgtcgcggtcgccaagaacgtctacagcgcgtgggaggcgctgtggtgcggagacacgctgagagggtggtggaacgggcagaggatgtggctggtccggagaacgacctcgtacctctacggcttcgtcgacaccgtca

SEQ ID NO: 63847 - DNA, 283 bp, Zea mays
tgacaaaccaaagctcctcgctcagctatctgctttgttgtctgaagttggactgaacatccgtgaagctcatgtcttctcaacgactgatggcttttgtttggatgtatttgttgttgatggctgggatacaaaggtgatttaccatagtatgattgtgtagtgctagcttgcttatctatgtatacttggagcatgttctgtaatctgtaggaaccatttttttccctgaaagaaactacagcaaccatttaggtcgcttgaacgttattgtcaaaaacat

SEQ ID NO: 63848 - DNA, 276 bp, Zea mays
atttgtcctcaaaattttcacatcttttggagggagctgcatgattagtttattccaagatttagttcatatagccttttatatcttgtgtatatgcagggagtacgaaaaaacagcctttcacatttaggccttgttcggttagcttccaatccacatggattgagtgggattgggtgggtttaaatcccaactaagtcaaactctttcttaattttttccaatctcatccaattcatgggtaacgggattaaccgaacaatgccttaagtgata

SEQ ID NO: 63849 - DNA, 283 bp, Zea mays
ctttatgtgaccttgtttcatataactccaagcactgtgatgcaaatggagaaggtggtcgtgatgggtgcaatgacaactagagctggaactgtggcattgaaggagaaacaaatgatttgaatgtgctaagtcttcgttcaaggcaaatgaagaacttccatgtggcattaatgatttcccaaggtactccaatgatgctgatgggagatgaatagggtcacacacgttatggaaacaacaatagctatggacatgatactcacataaataattttcagtg

SEQ ID NO: 63850 - DNA, 283 bp, Zea mays
tggtctacaccaacgatcagggggaggtcgtcaaaggagtctgctcgaacttgctctgtgacttgaagccaggcgctgaggtgaagatcacagggccagtgggcaaggagatgctcatgcccaaagaccccaacgcaacaatcatcatgctcgcaacgggtaccggcatcgctccgttccgctccttcttgtggaagatgttcttcgaggagcacgaggactacaagtacaccgggctggcgtggctgttcctgggcgtcccgaccagcgacaccctgctgta

SEQ ID NO: 63851 - DNA, 286 bp, Zea mays
agatgggctactccatctacgggctatgggcgcccaactcgctgcctacgctgtactacgccgtcgtcccttcgctgtgcctgctcaagggcacccctctgttccctgagctcacgagtccgtggatcgcgcctttcgtctacgtcgcggtcgccaagaacgtctacagcgcgtgggaggcgctgtggtgcggagacacgctgagagggtggtggaacgggcagaggatgtggctggtccggagaacgacctcgtacctctacggcttcgtcgacaccgtcaggga

SEQ ID NO: 63852 - DNA, 187 bp, Zea mays
cggaaggaaaaacaggttattgcatcgctcatggtggaggctgccgctgccaacatcctggctgtcctaaagctgcccggggtaagtctgggcggtgcatcaagcacggtggtgggaagagcggctcggttaaaggttgcatcaggagcgctgaggggaaggctgggctgtgcatttctcatggcgg

SEQ ID NO: 63853 - DNA, 280 bp, Zea mays
ctttatgtgaccttgtttcatataactccaagcacaatgatgcaaatggagaaggtggtcgtgatgggtgcaatgacaactacagctggaactgtggcattgaaggagaaacaaatgatttgaatgtgctaagtcttcgttcaaggcaaatgaagaacttccatgtggcattaatgatttcccagggtactccaatgatgctgatgggagatgaatatggtcacacacgttatggaaacaacaatagctatggacatgatactcacataaataattttca

SEQ ID NO: 63854 - DNA, 284 bp, Zea mays
ctagcatcttattcaaagggaaacagcaaacacatacatgtctggcatgggaatcatcaccaccattacagacagactgtaagagctgagcatgcagttgaagatagctcccaacctagtcatgcttctgaagggaagtcgcatccaaaagggagtgttctggcaccgatggctggcttggttgtgaaagttttgcttgaagacggggctcaggtggacgcagggcagcctgtcatggttatggaagcaatgaagatggagcatgttgtgaaggcgcctcgtgc

SEQ ID NO: 63855 - DNA, 280 bp, Zea mays
cttccgggaggttgccatcaaaggtttctgggacatgtatgacccagagggctactctctgtggttctgtgactacaagtacaatgacgagaacaccgtctcctttgtgaccctgaacaaggttggtggattcctgcagcggatggacctgtgccgcaagtacgcctttggcaagatgctcgtggtaggttctgagccacccttcaagctgaagggcctttggctcttccgtggccaggaggttcccaagtttgtaatggatgaggtctatgacatggag

SEQ ID NO: 63856 - DNA, 184 bp, Zea mays
gtgaaggcgaagatccaggacaaagagggcatccccccagaccagcagcgtctgatcttcgctggcaagcagctggaggatggccgcaccctagcagactacaacatccagaaggagagcactctccacctggcgctccgcctccgcggtggtcagtaagccatgggtcatttaagctgctgct

SEQ ID NO: 63857 - DNA, 287 bp, Zea mays
actgcattggctcttggaagagcaggctgcaaggtcttggtatattatgctcgatcttcaaaggaggctgaagaagtctccaaggagattgaagcatttggaggccaggccattacctttggaggagatgtttccaaagaggctgatgttgaatctatgataaaagtggctgatgatacatggggaacgattgatgtactagtaaataatgcaggaatcacacgggacacattgttgatgagaatgaagaaatcacagtggcaagatgtgattgatttgaatcttac

SEQ ID NO: 63858 - DNA, 278 bp, Zea mays
gcgaccgctacgctactgagctcctccttcgccatgcccgccgccgcccgtagggcctcctccccttcctccgcctcattgagcttcgccacgtcgcagctcgccggcctctccctcttcgccggcgttgcaactccaaccgccgtcgccctcctccccaagaggcagcagctccagcccattgtcgcgcggcgtgtgtgcccgttcacggacaagaagacgaaccgggcgaacaaggtgtcgttttccaaccacaagacgaagaagcagcagttcgt

SEQ ID NO: 63859 - DNA, 268 bp, Zea mays
ctaaacttagctctggaccttagttttcaaaactgcggtattataaactacggtattgttataactaaagtatagtatagtatttcaaaaactgtagttttcaaaaactttgttcccaaacagggccttatgtgcacaagagacgctgattaaacatgtaacgtaccattagccttggtacaggataggaacagtaagctctggttctatcttgtactcttaaaatatgttcataaggtggcatatggtcatggtaaatgttaaggcg

SEQ ID NO: 63860 - DNA, 290 bp, Zea mays
ggaacatcgaggacattgtaagtgaattatgtgctgagacgggagccaaccaggaggatgccctcgcgcgaattgaaaagctttcagaagtaaacccgatgcttggcttccgtgggtgcaggcttggtatatcgtaccctgaattgacagagatgcaagcccgggccatttttgaagctgctatagcaatgaccaaccagggtgttcaagtgttcccagagataatggttcctcttgttggaacaccacaggaactggggcatcaagtgactcttatccgccaagttgct

SEQ ID NO: 63861 - DNA, 288 bp, Zea mays
ttcgactctcacgcgactagggttctgtgcgtccacttccccgtcggcgcaatggaggtcgggggtcaagaagtgaagccaggagccacggtttcttgcaaagttggtgatggcttggttatccacctttcacaggctgcactgggggaatcaaagaaagcgagtgagaatgccattttgtctgttaatattgatgataagaaactagtgcttggaaccttatcagttgagaagcatcctcagatctcttgtgatcttgtatttgataaggattttgagctaccacac

SEQ ID NO: 63862 - DNA, 288 bp, Zea mays
gttttattggtgcatccgtgacaactatcatctctgcatttccgttagcaaatgtcatgggccgtttccaatggttgacatgccctagaaaggatctgtcaactgggtggctttattgtgatcctggtccaatgtttaagccagagcattactcattgggagagtcggtgccacattggttcccatggaaagatctagccattatgcctgtgcagtggcatgctttagccctaggtttatttgcgtcaataatagcaccattcggaggattttttgcgagtggcttca

SEQ ID NO: 63863 - DNA, 142 bp, Zea mays
gaagagctcagtgatttaccctttagaaaatactctaccgcgctagctctgatggcatggtcagctccataagcaccgaacaccaagcatatatcctccatgatgttcttccctgaagctgcatcagttgaagtccttgcca

SEQ ID NO: 63864 - DNA, 289 bp, Zea mays
cttcatcaagctcgtctcttggtacgacaacgagtggggctacagtaaccgcgtcgtcgtcctgatccgccacatgttcaagacccagtagagagagatatttctgcctccctatcgtgggtcgtcaccaatggcctttggtcgcagacatctttgctgcttgtctatgctgagaataaatgtgaacggtgcccctggacgctggatccatgctggttttggacacgttgtctttttgtgtttagacttatctgctaccgtcctgtaacgaattcactaagttctagtt

SEQ ID NO: 63865 - DNA, 290 bp, Zea mays
cacaactgccccgtctgctttgagtatctgttcgactccacgaaggacatcaccgtgctgcaatgtgggcataccatccatttggagtgcatgaacgagatgagagcacaccatcacttctcatgcccagtgtgctcgaggtccgcctgcgacatgtcggccacatggcggaagctcgacgaggaggtcgcggccacgccgatgcctgacatctaccagaagcacatggtctggatcctgtgcaacgactgcagcgcgacctcgagcgtgcggttccacgtgctggggca

SEQ ID NO: 63866 - DNA, 136 bp, Zea mays
ttagaatgttaaatgagattggaagcatggaaaatattccagattccattgtaggagtgaagaacaggaagaggaagatgtccggttttgggcaccgtgtgtataaaaactatgaccctcgtgctaaagtcataag

SEQ ID NO: 63867 - DNA, 142 bp, Zea mays
ggggttctcggcaccgcagctggacaccagcacgccgtccccgatcttcggcggcacacgggcgggctgctacgcaaatcgcaggtggaggagtgctgcgtcatcacgtggacgtcccccaaagagcatgtgtgcgagatgc

SEQ ID NO: 63868 - DNA, 284 bp, Zea mays
gggacaaggaaacggtagaggcctcggtgaagtccaccgggaagctcctcgttagccacgaggctccagtcaccgggggcttcggcgcggagatcgccgcgtccattgccgagcgctgcttccagaggttagaagcacccgtggcgagagtctgcggtctcgacacccctttccctctcgtgtacgagccattttacatgcccaccaagaacaaggtcctggacgcgatacaagccactgtagatttctgaaacatgttgcttgatcgatacagagtactctag

SEQ ID NO: 63869 - DNA, 284 bp, Zea mays
  unsure (1)..(284): unsure at all n locations
cgctgcttgtcacttggatatttgcggatgcggagtgaagttaccatggcatccttgctaagaataagaaagtactgtggttatgaggagatgtgtaattttgtggcgatattatttgcaacaatgatgtatatatgggcatgtttggttcacggctaactgtgacacactttgcctaaggttagtcgttctcattgaagaactaaccttnagcagaaaaagttaggcaaagtgtggaaatttatgcagcaaaccaaataggcctatagttttactgctagtta

SEQ ID NO: 63870 - DNA, 285 bp, Zea mays
cgattgctaaatctggcacttcaggtactgccttttcatctttccagctgatttttgcactcataatatttgtttatgagtgcaggtacaggagctgctcgagtctcttgtcgaagctgatacgagaaggcaggaaagagctaagaagatgttagataagaaagtgtatctgcaactatacgaagcaatggaggcgttcgtcaagatcaatctggagaccaacaagatcatggacttcatcaagtttgacgtcggcaacgtggtcatggtgactggcgggaggaa

SEQ ID NO: 63871 - DNA, 106 bp, Zea mays
cttatttatgagctaccactagcagagatggttggcgatttcttagatcaactgatatcacgagtaaaggatatgctagcatggaatattcagttgttgggtacag

SEQ ID NO: 63872 - DNA, 94 bp, Zea mays
agccgcgggaagggtatctcatcgtcggcgcttccctacaagaggacgcctcctacctggctcaagactgctgactccgacgtggaggatatga

SEQ ID NO: 63873 - DNA, 279 bp, Zea mays
gcatcctcaagcttctcgaatctcaccttgtgccgtcttccaccgctcccgagtccaaggtcttctatctcaagatgaagggtgactactacagataccttgctgagttcaagactggagctgagagaaaggacgctgctgagaacaccatggtggcatacaaggctgcccaggacattgctttggctgagcttgctccaactcaccctattaggcttggactggcactcaacttctcagtgttctactatgagattctcaactcacccgatcgcgcct

SEQ ID NO: 63874 - DNA, 275 bp, Zea mays
gcaggaagctttatacattctatcctacgcttgggggaatgatgatacagttcaggagagcctcggtatccgcaaggggacaattggagcatggaaacgatacagccatgcattgccttacaattatgatatccagagtgtagtggattaccattcaaggctagccacaaaaggatacagggcgctgatatacagagcggcgaccacgatgctgttgtaccccatgttggcacacaagcatggattagatacctcaacttgacgatcgttgatga

SEQ ID NO: 63875 - DNA, 277 bp, Zea mays
cttccgggaggttgccatcaaaggtttctgggacatgtatgacccagagggctactctctgtggttctgtgactacaagtacaatgacgagaacaccgtctcctttgtgaccctgaacaaggttggtggattcctgcagcggatggacctgtgccgcaagtacgcctttggcaagatgctcgtggtaggttctgagccacccttcaagctgaagggcctttggctcttccgtggccaggaggttcccaagtttgtaatggatgaggtctatgacatg

SEQ ID NO: 63876 - DNA, 279 bp, Zea mays
cccaacattgacaagcttggtaggatatgcctcgacattctcaaggacaaatggagcccagcacttcagattcgaacagttcttttgagtatacaggctctactgagtgcaccaaatccagatgaccctctctccgataacattgcaaagcactggaaatccaatgaggtagaagctgttgaaacagccaaggagtggactcgcctgtatgcgagcggtgcatgagagcgcagtgctgttctttgtgtaataaccccatcatacttcagtcctaatccg

SEQ ID NO: 63877 - DNA, 275 bp, Zea mays
  unsure (1)..(275): unsure at all n locations
gttcatccaatgtatatttctccactattaaattacattggatgaacagaaagcgtgtgagaagattctaacaggctttctgttcatccaatgtatatttctccactcttanattacaaaattagcttagtgtgatacaattgcttgcttattgcaggttgcaattttcaataccgaacttagcgacgagaatttcaaggcagctatgtctattcctacaacccttggccttgatccaactgttgcaaactcagtgcatcaagttataaatagaa

SEQ ID NO: 63878 - DNA, 277 bp, Zea mays
ctccactcgctccccccccgcctccactaccccactcccaggcgccgcacaggtacgtcgccggcggcgatgacgacgcgcttcaagaagaaccgcaagaagcgcggccacgtgtccggcggggacgccgcatcggcaagcacaggaagcatcccggagtcgcggtaagccggtggcatgcaccaccaccgcatcctcttcgacaagtaccatcccggctacttcggtaaggtcggcatgcgctacttccacaagctccgcaacaagttctactgcc

SEQ ID NO: 63879 - DNA, 278 bp, Zea mays
ctctgccttgcctgtgcatcttctggtggaagaatatccatcttgacgatgcaagctgacgggggttgggatactgcaaccattgagcgagcacatcctgtcggtgcgactgccatatcctgggtacctgcaacagcgtcactagctggtgcaggggagcttgtttacaagcttgtctcaggagggtttgactctgttgttaaggtctggggattcaacaatggtagttggaagctggagagtgctcttatctctgacatgcacacagattgtgtgag

SEQ ID NO: 63880 - DNA, 275 bp, Zea mays
ggtatctattggggagtgaacaagtttgttattgataactcatctgtgcccgtggttgagcggaaaaagaaggacaagccaaagctcagcatgggtgagagcatgaaggttctgttgtcatctcggtatgtgagggatcttgctacattggttgttgcttatggaataagcattaaccttgtcgaggtgacatggaaatcaaaactgaaagcacagttcccaagcccgaatgaatattcttcattcatgggcgatttctcaactgccaccggcat

SEQ ID NO: 63881 - DNA, 272 bp, Zea mays
  unsure (1)..(272): unsure at all n locations
gcacactacaaatctggagtgtacaagcacatcaccggtggcattatgggtggccatgccgtcaagttgattggatggggaaccagtgatgctggagaagattactggcttctggcaaatcagtggaatagaggctggggcgatgatggatacttcaagatcataaggggcaaaaatgaatgtggcatcgatgagggcgctgttgctggaatgccatccacaaagaatatggttccaaacttcggcggtgcgttnggaagagctatagttta

SEQ ID NO: 63882 - DNA, 279 bp, Zea mays
tggaaagatggtctaataaaacactagagatatcgaacttaagatgttcatctaagaccagcctatatatcctggtagagaatatgggtcgtgtaaattatgggccatatatttttgaccggaaggtagtactatctcctattcaaatagatggcattactctccggtcactggaatatgtatccactggcactcaattcactggatatcctgccaaaacttcaactaatcactcaaataccttatgctggagccagtatattgtccattcatggcgac

SEQ ID NO: 63883 - DNA, 274 bp, Zea mays
agaccttgaggctctactcgcctgctctcttcatgcaaaggaagaccctggccgacatgaccgtggggccaataaaactgcccaaaggcactgcaattgtgatacccattccgatcatgcatcgagacaagcaggcatggggcgacgacgcagacgagttcagtccgatgagatttgcgaatgggatcacgggagcagcgatagttcctcacggcctgctggcgttctcgatggtgccaaggtcttgcatcggtcagaacttgtcgatgctgga

SEQ ID NO: 63884 - DNA, 248 bp, Zea mays
cggcgtttcggctggtgaacaaggcgaccggggaggccatcaagcactcgctggggcagtcccacccggtgcgcctggtgccctacaacccggacttcctggacgagtcggtgctgtggacggagatccgcgacgtcggcaacggcttccgctgcgtccgcatggtcaacaacatctagctcaacttcgatatcctccacgggtacaagtggcacggcggcgtcagtgacgtcatctaattcgtgctc

SEQ ID NO: 63885 - DNA, 276 bp, Zea mays
  unsure (1)..(276): unsure at all n locations
gacgtgatcgtgtttggcaggggctcaaggagtgcatcctcagtagtctcctttccgtcgacggcctcaaggttgtgcatatggacagttacgactactatggaggagattccacctcgctcaaccttaatcagctctggaagaggtttagaggggaagacaagcccccagcacatctaggtgcaagcagagactacaatttgganctggtgccaaagtttatgatggcaaatgggacattggttcgaaccctcatccacactgatgtgacaaagt

SEQ ID NO: 63886 - DNA, 271 bp, Zea mays
cttccgggaggttgccatcaaaggtttctgggacatgtatgagccatagggctactctctgtggttctgtgactacaagtacaatgacgagaacaccgtctcctttgtgaccctgaacaaggttggtggattcctgcagcgtatggacctgtgccgcgagtacgcctttggcaagatactcgtggtaggttctgagccacccttcaagctgaagggcctttggctcttccgtggccaggaggttcgcaagtttgtaatggcatgagtctat

SEQ ID NO: 63887 - DNA, 273 bp, Zea mays
attattcttggataatctgttgagccagacaccggatcagcaacagactctggctgcaattggagaggacttatttgctatagcacaagatcaaccttttcggtttccaaccatatgtacatttgttatatgggcattctctactcttgaagtaatgggatacatattagatccagaattgtcgattgtcgaagttgcagcaccatatgctcaagaactgtttcacttgatacagagacgacaaactggacctcaattggtccaggaaataag

SEQ ID NO: 63888 - DNA, 274 bp, Zea mays
gcttcgcctggggctgctgcccgctcgagggcgccacctgctgcgacgaccactacagctgctgcccccatgactaccccgtctgcaacgtcaagcagggaacctgcctcatgggcaaggacagcccactgtcactgtcagtgacggctacgaagcgcaccctggccaagccgcactgggctttccctggcaacacagctgctgacggcatgaagagcagcgcatgagaaaaacgcagcatggcattaggccgccaacagccagcatcattaga

SEQ ID NO: 63889 - DNA, 271 bp, Zea mays
atggatattatggttatggcaacgagagtcaggatggaacaatcgagttaaacagaggtcctagatctggccgtttcaagaaccagaaattgtacggccatactgtcactattgctgtgaaagggcagagccttccttctggtgaaagcaaggatgatagtgccgtgcctgatagagcacagttcaatagagacgatttccctgttcagtatgatgctgcaaagttctttgtcattaaatcgtacagtgaggatgacatccacaagagtgt

SEQ ID NO: 63890 - DNA, 277 bp, Zea mays
tatgcatgatatatgctgtaggggaagcctgcgaagatcggagagtggggtggatacgccggcgatcgtcgggatctgagggctactccggaccggctgaccgaggtgaaggtcacggcggacaacagcagctgcatccgctccatctccttcatctacatcggagccgatggcaagccgtacgaggaggggccatggggtttcggccatgctggcacggagtacaagattgatctgtgcaggttcgacgagagcttgacggagatctccgggacca

SEQ ID NO: 63891 - DNA, 268 bp, Zea mays
ctgctggtgtgcttcggttggttttccatgatgcagggacttttgaaattggggacggatcaggtggcatgaatggctctataatttttgaagttgacaggcctgaaaacattggcctaaatagatccataaagatactaagaaaagcaaaagaaggaatcgacaacgttcagaaagtgtcgtgggcggatctgattgccgtggctggcgctgaggcagttgcgctctgtggcgggcctgagattccagtaaggctaggaagagtaga

SEQ ID NO: 63892 - DNA, 255 bp, Zea mays
  unsure (1)..(255): unsure at all n locations
tgctcgatggcacgctgcccggcgactatggcttcgacccgctgggcctctcggacccggagggcaccgggggcttcatcgagcccaagtggctggcctatggcgaggtgatcaacggccgctacgccatgctgggcgcggtgggcgccatcggcccggagatcttcggcgagatgggcggcantcccccggagaccgcgctgccgtagttccagaccggcgtcatctcgtccgcgggggctacaactactgggc

SEQ ID NO: 63893 - DNA, 298 bp, Zea mays
gcaaaaacgtgcaactggcgaggagtatcatgagcttatggaagagttcatggctgctgttaagcaaatctatggcgagatagtcctcattcagtttgaggacttcgcgaatcataatgcttttaatttgcttgcaaaatatagcaagagccatctgtgttcaatgatgacatccagggcacagcatcagtggtccttgcaggtttgttagcggcactcaaggtggttggtgggaccttggcagagcacacttatttattccttggtgctggggaggctggaactggtattgcagaat

SEQ ID NO: 63894 - DNA, 291 bp, Zea mays
cgatggcaagccgtacgaggaggggccatggggtttcggccatgctggcacggagtacaagattgatctgtgcaggttcgacgagagcttgacggagatctccgggaccacgggcccagcctacaacattgacaatctggtcaagtctctcaaatttgtcaccaacaaacgtacttacggaccgtacggcagggacgagggcaccccgttccgtgtcaaggtgatgaacaacggccacgtcgctggcttctttggccgctctggagattgcctggacgcgatcgggctcta

SEQ ID NO: 63895 - DNA, 286 bp, Zea mays
ggggccatggggtttcggccatgctggcacggagtacaagattgatctgtgcaggttcgacgagagcttgacggagatctccgggaccacgggcccagcctacaacattgacaatctggtcaagtctctcaaattcgtcaccaacaaagcgcttacggaccgtacggcagggacgagggcaccccgttccgtgtcaaggtgatgaacaacggccacgtcgctggcttctttggccgctctggagattgcctggacgcgatcgggctctacgtgaaccccaactaat

SEQ ID NO: 63896 - DNA, 290 bp, Zea mays
cgccaacacctcgacgcgatcgactccattgatcgtacctcgtcgtccggttgtcgatggccaggacatctttcaaaatggagtacgacctcgagaaaaggcagtccgaatctgccaggatcagggataagtatcccgacagaattcctgtgattgttgagaaagctggcaaaactgaggtccccgagattgataagaagaagtaccttgtccctgctgatctcactgtcggccagtttgtctatgtggtgaggaagagaatcaagctgagcccagagaaggccatcttt

SEQ ID NO: 63897 - DNA, 275 bp, Zea mays
gtgacttgaaaccaggcgccgatgtgaagatcacaggaccagtgggcaaggagatgctcatgcccaaagaccccaatgcaacagtcatcatgctcgcaacggggaccggtattgctccgttccgctccttcttgtggaagatgttcctgaggagcacgaggactacaagttcagcggcctcgcgtggctgttcttgggagtcgcgacgagcgacacctgctgtacaaagaggagctggagaagatgaaggagatggcgccgggcaacttccggct

SEQ ID NO: 63898 - DNA, 281 bp, Zea mays
gatcatcttcaccaacgtcggcaacccgcacgccctcggccagaagccgctcaccttcccgcgccaggtggtggcgctgtgccaggctccgttcctcctcgatgaccccaatgtcggcctcatgttcccgcccgatgccatcgtgcgggccaagcgctatctcgccatggcgccgggaggtctaggtgcgtacagtgatgcccgtggtatccccggaatcaggaaggaagttgctgacttcatccacaagcgtgatggatatccgagtgatccagaactca

SEQ ID NO: 63899 - DNA, 280 bp, Zea mays
aacaaaccctagcccgctacccctgccccttctctcttcgtcgcgcctccgcctccgccgtcgtagcatcctcctccgccacctcggccatggcgacatccccagcgctcctcttcccttctccctcctcggcatcctctgcgcctcgtcggcgcgggtggaggcagtggtgcttttcaacgtctgcgacagctacgtgcggcgcccggaccaggcggaccgcgtcatcggcaccctcctcggttccctcctctccgacggcaccgtccacgtccgcaac

SEQ ID NO: 63900 - DNA, 286 bp, Zea mays
cagacaggtgtgttaggtttcacttaaggtggggatgcagagaggttctctatgagaaatcacctgatggagagacctatgttaagggccttctactcaccaaggctacaagtagagagattatcaaagctgatgcatacgtcgcagctgtgcatgttccgggtatcaaaagattacttccatcagaatggagggaatgggaaatgtttgacaatatctacaagttagatggtgtccctgttgtcactgtccagctccgctacaacggatgggtcactgaacttca

SEQ ID NO: 63901 - DNA, 282 bp, Zea mays
cgggccgcgaatcaagagttgtaactgctcttacactactgaagtcacacctcttcaagtctcaaggccatgtcagtgctgcccttgttcttggtggagtggattgtactgggccacatttacacactgtttatccacacgggtccatgatactcttccttttgccaccatgggctctggttctcttcctgcaatgtcagtgtttgaatcgaagtacaaagaaggccttactagggaggagggaatacagattgtgtgcgaacaatctgtgctggtattttc

SEQ ID NO: 63902 - DNA, 275 bp, Zea mays
accgccgtcacgccatctcgccgggggcggaaccccgaccgcgagtatggggaacatcttcgtgaagaagcccaagatcactgacgtcgatagggccatcctcaccctcaagacgcagcgccgcaagcttgcccagtttcaacagcagcttgagaaggtaatcgaagcagaaaaggaagctgcacggcagttggttcaacagaagaagagagacagagctttgattgctctgaagaagaagaaagctcaggaagagctgttgaaacaagttgaca

SEQ ID NO: 63903 - DNA, 276 bp, Zea mays
tcgctgtcttcatgcacgatgacatcgcgcataacccgggcaaatccgaggcctggtgtcaacataaatcatccccagggtggcgacgtccatgccggggggccaaaggattacactgggcgagaaggcaacgtcgacaatttcttcgctgatccgtctggcaacaaaactgctctccagggtgggagcggcaaggtttgtggcaatgggccccatgaccataatattgttttctacagtgaccatggggttctggcgtcttggaatgctacgtat

SEQ ID NO: 63904 - DNA, 287 bp, Zea mays
gtgtggaagttcatccgttggatttcaccactaactgtggtaagatcaggttctactgctgggataccgcaggcaagagaagtttggtggcctcagggatggatactatatccatggccagtgtgcgatcatcatgtttgatgtaacctaaggcttacttacaagaatgttcctacgtggcatagggacctgtgcagggtctgtgaaaacatccccattgtcctctgcggtaataaggttgatgtgaagaacaggcaggtcaaagccaagcaggttactttccacag

SEQ ID NO: 63905 - DNA, 283 bp, Zea mays
gtcagaggacggcagccttgtgagcatgccaccatgggttaatccgtggcttcttctggccatgtcggtttctttcgggctgcatttcttgatcctctacgtgcctttcctcgctcaagtgtttgggatcgtgcccctcagtttgacgaatggctcttggtggtggcagtggccttccccgttgtgctgatcgacgaggttctcaaatttgtggggcggtgcctgacagcgcgtgcccggaaacaatcagggaagaggaaggcagagtagatgctagtgatca

SEQ ID NO: 63906 - DNA, 283 bp, Zea mays
tcggcgtcaagaggctccaggacatcggcatgatcagcgccgtgccggggatgaaggcgctcgacatgaacaccgccgaggacgagatcgtgcgcctcacgcgcgaggtcgttcccggcatgatcgtcaccggaatggaggtcgcgagattgacggcgcccccaggatgggcccgacgtttggcgccatgatgatctccggccagaaggcggcgcacctggcgctcaaggccctgggcaagttcaacgccgtggacgggaccatgtcgccgccgttgcgcgag

SEQ ID NO: 63907 - DNA, 280 bp, Zea mays
caggacgacttcttgccccggacggctactcctcttgaagacattttcaagtcgatcctctgcttgccttgcctcctaggtttgagatgtttgagggatacatgtatacctgaagacgctatgcttaaggatccaaggaggctttatgcaccaggccggatttatcacatagtcgaaagaagaacgtgcaggtgcggaagatatccaccggtagtcaaaacagctgtgccggtggatggtagatttgagcacatagttctttcctgcaatgccacagcgg

SEQ ID NO: 63908 - DNA, 280 bp, Zea mays
gtgctaccgatggaatgctcgtcgatggtgaagcttgtactttgccacagcttgagcttctggaagtgaccgctcgggctgtccatcttatcatcgaatggggagattcaggtttatcagttgcagatggtctttcaaatctctgaagtgccgtctatcaaccaccatccgctgcctttctcacccaagtgcacacgtgcgcgcactcagcatgtctgtcctccgcgacatcctgagcaacggatccgtgaaccccaacaagacaatccaaggggaacag

SEQ ID NO: 63909 - DNA, 283 bp, Zea mays
cgcgagaacttgagccgccccaaggccgaggtcgactacatgatgggcttgtccgagtggctgataggcgacaacatcgacaagctctcgaggcaggggatccgactgcaggtgatcggcgacgcgcgaagatgccagcctctctcggacgcaggtcgcaggccgacgaggccacgaggcaaaactcgcagctgcacgtgatgctggccatctgctacagcgggcgatgggacatggtccaggcgtgccgggagctggcccgggaggcgctagcgaaccggct

SEQ ID NO: 63910 - DNA, 277 bp, Zea mays
cgtgggtggttcaaaggtgtcatccaagatcggggttattgagtccctgttggagaagtgtgatatccttctcttgggtggtggtatgatcttcacgttttacaaggcacaaggtctccctgtttgtgcttcattggtacaggaagacaaactcgagcttgcgacgtctctccttgcaaaggctaaggaaaagggcgtctcccttatgctgccaactgatgttgtcattgctgacaagtttgcccctgatgctaacagccagattgttccagcatct

SEQ ID NO: 63911 - DNA, 273 bp, Zea mays
gacaaaggtgcttttgggtacggatcatacttctgtttgtctctgatggacaagttgtaccacccggacatgactgttgaggaagcagtagatcttgttgacaagtgcatcaaggagattccgctgcgattggttgtcggcctcagaactttgttatcaagattgtcgacaaggacggggcgagggagtacgccaggcgtgaactcgtcggtgacaatgcacctgctgaagctgcaaccgcagttgttgctgcctgaggcatgaactcgtttg

SEQ ID NO: 63912 - DNA, 283 bp, Zea mays
ctaagacgaagacgataaaggagactacttctgaatgggaacttctgaatgatatgaaggctgtatggcttcgcagcccgaaggaggttactgatgaggaatactcgaagttttaccactcactagccaaggacttcggtgatgacaagcctatgggttggagccacttcactgctgaaggagatgttgagttcaaagctttgctcttcattccaccgaagctccgcatgatctctatgagagttactacaacagcaacaagtcaaacctcaagttgtatgtt

SEQ ID NO: 63913 - DNA, 275 bp, Zea mays
gatttctgtgtgagaaactactcacctgtccctacaatcaataacagcattaagatggaagtaggaattgaggattgcttacatattgagtttgaatacagcaaaagcaagtaccatctcaatgatgtgattattgggagatatatttccttcttgtcagaataaagataaaaaatatggaactggaaattaggcgtagggaatcaacaggatcaggctctaacacatatgttgaaactgagactcttgcaaagtttgagttgatggatggtgct

SEQ ID NO: 63914 - DNA, 271 bp, Zea mays
caattgacctggtggaaaagatgctgacttttgatcctagacagagaataactgttgaaggcgcacttgcacacccttacttggcatcacttcatgacataagtgatgagccaggctgctcaatgcccttcagctttgacttcgagcagcatgcattgtctgaagaacaaatgaaggatcttatctaccaagaggctcttgcattcaaccctgattatcagtagccaaagttcaatttcagccggagattggcttcattgacatggagatt

SEQ ID NO: 63915 - DNA, 274 bp, Zea mays
gttctgaatatgaaggcaatgggaataaatgaccttttgtcatttgacttcatggaccctccagcatctcaagcactcatatcggctatggaacaactgtacagtcttggtgccttagatgaagagggtcttcttacaggcttgggagaaaaatggctgaatttccccaagaaccacctctttctaagatgctccttgctagtgtagaccttggatgcagtgatgaaatactgacaatcattgcaatgattcaaactgggaacatattctatcg

SEQ ID NO: 63916 - DNA, 274 bp, Zea mays
gaggtcttgcgtgacaggcctgctggtcatgattgggagcttgaacctggagtcacgtgtggtgactatttgtttgggatgttgcagggaacccgttctgctctttatgcaaatgaccgggagtctatctctgttacgtgcaagaggtaactcctagagctgttggagcactgatttcactttatgaacgtgctgtggggatttatgcttctttggtaaatatcaatgcctatcatcagcctggtgttgaggctgggaaaaaggcagcaggaga

SEQ ID NO: 63917 - DNA, 277 bp, Zea mays
cggcaagaaggtcatggccgtccgcatcatgaagcacaccctggagatcatccacctgctcactgacgccaatcccatccaggtggtcgtggacgccattatcaacagtggaccacgtgaggatgccacccgtattggtctgctggtgttgtgagaaggcaggctgtggatatctcacccctgagaagggtgaaccaggccatctacctcctcaccactggtgccagggagagcgctttcaggaacatcaaaaccattgctgagtgccttgcagatg

SEQ ID NO: 63918 - DNA, 274 bp, Zea mays
tcatgattggggaggacaggttaattcatttctctggggtcgcgatggggcaggcttgcaccattgtcttaaggggggctagtgagcatgtgcttgatgaggcagagaggtccttgcatgatgccttgtgtgtgctgccccagacagtaaatcatacccgtgtcttgtttggaggcggttggcctgagatgctgatggctaaagaagtggatgaacttgcaaggaagacccctgggaagagatctcatgctatcgatgctttctcccacgctct

SEQ ID NO: 63919 - DNA, 272 bp, Zea mays
ctcccaccccgcagccgccctagcacccgcgacgagcaggatctgaccagttgctcttgcggtagttcccccaactgtcaccatgcagaacgaggagggtaagactgtggacctctatgtccccaagaagtgctcggcacaaacaggatcatcactgccaaggaccatgcctctgtccagatcaacattggccacttggatgcgaatggcctgtatgatggtcacttcacaacgtttgctctctctgggtttgtccgtgctcagggtgacgc

SEQ ID NO: 63920 - DNA, 266 bp, Zea mays
acatgaccccttcgaggtcctggaccagaggggagtgggcgagctggtgaagtttgctacagagagggtgcgcaaagctaggtctaacttgaaggtgggcatttgtggagaacacggtggagagccttcctctgtagcttcttcgcgaagctgggctggattacgtttcttgctcccctttcagggttccgattgctaggctagctgcagctcaggtgcttgtcctgagctgcctcctcattggcaaccggatttctgctgctggt

SEQ ID NO: 63921 - DNA, 283 bp, Zea mays
atcgagtcctttggtttctccagccaactgagggccgcaacctctggtcaggcgttcccccagtgtgtctttgaccattgggacatgatgggctcagatcctttggaggccggctcccaggctgctcagctggtgctggatatccgcaagaggaagggtctcaaggaacagatgacccctctttctgagtttgaggacaagctctaaaatttttggctgttggtgatactgtttcatctgccggtttaatcatcaattcgtctactgtaatagcagcgacttc

SEQ ID NO: 63922 - DNA, 286 bp, Zea mays
cggcggagtccggcgaggccgcccacggctgcagctgcggtggcaactgcaagtgcgacccctgcaactgcagatcacatcgatcgacgaccatggatatgattattatctatctagcttgtggtggtggttgagcaataataagcgaggccgaactggctgccatacataggtattgtgtggtgtgtgtgagagagagagaaacagagttcttcagtttgctatctctctctgcatgtttggcgtcagtctttgtgctcatgtacgtacgtgtgtctacctgcat

SEQ ID NO: 63923 - DNA, 137 bp, Zea mays
atcgagtcctttggtttctccagccaactgagggccgcaacctctggtcaggcgttcccccagtgtgtctttgaccattgggacatgatgggctcagatcctttggaggccggctcccaggctgctcagctggtgct

SEQ ID NO: 63924 - DNA, 278 bp, Zea mays
  unsure (1)..(278): unsure at all n locations
cacaaggttactggacgaagagatagagccaggcctttgacattcaggatggaatcaagtggtgcctggggttactcaggagcaaattctggtaatcctcgcattactgcaacttttgagggcccttgttatgcattgaacaaaatagagatagacacaaagttacccatttttggcgaccagaaatgggtcatatggatttgctctttcaacattccanatggcccagggaagactcgttctattgtctgtagcgctcgaaactttttccagttcac

SEQ ID NO: 63925 - DNA, 290 bp, Zea mays
gcaaagcagaggaagagtctggagagacaggacctatggtcaatgaagaagatatccagcacatagtatcttcatggactggcatccctgtggagaaggtttccagcgatgaatctgataagcttcttaagatggaagagactttgcacaagcgtgtcattggccaagatgaggctgtggtagcaattagtcgctccatccgccgtgctcgtgtgggtctcaagaaccccaacaggccaattgcaagctttatttttgctggtccaacggcgttgggaagtctgagcttg

SEQ ID NO: 63926 - DNA, 265 bp, Zea mays
aggatttgatggcggtaaaagcgccctcggcagggttaccttggttaattcctttggcaatattgtatatgatgaatatgttcgcgccgaggagcgaattgtggactaccggacatggattagtgggattagacctaagcacatgaacaaagccaaagaattctgggctgtgcagaaggaagtagctgagctgattaaaggaagaattcttgttggtcatgcactgcagcaatgactcaaggtgctgctactaagccacccaaag

SEQ ID NO: 63927 - DNA, 282 bp, Zea mays
cagggtttaaacgatcttctcatgtgttgcattgtacaaggccttgtatccgtaaactggttgtaccagtcttcgttgtctagtcttgatgcagatatcagaaaggcatgctactatcacgtgcaagaataaggctttctatctgactgatctcgggagtgaacatggtacctggattaccgacaatgaaggtagacgttaccgcgtgccaccaaacttcccggatcgtttccatcattccgatgtcattgactttagttccgataagaaggctatgttccg

SEQ ID NO: 63928 - DNA, 284 bp, Zea mays
cttgccccggttcctttccccggccccaactccattatttgcttgatccttgacgagcgggagagagagagagaggaagacgagaggcagcgaaggaaacagtagttcttcagttaggcaggagggcacaggaggaggaagatggcgtcgaagaggatccagaaggagctcaaggatcttcagaaggaccctcccacctcgtgcagtgcaggtcctgttggtgaagatatattccactggcaggcaacaataatgggtccatctgatagcccatattctggtgg

SEQ ID NO: 63929 - DNA, 280 bp, Zea mays
gccgcaaccccaatggcattctcggccttctatgtagggaacacttccctagactggttgagtacagtggagtgacagacccagcttacaccttcaaccactacatcgtcggcctcgatgcagtagaccaggacaacaggggattcaacaacaaggccgagcatgtgaagcaaaagttgtgggatttcttcagatatgaggttgtatacgaggccaaggcggatgtggtggacaccacgagctgtaagaagctcgtcgtggacatgcattaccgagtgcg

SEQ ID NO: 63930 - DNA, 285 bp, Zea mays
cctgacccgtggtttcggtcgcagggagggccggcgtgcccatggaggtcatgggtctcatgctcggcgagttcgtcgatgactacaccgtcagggtcgtcgacgtcttcgccatgccgcagagcgggactggggtcagcgtcgaggccgtcgaccacgtcttccagacaaacatgcttgacatgctcaagcagaccggcaggccagaaatggttgtaggctggtatcactcacatcctggcttcggttgctggctatcaggcgttgatatcaatactcagcaga

SEQ ID NO: 63931 - DNA, 288 bp, Zea mays
cccaaagtagtcagtcgtcatcgtctcttccgatcgcctcgagttcattacagttagcgccgctaatcccctccctaatcaccatccatccatccatccggtaggattccccagccatgtcggcgactgcggtgaagtttcccgtggaggcgcctccgaggacagtgaaggtcaccaacgtctctcttagtgcaaccgtgcaagacattaaggagttcttttccttttcaggagatattgaacatgtggagatgcagagtggtgatgagtggtctcaaattgcatatg

SEQ ID NO: 63932 - DNA, 277 bp, Zea mays
gggaagcatggccatgccaagtgccactttgttggcattgacgttttcactggaaagaagcttgaggatattgttccttcttctcacaactgtgatgttccccatgttgatcgcactgagtatcagctgattgacatcactgaagatggatttgtgagccttttgactgacagtggcaacactaaggatgacctcaggcttccgactgatgaagctctggaaggccagatcaagagcggatatgatgatggaaaggacctcctcctgacggtgatgt

SEQ ID NO: 63933 - DNA, 284 bp, Zea mays
ctcgcctgcgctccctcgccgccccagttccccaccccctgctcacccacccgtcccctcctgctcgcccatggctcccatcgctgtcggcgacgccctccccgacggccagctcgggtggttcgacgagaagacctaccccgagaacaagcacgtgaagttcctcgccgacggatctggagcgtacaccaaggcgctcgacctcgagctcgatctcacggacaaagggctgggcgtgcgctcgaagaggttcgctctcctggccgacgacctcacggtcaccg

SEQ ID NO: 63934 - DNA, 281 bp, Zea mays
cagcgctggaccatggtgtcacggccgtcggctacgggacagagaacggcaaggactactggatcggaagaactcatggggcagcagctggggcgagtccgggtacgtgaggatggagcgcaacatcaaggcgtccagcggcaagtgcggtatcgcggttgagccgtcatacccgttgaaggagggcgccaacccgccgaaccctggccccagcccgccgtccccgaccccggcgcccgccgtgtgcgacaactactactcgtgccctgacagcaccacct

SEQ ID NO: 63935 - DNA, 205 bp, Zea mays
taactcctcaccctccacagggctttgggattcaccccgaaatgactcactttcggtgaaattcacccgtttcggcgaggtcgtccgaatataccggccaaatgtttccattggatttcaattattagtcaactctagagttgaaacaaacatacaagttcttcattcaataatcaatatagaagtgcatatctgtttcctcttc

SEQ ID NO: 63936 - DNA, 280 bp, Zea mays
tttggctatagcgccccagagtttgcaatgtctggcatttatactgtaaagagcgatgtatacagttttggagtggtaatgttagagctattgacagggcggaagtcattagacagttccagagagaggtcagaacagtctcttgttagatgggctacccctcaatttcatgatattgatgcacttgctaggatggttgatccagcattaaacggaatgtacccagctaaatcactctctcgttttgcagacgtaattgcactctgcgttcagcctgagc

SEQ ID NO: 63937 - DNA, 275 bp, Zea mays
  unsure (1)..(275): unsure at all n locations
cggatcgcatggaacttgccgggacatggaggaaggtgatgccttacatggccatggtgtttcttcagttcggcttcgccggaatgttcctcatctccgtcgcgtccctgcggcagggaatgagccactatgtccttgttgtctaccggaacgtagtggcagccattgtcatggctccattcgcgctatggtttgagagganaacaaggcctaaaatgagcctaccggtgttcatcaagatccttgctttgggattactcgaacccgtgcttgac

SEQ ID NO: 63938 - DNA, 279 bp, Zea mays
cacaaattgacatctggtccagaaaaagaaaccaagtatgttatattaggagaaaagggcaaagttcagctgttgcgtgactcaaaggacagcattgaaatgactgcaactgaactgcagaagaaccctatcaactacacacaggttgccgtgctcgcggatgacatattgaaaaatgtggaatatgatgctctgagggttattttcaacaagttccaatctgtcatatcgtttaagcccacaatggtaacaatactttcccccgaggttgcagaaaaa

SEQ ID NO: 63939 - DNA, 286 bp, Zea mays
cagctatgaggaaggtgaacagtttgccaaggagcatggtctggtctttatggaggcatctgctaaaactgcacaaaacgttgaggaggcattcattaagaccgctggtacaatatacaagaaaatccaagatggcatatttgatgtatcaaatgagtccaacgggatcaaagttggctacgctgttcccaactcatctggaggtggtgctggctcgtcctctcaggctggtggctgctgcagttgagtggtggcagcaagtcatacaaatgcacaaggttctccc

SEQ ID NO: 63940 - DNA, 273 bp, Zea mays
ctgccttcgatcccttcgctgaggccaatgctggggactctggtgcggcagagggtcaaaggactacgtacacgtgcgcatccagcagcgtaatggtcgcaagagcctgactaccgtccagggattgaagaaggagttcagctacagcaagatcctcaaagatctcaagaaagagttctgctgcaatggtacagtggtccaggacccagaacttggacaggtcattcagctccagggtgatcagaggaagaacgtctcgaatttcctcgtcca

SEQ ID NO: 63941 - DNA, 274 bp, Zea mays
  unsure (1)..(274): unsure at all n locations
ccgcagagagtttgttccgtccaggcaaccanaaagcgttgccccgccgcgcagaggaagaagagagcagaggaggatggctcgtacgaagcagaccgcccgcaagtccacgggaggcaaggccccccgcaagcagctcgccaccaaggcggcgaggaagtcggcgccgacgaccggcggcgtgaagaagccccacaggtacaggcccggaaccgtggcgctgcgcgagatccgcaagtaccagaagagcacggagctgctgatccgcaagctg

SEQ ID NO: 63942 - DNA, 267 bp, Zea mays
gatagaactcctaaaagcagtggttctgccaagaggaaaaggataccatcccttgaagatgacatggtgataccttataaatccgataagctacaaaatgactcaatggttattgacatgggccctcctgctgattgggtgaaaataaatgttaggaaaaccaaagattgctatgaagtctatgcattggttcctggccttctgcgtgaagaggtacatgttcagtctgaccctgctggtcgtttgatagttactggagagcccgag

SEQ ID NO: 63943 - DNA, 282 bp, Zea mays
gttaagtgatcacgtgatgcggaagatcagagccaagtcattcccaagatgatgcagagagtgggcatctccgcaagacgatgtcgtcagtcggaccaacctaaagatggataatctgaacgagtgccaagacaaagtgtgacggaacctcccaagtcattaggcccgcctacagttgtccttgtccaacggacctcggacaaccctgtaaatgcacataatcacttgacaagttcgatatctgtatcctttacctttcccaagagtgtttcacccgtcacg

SEQ ID NO: 63944 - DNA, 280 bp, Zea mays
gctatctcaatcactgctaccagcaattgtagaacttgcagaggataggcactggagagtccggcttgcaataattgagtacatcccattgttggcgagtcaattaggtgttgggtttttcgatgacaagctgggggcgctctgcatgcaatggttggaagacaaggtcttttcaatcagagatgctgccgctaacaacttgaagcgccttgcagaagagtttggtccagagtgggcaatgcagcatataatccctcaggtgctggagaagatcaacaac

SEQ ID NO: 63945 - DNA, 275 bp, Zea mays
tacacacatacatagtttcttctactacacgacgacaaacatggggaagcctgcgaagatcggagagtggggtggatacgccggcgatcgtcgggatctgagggctactccggaccggctgatcgaggtgaaggtcacggcggacaacagcagctgcatccgctccatctccttcatctacatcggagccgatggcaaaccgtacgaggaggggccatggggtttcggccatgctggcacggagtacaagattgatctgtgcaggttcgacgaga

SEQ ID NO: 63946 - DNA, 269 bp, Zea mays
ggcgtatgacgtgccaacgccgcgtggtcctctctggattcttggggaggtcttcatgggagcttaccacacggtgttcgacttcggcaacgacaggattggcttcgcggaatctgcatgagtgtggagagcactctcatctttataaagacgataccctatgtgttagggatgtgtagtttattgtctatccactacatgccaacagtacgctgcaaataaatcggtggccaaaattgctgaaaccagaaacgtgaacagtactgctt

SEQ ID NO: 63947 - DNA, 275 bp, Zea mays
gccatcgccatggaggaggccaaggttgtggagtccaaggacgggacgatctcagttgcttcagcatttgctggtcatcaggaagctgtgcaagacagggaccacaaatttttatcaaaggcagtggaggaagcataccgaggagttgactgcggcgatggaggaccatttggtgcagttgttgtccataatgatgaagtaatagttagctgccataacatggttttgaagaacactgatccaactgcgcatgctgaagtaactgcgataagaga

SEQ ID NO: 63948 - DNA, 276 bp, Zea mays
gaacgagccgttacaggcaatgatgaaagaccagttcgcaaactatgttgtgcagaaggttctggagacatgtgatgaccagaaccgtgaattgattctttcccgtatcaaggtccacttgaatgcactgaaaaggtacacctatgggaagcatattgtgacacgtgttgagaagcttattgccgcaggagaacgtcgcattggcgcactaccctcctgctgagatggcaatggttaggtcacctgtacagcagaagatagcgaggcctagctttt

SEQ ID NO: 63949 - DNA, 270 bp, Zea mays
  unsure (1)..(270): unsure at all n locations
agaggaatggaaagcattactcgatgaggacttctatgaagataagaaaatccttctcaggggataccagagatcaatggtcaaatcaatgagcctggcagcaaaagttccacattttcattatcataangagataaattgtgattctcttgtgcaactaaaaaccacatttcaaaatgagaacaaggatcaaactatcaagcacactttccttccgttcctcataaagtcactttctatggcactgagtaaataccctatgttgaacag

SEQ ID NO: 63950 - DNA, 271 bp, Zea mays
attcacaaaagaaatcattgaggccatgtcttccttcaacgagaggcctatcatcttttcattgtcaaacccaacctcgcattctgaatgcactgatgaacaagcatatacctggagtcagggccgttcgatctttgccagtggcagtccatttgcccccgtggagtacgaaggaaagacttttgtgcctgggcagtcgaacaatgcctacattttccctggactcggcctcggtcttgtgatctctggggccgtccgtgtccacgaggac

SEQ ID NO: 63951 - DNA, 250 bp, Zea mays
gtgatcggtttcctgtactcggtgttccagttcgtcgcgctcgtcgagctcatgaggaggaacaagcatttgatcccccatcgcaagcgtggtctcttcgacttcaccatggaccaggtgctagcataccttctgatatcgtcgtcgtcgtccgcaaccgctcgagtgagcgacctgatcgacaactgggggagcgaccctttcccgacgatggcgaacggctccatcgccatatccttcatggcgttcg

SEQ ID NO: 63952 - DNA, 249 bp, Zea mays
ccaaatccgaagctgttcaactgactccggagccacccaaagtccggccactaaccgctgaggattacagaattgccattgggatcgagcggttccgttgccctgaagtcctcttccagccaggcatgattggaatcgaccaggccggcatcgatgagatggtcagcatctcactcaggagattaatggaggacgagtctgtgaaggagcgcctctgccagtcgatccttgtcactggcgggagctccc

SEQ ID NO: 63953 - DNA, 252 bp, Zea mays
cgcaaacatttcaatgttaaatcatccaaaccttgctgagctcgctggttactgctcagagcatggacaatgcttgctggcatatgaattctaccgaaacggttctcttcatgatttccttcatctgaaagatgaacacagcaagccattgtcttggaacaaccgtgtcaagattgcgcttggatctgcaagagcattagagtacctacatgagacttgttcaccctctgtggtccacaagaatttcaagtg

SEQ ID NO: 63954 - DNA, 245 bp, Zea mays
ggcgcactcgcagctgggccgcgcggggctcgacgtcgagtcctacggcacgggcacccacgtcaagctccccggcccctccctccacgagcccaacgtctacgacttcggcaccccctacggcgccatctacgacgacctccgccgcaaggaccccgaactgtacaagaggaatgggttgctgcctatgctgaagaggaacacctcggtgaagctggcgcctcagcggtggcaggacaatgccg

SEQ ID NO: 63955 - DNA, 244 bp, Zea mays
cagccctgaagcgttggtgatactcgctagtgcctccgaccttctacttcgtgctaccgatggaatgctcgtcgatggtgaagcttgtactttgccacagcttgagcttctggaagtgaccgctcgggctgtccatcttatcatcgaatggggagattcaggtttatcagttgcagatggtctttcaaatctgctgaagtgccgtctatcaaccaccatccgctgcctttctcacccaagtgca

SEQ ID NO: 63956 - DNA, 245 bp, Zea mays
gaccgtgttgttgaagccagagatgagctccacaggatgctgaacgaggatgagctacgtgatgctgtgctgcttgtttttgccaacaagcaagatcttcccaatgccatgaatgctgctgagattactgacaagcttggattacactccctgcgccagcgacactggtacatccagagcacttgtgccacaactggcgagggtctgtatgaaggcctggactggctgtccagcaacattgcgag

SEQ ID NO: 63957 - DNA, 247 bp, Zea mays
ctgaaacctgtggcaatgcgtggtataaaatcacatgcaatggttttggctgcatcgaatgaggaccacacgaaggttgagttggtggagccacccgaatctgctgccgtgggcgagcgtgttacctttgctgggtactcgggggagcctgaggcttccctcagtggcaagagcaagacgtgggagaagctggccgccgagctgcacagtaacggtgagctcgtggcgtgctacaaagatgtgccct

SEQ ID NO: 63958 - DNA, 245 bp, Zea mays
agctcccgaagacatcatatacttcatatatttactaccgcagcatagaagactgggagggtctttctaggaaggaatatgaagagaaaaaagaggtggtggccaatgagattataagaaggcttgaaaagaagttgtttcctggtcttcaagattcaatagtcctcaaagaggtaggctcaccaaaaacacaccgaagatttcttgctcgaaatgacggtacatatggaccaatgccgcggggt

SEQ ID NO: 63959 - DNA, 245 bp, Zea mays
ctaagcaaaaatgttttacgggggatatgcttaccatggcaactcgtttgagcaaacataccgttgttatccagcatcgttttttgataagccacacctggaaggcggtgataaagtaataatgccaccttctgcccttgatcgtcttgcttccttgcacatcgagtatcatatgctatttgagctgcacaatgatgcaacccagcggatttcacactgtggtgttttggagtttgttgcagaag

SEQ ID NO: 63960 - DNA, 245 bp, Zea mays
cgcccagtgaaaaaccagggccactgtggatcatgctggaccttcagcactactggtgcacttgaggctgcatatacccaggcaactggcaagcccatctctctctctgagcaacagcttattgactgtggttttgcattcaacaatttcggatgcaacggaggccttccatcccaggcctttgaatacatcaaatacaatggtggccttgacactgaggaatcttacccttaccaaggtgtcaa

SEQ ID NO: 63961 - DNA, 246 bp, Zea mays
ccgccggcggcatcctcctcccggaaacatccaagcagctgaatgctgctaaagtggtggctgttggccctggtgagcgcgacaaggcaggcaatctgatcccagttgctctgaaggaaggtgacactgttctcctgccagagtatggtggaactgaagttaagcttgcagctgataaagagtacctcctcttcagagagcacgacattttgggcacacttgtggactgattcagagcatcagcaa

SEQ ID NO: 63962 - DNA, 241 bp, Zea mays
ctcttcgtcagcaacgcttccgtgggtgttcgttctgaatccgaccgtgcactgagcggatcgtcgctgttcgggatgttcgctttgaaggaacgccccaagtggatgaagatcacctctctcgacgagctgaagacaatagtggggcacgtcatcgtgatgatcctgctggtgaagatgttcgagaggagcaagatggtgacaatcgccacggggctggacctcctcagctactcgatct

SEQ ID NO: 63963 - DNA, 249 bp, Zea mays
cggtcgagcgcacggcactgttcgagccgcagaggtggacgacggctgcgaggcggaagaggacgagcaggccgtcatcggcttcgccagcgtgttcttctggcttgccttcaacaccgtgctcatcgccatcctgtccgagtacgtggtcggcaccatcgagcctaactccaaatcctggggtttgtccgtcagcttcatcagcatcatacttctacccatcgtggggaacgccgcggagcacgccgg

SEQ ID NO: 63964 - DNA, 244 bp, Zea mays
gggacaattgctattgtggaggccatttctcctgagcttggtaaccgcgtgcaaagagtccgtgtgcagcttcctggtctaagccaggagcttcttcagaagttgagggagaagaacatcgattttgctgctcacagcaaccaggaagactctggttctcttctgttcaaccttattggaaatttggcattcccgcttatccttatcggtggtcagtttttactttcaagaagggcacagggtg

SEQ ID NO: 63965 - DNA, 241 bp, Zea mays
ctgaaacctgtggcaatgcgtggtataaaatcacatgcaatggttttggctgcatcgaatgaggaccacacgaaggttgagttggtggagccacccgaatctgctgccgtgggcgagcgtgttacctttgctgggtactcgggggagcctgaggcttccctcagtggcaagagcaagacgtgggagaagctggccgccgagctgcacagtaacggtgagctcgtggcgtgctacaaagatg

SEQ ID NO: 63966 - DNA, 240 bp, Zea mays
gtacaagattgatctgtgcaggttcgacgagagcttgacggagatctccgggaccacgggcccagcctacaacattgacaatctggtcaagtctctcaaattcgtcaccaacaaacgcgcttacggaccgtacggcagggacgagggcaccccgttccgtgtcaaggtgatgaacaacggccacgtcgctggcttctttggccgctctggagattgcctggacgcgatcgggctctacgt

SEQ ID NO: 63967 - DNA, 240 bp, Zea mays
gcggacatggcaagattctcaaggacttcaagaagggcttggtgcaaaacaaggacatagagaacctgagggcggaggtcgagaagttcgccacttcatttgacatgcctggcttcagggtgtctgacatgaagtacacagactagactgctgctgacttgggtgcaaaccgttgctcctgttacagtaacactggcaggctggtgcaatgcaaaccgttcttctgttacggtaatatta

SEQ ID NO: 63968 - DNA, 240 bp, Zea mays
gcgccgccgcctccgacatcgtcccttcgtccccacgagcaaccgataatccgctagcgttgagatgttggtttatcaggatctcctatctggcgacgagctcctgtcggattcattcacctacaaggagctcgagaacggcgtcctgtgggaggtcgagggaaagtgggtcacccaaggtcctgttgatgtggacattggtgccaatccatccgccgagggtggtgaggacgaaagcgt

SEQ ID NO: 63969 - DNA, 240 bp, Zea mays
attaaaaggaacctgttctagcatcggtgcttgcaggatgaagaacgagtgcacctcattcagaaatagatgtggagacgagaacgttgaaggttgtatgaggtccttccagaacctgaagagggagcatggagtcctcaggcagaagctggaatcctacttccagctgctgcgacaagccggtcctgccgtgactgcaaccaggcctagaggcatgtaaggaacggctgttggcgtgca

SEQ ID NO: 63970 - DNA, 243 bp, Zea mays
ggatatgcaagatgcgtgcaaactttttgagcccatctatgacgagactgatggggctgatgggtatgtctccgtagaggggtctcctaggttggctaatgacactcaatgtactgttgaagctgcaaagtggttacacaaagttgtcaaccgccccaatgtctacataaagatcccagctactgcagaatgtgttccttccatccaggaagttatccctaatggcattagcgtcaacgtcac

SEQ ID NO: 63971 - DNA, 236 bp, Zea mays
agtcaagaatggcatgggttaagaagcatgataatttgattgttctccgaacatttagcaaacgggcaggttgagctggtcttcgtgtgggttatggtgcatttcctctgagcattatcgattatttgtggcgggccaagcagccctataatgtttctgtggccgcagaagtttcagcatgtgctgctttacagaatccaacttatctggagaatgtgaaaaatttactggtaaaa

SEQ ID NO: 63972 - DNA, 237 bp, Zea mays
cttcgaggtcctggaccagaggggagtgggcgagctggtgaagtttgctacagagaggggccgcaaagctaggcctaacttgaaggtgggcatttgtggagaacacggtggagagccttcctctgtggccttcttcgcgaaggctgggctggattacgtttcttgctcccctttcagggttccgattgctaggctagctgcagctcaggtgcttgtctgaggctgcctcctcattgg

SEQ ID NO: 63973 - DNA, 237 bp, Zea mays
gttagagctgcgattcatgccaaaccaaaaagctcaattggatcatgggaactgtacactgcaagaatagacttcacccatgatacagggacgatggtgagctatcacaagaagtttacagctttgggatatcgcgtgctaatctacagcggagaccatgacctgtgtattccttaccctggtaccgaagcgtgggtgaaatcaataggctaccaagttactgatagatggcggcca

SEQ ID NO: 63974 - DNA, 236 bp, Zea mays
gcacaattgggaacatacttgatcaaggtcactgtggctcttgttgggcttttggtgctgtggagtgcctccaggaccgtttttgcattcacctcaacatgagcattttactttcagtcaatgacctactggcatgctgcggttttatgtgcggcgatgggtgtgatggaggctatcctatagaggcatggcgctactttgttcaaaatggtgttgttacggatgagtgtgatcca

SEQ ID NO: 63975 - DNA, 227 bp, Zea mays
ctgcactgactccgatggaggaccatgatgtgaaggagagtgacgatggttgtgatggagagaatctcccccctggttcatatgtaatcttgcaactggaaagggaggagattttagcaccacatactcatttctgcttgatctgtggtaagggtttcaaaagagatgctaacctaaggatgcacatgaggggccatggagatgagtacaagactccagctgctctt

SEQ ID NO: 63976 - DNA, 235 bp, Zea mays
gcggtggagcacgagcatcaaggacgaggaaggttacccggcgttcgcgctggtgaacaaggcgaccggggatgccatcaagcactcgctggggcagtcccacccggtgcgcctggtgccctacaacccggacttcctggacgagtcggtgctgtggacggagagccgcgacgtcggcaacggcttccgctgcgtccgcatggtcaacaacatctacctcaacttcgatgccctc

SEQ ID NO: 63977 - DNA, 237 bp, Zea mays
cgtgttcatacgtcaacagcaactgtagctattatgccagaggctgatgaagttgatgtggttattgatccgaaagatattgagcttaaaacagcaagatctggtggagctggagggcagaatgttaacaaggtggagacggctgttgatcttattcacaagccgacaggaatacggatattctgtacggaagagagatcacagctacagaacagagagcgggcatttcaattgttt

SEQ ID NO: 63978 - DNA, 238 bp, Zea mays
gggaaatctttcacttgcatcgttcgctttgacactgaggtggagctggcgtacttcaaccatggaggcatcctcccttatgtcatccgcaacttggcagctgcgcataactgaggcaagatcacacaccgtttgacccacaatggcagtggcaggctccatgttcccagggctagcgacctggttctcaatgtagtgacatttgtgatggatctaggggtctctttgtcgattcagc

SEQ ID NO: 63979 - DNA, 238 bp, Zea mays
ctgtactgactccgatggaggaccatgatgtgaaggagagtgacgatggtggtgagggagagaatctcccccctggttcatatgtaatcttgcaactggataaggaggagattttagcaccacatactcatttctgcttgatctgtagtaagggtttcagaagagatgctaacctaaggatgcacatgaggggccatggagatgagtacaagactccagctgctcttgccaaacccac

SEQ ID NO: 63980 - DNA, 236 bp, Zea mays
gttggcttcaacgtgaagaacgttgctgtcaaggatctcaagcgtgggttcgtggcctccaactccaaggatgacgccgccaaggaggctgccagcttcacctcccaggtcatcatcatgaaccaccctgggcagattggcaacggctatgccccagtgctggactgccacacctcccacatcgccgtcaagtttgctgagctcattaccaagatcgacaggcgatctggcaagga

SEQ ID NO: 63981 - DNA, 226 bp, Zea mays
tgtgaaccgtactgagtatcagctgattgatatttctgaggatggatttgtgagccgtcttacttcagatggcaacactaacgatgatcttagactcccaactgatgagactcttgtggcccagattaaggaagggttcgaaagcgggaaggacttgttgtgactgtccagtctgcgatgggggaggagcagatctccgttgaagatgttggcccaataactcctt

SEQ ID NO: 63982 - DNA, 290 bp, Zea mays
aagcaatgcctgataaagtgtttgatgtgctgaatgaagttgttgttgatcgaggttccaatccatacctatcaaaaattgagtgttatgagcataaccaccttatcactaagggcaaggtgatggggtgatagttgcaacaccaacaggcagcacggcatattctactgcagctgggggatcaatggttcatccaaatgtcccatgcatggttgtttactccaatctgccctcactcactgtcatttagacctgtcatccttccggatgccgcacggcttgaattaaag

SEQ ID NO: 63983 - DNA, 276 bp, Zea mays
cccattcctcgcgcggcgaccacccgattcgaagcgtgcggagagaccgaagaaacgggagagatggctcctaccaagcagactgctcggaagtccacggggagggaagcgtcaggaagcagcttgccaccaaggctgcccgtaagtctgcccccaccactggttgagtgaagaagcctcaccgctaccgccctggaactgttgcactccgtgagatccgcaagtaccagaagagcactgagctgctgatcaggaagctgcccttccagaggctcg

SEQ ID NO: 63984 - DNA, 277 bp, Zea mays
ccgagatggaagaccgcctcgacgacctggacccgctggacgtgaccaagacgtggcccgaggacgcgtttccggtgcagcccgtgggccgcctggtgctcaaccgcaactcgacaacttcttcgcggagaacgagcagctggccttctgcccgggcctcatcgtccccgggatctactactccgacgacaagctgctgcagaccaggatcttctcctactccgacacgcagcgccaccgcctcggccccaattacctgctgctaccggccaacgcg

SEQ ID NO: 63985 - DNA, 290 bp, Zea mays
  unsure (1)..(290): unsure at all n locations
atcgatatnttctgacattgaaaaaaattgtccggaaaatttcaatatttgggacaaccacatcaaccattgatttgaatgttgttggcgagaagacaaattctcaagatagaatataggggctcactttttcagccctgctcatattatgcccttgcttgaaattgtccggacggagaagatatcaccacaagctatccttgatctcatcactgttgggaagataataaagaaggtccctgttgtggtcggcaactgcacaggatttgcagtcaaccgtacattttttc

SEQ ID NO: 63986 - DNA, 148 bp, Zea mays
tagaaatgtggtctttggtgctggatgaatctcatttgctcacactatcaaagatctgtgagccttcttcagcgcagggctactcagtttatccttggacagcaagttccttctctctgtggctttctcttgcccctgtggtcattgg

SEQ ID NO: 63987 - DNA, 273 bp, Zea mays
agcatctggtgcggacaccaagagaaaggggaaaggattgcttcctcgtccggttcgagctggaatagttggatatccaaatgttggcaaatcttccttgattaatacgtgctaaaacgaagaatgtgcccagcagcacctaggccaggtgtcacaagagagctaaagtgggttcgttttggaacagacctagagttgttagattcacctggaattttaactatgcgaattagtgaccagacatctgcaatcaagcttgctatatgtgatgat

SEQ ID NO: 63988 - DNA, 275 bp, Zea mays
gtaacatggaacctgctctgcccctgggggtcaaggttgattacaagaattcaaccctggccctagactctactttcagtataacgttacggaaatgctgtcaagtggtggatacaggtttccaatggtaaggaatatgcactgagcgatgtcatcgataccatcaaacatgcttttgggggatcaccacaaattgtttgcaagaggggttcaatcgaagaacttaggttatgcttcgacaaagaattgaagcctcgtgattgctttaccacttc

SEQ ID NO: 63989 - DNA, 277 bp, Zea mays
tttaggcgctgacctagttattcattctgctacaaagtacattgctggacacaacgatgttattggaggatgcgtcagtggcacagatcagttgggttccaaagccgtatttatcaccatgtggttggtggtgttctaaacccgaatgctgcgtaccttatccttcgaggcatgaaaacacttcatctccgtgtgcaatgtcagaataacactgctcttcggatggcccagtttttagaggaacatctaaagattgcccgtgtctactatcctggct

SEQ ID NO: 63990 - DNA, 309 bp, Zea mays
atccaacacaatgtgtgcatgtcacatctttttgttctagtacatacatagaaggatattgcttggtcttgattgatcatgtctgatttaagtcgactattatttcttggaattttcttttggacctggtgctatggttgatggatgtatattggatatgtgcgttctgccaggtgtaagcacaaaggtttagacagaccgagagcaagagcgagtgaacctgttctggttttgcagtggttcagtaaggcagaaagttgttaaaccgtagtctgagatgtattaccagtggcgccatgctgtactttt

SEQ ID NO: 63991 - DNA, 111 bp, Zea mays
attgacagtgtgttctcccaccttgcatgggtgcagacagacaggaagtctggtgggcttggcgatcttaaatacccacttatttctgatgtcaccaaatctgtttcaaag

SEQ ID NO: 63992 - DNA, 309 bp, Zea mays
ctatctcgacctctacctcatccatttcccagtagccactcggcacaccggagtcggcacgacttctagcgctctgggtgacgatggcgtgctggacatcgacaccactatctccctggaaacgacatggcacgcgatggaagagcttgtttccatggggctggtgcgcagcattggaatcagcaactacgacatcttcctcaccagagactgcctcggcctacgccaagataaagccggcggtgaaccagatcgagacgcacccctcttccagcgcgactcacttgtcaagttctgccagaagcacgg

SEQ ID NO: 63993 - DNA, 302 bp, Zea mays
gaagacaacccgtcagcccctctcgtttttcatccgccttcgcctccaaccgcgtgcgctccacgcctcctcctggaaagcgagagcttctgcataagaacaacaaatcaaaagcgtgatcagctcggtgccaacaaaacctcaacaaccaagtttcatgtctgatctcgacgtccagcttccatctgcctttgatccgtttgctgaggcaaatgctgaggactctggtgctggtcctggaacgaaggattatgtgcatgtgcgcatcagcagcgcaacggcagaaagagtctgactacagt

SEQ ID NO: 63994 - DNA, 312 bp, Zea mays
ctccgctccccctcagtcctcagttcctcacctagcggtagcgtgacgcgcggagagacgtagatggcggcttcggaggcggcagctgcggcggcaacaccggtgacgccgacagaggggacggtgatcgcgatccacagcctggaggagtggagcatccagatcgaggatgccaacagcgccaagaagctggtggtgattgacttcactgcaacatggtgtcctccgtgccgcgccatggctccaatttttgctgatatggccaagaagtccaaatgttgttttcctgaaagttgatgtggatgaaatgaa

SEQ ID NO: 63995 - DNA, 314 bp, Zea mays
aatacttcagtctagacactagatacagtaagccttagcgcaccaacagaggatacttcaactatgtctgcctcgcggagctcctctcccaactccatgtcacagtggagccagaaagagaacaagatgtttgaagaggcactcgcctactatggcgagggcacacccaaccggtgggacaaggtgtccagcgccatgggaggcatcaagtctgccgaggaggtgcgctgccactatgaaaatcttgattacgacgtcagatgattgagtcagcaatgtgccgtaccccaagtacaagacacagggattctgga

SEQ ID NO: 63996 - DNA, 312 bp, Zea mays
ccgccggcggcatcctcctcccggaaacattcaagcagctgaatgctgctaaagttgtggctgttggccctggtgagcgcgacaaggcaggcaatctgatcccagttgctctgaaggaaggtgacactgttctcctgccagagtatggtggaactgatattaagcttgcagctgataaagagtacctcctcttcagagagcacgacattttgggcacacttgtggactgattcagagcatcagcaagcctgtcactagtcgttggttctagcttctagtgtgagatgcgtagtatcagattctgggatcaaa

SEQ ID NO: 63997 - DNA, 318 bp, Zea mays
cagcaccgggcgctcctgacgctcaccaccttcccgatcttcgccttctttcccgcagtcaccaaacggctcttccgcagccggtgggaggccaacgtcgcggtgcggcggaggcaggacgatctgttcgtccctctcatccacgccaaggccacgcgcgggaacgacgacggcgacaccagcgccagcacgccgagtacttcgtggcgaggatggtgcgggacttggagtggcgcccgccggtggacggcgtggcggtggaaatggcggaagctggcacttcacgtcgtcatgaagcagccgctccgtgcacgcatc

SEQ ID NO: 63998 - DNA, 107 bp, Zea mays
gacccgccaacatgggccgcgttcgcaccaataccgtgaagaaggcggcccgggtcatcctagaaaagtactacacgcgcctgggcaacgacttccacacaacatac

SEQ ID NO: 63999 - DNA, 303 bp, Zea mays
cgcttccaagatgtcgaagcgaggacgtggaggttctgctggtaacaagttccggatgtcactgggtctaccagtggcagccactgtgaactgtgctgataacactggagccaagaacctttacatcatttctgtgaagggaatcaaggggcgccttaacaggcttccttctgcctgtgttggtgacatggttatggcaactgtgaagaagggaaagcctgaccttaggaagaaggtgatgccagctgtcattgtgaggcacgcaaccatggcgccgaaaggatggtgtctacatgtactttg

SEQ ID NO: 64000 - DNA, 303 bp, Zea mays
tggaggtgcatctgataagcctatcgacagtgctgttctttctagaatgaagcagttcagagcaatgaataagctgaaaaagatggccctaaaggttattgcctcaaaccttaacgaggaagagatcaaggggctaaagcaaatgttcatgaacatggacacagacaatagtggcacaatcacgtatgaagaactcaaagcaggactagccaaacttggatcaaagctgtcggaagctgaagtaaagcagttgatggaggctgtgatgttgatgggaatggatccatcgactatgttgagttc

SEQ ID NO: 64001 - DNA, 302 bp, Zea mays
cagcaatatggcgtccctgtctgtggtagagacattcttggggatcttaagctcaaagagtgtgttaaagcccacactaactggcctacatttcgtcaaatatttatcaatggagagtttgttggggggtctgacatcatattaagcttgcaccagaagggtgagcttaaggatcttcttggggatattgcacaaagagacgaacaaaaagtgcatgctcacgattcatgaagcaatcaacagtaggttcttttactatgcgtatctactctgccactaaaatgttctatctcggagtcttt

SEQ ID NO: 64002 - DNA, 308 bp, Zea mays
cctcctcagtctcggtgccaagtatgagcctacaccggcccaagtcgcttcatcttgtgacgtgacattcgcgatgctcgctgatccacaaagcgcggctgaggttgcatgtgggtccagcggagctgctgaagggttggcccctgggaaaggctatgtcgatgtgtcgacggttgatggtgctacatccaagctgattggtgaacgcattacaagtactggagcatctttccttgaggctccagtttcaggctcgaaaaaaccagcagagatgggcttctcatctttcttactgcaggtgatgagtc

SEQ ID NO: 64003 - DNA, 314 bp, Zea mays
ccatgtatgagctgtacgacccttcgacagtgatgttcttcttccggaacaagcacatcatgattgatctcgggactggaaacaacaacaagatcaactgggccctgaaggacaagcaagagttcatcgacattgtggagaccgtatacaggggcgcccggaaaggccgtggtctggtgattgctccaaaggactactccaccaagtaccgttactaagaaggcaggcattccccttatgcaatctattggggatgtttacacggacagtagtccgacaggtgatccctaactgtatcttggcataccctagta

SEQ ID NO: 64004 - DNA, 297 bp, Zea mays
gaggagatcaagacggcgtaccggcggctgtccaaggagtaccacccggacacgacgacgctgccgctcaaggtggcgtcgcagaagttcatccgcctgcgagaggtgtacaacgtgctgagcaaggaggagacacggcggttctacgactggacgctggcgcaggaggccgagagccgccgcctgcagcagctcaggtccaggctcgaggacccatacgagcaggacatcatcaactacaaacccgtgccagacatggttgccgcctcggcggcaagaacatgaagcttagcgatc

SEQ ID NO: 64005 - DNA, 302 bp, Zea mays
tattggagggtttcaaagcgctacaaggtatctctggcccccagagatttcagatttacaaggcgtatggatctcctggtcgacttccatctgctcatacctgctttaaccagttggatttaccggaatatacctcaaaggagcaattagaagaacgactgcttcttgccattcatgaagctagtgaaggttttggctttggttgattggttcctacgggaggttgtaaagcgtgcactgggtcattggttttctgcttgactgtacagattttgaaggcaattgagatggtcagtgctatg

SEQ ID NO: 64006 - DNA, 164 bp, Zea mays
accagatctcgaacaactgcggcatgcctcactaaacctcaggcggccagttcaagatcccggtcgtgatccgaggccccggcggtgtcggtcgccagctcggtgccgagcactcgcagcggctagagtcgtacttccagtcgattcctggccgccagatggtt

SEQ ID NO: 64007 - DNA, 301 bp, Zea mays
tggtcaaggttttggactcggttaacatcaccctgggtgctgaggatgaactgaaggatgctgttggtctggttcgcccagttagcgttgccttcgaggtgatcactggtttcaggctgtacaagagcggagtttacactagcgaccattgtggaactacaccgatggatgtgaaccacgctgttctggctgttggctacggtgtcgaagatggtgtcccctactggctcatcaagaactcatggggcgctgactgggggatgagggttacttcaagatggaaatgggcaagaacatgtgc

SEQ ID NO: 64008 - DNA, 307 bp, Zea mays
gcagcccccaactacccccagcctcggaaggaaccttccagaagcgcaagactctaaaggccgtcgccttcccattcttcctcgccgcgggggtcgcctgagatcacataaacaatggtgaaggctgttgctgtgcttggtagcagcgatcgtgtcaagggcaccatctttttcacccaagagggagatggccctaccgctgtcaccggaagtgtctctggcctcaagcctggcctccatgggttccatgtacatgcacttgggagatcaccaatcgatgcatgtcaactgcgacacactacaatcc

SEQ ID NO: 64009 - DNA, 293 bp, Zea mays
cttgtgctgaaaaccagataacaagcatgatcccaaaaattatcaagactggttttgcagcaattcatctgatatactttttcactgctggtcctgatgaggtaaaatgttggcagatcagacgccagactaaagctcctcaagctgctggtgcaattcacactgattttgaaaggggtttcatatgcgctgaggtaatgaagtttgaagatctgaaagaactgggcagtgaatctgctgtaaaggctgctggcaatacaagcaggaggggataacctatgtggtccaggacg

SEQ ID NO: 64010 - DNA, 291 bp, Zea mays
cggatcaccactatgcaaagacttcagcaggaaaggtcacaaaggattgggtgaaggcaatccaaagtgaatgggatcttctacagaaaaacctacctgaatctatatacgttagagtctatgaggacaggactgatctgctgagggctgccataggtgtggccagcaggaactccataccatgatggtctgttcttcttcgatgtccgttttccttgcgaatacccaaagtgcccaccaaaagtatactaccattctggcggacttcggctgaacccgaacctgtacgag

SEQ ID NO: 64011 - DNA, 126 bp, Zea mays
tggaagaggatctggtttctaccgacttccttggtgacagcaggtcgagcatcttcgacgccaaggccgggatcgctctgaacgaccacttcgtcaagctcgtctcgtggtacgacaacgagtggg

SEQ ID NO: 64012 - DNA, 285 bp, Zea mays
cacagccccatcccaatcctagtcgatcttcttcccctcctcaaggaagaaaagaagctgaaccatggggaagagaaagtcagctgctaagccacctcctaagaagcggatggacaagcttgacactgtcttttcctgcccattctgcaaccacgggagtagtgttgagtgccgaattgacatgaagaatctgattggcgaacatcttgtagaatctgtcaggaaaacttcagcacaactgttaatgcactcactgagcctattgatatatatagtgaatggatt

SEQ ID NO: 64013 - DNA, 202 bp, Zea mays
gagaagcagctcaagcacagagaacagacaactccaatggccactacacctccgaaaagtggaaatggcacgacgaagcactctgctgatgaccccaacacaccactgtcccctgtcgccgttcctgcacagaagcagctcaagtattctgctggaattgtaaatagccccagcaaaggagttgctgcgataaaaaaagagc

SEQ ID NO: 64014 - DNA, 279 bp, Zea mays
agacaacccgtcagcccctctcgtttttgcatccgccttcgcctccaaccgcgtgcgctccacgcctcctccaagaaagcgagagcttctgcataagaacaacaaatcaaaagcgtgatcagctcggtgccaacaaaacctcaacaaccaagtttcgcgtctgatctcgacgtccaacttccatctgcctttgatccgtttgctgaggcaaatgctgaggactctggtgctggatctggaacgaaggattatgtgcatgtgcgcatccagcagcgcaac

SEQ ID NO: 64015 - DNA, 275 bp, Zea mays
cacttcaacaatgttgaggtcaataaacgactcctggaggatatgattgagccttcatttagtgataagttgcctgtacctaagaaattcaagggacaccggaacgaggaaaccgtgaagggggttgacttccttggccccaactgtgattttgttacctctgggtcagactgtggcagcatatttatttggagaaagaaggatgcagaactgatcagagcgatgcgtggagataagcgggttgtaaactgtgtcgaacagcacccttctgggat

SEQ ID NO: 64016 - DNA, 282 bp, Zea mays
ccaggtctcctacgccatcgggtgcccgagcccctttcggtgttcgtggacacgtacggcaccggcgcgatccccgacaaggagatcctgaagatcgtgaaggagaacttcgacttcaggcccggcatgatcatcatcaacctcgacctcaagaaaggcggcaacgggcgctacctcaagacggcggcctacgggcactttgggagggacgaccccgacttcacctgggaggtggtgaagcccctcaaggcggagaagccgtcttctgcatgaggcgcctcc

SEQ ID NO: 64017 - DNA, 203 bp, Zea mays
ggaacttccttgcttgctggccccacagccattattactgaaatcaacgaaaagattggtgctgctggtgtagtcagccaggagtgcaagactgttgtttctcaatacggacaacagatcctagatcttctgctagctgagacgcaacctgcgaagatctgtgctcaggttggcctgtgcacttttgatggcactcacggtgt

SEQ ID NO: 64018 - DNA, 276 bp, Zea mays
cagactaatacgatggctcaaatagttaaggctatcagaatgattgttggaagggacaacacatcatcaagtaagcagcctgaggttatggagggagagatagagattgaggatgatgctccgaaacgtaagccatctttggaggaaattgatgccttggaggaggctcgtcttgcaatcgagtacatcgttattccaggtggggagccagttgagctcctcccaagatgttcagaaatagttgctcggcagctggagctcgtagagagctaccag

SEQ ID NO: 64019 - DNA, 285 bp, Zea mays
cgcatctggacaatggttgcaggtggtggtgctagtgtcatatacgcagacactgttagtgatttgggatatgcttcggagctaggaaattatgcagagtacagtggagctcccaaggaggaggaggttctgcagtatgctagagtgctgacaggattgcgctacctctgatcctgatggccgtaagagagcccttctaatcggaggaggaatcgctaacttcacagatgttgcttctacatgttagtggcatcattcgggctttaagagagaaggagtccaaat

SEQ ID NO: 64020 - DNA, 122 bp, Zea mays
cacaaccaccagattgctgcactttctgttgctctacagcaaactatgtcgcctggcttcaaggcctaggcaaagcaagtgaaggccaatgctgttgcgattggaaactatctcatgagcaa

SEQ ID NO: 64021 - DNA, 278 bp, Zea mays
gtgaaatagacatgtctgtgatgatgctcgggcgcaacaacggcaagaaggtcatggctgtccgcatcatcaagcataccctggagatcattcacctgctcaccgatgccaaccccatccaggtcgtcgtcgacgcgatcatcaacagtggcccccgtgaggatgccacccgtattggttccgctggtgttgtgagaaggcaggccgtggatatctcacccctgaggagggtgaaccaggccatctacctcctcaccaactgtgccagggagagtgct

SEQ ID NO: 64022 - DNA, 202 bp, Zea mays
agcacatgcggtccttcgcaaacatctgcaacgctggcatccttcctgaagcagtgtcgaagtgtgctgctcaggcttgcaccagcattccttccaacccctggagttctatccacaagggttttagcgcctaagaatcgtaaggtgaggcgaaatatttcagccgctccaccgcaaactactcgtttacattaccagtcct

SEQ ID NO: 64023 - DNA, 180 bp, Zea mays
atcgggagacaatgatgagtgcaaggtgaggccattgattctccggaacaaggccccaaggtggcacgagcagctgcagtgctggtgcctcaatttcaggggcagggtgacagtcgcatctgtgaagaacttccagctcgttgctgccacgcagccgtctgctggagcaccaaccccatc

SEQ ID NO: 64024 - DNA, 197 bp, Zea mays
agacaggcaagctgcctggcgcagggttgtctgccttgccatcaacaatggcgttagcaccccaggcatgtctgcaagtctggcctacttcgactcgtaccgcagggacaggcttcccgccaacctggtgcaggctcagagagactacttcggcgctcccacgtacgagagggttgacatgcctggttctttccaca

SEQ ID NO: 64025 - DNA, 272 bp, Zea mays
ctttgagagaggagatttggtcttcgtgttcaacttccactggagcaatatctattttgactatcgcgttggttgtttcaagcctgggaagtacaagattgttttagattctgacgatggccttttcggtggatttagtcggcttgatcatgacgctgcgtacttcactgctgactggccgcatgacaacaggccgtgttctttctcggtctatgcacccagcagaacagccgtcgtatatgcacctgagggtgcagaggacgaattgggca

SEQ ID NO: 64026 - DNA, 261 bp, Zea mays
agcccaaggtcgtggaggccgacgaagcatctcctcctgaggtcaaggctctgttcaaggataagaagccagtcaaggtcagcaagaagaactcggctgcagtcaccaagttcctcgatgagctggctaagattgacttccctggagccaagggggtgagcgaggcggtggccaagtccggcacctcgcccctgcttccggcgatcaccttcatcttggacaaggtcgcaccgtttatccccaaggaggagcccaaggcgg

SEQ ID NO: 64027 - DNA, 282 bp, Zea mays
gcatcagctgcggagataaaacgcgcctacaaaaagctggcgttgcagtggcatccagatagaaacgtggatcaccgggagaaagcagggaacatgtatcgagaaattgctgctgcttatgaggtgcttggtgatgaagacaaacgtgtaaggtatgcacgtggagaggatgtggaggagatgaatatgggaggcgggggtggcttcaatccttttgggggatgcggccagcagtacacgtttcaatacgacggtggcttccccggcggcggcttccctgga

SEQ ID NO: 64028 - DNA, 283 bp, Zea mays
gagacagatgagaaggctactagcctatcctctgcgtctgttgatgatgctgccgtcattgaagagcttattgcaaagctgcaagcaatttctaaaacattgtcaccaggattccgtatgaaccctatacagtttgagaaggatgatgataccaatttccatatggagctttacaaggtccttgctggtgggcacaaggttgaagactaccggaacacatttgcgaacctcgcaatccccctcttctccagggcggagctgtgccgcccaagaccatgaagca

SEQ ID NO: 64029 - DNA, 284 bp, Zea mays
ggctggaactggtattgcagaacttattgctcttgagatttcgaaacagacgaatgctccaattgaagagtgccgcaagaaggtttggctggtggactcaaagggtttgattgttgactctcgtaaaggctcccttcagccattcaagaaaccttgggcgcattcgaacgagcccttgaaaaccttgtatgatgctgttcagtccatcaaacctacagttctgatcgggacatctggagttggaagaacattcacaaaagaaatcattgaggccatgtcttcct

SEQ ID NO: 64030 - DNA, 285 bp, Zea mays
atatacccaggcaactggcaagcccatctctctctctgagcaacagcttattgactgtggttttgcattcaacaatttcggatgcaacggaggccttccatcccaggcctttgaatacatcaaatacaatggtggccttgacactgaggaatcttacccttaccaaggtgtcaatggaatctgcaagtttaagaatgagaatcgttggagtcaaggttttggactcggttaacatcaccctgggtgctgaggatgaactgaaggatgctgttggtctggttcgcc

SEQ ID NO: 64031 - DNA, 284 bp, Zea mays
tggccgttcgatctttgccagtggcagtccatttgcccccgtggagtacgaaggaaagacttttgtgcctgggcagtcgaacaatgcctacattttccctggactcggcctcggtcttgtgatctctggggccgtccgtgtccacgaggacatgcttctcgccgcctcgaaagcgctagctgatcaggccacacaggacaacttcgagaagggctccatcttcccacccttcaccagcatcagaaagatctctgcgcacatcgctgcagccgtggctgcaaaag

SEQ ID NO: 64032 - DNA, 286 bp, Zea mays
aattaggcaaaccaattgatatcaatgatgctgaagaacatatttttggcctaactttgatgaatgattggagcgccagagatattcaggcttgggagactatacctcttggacttttccttgggaaaagcttcagtaccaccatatcaccatggattgttactcttgatgctttgaagcctttcatgtgtgaggctcctaagcaggaacccgaacctttaccatacctagctgaaaagaatcacataaactattacattcctcttgaagtcttgattaagcctaa

SEQ ID NO: 64033 - DNA, 277 bp, Zea mays
tgtgggaggagcttagagccaagttggaagagaaagagtggatctcgcagaagcagatgatcatccttctcaaccaggccaccgatatcatcaacctctggcagcagggtggtgggaacctgtcgacatgagtccctccccgccctgttctttcaaccgtgcaaagcttgcgtttttatggtttcactacaggctctctctgttgttaatgttaaaagtatggtacatggccttgtagatcggttcaaactgttctcaggtatggccttttccatgg

SEQ ID NO: 64034 - DNA, 287 bp, Zea mays
ctgagaagctcatggagtatcagaacaaacgcggaggcagggtgaggctccagtcgattgtggcgcctttgaccgagtttgaccaccccgagaaaggcgatgctctgtacgctatggagctgactctggctctggaaaagctggttaatgagaagctgcacagcctgcatggtgtggcaacaaggtgcaatgatcctcagctgatagacttcatcgagagtgagttcctcgaggagcaggtggaagccataaataaggtctccaagtatgtcgcgcactgaggagag

SEQ ID NO: 64035 - DNA, 144 bp, Zea mays
cgtccacacgctccgctccgattccgcccgcgtccgcggacccagatccggcgcccgcgcccatggcgacgcgcaggcgaatgctcctcaaggtcatcatcctcggcgacagggggtcggcaagacctcgctgatgaaccagta

SEQ ID NO: 64036 - DNA, 283 bp, Zea mays
ggcgcccgttcaggatccacatcttcccgagcgagttcttggttgacctcttcccccttcggaccacctccaaggctcttggtgtagcttgccactctcaccaatcaagttttcatgtctgatctcgacattcagatcccaactgccttcgattccttcgctgaggccaatgctgggcgatctggtgcggcagagggtcccccccactacgttcacgtgcgcatccagcagcgtaatggtcgcaagagcctgactaccgtccagggattgaagaaggagttca

SEQ ID NO: 64037 - DNA, 126 bp, Zea mays
ctgcggcagagactgtagtacatgaaactggttctgcttgaagctcttcgcttgtatcctcagccaccattgttaatcaggcgttctctccggccagacaagttgccatgctggtgcaatagctgt

SEQ ID NO: 64038 - DNA, 277 bp, Zea mays
tggtgctgaaattggtggagcatttggtggagaaaaagcaactggtggtggacgagaagcagggagtgattcctggaagcaatacatgaggagggcgacttgtacaatcaactatgggagcgagctacctctagcccagggaatcaattttggttaatcctgcagaaatgttgcgcgtggatctcggtgttttctgcagacgtggatgccgtatggaaagaactgatgcaaccgcatttgagatctcagcagacttgagcagcatttattggcgtca

SEQ ID NO: 64039 - DNA, 275 bp, Zea mays
cgctagtggctgccctactcgtgctgcttgccctcgccgccgtttcctccacgcgcagcacaaaaggagtccgcggctgacaacgccgggatgttggcaggcggcatcaaggacgtgccggcgaacgagaacgacctccagctccaggagctcgcgcgcttcgccgtcaatgagcacaaccaaaaggccaatgctcttctggggttcgagaagcttgtgaaggccaagacacaagtggttgctggcacgatgtactatctcactattgaagtgaa

SEQ ID NO: 64040 - DNA, 276 bp, Zea mays
attgaattccctctcccagatattaaaactagaagacgcatcttccagattcacacatcaaaaatgacattagctgacgatgtgaacttggaagagtttgttatgaccaaagatgagttctcgggcgctgatattaaggccatctgcacggaggctggattgctcgccttaagagaacgtagaatgaaagtgacccatgcagatttcaagaaagcaaaggagaaggtgatgtacaagaagaaggaaggtgttccggatggtctctacatgtagtag

SEQ ID NO: 64041 - DNA, 279 bp, Zea mays
ctcgctcggccatcgggactgtacaaggacgagagggagaagagaacagcggattcatcaccgccaggcgtcagagtgtgttaagacaagatggtggcgaatggcgacgcacctgctagagggagtgcggcggcagctgcaagcctgcgcaggcgtaggaccacaagcggtgctgctgctggcggaggtggtgccagctcgatgctccagttttacaccgatgaggctgcgggccgcaaaatgtcaccaaacaccgttctgatcatgagcattgggttc

SEQ ID NO: 64042 - DNA, 272 bp, Zea mays
gctgctggtattaatgcccattatcatgaggatgagaatgctccaacgggcacatgtgctgtttgtgttgttggtggagaaaggtcacttattgctaacttgtctgcggcaaactgctataagtctgaacatctgaagaaacctgagaattgggcacttgttgagaaggcaaaatatatttacattgctggatttttccttacggtatccccggattctattcaacttgttgctgagcatgccgctgcaactaacaaggtgtttatgatgaa

SEQ ID NO: 64043 - DNA, 278 bp, Zea mays
cagcctgagcacgggcgtgtcgctcttcctgggccgcttcgtcttcttcaacttccagcgggagaacgtggcgaacaggtgcccgcgcagaacggcaagacgcacttcgacgccggcgacgagcgcgccaaggagttcgcggccctgctcaagtccaacgaccccgtgggcttcaacctcgtcgacgtcctcgcctggggctcgctcggccacatcgtcgcctactacatcctcgccacctccagcaacggatacgaccccaacttcttctgagcggt

SEQ ID NO: 64044 - DNA, 277 bp, Zea mays
cccagcattgagaacttcattcttgaaggcattccgtgtaatggatagggatctcaaattacataaaagcattgactgctttttcagtgggactacagcggtggcagtgatcaagcaggaacacaatcttataattggcaatttgggggattcaagagctgtcttaggcaccagagatgaaaataaccagcttattgctgttcaattgacagttgatctcaaacctaacattccaagcgaagcacagtcaatcaggcaacgcaggggcagaatattc

SEQ ID NO: 64045 - DNA, 275 bp, Zea mays
gaaatgttctagcccgacaaaacctggagtgcttggattgattgaaaaggcaacaccaacactcgccgcagcatactccatctctcgggctgttagtattccagtgatgtgctcgtcagggttaagctcggtgactgcaccaatggcagtaactgcaggagctgctggagttggagtcggttctgctattaacaaactcaacgacgttgtggcaatgatcgctgaggtgagaagcattgcgcaacaatggagcttgcgccaagaatcgtgtccga

SEQ ID NO: 64046 - DNA, 276 bp, Zea mays
atgcaatggcagctaaaaaaggatgcacaccatcacagctagcattggcatgggttcaccatcagggaaacgatgtttgccccatacctggaacaacaaaaatcgagaacttcaaccagaacgtgggggcgctttctgtgaagttgacaccaacagagatggccgaactcgagtcctgtgctgctgcaggtgaaatcttgggtgaccgttatcctcaaatggccaacacctggaaggactctgagaccccgccattgtcttcttggaaatctgagt

SEQ ID NO: 64047 - DNA, 279 bp, Zea mays
gttcaagaagaaggttaggcaatgtgtccgcaggtctcaggaaatgctgtgaaggagggacatgggggagttgaacgagtctgcaatcggtgtgctgcaattcacaaccaattatctcattgcagcattcttttgctttcccctgtatattttttcaatcggtgtcactcgtatagtggtgttgggtctctttagacaaactcgggacggttgcttatcctaaaaattcgattgtactgcgtggcatgaaatgatagattcgaagaatattttgaacat

SEQ ID NO: 64048 - DNA, 274 bp, Zea mays
  unsure (1)..(274): unsure at all n locations
agcccaaggtcgtggaggcctacgaagcatctcctcctgaggtcaaggctctgttcaaggataagaagccagtcaaggtcagcaagaagaactcggctgcagtcaccaagttcctcgatgagctggctaagattgacttccctggagccaaggtggtgagcgaggcggtggccaagtccggcacctcgcccctgcttccggcgatcaccttcatcttggacaaggtcgcaccgtttatccccaaggaggagcccaaggcggagcggncggcgga

SEQ ID NO: 64049 - DNA, 271 bp, Zea mays
ggaccggtcactcggcacgcaggctagcagcacagcagcagccagagccatcccctctcctcgctacgcttcgcttcctcggcgccgattcctcctcctcctcctccaccctcgtccgtccccttccggcgcacgagctcgcccgagatggagaacgcgagatcgggtgtcgctgtgaacgatgagtgcatgctgaagtttggcgagctgcagtcgaagaggctgcaccgcttcataactttcaagatggacgacaagttcaaggagatag

SEQ ID NO: 64050 - DNA, 273 bp, Zea mays
agctcgtgacgatcggaggccatgtgctgcgcgaaggtgagtggctgtcgctgaatgggtcgactggtgaggtgatccttggaaagcagccgctttccccaccagcccttagtggcgatctgggaactttcatggcctgggtggatgatgttagaaagctcaaggtcctggctaacgccgatacccctgatgatgcattgactgcgcgaaacaatggggcacaaggcattggattatgccggacagagcacatgttctttgcttcagacgaga

SEQ ID NO: 64051 - DNA, 267 bp, Zea mays
acctgtcctcgcgtctcccttcccagatccatcgactcgctcgggccgcccctcccgtcgtccccgttcgaaggtgcggcagccggcaggcgagcgatttgattcgacatgaatcccgagtacgactaccttttcaaacttctgcttattggtgattctggtgttgggaaatcatgcttgcttctcagatttgcagacgattcttatttggacagctatatcagcacaattggggttgatttcaaaattcgcacagtggagcaagat

SEQ ID NO: 64052 - DNA, 270 bp, Zea mays
acccgatcgcgcctgcagtcttgcaaagcaggcttttgacgaggccatctcggaactggacaccctgagcgaggagtcctacaaggacagcactttgatcatgcagctccttcgtgataacttgaccctatggacttctgacatctcggaggaccctgcggaagagatcagggaggcgcccacagcacgactcgagcgaggggcagtaaagccggctttacgtgcctagaagctagtacctagtgtttgctgctgtctaatgacactatg

SEQ ID NO: 64053 - DNA, 268 bp, Zea mays
gccgggaattcagcagcggggtctcggatatccggcatactgcggaccgctggcgcgtgtccctggatgtcaaccacttcgccccggagcagctgacggtcaagaccaaggatggcgtggtggagatcaccggcaagcacgaggagcggcaggacgagcatggctacatctcccggtgcttcacgcggaaatacacgctgccccccggtgtggaccccacccaagtttcctcctccctgtcccctgagggcacactgaccgtggaggc

SEQ ID NO: 64054 - DNA, 260 bp, Zea mays
gttaccacacccacaatctatcatacactctatggttgaaacccaggattcatctgtcctggctcaattgggatggccggatatgcggataccaatcttatacaccttatcgtggccagatagaatctattgctcggaggtcacgtggccccgtctagatctttgcaagttgggttcactgacgttcaaagctcctgacaatgtaaaatacccgtcaatggacctagcgtacgccgctgggcgggctgggggcacatgac

SEQ ID NO: 64055 - DNA, 267 bp, Zea mays
gggctgcatcaagccattgtgtgaccttcttgtctgccctgatccgagaattgtaacagtttgtctggagggtcttgagaatattcttaaagtagggcagcatgacaagaccatgggtgcaacaggtgacactaacgtcttagctcagatgatcgatgaagcggaaggcctggaaaagatcgagaacctacagagccacgataacaatgaaatctatgaaaaggctgtgaagcttcttgagacatactggatggaggaggaagatga

SEQ ID NO: 64056 - DNA, 268 bp, Zea mays
ctaagaacaagtctgtcgctgcggtggggaaagctgctggcgacaggtggaaatccctgagcgagtcggacacaggctccctatgtagccaaggctaacaagctcaagctcgagtacaccaaggccatcgctgcctacaacaagggcgagagcactgcagctaagaaggctcctgccaaggaggaagaggaggaagatgaagaggagtctgacaagtccaagtcggaggtcaatgacgaggatgatgaagagggtagtgaggaggatg

SEQ ID NO: 64057 - DNA, 268 bp, Zea mays
aggctggtgacaacgttggtcttcttcttcgtggtctgcaagcgtggtgatgtcgagcgtggccaggtggtgtgcaaacctggtagtctgaagacatacaaaaagtttgaggcagaaatatacgtcctgacaaaggatgaaggtggccggcacactgcctttgtcacaaattacacaccccaattctacttcaggactgctgatgtcactggaaaggttgagttgcttggtgagacgaagatggttttgcccggtgacaatgtaaccg

SEQ ID NO: 64058 - DNA, 266 bp, Zea mays
cgtcgatctacacacatacatagtttcttctactacacgacgacaaccatggggaagcctgcgaagatcggagagtggggtggatacgccggcgatcgtcgggatctgagggctactccggaccggctgaccgaggtgaaggtcacggcggacaacagcagctgcatccgctccatctccttcatctacatcggagccgatggcaagccgtacgaggaggggccatggggtttcggccatgctggcacggagtacaagattgatct

SEQ ID NO: 64059 - DNA, 266 bp, Zea mays
ccctgttgcactgctgctgtcttctgccatgatgttgaggcacttgcaattcccatcttttgctgaccggctggagacggcagttaagcgtgtcattgcagaaggcaagtacagaaccaaagatttgggcggcaccagcaccacccaggaagtcacagctgcggtcattgccaaattgggttagaaaccaaccgtgtctttaatacaacttttttttatctcttggactaggtaactagtcctgtcaaaacatttgctcctctcgt

SEQ ID NO: 64060 - DNA, 264 bp, Zea mays
cgcaacgctctatctctttcgccgagctcctcgaaaccctaggagcgtgcttgaccggcggcggcgaggtgatggcgatggaccctgacgcggtagcaaggccttcgtggagcattactaccgaacgatcgacaccaaccgcgcggcgctggttgggctgtaccaggagacctccatgctcaccttcgagggccagaagttccagggcccctccgccattgccggcaagctcggatctctccctttccaggcctgcgagcatca

SEQ ID NO: 64061 - DNA, 266 bp, Zea mays
tagcaacaagaagtttgattctgatgtttctcttgatgtcatagcaatgagaacacctgggttcagcggagcagacttggcaaaccttctgaatgaagcagccattctggctggaagacggggaaggacagcaatttcttcaaaagagattgatgattctattgacagaattgtagctggtatggaagggactgtgatgacagacgggaagagcaaaagtcttgttgcttaccatgaagttgggcatgcaatttgcggaactttga

SEQ ID NO: 64062 - DNA, 263 bp, Zea mays
cttggacatttcttccaccagagaatggtgacgccattcagatattacactaccagaatggtgagaaatatgaaccccactacgactacttccatgacaaaaataatccggccctgggcggccatcgcattgccactgtgctgatgtacctatcaaatgtcgagaagggtggagagaccatcttccccaatgcagaggggaagctattgcaacccaaggacgacacttggtctgattgtgcaagacacggatatgcagttaaa

SEQ ID NO: 64063 - DNA, 262 bp, Zea mays
gtgctgctggcaagacctcaatttggttggatggaacgcagcgagctacctcagactaatcaacctccaaagtacaaatcgtaccagtatgtcttgtgggttgctgcactcctcttgctggtagttgggtttgccattatcttggtcatgctcttcaaaggtaagaatgggaacgacagttctcactggtgccattacctgaactgcgtaccaacgtccagatggaagtgcgatacctgaattccgcgaactatatgctcca

SEQ ID NO: 64064 - DNA, 264 bp, Zea mays
cttatgaaaagaaatggccattgtatcttagcaccaaaaacactattttgaagaaatatgatggcaggttcaaggacattttccaggaggtgtatgaagctggttggaaaaccaaatttgaagctgccggcatatggtatgagcaccgccttatcgatgacatggtagcatacgcacttaagagtgaaggagggtatgtctgggcttgcaagaattatgatggagatgtgcagagcgatttcttagctcaaggttttggctcat

SEQ ID NO: 64065 - DNA, 265 bp, Zea mays
cacaactatggatgcagtgaacttcatagaatcatgtgaagaaggtcatgttgctgcaacagtgactccccagcatctcctcctcaataggaatgctttatttcagggtggcttgcagccacacaattattgcgtgccagtactgacaagagagactcgtcgacaagctattgtgtctgctgtaacaaatgggagtagacggtacttccttggtactgacagcgctccccatgataaacggaacaaagagtgttcctgtggatgt

SEQ ID NO: 64066 - DNA, 260 bp, Zea mays
gcgaaaacgaaccgaaatgtggagcaggtcttcttcgccatggcaagggacgtgaagcaaaggctcaccgagaccgttgccgctgcggctgagcccccgaccattcagattagcaggccagaccccgaccaggctgacgcagcctcctcgcggcggtggtcgtcgtcctgctgtaacacctgatctggcgactgccgtggcggcgtgaatcttgatgcgcgtgactggactgctaggttactgattgtcgcctgtgttca

SEQ ID NO: 64067 - DNA, 262 bp, Zea mays
agaagagcggcggcgcgggcggacaaggagcaggcggaggaggagttgtgccaagccacaatgggtatctcgcgtgactcgatgcacaagcgccgagccaccggtggaaagcagaaggcctggaggaagaagcgaaagtatgagcttggtcgccagctcgccaacaccaagttgtcaagcaataagacagtgaggagggtccgtgttcgtggaggtaatgtgaaatggagggctcttcgccttgatactggtaactactcat

SEQ ID NO: 64068 - DNA, 244 bp, Zea mays
catcgatctacacacatacatagtttcttctactacacgacgacaaccatggggaagcctgcgaagatcggagagtggggtggatacgccggcgatcgtcgggatctgagggctactccggaccggctgatcgaggtgaaggtcacggcggacaacaccagctgcatccgctccatctccttcatctacatcggagccgatggcaaaccgtacgaggaggggccatggggtttcggccatgctg

SEQ ID NO: 64069 - DNA, 213 bp, Zea mays
gtggccggaaggagtccctactgcagcatctgtgcaagaaatccttttctttcaggcccagacaatggagatgatgtataaaataattgcagatgagctcaaggcaacggacaataaggatatgcaccctgaagattacttgaacttcttttgtcttggaaatcgggaagaaccaccatctaatggtagtccagaatcagagaaatctacaga

SEQ ID NO: 64070 - DNA, 249 bp, Zea mays
atgggctacgtggaggaggatctggtttccaccgacttcaccggtgacagcaggtcgagcatcttcgacgccaaggccgggattgccctgaacgaccacttcatcaagctcgtctcttggtacgacaacgagtggggctacagcaaccgcgtcgtctacctgatccgccacatgttcaagacccagtagagcaagatatttctgcctccctatcgagggtcgtccccgatggcctttggtccagcatca

SEQ ID NO: 64071 - DNA, 271 bp, Zea mays
ccgtgttccgtgtccgcgtccagtgtgtccgctactccgctccccctcagtcctacagttcctcacctagcggtagcgtgcgcgcgggagacgtagatggcggcttcggaggcggcagcggcggcggcaacaccggtgacgccgacagaggggacggtgatcgcgatccacagcctggaggagtggagcatccagatcgaggaggccaacagcgccaagaagctggtggtgattgacttcactgcaacatggtgtcctccgtgccgcgcca

SEQ ID NO: 64072 - DNA, 266 bp, Zea mays
  unsure (1)..(266): unsure at all n locations
gctggtttgaaggctgtgacaacatctgcaacagctgatgccattgaagaatgtagaaagctctgtggcggacatggttacctgaacagcagtgggcttcctgaattgtttgctgtctatgttcctgcttgcacttatgaaggagacaatattgttctgactatgcaggttgcaaggattctaatgaagaccttatctcaattgacatctggaaaacaacctgttggtacaatggcttacatgggcaatgtcantatctgatgcaa

SEQ ID NO: 64073 - DNA, 256 bp, Zea mays
gccgaaccggtgcagcgcctgcaggaagagggttggacttacgggattcaactgccggtgtgggaacttgtactgcgcactccaccgctactccgactagcacgactgcaagttcgactaccggactgctgccagggacgccattgccaaggctaatccggtggtgaaggcagacaaggtcgacacgatctagggggggttccctacggttgggtatcaggaagattgtaaaccgcggtaactcgtcatgcggaac

SEQ ID NO: 64074 - DNA, 212 bp, Zea mays
cgccaacgggagaaagggcaagggcaagggcgtgtaccagttcgtcgacaagtacggcgcgaacgtcgacggatacagcccaatctacaacgaggatgactggtctcccaccggcgacgtctacgtcggtggaaccactgggcttctgatctgggccgtcaacatcgctgggatcctcggcggcgagcgccccctcgtctacaacaccagcg

SEQ ID NO: 64075 - DNA, 264 bp, Zea mays
cggagcgatggcaagccgtacgaggaggggccatggggtttcggccatgctggcacggacgtacaagattgatctgtgcaggttcgacgagagcttgacggagatctccgggaccacgggcccagcctacaacattgacaatctggtcaagtctctcaaatttgtcaccaacaaacgaacttacggaccgtacggcagggacgagggcaccccgttccgtgtcaaggtgatgaacaacggccacgtcgctggcttctttggccg

SEQ ID NO: 64076 - DNA, 265 bp, Zea mays
aaaaggcatatgtgcagcagctggagagcagtaagctgaaacttgcacaactggaacaggaactccagaaagctcgccagcagggaatcttcatttctagctctggagaccaaacccatgccatgagtggaaatggagctttgacttttgacatagaactagctagatggctagaggaccaaaataagcagataaatgagttgaggactgcagtgaatgctcatgcaagtgatagtgatctacgacttattgtagatggcataat

SEQ ID NO: 64077 - DNA, 249 bp, Zea mays
aattactttagtatggggatggatgcagaagaatcttatgcatttcattctgaaaggaagaagaatccagagaagttcaagaatcagctgacaaatcagggtacatacgctaagcttggacttaaacaaggatggttttgtgcttctcttaggcagacaacatcaaggaaccttgctcaaattgcaaaagtaaagatcatgaaaagagctggtagcctctgggaggaacttcacatgtcatcacagcat

SEQ ID NO: 64078 - DNA, 271 bp, Zea mays
ctgccccctcgcagacgagacgcgtggtagctagggttttggcctcgccgcgcacgcctcctgaagcttctagacgttcgaggaggaagaggggaggctcccgccgccgccgccgcagccatggcgtccaccaaggtgcagcgtatcatggggcagcccatcaacctcatcttccgtttcctccagagcaaagcgcgcatccagatctggctcttcgagcagaaggacctccggattgagggtcgcatcatcggattcgatgagtacatga

SEQ ID NO: 64079 - DNA, 256 bp, Zea mays
gcactggctgtgcctgctgtgccgcccagtctaatgcagatggccgcgtcggtcatctcctccgctcctcggcggcggcggcggctccggggcacaggcggcaacggtgaagtccgtcctcgtgtaccccatcacgtcctgcaggggaatctccgtgccccaagcccccaccaccgccacggggtgctatgtgggatgccagtggatgctcgtcaactccaaagggagacgcatcacccagagggtggagcccaag

SEQ ID NO: 64080 - DNA, 215 bp, Zea mays
ctgaaaccgagaggttgcgagtcatccaatgcctggaagcagccatcgaacggagggtatctgagggtgtgaagcttgagctgtgcaccaacgacaaggtcgggctgctatccgaggtcacccgcatcttccgcgagaacagcctgacggttacgagcgcggaggtgaccacgcggggcaggatagccgtgaacacgttctacgtgcgcggctcg

SEQ ID NO: 64081 - DNA, 268 bp, Zea mays
gtcgtatctctaccgagactggagtacatctagctgattatgcctgaagctcttcgctcgaatactcagccaccattgttaatcaggcgatctctccggccagacaagttgtccaggcgggtgcaatggagcaaaagagggatatgaaataccagctgggaccgatatatttgtttcggtatacaagctccacagatccccgtatttctgggaccggccaaatgagtttgaacccgagaggcttatccgtccgaagaaggacgagagc

SEQ ID NO: 64082 - DNA, 265 bp, Zea mays
aaaagaaaaagatagaagttggtgagcagaaaaagaagaggatcaagtctgatacagattctgcacgattttctgctgcatctatgaggaatcaacttgaccaagctgcaagccttaaaggagagcaggttgctgctagggtaaaatcagatgacgaaaaaaatgagtggtttgtcgtgaaggtcatacatttcgataaggaaacaaaagagtatgaagtacttgatgaagaaccaggtgatgacgaagagagcctcaaaagaag

SEQ ID NO: 64083 - DNA, 267 bp, Zea mays
tggtcgcgcaaaacaactgagaagagctgctggaggtgcgcatggtgaggggagttgacctcgccatctgcgacctccgatccagcgacccctacgtcgtccttcgcatcggcaaggcgctgaaagtgaagacgcgagtggtcaagaagagcatcaatccggaatggaacgaagacctcaccctctcccgtggatgtgcgtccttggttccattgaaattcttttcagcagacattgtcccatatgggtatctaaatatgcttactg

SEQ ID NO: 64084 - DNA, 247 bp, Zea mays
gtccattctcattctcagtgtagagaggggaagagccacaggcgcaggaacagagagagagagagagcagtgcgggacacgcacctctgctgcctgtgcgtgctccttctcctgggactggcgtccggccaggtcctgttccacgcgttcaacggggagccgtggaagcagagcgggcatctggtataacctcctgatggggaaggtcgacgacatcgcctccgccggcgtcacgcacgtctggctc

SEQ ID NO: 64085 - DNA, 276 bp, Zea mays
tgaaatttgttctccatctataattcacaagaactttaagtcgtccaatattttactggacaccgagctcaatcctcacatttctgatgctggacattcaagttttgttccagatgctgaattccaggcttcagatcaggggtctggtatagtgcccctgaggtcgagatgtccggtcagtataccctcaagagtgatgtctacagctttggggtcgtcatgctggaactcttgacaggccgtaaaccatttgacagttctaggccccggtcagag

SEQ ID NO: 64086 - DNA, 272 bp, Zea mays
ctctccttcccggtatcctccgcgcgttgccttcgtcccctccatctccggcttcgtcgccggcgagcccgacaccgcgaatcggatccgccgacaaggcgagagggaaaagatggggcttacgttcaccaagctgttcagccgctgttcgccaagaaggagatgcggatcctgcatggtgggactcgactccgccggaaagaccaccatcctctacaagctgcagctaggcgagatcgtcagcaccatccccatcatcggattcaatgttg

SEQ ID NO: 64087 - DNA, 276 bp, Zea mays
ctcaagtcgagcgggcgcaccggcgtgatcgcctcggaggaggaggacgtgcccgtagcggtggagcagagctactccggcaactacatcgtcgtgttcgaccctctcgacggctcctccaccatcgacgccgccgtctccactgctccatcttcggcatctacaaccccaacgacgagtgcctcgccgacgtcgacgacaatgacacccttgattcggtggagcagaggtgcatcgtgaacgtgtgccagccggggagcaacctgctggccgccg

SEQ ID NO: 64088 - DNA, 272 bp, Zea mays
aacaaggtgcagccaccgtttgttatctggcattgcatcctcaggttgctggagtcaccggcaaatactttgtggatttcaatgctgttgaactaaaaccgcctgcaactgacaaggagttgtccaaaaagctctgggattttgtgtcagcctactccagtgatataactgccgattagttctcctacgccagctggtaaataaaggtcgatctgaatgagagatcatgtttcagtaatagaacaaggtgatccagcagtgtaatatctact

SEQ ID NO: 64089 - DNA, 271 bp, Zea mays
ggtagcccagcgaacgagcggatgtcgacggagggcaccgggctcagcctggggctcagcaacaacctgctggggtggatcctgctgggcgtcttcggcctcatctggtccctctacaccgtctacacctccacgctcgacgggacgacgactccggcctctcgctctgaactcatccgtcgattattcctagctacgactgtatttttgttcagcctgacccgtgagttcgatcgatctatgcatgcgttggtgcagacgaagcttaaga

SEQ ID NO: 64090 - DNA, 266 bp, Zea mays
gaaggatcaatttatggtggatatgcttcacagccttgggaaaggcacagtgatttttatggtgacatgaagacattcctcttcaaatgctatcctcaagcatccatttttcgtcctactggagcaaacaagaatttgcaaggtgtgctgtaaacttcagctctgagaacatacccaatggtattggatttggagggcagccacatcatttcggactctttttatcagcaaattttgaccaagggcactcatttacgtgtagcaca

SEQ ID NO: 64091 - DNA, 270 bp, Zea mays
gacaacacgttcatagaagacaactcgttgccatcattctcaaaggctgttaatcagcgcgacgctgaccttgtctacttctggcagaagtaccggaaattggcagacagctcacatgagaaaaatgaagctcggagggattgcttgaagtgatggcccacaggtctcatgttgacagcagtgttgagctcattggaagccttctctttggctctgaggacggtccaagggttctgaaagccgtccgtgcagctggtgagcctctcgtcg

SEQ ID NO: 64092 - DNA, 271 bp, Zea mays
gatccccagagggcaggagaagttcctcgccatcatggatctcaagggctggggctacgcaaactgcgacgtccgggcctacatcgcggccattgagatcatgcagaactactacccggagcggctgggcaaggcgctgatatcaacgtgccctacatcttcctcaaggtgtggaagacgatgatctaccccttcatcgacgccaacaccagggacaagttcgtgttcgtggatgacaagagcctgcgggagacgctgcggcgggagatcg

SEQ ID NO: 64093 - DNA, 272 bp, Zea mays
gagaagaacatcgattttgctgctcacagcaaccaggaggactctggttctcttctgttcatccttattggaaatttggcattcccgcttatccttatcggtggtctgtttttactttcaagaagggcacagggtggcctcgtggacccaatggtctcggctttccccttggttttggtcaatctagggccaagtttcagatggaacccaacactggtgttacatttgatgatgttgctggtgtcgatgaagcgaacaagacttcatggaag

SEQ ID NO: 64094 - DNA, 271 bp, Zea mays
gacaacatgagtcttcaaaaggcagaggtctatgaacaatcgcttattcagagcgatggaatgaagactgccgagagtgctcatttcatgcaaatatatcgtagccgtgaagtaggccaatcttacattacatccatcgcacaacattgctagccacattgcatgctatgtggctagtaataagaatcagaccacaagtgatattttgcaatggtccagggacatgctttcctctatgcatctcggcgttccttctgaaggtgcttggttt

SEQ ID NO: 64095 - DNA, 271 bp, Zea mays
gagcgcgccactgctcgcttctgggctgcctacgccgacgacaagttgtttccagcgtggtacggcatggtgaaggcccaggcggaggaggagagggcggagaaggcgaaggagacgctcgccgccatcgagcacatggaatggcctttggcaagtgctccggcggcaacgccttcttcggtggcgactccatcggctacgtcgacatcgtgctcggctccttcttgttctggttcgaggcggtgcgcagggttttcgacctggagatcat

SEQ ID NO: 64096 - DNA, 189 bp, Zea mays
gtcggcgcgagggtggtggtggcggctacggcggcggcggcggcggctggagggactgatgtgtgggcccatcctggcttcggccgagttatcttatctatctatagtatcgtgttaccgttcgcttctgtcaccgtgtagtgtccgttctacctttggattaggtgttggtacccctgttgttccctt

SEQ ID NO: 64097 - DNA, 270 bp, Zea mays
gaggttttgggctgtggagttaccgagcaggaaattttgaaaagaaatggcaggagagatcatgtggcatgggcctttggattgggattggagcgtcttgcgatggtccttttcgacattccagatattcgactattctggcgaatgataaacggttcacgtcccagttctcagaaggcaagcttggtgtcaagttcaagccattttcaaagtttcctccttgttacaaagatatgagtttctggatcaatgatgcatttacagaaaaca

SEQ ID NO: 64098 - DNA, 269 bp, Zea mays
gtgttcccagagataatggttcctcttgttggaacaccacaggaactggggcatcaagtgactcttatccgccaagttgctgagaaagtgttcgccaatgtgggcaagactattgggtacaaagttggaacaatgattgagatccccagggcagctctggtggctgatgagatagcggacaggctgaattcttctccttcggaacgaacgacctgacgcagatgacctttgggtacagcagggatgatgtgggaaagttcattcccgtc

SEQ ID NO: 64099 - DNA, 269 bp, Zea mays
ctgtggaacagcgttggaccatggtgtcacggccgtcggctacggcacagagaacggcaaggactactggatcgtgaagaactcttggggcagcagctggggcgagtccggctacgtcaggatggagcgcaacatcaagcgtccagcggcaagtgtggtatcgccgttgagccgtcgtaccctctgaagaagggcgccaaccccccgaaccctgggccgaccccgccttcccccaccccgccgcccaccgtctgcgacaactactactc

SEQ ID NO: 64100 - DNA, 266 bp, Zea mays
tatctctgcgcaggccgctggccatctggtcaagagccacatgaaatacaacagatccagcaaggatatgtccaagacccttgcagaggaaacaggcaaacccaagaaatgctgaataatatcaagtagttgttctaagccctttgggagaaaaggagcagaaagggtcgtacaggatgactttcttgcggcatgctcaggtggaaaggggggaaaaagaccttcaggcgaaaagagataattcagtcgccttgtcatatttacca

SEQ ID NO: 64101 - DNA, 264 bp, Zea mays
atagcgctgatttgatctctcagctacgagctgagcaccacaaagagaactccactgctggaattgatgtcatcacaggcactgttggggacatgcaaaagctagggattcaagagtcgttcaaggtgaagcaggcattcttctgtctgcaacagaggctgccgagatgatcctcagggtcgatgagatcataacctgtgccccgcgcagaagagaggataggatgtgatattacacgctgtttctcgatgtagcgggatgctc

SEQ ID NO: 64102 - DNA, 269 bp, Zea mays
cacatacatagtttcttctactacacgacgacaaacatggggaagcgtgcgaagatcggagagtggggtggatacgccggcgatcgtcgggatctgagggctactccggaccggctgaccgaggtgaaggtcacggcgacaacagcagctgcatccgctccatctccttcatctacatcggagccgatggcaagccgtacgaggaggggccatggggtttcggccatgctggcacggagtacaagattgatctgtgcaggttcgacgag

SEQ ID NO: 64103 - DNA, 269 bp, Zea mays
ccaacgtcgcctacgacatcgtcaacggcaagtccacgcccgtccggaacgccgacgcgccggtctacgtcaccatcggcgacggcggcaacatcgagggcatcgccgacaacttcacgcgcccgcagccgggctactccgccttccgggaggccagcttcggccacgccacgctggacatcaagaaccggacgcacgcctactactcgtggcaccgcaaccacgacggcgccaaggtcgtcgccgacggcgtctggttcaccaacagg

SEQ ID NO: 64104 - DNA, 184 bp, Zea mays
cgccgccgttgcgcgaggagttgatgattgcgtacaaggacgacgaggtcgtggacgcctgagtgcggcaagcagagaggaggatcgacgccagcagcgtcttatcttaattgccttgttgttcaatgatgaatgatcgaattcccttgggttagctttattattgttgttgttattattaatt

SEQ ID NO: 64105 - DNA, 193 bp, Zea mays
ctcggcggcggcgccctcctcgtctacaacaccagcgccctctcaggctaaggatatccaatgcatgcgcttcttgcgattcgtcatgtaaaatcagggtgtctgtctataatctagcctccatggatgctcaacttcgtcatgtaacaataatcagtgctactcttcattacataattttgatgctatatat

SEQ ID NO: 64106 - DNA, 261 bp, Zea mays
gccggacagagcacatgttctttgcttcagacgagaggattaaggctgtcaggcagatgattatggctcccacgcttgagctgaggcagcaggcgctcgaccgtctcttgccgtatcagaggtctgacttcgaagcattttccgtgctatggatggactcccgctgaccatccgactcctggaccctcccctccacgagttccttccagaagggaacatcgaggacattgtaagtgaattatgtgctgagacgggagccaa

SEQ ID NO: 64107 - DNA, 263 bp, Zea mays
gcggaaatggagctttggcatttgacatggagtatgcacgctggttggaagagcacaacaaacatgtaaatgagttgaggcttgcagtcaatgcacatgccggtgataatgatctccgtggtattgttggtagtttatggcacactacgatgaatttttcaggctcaagggtgtggcagctagatcagatgtttttcatgtgctgtctgggatgtggaagacccctgctgagagatgtttcatgtggttaggtggcttccgat

SEQ ID NO: 64108 - DNA, 264 bp, Zea mays
gatctatgctacaaaatatgccaaggatcaggacacatttttcgaggactacgctgaagctcatgccaaattgagcaatcttggggcaaagtttgacccgccaaagggtatctcactcgagtagttgtggatggggtgactgaacaggaagggtcatgtttctttgcgtgaccattttcgaaggttggcaaggaaaagttattggggttgaatgatagctccacaaattggattcaccgattaaaggatttttttcttagcgtg

SEQ ID NO: 64109 - DNA, 243 bp, Zea mays
gaacgacctgacgcagatgacctttgggtacagcagggatgatgtggggaagttcattcccgtctatcttgctcagggcatcctccaacatgaccccttcgaggtcctggaccagaggggagtgggcgagctgggaagtttgctacagagaggggccgcaaagctaggcctaacttgaaggtgggcatttgtggagaacacggtggagagcttactctgtagccttcttcgcgaagctgggct

SEQ ID NO: 64110 - DNA, 265 bp, Zea mays
aagtggtacaataagttttcaagagttgaaccaaaagaaataccgcacgcccctaattctaggaattggcctacttgtgttgcaacagctaagtggaataaactgtatagtattttattcaggtagcatcttcaagctgcagggctcaagaacagcaacttggacgcatgtgtacttggagctctcgaggttcttgccactggtgttacagtcacgttcttggacagagctggccggagaatcctccttattatatcttcttgtg

SEQ ID NO: 64111 - DNA, 266 bp, Zea mays
ggaggacggtaggatatttgaagccgagcttttggttggtgccgatggaatatggtcatgaggtgaggaagacactattcgggcactcagatgccacctattcaggttacacctgctacactggaattgcagatttgtgccgcctgatatcgatacggttgggtaccgggtatttctgggccacaaacagtacttcgtctcttcggatgtcggtgccggtaaaatgcaatggtatgcttttcacaaggaagaggcttgttgcactg

SEQ ID NO: 64112 - DNA, 262 bp, Zea mays
ctcgcgactgcagttacctcagttcatgaaatggagaatggctttcaaatatggtccttcagtggcaagcatctttacaaggtgtcaaaggatcatttctatcagtttatatggcgcccgagaccgccctcactactgacggccgagaaggaagaagagatctcaaggaacctgaagaagtatagcaagaagtacgaacaagaagaccaggatgcattcaatcagttgagcgagcaggaccgcaagaggcggacacagcttc

SEQ ID NO: 64113 - DNA, 262 bp, Zea mays
gggcagctctggtggctgatgagatagcggagaggctgaattcttctgcttcggaacgagcgacctgacggagatgacctttgggtacagcagggatgatgtgggaaagtgcattcccgtctatcttgctcagggcattctccaagatgaccccttcgaggtcctggacgagaggggagtgggcgagctggtgaagcttgctacagagaggggccgcaaagctaggcctaacttgaaggtgggcatttgtggagaacacggt

SEQ ID NO: 64114 - DNA, 259 bp, Zea mays
ggaggagacagcaggcccacgtcggaggacccgaaggagacatagagacctatttttgatgtgtttggatgttctggcgcctgcttattttgaggactcttaatatttctgagtgtataataggaacttggtcacctctgcggcttccctgctgcttatttgtttttacatggttagaccaggaaccttcacgagctgtagaatttagttcttgttggtcatttgtgtgtgtgcctgacgggtataatcccttgttcaa

SEQ ID NO: 64115 - DNA, 287 bp, Zea mays
aatgtgaaagtcgtccctatccttgttggtgcacttagctcccaaaacgaagccttgtatgggcagctgctctccaaatatgtggatgacccaaaaaaacttcttttccgtgtcgtcagacttctgccattggggatccaggtttagctacacatactacgaaaagaagcacggtgccatccataaatctatcgaggccttggaccgtatgggcatggagatcatagagactggcgatcccgtagcgttcaaagaatacctgcaggagtacgagaacaccatatgcg

SEQ ID NO: 64116 - DNA, 232 bp, Zea mays
agcgaatccctcgcatcgcattcgcagcctttgctgcatcacaccaccgcgaaaccccagcagccgcatcgatggcgcctaaggcggagaagaagccggctgcgaagaagccagcggaggaggagcccgctgccgcgaaggccccggcggcgaagaagcccaaggccgagaagcgcctcccggcggccaagtcgtccggcaaagaaggtcgcgacaagaagggtaagaagaa

SEQ ID NO: 64117 - DNA, 272 bp, Zea mays
  unsure (1)..(272): unsure at all n locations
ccgcttcctaactttcaagatggacgacaagttcaaggagatcgttgtggaccaggtcggggatcgcgctaccagctacgaggacttcacaaacagcctccccgagaatgactgccgatacgcgatctatgatttcgactttgtcactgcagaagatgtccagaagagcaggatcttctattccncatggtccccatcctccgccaaggtgaagagcaagatgctttatgcaagctcaaaccaaaaattcaagagtgggctcaatggcattc

SEQ ID NO: 64118 - DNA, 285 bp, Zea mays
cgaccaccgatcgctcctgagcactttccacattccagttccacaccgcctccgctgacggtcgccgtctccgagactccgacagtccgaccgcaagaaggatgagtgaagaggataagactgctgcttctgctgagcagccgaagagggcccctaagctcaatgaaaggatcctctcttctctgtccaggaggtccgtagctgctcatccatggcatgatcttgagatcggtcctgatgctcctgctgttttcaatgttgttgttgagatcacaaagggaagca

SEQ ID NO: 64119 - DNA, 283 bp, Zea mays
cgacgacaaacatggggaagcctgcgaagatcggagagtggggtggatacgccggcgatcgtcgggatctgagggctactccggaccggctgatcgaggtgaaggtcacggcggacaacagcagctgcatccgctccatctccttcatctacatcggagccgatggcaaaccgtacgaggaggggccatggggtttcggccatgctggcacggagtacaagattgatctgtgcaggttcgacgagagcttgacggagatctccgggaccacgggcccagccta

SEQ ID NO: 64120 - DNA, 282 bp, Zea mays
ggaccttcggcgcccgttcaggatccacatcttcccgagcgagttcttggttgacctcttcccccttcggaccacctccaaggctcttggtgtagcttgccactctcaccaatcaagttttcatgtctgatctcgacattcagatcccaactgccttcgatcccttcgctgaggccaatgctggggactctggtgcggcagcagggtcaaaggactacgttcacgtgcgcatccagcagcgtaatggtcgcaagagcctgactaccgtccagggattgaaga

SEQ ID NO: 64121 - DNA, 277 bp, Zea mays
gcggcggcggggtagcatttgtgctacgagggcttttgcaatggcggcttcggggttcggcggcggcgaggcgttccggctctcggccgcaccaggggccggcttactgaagctgcacaagggcgacatcaccctctggtccgtcgactgcgccaccgacgccatcgttaatgctgctaatgagcgaatgttacgtggcggaggtgttgatggagctatacatcaagctgctggaccagagctagtgcaagcatgccggaaagttccagaggtcaaa

SEQ ID NO: 64122 - DNA, 278 bp, Zea mays
atctcaccccctaccctaccatcagctccatcaatcagaggctgctggtcttggaggccttccaggtgtctcacccctgccggcagccagctacacccactgagctgagggcctagctcccaaatcctgccccgttggcacagggccacaggagcagaagctgggtgggctcaagaggcctggaaacgagcgtcttaattgaggagatgggagactcgaactctagccctggatctgccttcctgctgaaacttgttccacctcagtctcctcatctg

SEQ ID NO: 64123 - DNA, 280 bp, Zea mays
gcaggcccctgtcaaaaactgtgaggttcaatgtcgttaaagtcattccagctggatccgcagctgctggaaagaaggccttcacagcagcctgagtttatagactatgttccatgagtagtctatagaatgatgtctttttaattcaaaagaaatctctcttctaggctggtgcttttcgactataatttggagattgttccaatgtccgtgcaatcatctgaacatgttactacttattgtaccttgtcgtggcaagttttgctaagatctctattgt

SEQ ID NO: 64124 - DNA, 228 bp, Zea mays
gaggaagccgtggctgtgcttccgggactacgactgcaactggaacgtggagatcctgcgggagttcgcgagcgacgtcgcgcacgcccgctggtggaaggtgcacaaccggatgcccaggaagctccagagctactgccttctgaggtcgagcctgaaggccgggctggagtgggagcggcggcaggccgagaaggcgaacttcacggacgggcattggaagcggaa

SEQ ID NO: 64125 - DNA, 294 bp, Zea mays
  unsure (1)..(294): unsure at all n locations
gtgttcagcatgncatgcagntcganngngtgatggttgatgacgngctaggntagtgnatntgntgatggggcgattttctctgggaacgggattaaaaaagagcgaactgaaattgcttgctgagaagaaatgcgttgcccatcttaccagggagaggggaatgcattctgtgatcttccggaagatacccatgctaaccaggagaagtgtagtttagttacagaagcaacagcagcggaatgcatttgccaatacattagctgagacttgaaacatctgcttgccagatgc

SEQ ID NO: 64126 - DNA, 283 bp, Zea mays
gcctcggggagaaattgtcattggaggtccaaatataactaaaggctatttcaagaatgaagctaaaacaaatgaagtctacaaggatgatgagaaaggtatgcgatggttctattctggagacatcggacggttccatccagatggctgccttgaaatcattgaccgtaagaaagatatcgtgaagcttcaacatggcgaatatgtatctctcgggaaggtagaggctgctttgattgtgagcccatatgtggagaacattatgatccatgctgatcctttc

SEQ ID NO: 64127 - DNA, 270 bp, Zea mays
gaacgtcgctgtgaaggatatcaagcgtggtgatgtggcctccaactccaaggatgaccctgccaaggaggctgccagcttcacctcccaggtcatcatcatgaaccaccctgggcagatcggtaacggttatgccccagtgctggactgccacacctccctcattgctgtcaagtttgctgagctcattaccaagatcgacaggcgttctggcaaggagcttgagaaagagcccaagttcttgaagaacggtgatgcttgggtatggtg

SEQ ID NO: 64128 - DNA, 276 bp, Zea mays
gtgctggtaaccttaagatttctaccaactttgtcttctgcacatgaagtctctgccatcaagaagttaatgcgattctgcagctgcaatccatagagacaaaatactgtagaagccgcagcgcaccggattaaagccgcagcaaaccgcagcgaacaattatcttgcttctgatgaaaagtgtgtcgataacagtagcatcgtgtaacattattgtgaccacgcatttcagaaatgatgaagtgatagcttcacttccatttcttctgaaaagcg

SEQ ID NO: 64129 - DNA, 277 bp, Zea mays
gctgcttgcagccttggatatttgcggatgcggagtgaagttaccatggcatccttgctaagaataagaaagtaatgtggttatgaggagatgtgtaattttgtggcgatattatttgcaacaatgatgtatatatgggcatgtttggttcacggctaactgtgacacactttgcctaaggttagtcgttcgaattgaagaactaaccttaggcagaaaaagttaggcaaagtgtggaaatttatgcagcaaaccaaataggcctatagttttactg

SEQ ID NO: 64130 - DNA, 275 bp, Zea mays
gtacaccacagttgaccgactccattgtgctaccagagaagtttgagttatttggacagaacatcgacctgagtccactgaaaggcatattttcttccatcgaaaatgcagcatcctcggttgcaaagaccatatctgagcagcctccgctcaaaataccgatcaggacaaacaatgctgaatcgtggttgcttacgacataccttgacgaagagctcaggatctccagaggcgatggcagcagcatctttgtgctgttcaaggagggaagtact

SEQ ID NO: 64131 - DNA, 283 bp, Zea mays
ctcggggtcgcggttgcttcctcgcggcggattcgtatcttccgcggcagcagggagggtacggtactcctccggccggcgggaggagaagaggagcttcgagatgggggcgtccctcgcttccgcgggcttggtgaactacccgcttgtcgcggcgctcctcgcgttcgctctcgcgcagtcctccaagttcttcaccacctggtacaaagaaggtcggtgggatgccagacaacttatagcttctggcgggatgccatcatcccactcagctacagtgaca

SEQ ID NO: 64132 - DNA, 277 bp, Zea mays
gagagaggggtaaatgagctctcacaggctagcagatggccagtatgggcttccctgttgttgtacaggcagatcctggatgagatcgaagccaacgactacaacaacttcacgaagagggcgtatgttggtaaagggaagaagttgctagcacttcctgtggcatatggaaaatcgctactgctcccatgttcattgagaaatggccagacctagccaccagagaagctgcaatgcaaggttcaggttaggctagatagaaagttaaatggggcaa

SEQ ID NO: 64133 - DNA, 272 bp, Zea mays
tggtaagcaggccgtttcagcatcaggcaagtggctgaatggtattcgaaaatggtattacaatgctgcaggattcaataaactggggttaatgcgagatgatacaatatacgaggatgaagatgtaaaagaagccataagaagacttcctgagaacctttataatgacaggatgtttcgcattaagagggcactggacctgaacttgaagcatcagatcttgcctaaagagcagtgggccccaaatatgaagaggaaaatttctaccttga

SEQ ID NO: 64134 - DNA, 261 bp, Zea mays
ccgcagccgccgggcgccgccgacggggatcggagcaagatgttcttccacatcgtgctggagccgaccatgcagctgcacccacgacacttcgggccgcacctccgcgacaagctcgtttccaagctcatcaaggacgtcgaaggcacctgcagcgggcggcacgggttcggtgtagcgatcacgggtgtggaggacatcggcaaggggctcatccgggaaggcacgggatacgtcaccttccccgtcaagtaccagtgc

SEQ ID NO: 64135 - DNA, 280 bp, Zea mays
ctcccttatctgtaaggttgagttggtggaacctccagagtctgctgctgtgggggagcgtgttacctttgctgggtacgcgggtgagcccgaggcttccctcagtggcaagagcaagacgtgggagaagcttgccgccgagttgcacagcaacggtgagctggtggcgtgctacagagatgtgcccttcactacctcggctggagtctgcagggtgaagacaatagcgaacggagagattcgctagtaccacatcaccgaactgcagccagctgagccg

SEQ ID NO: 64136 - DNA, 275 bp, Zea mays
gtttcgctctcgcccgcgtcgacttcctagggttcgaggaacgtccgtccgtccgtccggggaaggagcaggagggaggcggagatgatcgaggtggtgctcaacgaccgcctggggaagaaggtgcgggtcaagtgcaacgaggacgacaccatcggcgacctcaagaagctggtggcggcgagacggggacgcgccccgagaagatccgcatccagaagtggtacaacatctacaaggaccacatcaccctcaaggactacgaggtccacgac

SEQ ID NO: 64137 - DNA, 262 bp, Zea mays
cctcttcaacttcatcagcggtaagcatttgaaaattctgaatcttggagatggacaaggtagaactagtggtgttactgctgttcttcagagcactgatgatgattctgttgatccacatctggagcggataaaaaatcaggccggtaatgaggaaagtgatgaagaggatgaagattttgtggcagacaaggatgatagtggatctccaaccgatgattctgatgcagaaggctctgatgctagtatgagtggaggagaa

SEQ ID NO: 64138 - DNA, 274 bp, Zea mays
aaacagttctcataaatcattgtcctcataacttgtaatgtcgtggactcagtatgatgatgactgggtgttgcccagtgccgatatcactcttgttctggttgggaaacttggctatggcaagagtgcaactggaaatagcatccttggacgggtagcatttgtatcagaatattcacatgccagtgttactaatacttgtcagttgggaagcactaccctgaaggacggccgcaccatcaatgttattggatacaccagggttatttgatat

SEQ ID NO: 64139 - DNA, 221 bp, Zea mays
gttctacaaacatctcaagagaagccggtccgccaggttatgggcctggggaaagtcatggcaatatcacttcatggatttcgacaggcgggcagagaatgtttacaggtccttcaactatcccgaacgaagtcgggcagcaaggatatggcccttcaggaatcccgggaacggatggctcaaggagtatggacttgaaagcctttccaccaggatatgga

SEQ ID NO: 64140 - DNA, 277 bp, Zea mays
gcagctttgagtccatgatttttgagctctatgaagagggtcggtttgatcaggctgacagattgttccaggacatggccaagaaggggttcaggccaaccatctgcatgtatgaggcaaagatcggtgctttatgcagggaacggaatgtggatgatgctgtggaagtgctggaagaggagctgccaaagaatgaccttgttccaacagtgacaacatataacttgctcatgaagggtctatgtgacacgatgcaatcaatgagggcactagaata

SEQ ID NO: 64141 - DNA, 275 bp, Zea mays
gcaggtagtggatcttctggtttgatgacatcagtgttggtgtgccctgatggaaaaaccatcgaagctgaagctgcccatggcacggttacccgtcatttccgtgtccaccagaaaggaggcgcaaccagcacgatcagcattgcttcgatctttgcatggacaagaggacttgcccacagggcaaagctcgacgacaacgctagactactcgacttcgctctcaaactcgaggctgcttgcgttgagaccgtggagtccgggaagatgactaa

SEQ ID NO: 64142 - DNA, 274 bp, Zea mays
gggctgtcgatgatgagaaaaccctggggtattggcaacaggacaagtggaatggttccttctctgttaagtggcacattgtcaaggacgtgcctaacaacattctcaaacacatcatcctagagaacaacgagaacaagccactcacgaacaaccgtgacactcaagagatacacctagaacaaggccttcagatgctcaagatatttagggagcatgtcagcaagacgtccatcttggatgacttcgccttctatgagagtcgccagagctg

SEQ ID NO: 64143 - DNA, 272 bp, Zea mays
ggattccctccgccaagcgcggatctgaacgctgcgctccgtgtcgccgctcgaatccgccatgaagggggccaaatccaagggcgccgccaaggccgatgccaagctggcggtgaagagcaatggggcggagaagcccgccaagggcaggaaagggaaggccggcaaggaccccaacaagcctaagagggctcccagcgctttcttcgtgttcatggaggaatttcgcaaggagttcaaggagaagaaccctaagaacaagtctgtcgctg

SEQ ID NO: 64144 - DNA, 271 bp, Zea mays
  unsure (1)..(271): unsure at all n locations
gttaattctatgaaatcgtttgataatcttcacaactggcgtgatgagtttctaattcaggtgaaatatttccaacggtttattagttcagtgagtctcacaattcataacaatcctgtttcttcccctaactctggatgttttactttgcaggcgagcccatcagatcctgacaatttcccttttgttctgttgggtaacaaagttgatgtagatggtgggaacagccgtgtggtgtcggagattttggcanaggcatggtgcgcctcta

SEQ ID NO: 64145 - DNA, 272 bp, Zea mays
gatgaagagaaaaatgcccaactattcaagtgcgaccctgctggtcacttctttggacataaggcaactagtgccgggctcaaggagcaggaagcaataaattttctggagaagaaaatgaaggatgacccgaaattcacctatgacgaaactgtgcagattgcaatatctgcgttgcaatcagttctccaggaagatttcaaggccactgagatcgaagttggtgttgtgagaaaagatgaccgcgttttcagagctctcacgacagagga

SEQ ID NO: 64146 - DNA, 274 bp, Zea mays
gtgaagagtatgaagaagaggaagagcgtgataacaccttatgtggatcctgtggaacaaatgacggcaaggacgaattctggatctgttgtgatagttgcgagcggtggtaccatgggaagtgtgtcaagatcacgcctgcacgagctgagcacatcaagcactacaaatgcccagattgcagcaacaagagggcaagagcctagcaccaagccctgctgtgactctggagtgaagtaagcgccaaatcattgatgtctgcagatatatgcct

SEQ ID NO: 64147 - DNA, 292 bp, Zea mays
gtgacgtgcccctcgtgcgagcgctcaaccttcttcttcaccaggcagttgggatgcgtgcacttgaagtagctgcgcgggtactcgctgtgcttcacctgcttctgcccgtacttcctccagctgtacccgtcctccgctggcgctgtaacggccattgccgccgggtagtcttccctcgcatcagcttcctcggctctctggccgtaatccgggggtgatgcgtgttcattgcctgcaccggtgccagacgcaagacggctgagcttggagtcacgagcaccgtcacttt

SEQ ID NO: 64148 - DNA, 285 bp, Zea mays
caggaaccaacaaaacaccagtatgactgggatgttgcgactacgtttgcttttctacagaagtacggtcttacaggagagttcaagagaaatgttgagtgcaaccatgctactctatctggacacagctgccatcatgaattggagactgcacggattaatgggctgcttggaaatatcgatgcaaacactggtgatcctcaagttggttgggacacagatcagttcatgacagacattgcagaggctactttggttatgtcaagtgtagttaagaatggtggc

SEQ ID NO: 64149 - DNA, 285 bp, Zea mays
gcagcacacacgcagctagctaggagcagcagcagagcagcggcgatggcggcctccatgatctcctcgtcagctctggcggtggcgcctcagggcctgccgcccctcggccgccgcgcctcctccttcgccgtcgtctgctccaagaagaagatcaagaccgacaagccctacgggattgggggtggcctgaccgtcgacgtcgacgccaacgggagaaagggcaagggcaagggcgtgtaccagttcgtcgacaagtacggcgcgaacgtcgatggatacacc

SEQ ID NO: 64150 - DNA, 285 bp, Zea mays
atacggcgtgtttgaccataagctccctgctgcttttaagaagctttccttcgaccgctacctgtcggtgcaaaacgtgaagaaggtggtttcagaagcagatggctatcagccccatctcatggcacctgaacaagggtaccggcggcttattgagaagggcatcaactatttcagaggaccagctgaagccacggttgatgcggtccacgttgttctaaaagacttggtcaggaaatccataggggagacagagcaactcagaagatttccgacgcttcagca

SEQ ID NO: 64151 - DNA, 285 bp, Zea mays
gcaggaggttggatttcagaggcagaagctttcagccaggcgggctcagggcgcgggcacatcaatggctggcaaggaaatcctccacaaggtgaaggacaaggtgaaagatgcatttagttcatcaggaccagaaacagggaaaggcaagacaaagttatcaggcaagcgtgtcaagcatggttaccatctggtgaagggcaaatctaatcatccaatggaggattatctagtggcagagtaccggcaagttggtgaacatgatttgggattgtttgctatatc

SEQ ID NO: 64152 - DNA, 286 bp, Zea mays
  unsure (1)..(286): unsure at all n locations
gctgatgattgttttccagcatcaaattttgctagctcgaatagtttcctacaaggtgaggagctaggaaagttgcagattgacataggcaagttcatggcgagaaagtctatttggagcagggttacagatgatgggttgcagacacgatagcatctggagaaccaacttgcctcttctttggctttgaagtctgcacaggagtaccgtcaatgcctcctatcttatgtacgatttttagaanaagaagcagatgaatctcgtttacgtgaagtttgtgagagtt

SEQ ID NO: 64153 - DNA, 280 bp, Zea mays
  unsure (1)..(280): unsure at all n locations
agaagacatactacaaaacggcatcattgacagcanatagttgcaaggctgttgctattcttgcagggcacacagctgaggtctcggtgcttgcatatgaatatggtcgaaacctgggtctagccttccagttaattgatgatgttcttgatttcaccggcacctctgcatcccttgggaagggttcattgtctggaattcgccacggaattattactgccccgatgctatatgcgatggaggaattcccacaactgcaagaagttgttgaccggggttt

SEQ ID NO: 64154 - DNA, 281 bp, Zea mays
cacacatacatagtttcttctactacacgacgacatcatggggaagcctgcgaagatcggagagtggggtggatacgccggcgatcgtcgggatctgagggctactccggaccggctgatcgaggtgaaggtcacggcggacaacagcagctgtcttcgctccatctccttcatctacatcggagccgatggcaaaccgtacgaggaggggccatggggtttcggccatgctggcacggagtacaagattgatctgtgcaggttcgacgagagcttgacga

SEQ ID NO: 64155 - DNA, 285 bp, Zea mays
ctattggccagctcaaggagttcgagggcaagaagctcgtctcggccaccaaggagggcctgaagctcgatgagagtgaggatgagaagaagcggaagttcgagggcctgtgcaaggtgatcaaggaggtgctgggcgacaaggtggagaaggttgtggtctctgaccgcgtggtggactccccctgctgcctggtgacgggcgagtacggctggacggccaacatggagaggatcatgaaggcacaggcgctcagggactcgagcatgtctgggtacatgtctc

SEQ ID NO: 64156 - DNA, 277 bp, Zea mays
  unsure (1)..(277): unsure at all n locations
ctgggtctgccgataactctgtccgaatgtgggatcgtcggaatctggggtcaagaggaagctgggtctccaattcacaaatttgaagggcataaagctgctgttctttgtgttcagtggtcacctgacagagcatctgtttttggaagttctgcagaagatgggttcctaaacgtgtgggatcctgagaaagtggggaagaagaaaaattctaatgtcccagccgggctctttcttcagcacgctggtcattaggatangattgtagacttccact

SEQ ID NO: 64157 - DNA, 276 bp, Zea mays
cctgctcttcagggggagaacacaaaaatgtcagctagtgacgcaaattcggcgatatacgtgacagatagtgctaaagaaataaagacaaaggtctgccctgctataaagtttgtttttttagctggaaaaatatcagactacccattttagttgtcccatttaagttatgacgaaagcggttattagaccgaaccaagaattagttgatctcctgcatatatctcttataatttgtttccaatgtttcaggtgaataaatatgccttctcagtg

SEQ ID NO: 64158 - DNA, 277 bp, Zea mays
ggaatctgcaagtttaagaatgagaatgtttgagtcaaggttttggactcggttaacatcaccctgggtgctgaggatgaactgaaggatgctgttggtctggttcgcccagttagcgttgccttcgaggtgatcactggtttcaggctgtacaagagcggagtttacactagcgaccattgtggaactacaccgatggatgtgaaccacgctgttctggctgttggctacggtgtcgaagatggtgtcccctactggctcatcaagaactcatggg

SEQ ID NO: 64159 - DNA, 280 bp, Zea mays
cacatacatagtttcttctactacacgacgacaaacatggggaagcctgcgaagatcggagagtggggtggatacgccggcgatcgtcgggatctgagggctactccggaccggctgaccgaggtgaaggtcacggcggacaacagcagctgcatccgctccatctccttcatctacatcggagccgatggcaagccgtacgaggaggggccatggggtttcggccatgctggcacggagtacaagattgatctgtgcaggttcgacgagagcttgagga

SEQ ID NO: 64160 - DNA, 279 bp, Zea mays
  unsure (1)..(279): unsure at all n locations
cactatattcagactcatcaggataatgttaagcaaaatgttctacttcaactacttgcccttgttggcaagcagccagcttttcatcaattgcgatcagttgagcaacttgcctacatagcgcttcttaggcaaagaaatgattctagtatccgtgggttgcaatttataatccagtcaacggttcaggatcctgctaatctggatgccagagttgaaaacttnctcaacatgtttgagagcaatgtctacaatatgtctgatgcagagttcaagagt

SEQ ID NO: 64161 - DNA, 276 bp, Zea mays
  unsure (1)..(276): unsure at all n locations
atcgcagcaaccgccgctaggaagaagagctccgcgatatccaggtcgcgcgagaatatgccgaagcagatccatgagattaaggtgcttctcctcaccgcgacgaggaaggatgcccgctcagtgaagatcgagatgagtaaggtttttgtcaagttcaaggtgcgctgctccaagtacttgtacacgctctgcgtcttcgatgctgagtaggcanacaagttgaagcaatctcttccaccatgtntgatcgtcgacgaggtctgattggataca

SEQ ID NO: 64162 - DNA, 282 bp, Zea mays
  unsure (1)..(282): unsure at all n locations
gagattcttgatctgcagcatagcgtacgantgtcggtcggggcatcactgcgcgcagatcttgcataggacccttggcatcaacgcaagtgttcgtgcgagtcttcacttctacaacacaaaagacgaggtggataccttcgtcgacgcgcttaaagccaccgttgatttcctcacggatcgatactagtgcggttcagttcagttcccttttttttgccagtttcatcgttctctcgtttgaactgttgtatgcacacacaaaaaagtatgcatatattt

SEQ ID NO: 64163 - DNA, 281 bp, Zea mays
ctcaagaggtgattactttgtgtgagaggttagctgggcaagatgccaatgtaaccactgtacctgttgcagtcttgagatttactcgtcagttgacacggtgcttccaatggacaaatgatgtggctgacagactggcattttcagaggtgctctcaagtgacacagttttcgctgctccaatgaatgagacctaccagcttctcggggtggatgggaatgacatcctcagcttagagaagtatttacaagattattttaccaacattttgaagaagtaa

SEQ ID NO: 64164 - DNA, 280 bp, Zea mays
ggaaggagtcggagggaaccgaaaactcagggtctcgaatttcctaggagcggaggcgatggctgggaagggaggaaaaggattgctcgccgcccagacgacggcggccaagtcggcggataaggacaaggggaagaaggcccccatctcacggtcctcccgcgcgggcctccagtttcctgttggacgaatccaccgtcagctgaagcaaaggactcaggcaaatggccgcgttggtgccactgcagccgtctactctgccgccatcctggagtactta

SEQ ID NO: 64165 - DNA, 278 bp, Zea mays
  unsure (1)..(278): unsure at all n locations
cttggcgttccctgggtcattcttggacactctgcaaggagagctctgctgggagtttcctgtgagtttgttggagacaaggtttgtnttgctctgtctcagggactaaaggtcattgcatgtgttggtgagacccttgagtttagggaggctggttcaaccatggatgttgttgctgcacaaacaaaagcaattgctgagaagatcaaggactggagcaacgttgttcttgcctatgaaccagtctgggctattggaactggcaaagtcgccaccca

SEQ ID NO: 64166 - DNA, 271 bp, Zea mays
tcggcagctaacgacctgcagccaaccatctaccagcgactcagcgagcgagagcagcacacacgcagctagctaggagcagcagcagagcagcggcgatggcggcctccatgatctcctcgtcagctctggcggtggcgcctcagggcctgccgcccctcggccgccgcgcctcctccttcgccgtcgtctgctccaagaagaagatcaagaccgacaagccctacgggattgggggtggcctgaccgtcgacgtcgacgccaacgggag

SEQ ID NO: 64167 - DNA, 277 bp, Zea mays
ctctgctagtgccaggattcgccctatccatcccatcaacctcagctaaggtccccagcggcggcgaagcgatggcggcgcctgtgacggtgtacggaccgatgctctcaccagctgtggcccgcgtggcggcctgcctcctggagaaggacgtgccgttccagatcgagccggtggacatgtccaagggcgagcacaagtcgccgtccttcctcaagctccagcccttcggacaggtccctgccttcaaggaccacctcacaaccgtctttgagta

SEQ ID NO: 64168 - DNA, 273 bp, Zea mays
ccacgcaaagccgccgccgttccctctcgtcttccccagttcccctacgccggtaatcccacgtcctatcagccgccgatccagccttgcttccatccatccatccatccatctcgtcgcttctctctgttccgcgtgcgatcgtcttcatcaaaaggaggaggaggatggcgaggagttcgttcaagttggagcaccccttcgaaaggaggcaagctgaggctaaccgcatcagggagaaataccctgacagaatccctgtcattgttgaga

SEQ ID NO: 64169 - DNA, 278 bp, Zea mays
gtggtgagatgctgcttggagcacgccgcgtcggtggccaagaccttcctgacatcagatgttgtggtcgtcgatatcaaggagccggagggtgcacctgtcgcaaacccgatggacaactctggctatggatactgatgagatgctatggccatgccccatgggacgaaggtgatcaccatattaattttttggtaggcgaagagtcgggtcgaggtagctttttagacgaccgaaaggcgaaaataagttgaggatctgcatcccaaatttgtgag

SEQ ID NO: 64170 - DNA, 275 bp, Zea mays
tcgggatctgacggctactccggaccggctgaccgaggtgaaggtcacggcggacaacagcagctgcatccgctccatctccttcatctacatcggagccgatggcaagccgtacgaggaggggccatggggtttcggccatgctggcaacggagtacaagattgatctgtgcaggttcgacgagagcttgacggagatctccgggatcacgggcccagcctacaacattgacaatctggtcaagtctctcagatttgtcaccaacaaacgtact

SEQ ID NO: 64171 - DNA, 223 bp, Zea mays
cagaccaagaattcagagtggtagttgaggctattggtcatgtccgacataagaatttggttcggctgttgggatattgtgttgagggcgtaaacaggatgctagtttatgagttcgagaaccatggtgatttagagcagtggcttcatgaagctattgagccaaaagttgcacatcgagatatagaatcaagcgacatatagaccgatgatgaatttaatgg

SEQ ID NO: 64172 - DNA, 273 bp, Zea mays
ctcgacccgccggagcttatcacgccgcccaagatctttgtcatcgcaggtctgcacccaatcttcgacgagcgtgtgaacgacctcttagacttcagcatctacttggacatcagtgatgaggttaagtttgcatggaaaatccaggtcagcgagacattgtatgttccttagcttgctccacatgagccagtaaagggtgtctttctgctgtttaatttctagaaaaaatatcaccgctactaatttggcagcgggacatggcagagcgtg

SEQ ID NO: 64173 - DNA, 267 bp, Zea mays
gcttgtaacacttgctgccatcgatgaagaggctgatattctgatatatcttaactggcctggtggaagtccctattcgatcttagcggattatgattgcatgtcctggataaagcccagagttgggacagtgtgccttggtggttgtgctagtcaagcagcaattatcttgcaggtggcgagaagggatgcgctatgccatgccagatgctagagtaatgattcatcaactcaaagtggatctgagggtaatgtggaggaggtgag

SEQ ID NO: 64174 - DNA, 283 bp, Zea mays
ctgggcttcttcttgggcatttgtctggtttaatggataacagcacaaaggcaggtcttttaggactgtggatgcttcttttcacaatcttcgccgctagaaaattccagcagcccatcaaggatgacgttggagacaaatctgttttcatgttcaacgctctccccgaagaggaaaagaaggcttggatccagaaactcgagaggcaaaagggacaagagttgtttgagtagaaaagagtagcttgtcttggtgcagccaatagtgcgtccgtgaatgtttg

SEQ ID NO: 64175 - DNA, 283 bp, Zea mays
gacgaaaggagggagttttgagaagcatacatggctcctaaagccgctcctgtcaagaagggtgatgccaaggcccaggccttgaaggtggccaaggctgtgaagtctggggcaggcaagaagaagaccaagaagattcgcacatctgtaacatttcaccagcccaagaccctgaagaaggccagggacccgaagtacccaagaatcagcactactggaagacacaagcttgatcagtaccaaatcctcaagtaccccctcaccacagaatctgcaatgaaga

SEQ ID NO: 64176 - DNA, 167 bp, Zea mays
cacgctaagagcgcagaagagcgccgaagatgaacgttatgaaagtgcgtataataatttacgatccgaagttatcaagctgagaaatgaagctttggaaaaagataaaattctgcttacattggtggataaggtgaaaaaagacgaagccgcttcaaaggcccaat

SEQ ID NO: 64177 - DNA, 209 bp, Zea mays
aagaagctgagattggcatgtgggaggcagtaacatggcttgcggttttaacactctgggtgtcttttctttctgagtacctagttaacgccattgagggagcatctgattcattgaacctaccggtggcttttatcagtgttattttgcttcctattgtgggcaatgcagctgaacatgcaaagtggaataatgtttggcatgaaaga

SEQ ID NO: 64178 - DNA, 287 bp, Zea mays
ctctatattaactgagtacctcccaagggggagcctatatcgtctgttgcataggccaaatagtcgaattgatgaagtacggaggctaaaaatggcattcgatgtggcaaaagggatgaactacctgcactctagccatcctaccattgttcaccgtgacctgaaatcccccaatcttttagtggataaaaattgggttgttaaggtgtctgactttggcatgtccaggttgaaacatcatacttttctttcctctaagtcaactgctggaacaccagagtggatgg

SEQ ID NO: 64179 - DNA, 274 bp, Zea mays
gcaagaagctacgaacgctcagaattgagcgtggcgacgatgatcctggccaagaagagcagggaggagtctctcagataggtttgacagccgtagccgttggctgccgcgaactagagtacatagctgcctatgtatctgatatcacaaatggggcgctggaatccattggcactttctgcaagaatctctatgatttccggcttgttctacttgacaaacagaagaagataacagacctgccacttgacaacggcgtccgtgccctactgag

SEQ ID NO: 64180 - DNA, 255 bp, Zea mays
tagcatagagagatagcacaaccattggcatcaaaggtctacccaagacttcgaaatggagcttcatgaagctgagcttgctgtgagaccggaggatccaaaaatgataagtagaccaagatatgcggtaatgaacaccgcaaaaggcccaattactatagaaatatacaaagatgcttctgctgacgttgtggatagatttatcaacttgtgcaagagtaatcatttcaaaggaatgccatttcggcatatcat

SEQ ID NO: 64181 - DNA, 282 bp, Zea mays
cttcacccctcgccgccgacgccgacgccgccaccgccgtcgccgtcgcaagctacgatgctcgacatcaacttgttccgcaccgacaagggcggcaacccggaccttattcgcgagtcccagcgcagtaggttcgcctccgtcgagctcgtcgacgaggtcatcgccctcgacaaggcatggcgcgaaaggcagttcgagctggttaagatccggcaggagcttaacgctaccagcaagaagatcggcaagctcaaagccagcaagcaagaagaggaagcg

SEQ ID NO: 64182 - DNA, 282 bp, Zea mays
atgatatgtgcctgcctcaatgtgctcatgtacgggtcaccccttgcttctatgaaaacggtgatcacgacaaagagcgtggagttcatgccattcttcctgtccttcttcctcttcctcaacggaggcgtctgggcaacgtacgcggtgcttgaccgcgacatcttcctcgggatccccaatgggataggcttcgtgcttggcaccatccagctgatcgtctacgcgatctacatgaacagcaaggcctcccaatgcagcaaagaaacagcgtcctcgcct

SEQ ID NO: 64183 - DNA, 284 bp, Zea mays
agcctttccgaggattttgttgccaagccaccggccgaagacagggacattatgggagaggtgtcgaagactcatgaggccatacaatacttggagaagtcaattgacacactgcagatggagctggcagcgaacgcagcatcaacgagcttcacggggaaagtacaggtggtggcataagtaagcagaggagaagggcgttcgtggtgatcggggtcaacaccgccttcagcagcaggaagcgtcgggattccgtgagggagacctggatgcctcaaggtgag

SEQ ID NO: 64184 - DNA, 288 bp, Zea mays
cacccaccgccgccgccaagaaggatgagaaggccgtcaacgccgcgcgccgcgccggtgcggagatcgataccatgaagaagtacaacgctggtacgaacaaggcggcatccagcggtacatccctcaacaccaagcgcctcgacgacgacaccgaaaacctcgcccatgagcgagttccaagtgatctgaagaagaatctcatgcaagcaaggctcgataagaagctgacacaggcacaacttgctcagatgataaatgagaagccacaggtgattcaggagtatg

SEQ ID NO: 64185 - DNA, 285 bp, Zea mays
ctggccagtcgcagacaccccggatcctacactgagaattgcaaataaatacctgcaggattccatagttttgatgaggaaactgcttcagaagcaagagtctggttctaagaagcctaagaagggagctgcaccggcacctccgtccgaggaaaagaagtcaagcattggtctcatatatgtgaacgagcactactctggatggaaagagcagtgcttgagggtgctgcagtccaagttcgacagccaaagccgctccttctcacccgatcaggaaatagcaga

SEQ ID NO: 64186 - DNA, 281 bp, Zea mays
gcaaggccgataacacgccctgccccatcaagcaacggtctctacttgggatctgttggagcagcattcaataaggacgctctcaagagtttgaacatcacccatatcttgatcgttgcaaagtcactggatccagtatttccagctgaatttaatcacaagaagatcgaagatgaagctataagctctggaggcaatgttttggtccattgctttgctgggcggtcaatgagtgtgacaatcgttgttgcatatctcatgaagaagcatcaaatgagcct

SEQ ID NO: 64187 - DNA, 281 bp, Zea mays
gaggcactactttcagaacacacagggacttatttttgttgtagacagcaacgacagggaacgtgttgttgaggaaagagatgagctccacaggatgctgaatgaggatgagctgcgtgacgctgtgctgcttgtatttgcaaacaaacaagatcttcccaatgctatgaatgctgctgaaattactgacaagcttggtctgcattccctgtgacagcggcactggtacatccagagcacttgtgctacatctggtgaagggttgtatgaggggcttgact

SEQ ID NO: 64188 - DNA, 281 bp, Zea mays
gcgcgagagacagacgcgtatacccacgcggcggttgaggaggaggagatcaagaagaagaagatggcttcctccgcgtacgcctcatggtccaagcggtggatccgtcccgaggtgtacccgctgttcgtgccgatggccgtggccctgggtatctgctcgtaccagcttgtgcgcaacatcacgggcaaccccgaggtgcgggtgaccaaggagaagagggcggccggcgtcctggacaaccacgacgagggcgagaggtacgccatgcacggcctcag

SEQ ID NO: 64189 - DNA, 280 bp, Zea mays
gtccttttgtgcttccccttgcacacaaacacaaagtacaaattcttccatctgattctgagcactctgcaatatttcagtgtatacaaggcttgtccgaaggtgcacttcgtcgcattattctaactgcatcaggtggtgctttcagggactggccagttgacaggctgaaagatgtaaaagttgctgacgctttaaagcatccaaactggaatatgggaaggaagatcacagtagattctgctactttattcaacaagggtttagaagttattgaagc

SEQ ID NO: 64190 - DNA, 275 bp, Zea mays
gcctcgcgtcgtcgccccacagccacgcgagccttcgccgatccgcgagcgcagatcgccgaagccaggcggcggagagggagctcgaggcagcggaggaaggcgttcgccacagtcgctgatttccctggggaagagatgggtctctcctttgggaagctgttcagccgcctcttcgccatgaaggacacgaacattctcatggtcgggctcgatgccgccggtaagaccaccatcctctacaagctcaagctcggcgagatcgtcaccaccat

SEQ ID NO: 64191 - DNA, 280 bp, Zea mays
accgtccatgagggtcgcatctaccagctgaagttgttctgcgacaaggactaccctgagaagccaccatcagttcgatttcattcaagaataaacttaacatgcgttaatcatgaaactggagtggttgacccgaagaagttcagcgttctgggtaactggcagcgtgattactcaatggaatacatcctaacccatctcaagaaagagatgacatcgccacagaaccgcaagctagttcagcctccggaagggacattcttctaaagatggcagcaac

SEQ ID NO: 64192 - DNA, 279 bp, Zea mays
aaatttgatgaagggattgttggtacaccacagttgaccgactccattgtgctaccagagaagtttgagttatttggacagaacatcgacctgagtccactgaaaggcatattttcttccatcgaaaatgcagcatcctcggttgcaaagaccatatctgagcagcctccgctcaaaataccgattaggacaaacaatgctgaatcgtggttgcttacgacataccttgacgaagagctcaggatctccagaggcgatggcagcagcatctttgtgctg

SEQ ID NO: 64193 - DNA, 278 bp, Zea mays
gccagttccccctgtcaattgttcttgtcggggttggtgatggaccatgggacatgatgcaccagtttgatgacaatatacctgctcggtcatttgacaatttccagtttgtgaatttcacggagattatgtcgaagagcatagcagctgacagaaaggaggcagaatttgcattgtcagcgctgatggaaatccctacacagtacaaagcaacaattgatctccaactcttaggccgtcgccaaagaataaccccaagaattgctctgccaccacca

SEQ ID NO: 64194 - DNA, 277 bp, Zea mays
cttgaacttgctcaagaaaatgctgctgatctggagctggacatcgatttagtttggtctgacataaagaacttaaatctgaaaggcgtccatgttgatactgttgtcatgaatcctccctttggtacacgaaggaatggagcagacatggagttcctctctatggccttgcaggttgcttctcaagctgtctattctctacacaagacttccactagagaacatatcaagaaggcagccttgcgtggcttcaatgccatcagtgcggaggttctat

SEQ ID NO: 64195 - DNA, 310 bp, Zea mays
gtcgctccacggtacgaactcggattcggctcgagcgcggcacctttggcggagagcaagaacatgagccgcgagtacggcgggcagtggctgagcagcaccacgcggcacgtccgcatctacgctgcgtacatcgacccggtgaccaacgcgttcgaccagacgcagatggacaagctgatactcatgctcgacccccaggacgagttcgcctggaccgacgaggcctgccagatggtcttcaacgagttccaggacctcgtcgatcactacaggtgggctgagctgtcggagtacacacttcggttga

SEQ ID NO: 64196 - DNA, 277 bp, Zea mays
aaacgcgcttacggaccgtacggcagggacgagggcaccccgttccgtgtcacggtgatgaacaacggccacgtcgctggcttctttggccgctctggagattgcctggacgcgatcgggctctacgtgaaccccaactaataactaaaacgatggatcggatcatctgcatgcatgcatatgcagtatgcatgctgcttgcctgcctgtaacgaatatgaatgcataaaataacgcccctgctgctcccatgcatcagcagtgtgtaccactatgt

SEQ ID NO: 64197 - DNA, 270 bp, Zea mays
atggtggattggcatctattatcttctgtggctatatcatctatgacacagacaatatcatcaagcgccacacatatgatcaatacatatgggcagctgtttcactctacctcgacgtcatcaacttgttcctgtctctgctgcagctgctgagggcagccgatagctgagctcattaatggagtgtttggtttgaggaatgatatagtccatcatcttctcactcacttttttgtttggtttgtggaatgaagtgagttaatccatcac

SEQ ID NO: 64198 - DNA, 273 bp, Zea mays
tgcctagcgatctgctcgtatttcttcattgcatctctagtgatcaacctcctcagggacgtcaccccaaagaatgtctccagattcatcccaatcccgatggctatggccattcccttctacatcggtgcgtacttcgccatcgacatgtttgttgggacagttatccttttcgtctgggagaggatgaaccgcaaggagtgtgatgacttcgcaggtgcggttgcctctggcttgatctgtggtgatgggatctggactgttccttctgcg

SEQ ID NO: 64199 - DNA, 275 bp, Zea mays
cggcggcatctccggcgtgctctgggcctactttctcctctacgtgctcgacctcccctacttcttcaagtagaaatcatcaaagatgcgtatatatatagctccggccgatcctcctctctagctgcatggtatgtaggtggtgtggtccttgtttcatttcactccagcggtgatcagcgccgtgtataaatgtaattcctctgctttgcacatggatggattgggatgtaacctgttcaacttttttttaccttattggatgcatcattcag

SEQ ID NO: 64200 - DNA, 274 bp, Zea mays
tttcttatgaacactaaaggagagattttgatggagcaaagtggtgtagttaggtccaattgcattgattgcctggaccgtacaaatgtgacacagagtttccttgcaagaagatcattggattctcaattgcagctgatgggagcattattgtcatctgaaagcatttctctctctgataacattcatgatacattcaaaaaattatgggttgagcacggtgatgagctgagcctggagtatgctggctcttatgctttgaaaggggatctag

SEQ ID NO: 64201 - DNA, 158 bp, Zea mays
gaaaattgggtgtggtattgactacatcacggtagggttacatccagaattcgaaaactcaaggtgtttattcatagttaggaaggatggcgagcagatcgatttttcgttctggaagtgcgtcaaaggtctcattcggcaaaagtaccccatgtacg

SEQ ID NO: 64202 - DNA, 275 bp, Zea mays
gaaagtgttcgccaatgtgggcaagactatcgggtacaaagttggaacaatgattgagatccccagggcagctctggtggctgatgagatagcggacaggctgaattcttctccttcggaacgaacgacctgacgcagatgacctttgggtacagcagggatgatgtgggaaagttcattcccgtctatcttgctcagggcattctccaacatgaccccttcgaggtcctggaccagaggggagtgggcgagctggtgaagcttgctacagagag

SEQ ID NO: 64203 - DNA, 273 bp, Zea mays
ggccgcatttacccggcgatcctgcccgttgagagcaagagagttgctgggagggttatcatgggtgttactgatgaagagctccagcttcttgacgcgtttgaagacgtggagtacacgaggacaagagttgagatatcattggctgactcttccgagaacatgctggctgacacttacgtgtggagtgatgcagaggatctcaatctttatggagaatggaattttgaggagtggaagaaactgcacatgaaggatttccttgcgatgacg

SEQ ID NO: 64204 - DNA, 282 bp, Zea mays
gggggagggcatccgctgcatcatccgcatggagaactagatttcgctgtctagtttgtgatctggcctgggcttggggttaataaaagaggcaatgctagcctgccctttcgatgaggaggtacatacacgctggcgatggaccgcgcttgtgtgtcgcgttcagtttggcttttgccaagcagtagggtagcttcccgtgtcggtaattatatggtatgaaccatcaccttttggctctacatggtatgaacgtaagatacaaattccaactacctctaa

SEQ ID NO: 64205 - DNA, 285 bp, Zea mays
tcagaagggaatccaccttatcaaacatgcaatgcatcgagctcttgaacgcaatggacaggtggttttactgggttctgcaccagatcctcgcatacaaagtgactttacaaatttggccagtaagctgcatggtgaataccatggccgagtgaagctatgtctaacctatgacgagccactgtcacatttgatatatgctggcgcagacttcattctcgttccttccatcttcgaaccttgtggtctaacacagcttattgctatgcgctatggatccatccc

SEQ ID NO: 64206 - DNA, 283 bp, Zea mays
caagcacctgccaaacggtgcctcctttgcggcgatcggccttctcggcatgttcaactccggtggcgcggtgagggagctgagattcggtggtgaggatgccgacgtcgagctcagagtgcggggctcgggcacggtcggagcttattcctcggccaagccaacgtgtgtcgccgtcgattccaaggcggttggtttctcctacgatgccacctgtggcctcatcagcttcgagctcggcattcccgaccaagaaatgtacttgtggacggttacagtaggg

SEQ ID NO: 64207 - DNA, 284 bp, Zea mays
aagcaccttcccagaaaaatcccccattctccgtcgaggcgaggagagcgtgaaagacagggcaccggcagcgacgatgtcggggcgcggcaagggccgcaaaggtctgggcaagggcggagcaaagcgccaccgtaaggtgctccgtgacaacatccagggcatcaccaagcccgcgatccgtaggctggctcggaagggcggcgtgaagcgcatttcggggcttatctacgaggagacccgcggcgtcctcaagatcttcctcgagaacgtcatccgcgacg

SEQ ID NO: 64208 - DNA, 284 bp, Zea mays
caatattctgacagggcatcagctgaggaggccataagggtgctaaatggaagccagttgggaggtcagagcataaggctctcatggggccgtagccctgcaaacaagcagcctcagcaagagcagagccaatggagcggtggtggctattatgggtatccccaaggatacgatccatatggctatgctcggccccctcataatcctgccatgtacgcctacgcagcatatccagggtatggaaattaccagcaacagccaccacagcagcccccgccacaaca

SEQ ID NO: 64209 - DNA, 281 bp, Zea mays
ggtgtacaaaacttctttgttacgtttattgaggtcttgcgtgacaggcctgctggacatgattgggagcttgaacctggagtcacgtgtggtgactatttgtttgggatgttgcagggaacccgttctgctctttatgcaaatgaccgggagtctatctctgttactgtgcaagaggtaactcctagagctgttggagcactgattgcactttatgaacgtgctgtggggatttatgcttctttggtaaatatcaatgcctatcatcagcctggtgttga

SEQ ID NO: 64210 - DNA, 286 bp, Zea mays
gccgcagcaggtggacgacggctgcgaggcggaagaggacgagcaggccgtcatcggcttcgccagcggcctcttctggctcgccttcaacaccgtgctcatcgccatcctgtccgagtacgtggtcggcacgatcgagcctacctccaaatcctggggtttgtccgtcagcttcatcaggagaatacttctacccatcgtggggaacgccgcggagacgccggagcaatcatttttgctctcaagaacaagctggacattaccctcggagtagcgttgtgggtcg

SEQ ID NO: 64211 - DNA, 235 bp, Zea mays
caataataagcgaggccgagctggctgccatacataggtattgtgtggtgtgtgtgagagagagagaaacagagttcttcagtttgctatctctctctgcatgtttggcgtcagtctttgtgctcatgtacgtacgtgtgtctacctgcatgttggttgatccgattgcatctgctgtaaccatatattaattggtccacgatgatatgatttgatactatatatatactagaag

SEQ ID NO: 64212 - DNA, 277 bp, Zea mays
gcgtcactccgccggcggcctcgcgctctctcccccgccgctccttctctacgcttggcctgccaagatgaagctcgtcagattccttatgaagctaaacaatgagacggtcaccatcgagctcaagaacggaacggttgtccacggcaccatcaccggtgttgacataagcatgaacactcatctgaagacagtgaagcttacactgaaagggaagaaccctgtaacgctcgaccacctcagcgtgcgaggaaacaacatccgctattacattctt

SEQ ID NO: 64213 - DNA, 279 bp, Zea mays
gcagctggaagatgtggtcgtaggacagtataaaagtcacacaaaaggtggtaccacataccctgggtatactgatgataagacagtgcccaaggatagtgtgactccaacgtttgctgctgcggcgcttttcataaataatgccagatgggatggagttccctttcttatgaaagctgggaaagctttgcacacaaaacgagctgagattagggtacagttccgacatgttcctggaaatctctacaaggggagttttggcacagatcttgatagggc

SEQ ID NO: 64214 - DNA, 279 bp, Zea mays
gaaggatatgcccttcctcatgcgattcttcgtttggatcttgctggtcgggacctcacagactccctcatgaaaatcctgactgagaggggttactccttcacaacctctgccgagcgagaaattgtaagggacatcaaggagaagctggcatatatagctcttgactatgagcaagagttggaaactgccaagaacagctcctcagttgaaaagagctatgagctacctgatggccaagtaatcaccattggtgcagagagattcagatgccctgag

SEQ ID NO: 64215 - DNA, 273 bp, Zea mays
acagcttattgactgtggttttgcatgcaacaatttcggatgcaacggaggccttccatcccaggcctttgaatacatcaaatacaatggtggccttgacactgaggaatcttacccttaccaaggtgtcaatggaatctgcaagtttaagaatgagactgttggagtcaaggttttggactcggttaacatcacccggggtgctgaggatgaactgaaggatgctgttggtctggttcgcccagttagtgttgccttcgaggtgagcactgg

SEQ ID NO: 64216 - DNA, 274 bp, Zea mays
gaccgacgacgcacgcggagatccggcgtactgcaaattttgaaaactgaactgtaagatggcatcagcagagctttcccgtgaggaaaatgtgtacatggcgaactcgctgggcaggcggagaggtacgaggagatggttgagttcatggagaaggtagccaagactgttgactacggagagctcactgtggaggagcgaaacctcttatctgttgcatacaagaacgtcattggagcccgccgcgcctcatggcgcatcatctcctccatcg

SEQ ID NO: 64217 - DNA, 275 bp, Zea mays
tgcaaaacaggatttgttgttggacctgaaaggaacaatatacaaaacaactatagttccatccaggacattttgtgttgtgagtgtgggacaatcagaagcaaagatagaggctataatgaatgacttcattcaactggaaccacaatccaatttatttgaagcagagactatggtggaaggtacccttgatggattcacatttgattcagatgaggagggtgacaaactctatgaaccacaggctaatcaaaacgatctgaataataacgaag

SEQ ID NO: 64218 - DNA, 274 bp, Zea mays
ctttatgtatgatggaatggagcactactgcttagaagatgctcatattgtcaacctcttctcgttctcaaaggcttatggaatgatggggtggcgtgtaggatacattgcatttccaaatgaagctgatggcttccatgatcagctcctcaaggtgcaagacaacataccgatctgcgcctccatcatcgggcagcgctggcgctctactcgctggaggccggccccgagtggatcaaagaacgggtgaaagacctggtgaaaaaccgggcgc

SEQ ID NO: 64219 - DNA, 271 bp, Zea mays
gcggagaggctgaattcttctccttcggaacgaacgacctgacgcagatgacctttgggtacagcagggatgatgtggggaagttcattcccgtctatcttgctcagggcatcctccaacatgaccccttcgaggtcctggaccagaggggagtgggcgagctggtgaagtttactgcagagaggggccgcaaagctaggcctaacttgaaggtgggcatttgtggagaacaggtggagagccttcctctgtggcctcttcgcgaagctgg

SEQ ID NO: 64220 - DNA, 273 bp, Zea mays; identical to SEQ ID NO: 53528

SEQ ID NO: 64221 - DNA, 265 bp, Zea mays
ccggaaattggcagacagctcacatgagaaaaatgaagctcggagggagttgcttgaagtgatggcccacaggtctcatgttgacagcagtgttgagctcattggaagccttctctttggctctgaggacggtccaagggttctgaaagccgtccgtgcagctggtgagcctctcgtcgatgattggagctgtctcaagtccacggttcgtacttttgaggcgcaatgtgggtcgttggcgcagtatgggatgaagcacatgcgg

SEQ ID NO: 64222 - DNA, 270 bp, Zea mays
gtgaaacggcagcatgcgattcttattctcgcggacaccctttactatgggaagttcaagcgttactgtaagccaggaaacgaatggcataactgctattcagacgagcactacttgccaaccctctttaacatggttgatccgactggaatctcgaactggtcggtgacgcatgtcgactggtccgaagggaagtggcatcccaaagtctacagggctgcggacacaagcttcgatctgctcaaggacatcgcgtccatcgacgagagc

SEQ ID NO: 64223 - DNA, 271 bp, Zea mays
gcttcatgttgtcgatagacttaaagaactgattaagtacaaaggcttccagattgctcctgctgagcttgaaggactgcttttgtctcatccagaaatccttgatgccgctgttatcccgtatcctgatgctgaagcgggggaagttcctatcgcctacgttgtactatcaccgaagagttcactggccgaagctgatgtccagaaatttatcgagaaacaggtcgcgcactacaagaggctgaggaaggtaacgttcgtgggcagcgta

SEQ ID NO: 64224 - DNA, 273 bp, Zea mays
cactcgtcgatctacacacatacatagccccttctactacacgacgacaaccatggggaagcctgcgaagctcggagagtggggtggatacgccggcgatcgtcgggatctgagggctactccggaccggctgaccgaggtgaaggtcacggcggacaacagcagctgcatccgctccatctccttcatctacatcggagccgatggcaagccgtacgaggaggggccatggggtttcggccatgctggcacggagtacaagattgatctgtg

SEQ ID NO: 64225 - DNA, 274 bp, Zea mays
atgcggctcgagatggtcgcacaagactgactaccgtccagggattgaagaaggagttcagctacagcaagatcctcaaagatctcaagaaagagttctgctgcaatggtacagtggtccaggacccagaacttggacaggtcattcagctccagggtgatcagaggaagaacgtctcgaatttcctcgtccaggccggcattgtgaagaaggagcacatcaagattcatggtttctgagcaaccgccgggtccatagcaaaccaaccctgcat

SEQ ID NO: 64226 - DNA, 269 bp, Zea mays
agtgggagacccgcgagaggctgccgtgtagggactagggaccgtagagtaagcgacaggacaggagggagagggggatggccgggatcgggccgatcagacaggactgggagccggtggttgtgcggaagaaggcacccaccgccgctgccaagaaggatgagaaggccgtcaacgccgcgcgccgctccggcgcgaagatcgagaccatgaagaagtacaacgctggtatgaacaaggcggcgtccagcggcacatccctcaacacc

SEQ ID NO: 64227 - DNA, 266 bp, Zea mays
gtcacggcggacaacagcagctgcatccgctccatctccttcatctacatcggagccgatggcaaaccgtacgaggaggggccatggggtttcggccatgctggcacggagtacaagattgatctctgcaggttcgacgagagcttgacggagatctccgggaccacgggcccagcctacaacattgacaatctggtcaagtctctcaaattcgtcaccaacaaacgcgcttacggaccgtacggcagggacgagggcacccgttc

SEQ ID NO: 64228 - DNA, 269 bp, Zea mays
gagctgcagtcctggccgacatggattctgttgggaaggaagcacagctaagaggttttgaatttgctaaagctgttcggcttgtcgctgagccattcacagtggcaaatggtctcctcaccccaacattcaaggtcaaaaggcagcaagcaaagacatactttgcaaaggaaatttcagatatgtacgcggagctgcgggaggcagaggcacccaggtcgaagttgtaatccccgccatgtaatgatcaattcaaggagaagcgacat

SEQ ID NO: 64229 - DNA, 268 bp, Zea mays
cagtccgggtctaccagaagcttcgtggccgaatgcgaggccctgcggagggtccgtcaccgctgcctcataaagatcgtcacctgctgctcgagcatcgaccaccgaggtgaagaattcaaggcgctggttttcgagttcatgcccaacggcagcctggacgactggctgcatccggcatctggagcacacccgctgaacaagacgctcagcctggctcagagactggacatcgctgtggacgtcttggatgctctggaataccttc

SEQ ID NO: 64230 - DNA, 268 bp, Zea mays
atcatgaactccttcattatggacatggccttggaggagatgccaatgtccgggtgcacctgcttcaaggccatgtccatcatgaactccttcattaacgatatcttcgagaagctcgctgctgaggccgccaagctcgcgcgctataacaagaagcctagcatcacctcccgtgagatccgcacctccgtgcgcctcgtccttcccggggagctcgccaagcacgccgtctccgagggcaccaaggccgtcaccaagttcacctcgg

SEQ ID NO: 64231 - DNA, 272 bp, Zea mays
gccaaccatctaccagcgactcagcgagcgagagcagcacacacgcagctagctaggagcagcagcagagcagcggcgatggcggcctccatgatctcctcgtcagctctggcggtggcgcctcagggcctgccgcccctcggccgccgcgcctcctccttcgccgtcgtctgctccaagaagaagatcaagaccgacaagccctacgggattgggggtagcctgaccgtcgacgtcgacgccaacgggagacagggcaagggcaagggcgt

SEQ ID NO: 64232 - DNA, 274 bp, Zea mays
ggagagttgctcctgccccacagggcgacaagtatcagtacacacacttcgcactcaaaataaacagcttcgacacggcacctaagaagctgttggcatctgattcacggctgaggcctgatagatatgccctcgagaagggtgacatgtctaagtccggggcagagaagagcaggctcgaggaacaacagagagctgagaaacgaactcgagaggccaagggcgagcaatttactcctagatggttcaacctgacagatgtggtctcccctac

SEQ ID NO: 64233 - DNA, 263 bp, Zea mays
gttttggactcggttaacatcaccctgggtgctgaggatgaactgaaggatgctgttggtctggttcgcccagttagcgttgccttcgaggtgatcactggtttcaggctgtacaagagcggagtttacactagcgaccattgtggaactacaccgatggatgtgaaccacgctgttctggctgttggctacggtgtcgaagatggtgtcccctactggctcatcaagaactcatggggcgctgactggggcgatgagggtta

SEQ ID NO: 64234 - DNA, 265 bp, Zea mays
agatttatcacccgaatgtcgatgagatgtctggctctgtctgtttggatgtcataaaccagacatggagcccaatgtttgatctagtaaatgtttttgaagtattccttccacagctgttgctgtacccaaatccttctgatccattaaatggggaggctgcagcactgatgatgcgtgatcggcctgtttatgaacagaaagtgatagaatattgtgaaaagtatgctacaccagaggacgctggcatcaccccggaagacaa

SEQ ID NO: 64235 - DNA, 241 bp, Zea mays
cgacgatcgacacacatacatagttactactaatatacgacgacaatcatactgaagcctgcgaagatcggagagtggggtggatacgccggcgatcgtcgggatctgagggctactccggaccggctgaccgatgtgaaggtcacggcggactacagcagctgcatccgatccatctcctatcatctacatcggagccgatggcaagccgtacgaggaggggccatggggtttcggccat

SEQ ID NO: 64236 - DNA, 258 bp, Zea mays
ggaactggcagatcgtttataccgacaacgagggtgatatgatgcttgtcggagatgacccgtgggaggagttctgcaacatagtgcgcaagatctacatctacacgaaggaggaggtccagaagatgaactcgaaatcatccgtgccgaggaaggaggaacccccagcagcaggcgaaggccgcgccgccgccgccgcaaacgagtaggatgtctgcctgcactgcagcaagcagtgttagatgactaggtcgtgtg

SEQ ID NO: 64237 - DNA, 262 bp, Zea mays
acgagaaggtgcaggacctgcttctgcttgacgtcactcctctctctctgggtctggagactgccggaggagtgatgaccgtccttatcccgaggaacaccaccatccccatcaagacggagcaggtgttctccacctactcggacaatcagcctggtgtgttgatccaggtgtactagggtgagaggacgcggatccgcgacaacaacctgcttgggcattcgcgctctccggcatcccaccggctcctcgtggtgtcccc

SEQ ID NO: 64238 - DNA, 262 bp, Zea mays
tatcgccaagtttgatgacaagtactgtgccagggagaagaagcagatagggtagaagaccgagggcgagctttttgagacagaaaaggaggcatccaagtcactgcctgacttcaagaaggatgaccagaaggctgtggattctgctctgatcaaggctatcgaggctgtcccggagctgaaaacctatcttggcgcccggttctctctcagggatggtgacaagccccatgagatggtcttcgaagcttctagttttgga

SEQ ID NO: 64239 - DNA, 258 bp, Zea mays
cgtcgatctacacacatacataattacttctactacacgacgacaaccatggggaagcctgcgaagatcggagagtacggtggatacgccggcgatcgtcgggatctgagggctactccggaccggctgaccgaggtgaaggtcacggcggacaacagcagctgcatccgctccatctccttcatctacatcggagccgatggcaagccgtacgaggaggggccatggggtttcggccatgctggcacggagtacaag

SEQ ID NO: 64240 - DNA, 256 bp, Zea mays
gcaggatcttctatatcctatggtccccatcctccgccaaggtgaagagcaagatgctttatgcaagctcaaaccaaaaattcaagagtgggctcaatggcattcaggtggaactgcaggctactgatgcaagtgaaatcagccttgatgagatcaaggatcgggctcgctaggcatcatcatgatcatgcatcatggacttggcctactactgtggatttgtatgccattatagacttggtgctgtgaaagactg

SEQ ID NO: 64241 - DNA, 213 bp, Zea mays
gaggtggccatacgcaacaagcaaagcatacccccaaatccccaatccccaatccccaatccccaaaccctaggttatctcggcgcggcacgatggcggcggcgggcctgaggaaggggaatgcgcgcctcccgccggaggtgaatcgggtgctctacgtgcggaacctgccgttcaacatctcgagcgaggagatgtacgacatcttcggca

SEQ ID NO: 64242 - DNA, 255 bp, Zea mays
ggcacattctttagaacttccactgcattggagaatggaagactagaaacaagatggttcattgattactatgctagagacagaaacatgtgccccttgctactccaatttgctgaaattgacttcaaccaggttcaatatgaacatcaataatgtcttgcagtagtgacacggtggtggaagaaaattgggcttggtgaaaagttgccatttgcaagggatcgtctgatggagtgtttccactatgctaatgga

SEQ ID NO: 64243 - DNA, 255 bp, Zea mays
aacgtccatatacttgtcttggaaccttgagggatcagatcatataccctctctctcacgaggaggcaaagttgaagatgctctcaggcgaaacaagtgacaagtctacagcttccgagctgttggatgatcacctgaggacgattctagagaatgttcgcttgctgtatcttctggagagagaaggttgggatgctaccactaactgggaagatactctatccttgggagagcagcagaggctggggatggctc

SEQ ID NO: 64244 - DNA, 254 bp, Zea mays
ggcgaacgcatgaggttggccagggaagagggtctgctagtgggcatatcgtctggggcgaatctggcagcttgcctcaaggtggcgtcgagacaggagaaccgagggaagatgatcgtcaccgtgtttcctagcggtggcgagaggtacatgagctccgatcttatcgcggatgcaagggaggagtgcgtcgccatgaccttctgatcttctggacgctctgtgcggatctgcagcggcaaactgctatttct

SEQ ID NO: 64245 - DNA, 255 bp, Zea mays
gcttgatccttgagaagagagaggaagacgagagctagaagcgaaggagaaaagcagttcttcagctaggcaggagggcacaggaaggaggagatggcgtcaaagaggattcagaaggagctcaaggatctgcagaaggaccctcccacctcgtgcagtgcaggtcctgttggtgaagacatgttccactggcaggcaacaataatgggtccatctgatagcccatattctggtggagttttcctagttacaatc

SEQ ID NO: 64246 - DNA, 254 bp, Zea mays
cacatctgagggacatcttttatcggatgggcttatcggacaaagatattgtagctctatcagggggacatactctgggaagggctcaccctgagaggtctggattcgatggtgcctggacaaaggagcctcttaagtttgataactcatactttcttgagctgttgaatgaggaatctgagggacttttaaagctcccaactgacaaggcactgttatcagatcctgaatttaggcgctatgtggagctctat

SEQ ID NO: 64247 - DNA, 251 bp, Zea mays
tcaggacgcaggctagcagcacagcagcagtcagagccatcccctgtcctcgctacgctacgcttcctcggcgccgattcctcctcctcctcctcgatcctcgtccgcccccttaccggcgcaagagctcgcccgagatggcgaacgcgagatcaggtgtcgccgtgcacgctgagtgcatgctgacgtctggcgagctgcagtcgacagacgatgcaccgcttcataactggcaagatggacgacacagt

SEQ ID NO: 64248 - DNA, 259 bp, Zea mays
ctgccaacttaacgcaaggtgttcaagaaatttaaaccatgcactcttcatcgggaataaagatccaaataagtttttgacattgatctgtagccagtactgcaatggctacgaagcttgtggttctcggtatcccctgggatgttgacactgaagggttacgagagtacatggccaagtttggacccctagacgattgtgtcgtcatgaaggagcggtcttctgggcgatctcgcgggtttggctatgtaacattcgc

SEQ ID NO: 64249 - DNA, 276 bp, Zea mays
caaggctcttggtgtagcttgccactctcaccaatcaagttttcatgtctgatctcgacattcagatcccaactgccttcgatcccttcgctgaggccaatgctggggactctggtgcggcagcagggtcaaaggactacgtacacgtgcgcatccagcagcgtaatggtcgcaagagcctgactaccgtccagggattgaagaaggagttcagctacagcaagatcctcaaagatctcaagaaagagttctgctgcaatggtacagtggtccagg

SEQ ID NO: 64250 - DNA, 272 bp, Zea mays
gggactttaaaagatacagctttgccccaagaatccccttggttaaactttatgaaagggtctcgactttcaggaccccttattgatgctctggtcgcatctcctgcttcaagttcaagctctgcaaggtgaggtctgttcagtttggccagaaaggcatcccctacctgaacacctacgacggccgcaccatccgctaccccgacccgctcaaggccaacgacaccatcaagatcgatctagagaccaacaagatcatggacttcttcaag

SEQ ID NO: 64251 - DNA, 277 bp, Zea mays
gggctcaagtgctacgagaaccccaagcacaaggtcaccgctgtccccgccgacgaagaagagatctgcggtgccactttcaaggtggtggaagggtctactgtactgacggcgctgcactgatcgatcatcatcaggcggaggcgatgcgacgatacagaactttgtacatgcgtggtgggtgtaacatagtggctggcaacaagccatgctcaagcaaaccgatgaatctatctctgtatcatgcatcgatctcggttgcttgctagtccagact

SEQ ID NO: 64252 - DNA, 265 bp, Zea mays
gctccatctccttcatctacatcggagccgatggcaaaccgtacgaggaggggccatggggtttcggccatgctggcacggagtacaagattgatctgtgcaggttcgacgagagcttgacggagatctccgggaccacgggcccagcctacaacattgacaatctggtcaagtctctcaaattcgtcaccaacaaacgcgcttacggaccgtacggcagggacgagggcacccgttccgtgtcaaggtgatgaacaaggccacg

SEQ ID NO: 64253 - DNA, 266 bp, Zea mays
cgcacaacggcgaggatcttccctgctgtcctagacgtcgagaaccccgagttcaagatgaagcttgacaggatggttgagatcaaccagaagatcattgccgtcggagagtccgacgaaatccccctagtgaagaacctgaagaggattcctcttgtcgcctctctggtgtccgagatcatcgcaccatacctcatgccccccatcgagtctggctcggttgatttcgccgaatttgagccccggctcgtttactgattctgtac

SEQ ID NO: 64254 - DNA, 173 bp, Zea mays
atccattcaggatacctccgtattttgctttgattattagagccatcggagtattagaaggcatagctttggtgggagatcctgaatttgccattgtggatgaagcatacccatacatcgcacagaggctactaacggacgaatcgcctcggctaaggagcgccttgcgttac

SEQ ID NO: 64255 - DNA, 272 bp, Zea mays
gcagcacacacgcagctagctaggagcagcagcagagcagcggcgatggcggcctccatgatctcctcgtcagctctggcggtggcgcctcagggcctgccgcccctcggccgccgcgcctcctccttcgccgtcgtctgctccaagaagaagatcaagaccgacaagccctacgggattgggggtggcctgaccgtcgacgtcgacgccaacgggagaaagggcaagggcaagggcgtgtaccagttcgtcgacaagtacggcgcgaacgt

SEQ ID NO: 64256 - DNA, 180 bp, Zea mays
cgtgagagagatggaaacagagttcttcagtttgctatctctctctgcatgtttggcgtcagtctttgtgctcatgtacgtacgtgtgtctacctgcatgttagttgatccgattgcatctgctgtaaccatatattaattggtccacgatgatatgatttgatactatatatatactag

SEQ ID NO: 64257 - DNA, 269 bp, Zea mays
ctgatcgatttgttttagcattccgcacatggctaaggaaatttggcaatagccagccggagtggtttggaaatcctacacaagaagcattgccttccaccgtcctttcaaagcgcgagatgctagacagatacgagcagcacacgttgaaatgctcgtcctgcaaaggagcatataatgcattccagaatctgcagaaggtattcatgggagcgacagtagtttgctgtgctgccgctggtattcctccagatgttcagctcaggtta

SEQ ID NO: 64258 - DNA, 274 bp, Zea mays
gcccgtgattgatttgggttacttgtttgcggggtcgcaggaacgcggcgagctcggacgaaatccagctgcggatcgacccggtgcacggggacctcgacgaggagatcgacgggctgcactccagggtccgcatgctcaaaggggtggcccaggagataaattctgaagccaacctccagaatgattttcttcatgaactgcaaatgacccttgcaaaagctcaggctggagtgaagaacaacatgcggagattgaacaagagcatcatcca

SEQ ID NO: 64259 - DNA, 260 bp, Zea mays
ctggcaaccattccttcaagtgttgtggttctcaccccagagacctttgactcaattgtccttgatgaaaccaaagatgtccttgttgagttctatgctccatggtgtggtcactgcaagagtcttgcaccgacgtatgagaaggtggcttctgttttcaagttggatgaaggagttgttattgctaaccttgacgctgacaatcacagggatttggctgagaactatggagttagtggcatttctaccttgaagttttc

SEQ ID NO: 64260 - DNA, 273 bp, Zea mays
gtcactattgacagctacgaagatataccagcgaacgatgagaagagtcttcagaaggcagttgccaaccagcctgtcagtgtcgcaattgaggctgctggcacagcatttcagctctacagctcgggtatcttcactggaagctgtggaacagcgctggaccatggtgtcacggccgtcggctacggtacagagaacggcatagactactggatcttgaagcactcatgggcccaacccgccgaatcctggccccagcccgccgtcctcgac

SEQ ID NO: 64261 - DNA, 269 bp, Zea mays
tagatccactccataataagtttgttgaggaagtttcttcttgtaatatattcatggtgaaggacaatattatttctactccactgttaacggggacaattcttcctggaatcacaaggagaagtgtgattgaaatttctacagaatcttgactttcaggttgaggagcgtcttatcacaatagatgaactgcttggggctgatgaagtcttttgtacatgaacagctgttgtattgtcacctgttgggagcatcacttaccgtggaag

SEQ ID NO: 64262 - DNA, 261 bp, Zea mays
cctttccccaactcgatctcgcacctagggtttcgtctcgccgctctcgtcctccgcgaagatgccgaagaacaagggtaagggaggcaagaaccggaagcgaggaaagaacgaggctgacgacgacaagagcgagcacgtcttcaaggaagacgggcaggagtacgcgcaggtgacccggatgctcggcaacgggcggtgcgaggccatctgcgtcgatggcacgcgccgcctctgccatatccggggtaagatgcaaag

SEQ ID NO: 64263 - DNA, 257 bp, Zea mays
  unsure (1)..(257): unsure at all n locations
ctcctcctcgcgacgatcccagtcctaatagtcgcgctactcgtcctggtggtgtccaacatcatcgtgacgtacactctccccgtgatgctgaacgtcgtcgggctcgccggcgtctttggggtgtacgccgtcgtgtgcgtcctagccctcgcgttcgtgttcatcaaggtgctctngacgaagggcatgcctctcgaggtcatcaccgagttcttctccgttggggcaaagcaagccaaggaagaggaggagga

SEQ ID NO: 64264 - DNA, 269 bp, Zea mays
atcgaacagggcttctaagggggtgtttggtttgaggaatcactccatccaaaatgtggtggtgcatcatggatccattcctcaaatctagtctgatgaccccattcctcatattagtactaactgctttactataaggaatgaggtgatgatggatcaactcattccattccacaaaccaaacaaaaaaagtgaggagtgagaagatgattgactagctcattcctcaaaccaaacagtctataagtttgtcataatgctttttggtc

SEQ ID NO: 64265 - DNA, 220 bp, Zea mays
caaagttgtgctcagctgtctccaatgctgatacaaaggttgatgatgctgaatttgaagaaaatgaagtatatgcaatcgatattgtcaccagcactggggaggggaagcccaagttattggatgagaaacagaccaccatctacaaaagggccgtagacaagaattatcacttgaagatgaaagcgtcaaggtttattttcagtgtgatcagccagaa

SEQ ID NO: 64266 - DNA, 265 bp, Zea mays
gcacttcgtttagatcataccagagttgtagacataatgcgcaaggctggtcagttgcatcttgtgaaaccatatatggttgcagttcagagtaacaatgtctctgctgtgaatgaagccttgaatgagctttatgttgaagaggaggactatgagagactccgtgaatcagttgacatgcatgacaactttgaccagataggtcttgcccagaagcttgagaagcatgaattgctggagatgaggaggattgccgcctacattt

SEQ ID NO: 64267 - DNA, 258 bp, Zea mays
gacagaagcatagaactcggtgataagatattttctggtctcaaggggtacattgctggcaacccgttgactggcggacagtttgatacagacagccaaattccatactttcatgccatgggacttgtatccgatgaactttacaagaatgctagggagaactgtggtggaaagtatagtgctccactgaatgctgtatgtgcagaggctgtccaagctatcaacaattgcacacgggatatcaataagcaatacatc

SEQ ID NO: 64268 - DNA, 290 bp, Zea mays
ctaaaagcttactttggtatttctggcgggtacaacctccttaacttggttgatcattttcatagacgtggcctttaccggtctatctttctcagtatcatggaaggtgaagtatcactccagaaattctctccacaaatgatgattatggagtcatctgctaggtctgcagtttctttattgcctcgcatcatccttttccacggaacaagtgattattcaatacctccagctgaaagccaagcatttgctgatgctttacaacagcaaggcgcaagggcagatctatt

SEQ ID NO: 64269 - DNA, 277 bp, Zea mays
tgcaaagattaggatcgtgaacaagtttttgaacggagaagttggagccaagagcattcatgttgctactggggagaagctttctgtttttgatgcggccatgagatagagatctgagggctatgctactatgatgctcgctggcgctgagtatgaaacggccagaactcgtgatagggctgatacaggtccgatgctcctgggagttaaagctgtgattgccaagagctttgagcgtatccacagaagcaacttggtggggatgggaatcattctc

SEQ ID NO: 64270 - DNA, 284 bp, Zea mays
ctttgttcttgggactgcatattcaatcaatctgccgtaccttcgatggaagagatttgctgttgttgcagcactgtgcatattagcagctcgtgcagtgattgttcagctggccttttttctccacattcagacttttgctttcaggagaccggcagtgtttcctaggccattattatttgcaactggatttatgacgttcttctctgttgtaatagcactattcaaggatatacctgacatcgaacgggaccgcatattcgggatccgatccttcagcgtcc

SEQ ID NO: 64271 - DNA, 289 bp, Zea mays
acggcatgtgcccattctcctccttggtaatgacaccattgggatatatcatcagctcccgtgtgtctatgcattgtgttagttgtattaccagtgcgtagtgaacaaaaagggagccagcttatgaggtgttgagatttctgaccaagaggtcgatttgggatttatgggagtctttcaatgaacctcttataattcggtacctcagtaaccgggaactgggaacatggccacgttcctcgttccatgaacgttcgttccgttccaggaacgtgggaacaatctcgtt

SEQ ID NO: 64272 - DNA, 290 bp, Zea mays
cgactccgccgccgctcccgctccgcgccagcgcatcgcccgccgccacagcgtaccgcgacctcatctatcaccttcagctttcaatcatggcggacgtcgatgtcgaaccggaggttgccgccggagctcccaagaagaggacgttccgcaagtacagctaccgcggcgtcgacctagatgcgcttctcgacatgtccactgacgacctcgtccagctcttccccgcgcgcgccacgagaaggttccagaggggtctgaagaggaagcccatggcgctcatcaagaaa

SEQ ID NO: 64273 - DNA, 282 bp, Zea mays
ggaggagacagcaggcccacgtcggaggacccgaaggagacatagagacctatttttgatgtgtttggatgtactggcgcctgcttattttgaggactcttaatatttctgagtgtataataggaacttgtgtcacctctgcggcttccctgctgcttatttgtttttacatggttagaccaggaaccttcacgagctgtagaatttagttcttgttggtcatttgtgtgtgtgcctgacgggtataatcccttgttcaatcagatagaggtgatggttttt

SEQ ID NO: 64274 - DNA, 281 bp, Zea mays
gcccaaccccggcgtggtcgaccccaacaccaacctcacctacgacaacatgctctacgcccagatcgacgccgtgtacgcggccatggaggccatggggcacaccgacctcaccgtcatgatctccgagaccgggtggccgtccataggggacgaggacgatgtcggcgctaccgtggccaacgccgccgcgtacaacgggatcctcatgaagaggatcgccatgggccagggcatgccgctcaatccgcacgtgcccgtcgacgtcttcgtgttcgcgc

SEQ ID NO: 64275 - DNA, 284 bp, Zea mays
acaagatcaatgctaggatttacttactgaacccatctgtccttgaccgcattgagctgaggccaacatcaattgagaaagaggtcttccctcaaattgcagctgatcaacagctctatgcaatggtccttccaggtttttggatggatgttggccagcctagggactacattactggcttgcgtctttatctagactcgattaggaagaaatcagctgccaagctagctactggagcacatgttgttggcaatgtgctggtgcatgagagcgccaagattgga

SEQ ID NO: 64276 - DNA, 286 bp, Zea mays
gccgggagctggcccgggaggcgcaggcgaaccggctcagtccggacgacatcgacgagtcggtcatcgccggcaagctcgcgattagcgccgacggcgacgttttcctgtcccgacctggtcatcagaaccagcggcgagatgaggctcagcaacttcttgctgtggcagtcggcgtactcgcagctgttcttcaccggcaagatgtggcacgactttggggaggctgagtacctggaagcgttgcgctccttccagggcagagaccgccgcttcggccaatcaa

SEQ ID NO: 64277 - DNA, 277 bp, Zea mays
ctttctcttgcccctgtggtcattggtgtttcaatggcatcccatactgagctttcattcaactggactggtttcgtcaatgccatgatatcatacatctcattcacttaccggagcatttattccacatgatgctatgactgacatggatagcaccaacgtgtatgcttacatctcaataatcgctctaattgtttgcattccacgtgcgttgatcgatgtagggtccaagcgaatgcagcatggatttcgtgatgccattgcgatagtgggttcg

SEQ ID NO: 64278 - DNA, 283 bp, Zea mays
gcacggtgtacaagattgatctgtgcaagttcgacgagagcttgacggatatctccgggaccacgggcccagcctacaacattgacaatctggtcaagtctctcaaatttgtcaccaacaaacgtacttacggaccgtacggcagggacgagggcaccccgttccgtgtcaaggtgatcaacaacggccacgtcgctggcttctttggccgctctggagattgcctggacgcgatcgggctctacgtgaaccccaactaataactaaaacgatggatcggatc

SEQ ID NO: 64279 - DNA, 282 bp, Zea mays
tgaaagggtggttggaaggaggtctgatcctgtaacagggaaaatatatcatttgaagtattctccgccagatgatgaagaaatcgcttcaaggcttacacaaagatttgacgatacagaagaaaaggttaagttgaggctggagacttattaccaaaatatcgagtccttgctatcaacatatgagaacattattgttaaagtgcaaggagatgccacagtggatgctgtctttgctaagatcgacgagctgctgggttctatcctggagaagaaaaatga

SEQ ID NO: 64280 - DNA, 261 bp, Zea mays
gttcgcagcccggatcaaggtgcacgagctgcgggggaagatcaaggcggatctgctagcgcatttaaggagtttaagtcggagctctccctgctacgcgtagccaaggtcaccggcggggctcccaacaagctctccaagatcaaggttgtgcgcacctccatcgcgcgcgtgctgaccgttctctcgcagaagcagaagtcggcgctgcgtgaggcgtacaagaagaagaagctgctcccgctcgacctccgccccaag

SEQ ID NO: 64281 - DNA, 204 bp, Zea mays
cgccctcatgccagagtatgatccagtagccaagatttccatcatccctcgtggccaggctggtggactcacattctttgctccaagcgaagaaaggctagaatctggattgtagcgcaggagctatcttgagcaccaaatggctgtagaccttggatggcagggttgctgagtgaggtgatctctggccaagacaacgtgaca

SEQ ID NO: 64282 - DNA, 278 bp, Zea mays
tcaacataaaaatgttgtgcgattcattggtgcatgcacaaaaccaccccaattttgcataattacaggatacatgtctggaggaagcctatgtgactttgtgcacaagcagcataatgttctaaacctcaggactttattagagtttgcagttgatgtatgccgagggatgtgctacttgcatgaaaggggtatcatccatagagacttgaagactgcaaaccttctaatggccaaagatcatgttgtgaaagtggctgattttggtgtagctcggt

SEQ ID NO: 64283 - DNA, 278 bp, Zea mays
cggcaattggcagacagctcacatgagaacaatgaagctcggagggagttgcttgaagtgatggcccacaggtctcatgttgacatcagtgttgagctcattggaagccttctcttttgctctgaggacggtccaagggttctgaaagccgtccgtgcagctggtgagcctctcgtcgatgattggagctgtctcaagtccacggttcgtacttttgaggcgcaatgtgggtcgttggcgcagtatgggatgaagcacatgcggtccttcgcaaacat

SEQ ID NO: 64284 - DNA, 270 bp, Zea mays
gtcacggcggacaacagcagctgcatccgctccatctccttcatctacatcggagccgatggcaaaccgtacgaggaggggccatggggtttcggccatgctggcacggagtacaagattgatctgtgcaggttcgacgagagcttgacggagatctccgggaccacgggcccagcctacaacattgacaatctggtcaagtctctcaaattcgtccccaccaaacgcgcttacgggaccgtacggcagggacaagggcaccccgttccg

SEQ ID NO: 64285 - DNA, 302 bp, Zea mays
tgccttccttggctttgggccagagaacaccaactttgcagttgaattgacatacaactatggcgttgacaagtatgacattggaacgggctttgggcatttcgcaattgctaatgatgatgtgtacaagttagctgagaatatcaaatccaagggtggtaagatcacccgcgaacctggtcctgtcaagggaggatccactgttattgccttcgcacaggatcctgatggctacatgtttgagcttatccagatggctgacacacctgagcctctttgccaatggcaccaaatgatgtgta

SEQ ID NO: 64286 - DNA, 312 bp, Zea mays
acagttcatacttctgctcgagcctcaaccgtctcgatgagatgatcgtgttcaggcagcttaccaagctcgaggtcaaggagatagcggacatcatgctccaggaggtctttgacaggctgaaggccaaggacatcaatcttcaagtgaccgagaagttcaaggagcgggtggtggacgaaggctacaaccctagctatggtgcacgcccgctgaggcgagccatcatgaggctgctggaggacagccttgctgagaagatgctcgcaggggaggtaaaggagggcgactctgccatagtagatgtggact

SEQ ID NO: 64287 - DNA, 286 bp, Zea mays
gcaacatgatcattgtcccgagatgattgggagcattgttggtgtctacaatggcaagaccttcaaccaggttgagatcaagcctgagatgattggccactatcttgcagagttctccatttcctacaagccggtcaagcacgggaggcccggtattggtgccactcactcctcgcggtttatccctctgaaatgagttgttacccagatctgtagcgtcccaagggtgtccagtggcattgccctttcagctttgctgcttgtttcgacaagttacataccaaga

SEQ ID NO: 64288 - DNA, 284 bp, Zea mays
ggtcggcaagtaccaggtgggggctcctgctcgtgttggtctcgttgctccagttcatgttgttgtgccccctggcaacacttggctggatccgtcccagacctctttcttccaggtgcttaacatccccaccaagattaacaagggtaccgtggaaagtatcagccctgttgagctgatcaagaaggatgaaaacgtgggctcgtccgagtctagcctgctcgccaagctgggtatccgcccttctcgtacggcctccaagtcacagtgtctacgaggatggt

SEQ ID NO: 64289 - DNA, 288 bp, Zea mays
gaagctgcagggcggtggtgaccgtagtagtggcagtagtagtaggggcagcggcaacagtgataagcagcaggtgccggcggcggcgatgaggaagggcccgtggacagaggaggaagacgctcagctggtatggttcgtccgcttgtttggtgaacgccggtgggatttcttagcaaaggtctcaggtttgcgcggtggcgggtgcatccgatccccaagcatgcatgcatgcatgcatatgtagatgcatgcgtgcgtggggatggattgatgtaggatgggcta

SEQ ID NO: 64290 - DNA, 284 bp, Zea mays
ttggtattgcaacttaagagggaatagttctctgtgaatcgacgatgttatattcaagacgacttcaacctttgtggtctcatcagccaagttccttattatgattatgctctcgatctcattttagatatcgagtcatctcatggtgatatgttcactgaggaacaaaatgagctcgtagaatcagctgcagagatgctttatggtctgatacatgcacgatacattctgaccagtaaaggactggctgcaatgctggagaagtataagaactatgactttgg

SEQ ID NO: 64291 - DNA, 288 bp, Zea mays
gaggaaggttacccggcgttcgcgctggtgaacaaggcgaccggggaggccatcaagcactcgctggggcagtcccacccggtgcgcctggtgccctacaacccggactttttggacgagtcggtgctgtggacggagagccgcgacgtcggcaacggcttccgctgcgtccgcatggtcaacaacatctacctcaacttcgacgccctccacggcgacaagtggcacggcggcgtccgtgacggcaccgacgtcgtgctctggaagtggtgcgacggcgacaaccag

SEQ ID NO: 64292 - DNA, 283 bp, Zea mays
gtacatcaaggattgagcagttctatatttacaaagaggccagatattatttttaagtggctcgggccccatggtagtgattgtggtatagtgaatgtgaacatacctactaatggtgctgaaattggtggagcatttggtggagaaaaaacaactggtggtggacgagaagcagggagtgattcctggaagcagtacatgaggagggcgacttgtacaatcaactatgggagcgagctacctctagcccagggaatcaattttggttaatcctgcagaaatg

SEQ ID NO: 64293 - DNA, 287 bp, Zea mays
gcctatgtatgtcatggaatggtctattctgatcttaaccagaacccacttattgtaccattggaaattcttcgtggccattctagttcggatggaagaggggttttggactgcaagttccaccctaaacaaccatggttgttcactgctggcgctgactctgtgattagattatactgcgactaagcattcctccaaggattcatgattttgccaagcaatatgacgtgtagccttttgttgggcctcagtatggtgatgattgctatattctggtatgaagttgg

SEQ ID NO: 64294 - DNA, 291 bp, Zea mays
aggagttacatatagacgccttgatggagggaccgctgtgacagataggcagactatagtggacacgttcaacaacgatctttctatatttgcatgtttactttctacaagagctggaggccagggtctgaaccttgtaggagctgacacagtcattatacatgatatggattttaacccccagatggatcggcaagctgaggaccgttgccatcgcattggacaacagaaacctgtcactatctataggctagtgacaaaggattcagttgatgagaacatctatgagat

SEQ ID NO: 64295 - DNA, 278 bp, Zea mays
cgcatctggacaatggttgcagagtgtgatgctagtgtcatatacgcagacactgttggtgatttgggatatgcttcggagctaggaaattatgcagagtacagtggagctcccaaggaggaggaggttctgcagtatgctagagtgcttttggattgcgctacctctgatcctgatggccgtaagagagcccttctaatcggaggaggaatcgctaacttcacagatgttgcttctacatttagtggcatcattcgggctttaagagagaaggagtc

SEQ ID NO: 64296 - DNA, 276 bp, Zea mays
ccggtctgcgagttgaatcatggcggagcacttcgcttcgatcttcggcactgagaaggacagggtcaactgccctttttacttcaagattggggcctgtcgtcatggggatcgctgctctcgtctgcacaacaggccaactatatcaccaactcttgtgcttgctaacatgtatcagcgccctgatataacccctggagttgatgctcatggccaacctattgaccctgagaagccgaagccgaagcccgccaccacaaaggaggggcgacgtga

SEQ ID NO: 64297 - DNA, 280 bp, Zea mays
catgatgtaggatgtaaccatggacaaagtgttggggtctccactgatggcttcgcacgatcactacaatgaggaaacttggacttatttgggtgacgaacagaatgcacattgagatctacaagtacccagcttggggtgatgttgttgacatcgaaacatggtgccaagaagatggaagaattggtacccgtcgtgattggatcctcaaggacctagctaatggtgaagttattggcagagctaccagcaagtgggtcatgatgaatcaaaatacacg

SEQ ID NO: 64298 - DNA, 277 bp, Zea mays
ctgttttcgtacattggcacaaaccctgctaacgatgacaacacgttcatagaagacaactcgttgccatcattctcaaaggctgttaatcagcgcgacgctgaccttgtctacttctggcagaagtaccggaaattggcagacagctcacatgagaaaaatgaagctcggagggagttgcttgaagtgatggcccacaggtctcatgttgacagcagtgttgagctcattggaagccttctctttggctctgaggacggtccaagggttctgaaag

SEQ ID NO: 64299 - DNA, 276 bp, Zea mays
gtatggaggagggcgagttctccgaggctcatgaggatctggctacgctcgagaaggactacgaggaggtcggtgctgagtttgacgagggtgaggacggcgacgagggtgacgagtactagacgctctactggcgcggcgtcgtcgggcttgtgtgccactgctatcctgtgatctgccctgagtggctcctatcgtgttatgtttctgtcggttcttatctatctgtcgttgtgtggtttacaacttacgttgtagagctttattcccccgctt

SEQ ID NO: 64300 - DNA, 273 bp, Zea mays
ggtgttgctacagcaatgtcttgaaggattcccaccactgcgtcgaaagagcaatgcatcataactgccccgtctgcttcgagtatctgttcgactccacgaaggacatcagcgtgctgcaatgtgggcataccatccatttggagtgcatgaacgagatgagagcacaccatcacttctcatgcccagtgtgctcgaggtccgcctgcgacatgtcggccacatggcggaagctcgacgaggatgtcgcggccacgccgatgcctgacatct

SEQ ID NO: 64301 - DNA, 274 bp, Zea mays
atgcttctgaagggaagtcgcatccaaaagggagtgttctggcaccgatggctggcttggttgtgaaagttttgcttgaagacggggctcaggtggacgcagggcagcctgtcatggttatggaagcaatgaagatggagcatgttgtgaaggcgcctcgtgccggatacgtgagtggcctgaaggttactgcaggccaacaagtttttgactccagtgtccttttcacaatcaaggacagctctgcaaactgagatggagcgatcactgccct

SEQ ID NO: 64302 - DNA, 272 bp, Zea mays
tcggtgacgatggccgcttcctccctctgctacgtggacttgctcctgtttctcctcgtgtccgtcacatcggcctgcctcggtaccgcggcggcgcatcaagccgggtcttgagagggctacacgatcgccggccgcgtcaagatcgatggcatgagtgctaaaggctatggtcttccagccaagacatcaaacacaaaagtgatacttaatggcggacagagggttacatttgccaggccggatggctactttgcattccacaacatgcc

SEQ ID NO: 64303 - DNA, 287 bp, Zea mays
gttgcatgaaggagtgccaccctgaccttagcggggaccacgctgacgtgacaaacttctgcatgttcatcaacgaatttactcggtgttgagtgatccagacagcgtgctgtgtatgatgagatccataggtacacagcaacagcaatcaaccctttctatgatgacagtgcaccgaaggatcaggtgttcgttgatgagtttacctgcattggatgtaaaaactgtgccaatatttgccctggagtctttcaaattgaggaagacgttgggaggtcaagagtcta

SEQ ID NO: 64304 - DNA, 282 bp, Zea mays
ttgttgatgaaattgatgctgttggaaggcaaagaggtacaggtattggtggtggaaatgatgaaagggaacagactctcaatcaactactaactgagatggatggtttcgagggcaacactggaattattgttattgctgccactaaccggactgacatcttggattccgctttacttagacctgggcgttttgatagacaggtgtctgtcgacgttcctgatgtacgtggaaggacagagattctaaaagtgcatggtagcaacaagaagtttgattctg

SEQ ID NO: 64305 - DNA, 278 bp, Zea mays
gccgcgcgcgtgcccaagaaggtgctgcagttcgctggcattgaggatgtcttcacctcgtcccgtggctccactaagacccttggcaacttcgtcaaggcaaccttcgactgcctcatgaagacctacggcttccttactcctgaattctggagtcagaccaagttctccatgactccgttccagcagtactcggacctgctggcgaagccaccaagggtcttgtgcttgaggccccaactgagacagtagaggcttaggatggtttgtgctgtcta

SEQ ID NO: 64306 - DNA, 277 bp, Zea mays
ggcaaaccgtacgaggaggggccatggggtttcggccatgctggcacggagtacaagattgatctgtgcaggttcgacgagagcttgacggagatctccgggaccacgggcccagcctacaacattgacaatctggtcaagtctctcaaattcgtcaccaacaaacgcgcttacggaccgtacggcagggacgagggcaccccgttccgtgtcaaggtgatgaacaacggccacgtcgctggcttctttggccgctctggagattgcctggacgcga

SEQ ID NO: 64307 - DNA, 274 bp, Zea mays
tgcagttggaacaaagcagctgaatgggagacaagcttctcaggtatttatgctgaatggaagctcatcgcggaccctatcatgcatgtatacatggaaacaactgatgggtccttcatagagccaaaagagagcgctttggtatggcactatcagaacacggatcatgactttggctcgtgccaggcaaaggacctagtgagccatcttgagcgagtcctatcgaacgaacctgttgtcgtgaggcgtggccatcagatcgtagaagttaaac

SEQ ID NO: 64308 - DNA, 127 bp, Zea mays
aacggtgttgccctcctagagagggatgaacacattatgcatgcgatgtgtcagttcggtcggtgctatgctcgttgggatttgattgtaggaaataaaacatgggtgatgaatgtgtaccctccct

SEQ ID NO: 64309 - DNA, 275 bp, Zea mays
gttgactggtccggtcacaatcctgaactggtcattcgtcaggaacgaccagcctaggtttgagacatgctaccaaatagctcttgcaatcaaaaaggaggttgaggatcttgaggcagctggtattcaggtgatccagatcgatgaggcagctctaagggagggtctgccactacgcaagtcagagcatgcattctacctggactgggctgtccactctttcaggatcaccaactgcggagtccaggacaccacccagatccacacccacatgt

SEQ ID NO: 64310 - DNA, 276 bp, Zea mays
gaagattcttgtgtgcgctacgtcaaacaaagttgtaggagtgcacatgtgtggtgatgatgcacctgagataattcagggaattgcaattgctgttaaagctggattgacgaagcaagattttgatgccaccattggcattcaccccacatccgctgaggaattcgtcacaatgaggagcccgactagaaaaattcgaaaaagttctacagatcaggtagaatctaaagatgaggttgtaagtaagcagtagataccattttttcctaggaggtg

SEQ ID NO: 64311 - DNA, 272 bp, Zea mays
gggatccattacttttgagccttggaggaggctgtggaagtcttggactcctccaaaatgcaaatttttccagtggctggctatacggaataaatgttggacatcagatagattggaaattggataggagaggtttggatcacccaaaatcttgtttattatgtgatcaaacacaagaaaccatccaatatctattgtgtacgtgcgtctttgcaagacagttttggcataccatcttttcgcccttggggtttgttaatctctctccgtct

SEQ ID NO: 64312 - DNA, 268 bp, Zea mays
gcctatgtatgtcatggaatggtctattctgatcttaaccagaacccacttattgtaccattggaaattcttcgtggccattctagttcggatggaagaggggttttggactgcaagttccaccctaaacaaccatggttgttcactgctggcgctgactctgtgattagattatactgcgactaagcattcctccaaggattcatgattttgccaagcaatatgacgtgtagccttttgttgggcctcagtatggtgatgattgcta

SEQ ID NO: 64313 - DNA, 266 bp, Zea mays
atgttagagccttggaattgcccaaccaaagggtgtcctcctttatggagctccaggcacaggatagacattgctggcacgtgcggatggttcgggaactctttgttatggccagggaacatgcgccatgcatgatatttatggatgaaattgactctatcggatctgctagaatggagtctggaactggcaacggtgatagtgaagtgcagcgtaccatgcttgcacttctaaaccagcttgatggttttgaagcttcaaacaaa

SEQ ID NO: 64314 - DNA, 272 bp, Zea mays
ctaccagcgactcagcgagcgagagcagcacacacgcagctagctaggagcagcagcagagcagcggcgatggcggcctccatgatctcctcgtcagctctggcggttgcgcctcagggcctgccgcccctcggccgccgcgcctcctccttcgccgtcgtctgctccaagaagaagatcaagaccgacaagccctacgggattgggggtggcctgaccgtcgacgtcgacgccaacgggagatagggcaagggcaagggcgtgtaccagtt

SEQ ID NO: 64315 - DNA, 276 bp, Zea mays
cttgagaagagagaggaagacgagagctagaagcgaaggagaaaagcagttcttcagctaggcaggagggcacaggaaggaggagatggcgtcaaagaggattcagaaggagctcaaggatctgcagaaggaccctcccacctcgtgcagtgcaggtcctgttggtgaagacatgttccactggcaggcaacaataatgggtccatctgatagcccatattctggtggagttttcctagttacaatccattttcctcctgattatcctttcaaacc

SEQ ID NO: 64316 - DNA, 271 bp, Zea mays
gaaaaagtagagtagactacgacagcgtccggcgaggaggcggaggcgaagatgaggaagaagctcggcaccctattccccgcggctcgaatcaaaaagataatgcaagcagatgaggatgttggtaagattgcactagcagttcctgttttagtttcgaggtctcttgaattgtttttacaagatttaattgaccgtacttatgagattactcttcaaagtggagcaaagacactgaattccttccacctgaagcaatgtgtgaagaggt

SEQ ID NO: 64317 - DNA, 269 bp, Zea mays
catcgatctacacacatacatagtttcttctactacacgacgacaaccatggggaagcctgcgaagatctgagagtggggtggatacgccggcgatcgtcgggatctgagggctactccggaccggctgatcgaggtgaaggtcacggcggacaacagcagctgcatccgctccatctccttcatctacatcggagccgatggcaaaccgtacgaggaggggccatggggtttcggccatgctggcacggagtacaagattgatctgtg

SEQ ID NO: 64318 - DNA, 266 bp, Zea mays
cttgttttcaatgatgatatccagggcacagcatcagtggtccttgcaggtttgttagcagcactcaagatggttggtgggaccctggcagagcagacttatttgttccttggtgctggggaggctggaactggtattgcagaacttattgctcttgagatttcgaaacagacgaatgctccaattgaagagtgccgcaagaaggtttggctggtggactcaaagggtttgattgttgactctcgtaaaggctcccttcagccatt

SEQ ID NO: 64319 - DNA, 249 bp, Zea mays
cagttgccgtgctatggattgactcccggtgaccatccgactcctggatcctcggctcgacgagtgccttgcagaagggcacatcgacgacattggtaagtgagttatttgctgagactggagctaagcagtaggaggctctgacgctaattgaaaatgtgttagaagttagcgcgatgcttggcttccgtgggtgcaggcttggtatatcgtagcctgaattgacagagatgcaggcccgtgccattt

SEQ ID NO: 64320 - DNA, 271 bp, Zea mays
gttagcaaaaatcaatagcttcgattattcatgatctggtatgaagtatgaactgtttgactaaaccatacttttgcagattactgatgaaggtggtggaataccaaggagtggtctctcaagaagttttacgtatctctatagtacagcagaaaaccctcctgatcttgatgtacataatgaaggagtaactatggctggatatggttatgggattcctattagtcgtctttatgctcgatatttcggcggggacttgcagatcatctct

SEQ ID NO: 64321 - DNA, 277 bp, Zea mays
ggaggatcaccatatatttatcccttgtatggtttaggagaactgccacagggttttgcaagacttagcgctgtttatggtgggacctacatgttgagtaagccagagtgcaaggtcgaatttgatgatgaaggcaaagtttgtggtgttacctcagaaggggagactgcaaaatgcaaaaaggttgtctgtgatccttcctacctacctgacaaggttaaaaaaattggaaaagtttttcgggcaattgctatcatgagccatcccatcccaaata

SEQ ID NO: 64322 - DNA, 274 bp, Zea mays
ggcgaattcacatgttgcaaaattctctgcgatggattcaacttacagcttgcctgataatgttgcaatgcttacccttcaggagcttgaagatggaagtgttctccttcggtttgctcatctatatgaggccggggaggacaaggatctttcgtctttagcgagtatcgacctcattagagtgttcccggagaagaagattggcaaggtcatcgagacaagcttatcggcaaaccaagaacgcgcaccatggagaagaagcgtttgatatgga

SEQ ID NO: 64323 - DNA, 267 bp, Zea mays
gaatgacatctactacatcactggcgatagaagaaggccgtggagaactcccccttcctcgagaagctgaagaagaagggctatgaagtcctgtacatggtggacgccatcgatgagtatgctattggccagctcaaggagttcgagggcaagaagctcgtctcgtccaccaaggagggcctgaagctcgacgagagtgaggatgagaagaagcggaaggaggagctcaaggagaagttcgatggcctgtgcaaggtgatcaaggag

SEQ ID NO: 64324 - DNA, 268 bp, Zea mays
agcacctctttcctgtcccaaagccagattcaaagcgaataattacatttgctaacagagacgattacatctctttcaggcatcatgtatatgaaaaaccaggtggccccaaatcgattgacctgaaggaggtcggcccccggttcgagttgcggctgtaccagatcaaactaggaaccgtggaacaaaaggaagcgcagagcgagtttgtgctgcggccctacatcaatactgccaagaagcaaaagacgcttggagcgtgactaca

SEQ ID NO: 64325 - DNA, 264 bp, Zea mays
ctcataataccgtccatgagggtcgcatctaccagctgaagttgttctgcgacaaggactaccctgagaagccaccatcagttcgatttcattcaagaataaacttaacatgcgttaatcatgaaactggagtggttgacccgaagaagttcagcgttctgggtaactggcagcgtgattatccaatggaatacatcctaacccatctcaagaaagagatgacatcgccacagaaccgcaagctagttcagcctccggaaggga

SEQ ID NO: 64326 - DNA, 274 bp, Zea mays
aaccagttgcatatgcattttgtgcctactctacctttaaggcattcatttataaatggagtattctaatttgcagcagcaggcagcgtccttgaaaaagaacctctttgatcagggatacttggatgagcaattttgtcagattgaggacttgcaggatgaagcaagccctaattttacagaagaagttgtttccctgttcttcaagaactcaaccaggctaatgacaaatattgagcaagctatggacaggaatcccagagatttctgtaga

SEQ ID NO: 64327 - DNA, 272 bp, Zea mays
cttctgagatgtttgatctgcacaatgttgtcatatctatacctctgcctgcagttcgggaggctccaagtgtcagacagatagatggagagtggaagttggactcaagaaactctgtgttggaatggtctattctccttattgatcagtcgaatcgcagtggttccatggaattttttgttcccccagctgatccgtcatcatttttccccatctctgttggattttctgcatcgagtactttcagtgatctgaaggttactggaatcctt

SEQ ID NO: 64328 - DNA, 269 bp, Zea mays
ggctcttccacagtacagtgatcatattgataagctttccctgcatgttgagattgcaggaaaactcaataacataataagggaacaatgtcttcgggatgttggacagctagagcaagatcttgtgtttggcgatgctggaaccaaagaactaatcaactttttgagaacacaattgcacttaacccagagaagtttgaaagcgacaagggtgcaaaattaatgcagttggcaggattatctgctgatgacatgattgctgtaaataa

SEQ ID NO: 64329 - DNA, 264 bp, Zea mays
ccccgactcgctggcgccagagcagtgcaaggctctcgagtcggtacttccgccaaagccttcgtccaagctgacagacatggagatcgatgaatgcgaggagacgaccatgcatgatgtgaacaacatcgaggaagagatgcgcaggaagcaggctcatgctgctcaggaggcctacgaggaggatgacgagatgcctggcggacccaaagagtgcagtgcgctcaacagtaagcagactaccataatgggattcaaggcact

SEQ ID NO: 64330 - DNA, 266 bp, Zea mays
aatcgaccgagcgaatccctcgcatcgcattcgcagcctttgctgcatcacaccaccgcgaaaccccagcagccgcatcgatggcgcctaaggcggagaagaagccggctgcgaagaagccagcggaggaggagcccgctgccgcgaaggccccggcggggaagaagcccaaggccgagaagcgcctcccggcggccaagtcgtccggcaaagaaggcggcgacaagaagggtaagaagaaggcgaagaagtcggtggagacctac

SEQ ID NO: 64331 - DNA, 263 bp, Zea mays
tacacacatacatagtttcttctactacacgacgacaaacatggggaagcctgcgaagatcggagagtggggtggatacgccggcgatcgtcgggatctgagggctactccggaccggctgatcgaggtgaaggtcacggcggacaacagcagctgcatccgctccatctccttcatctacatcggagccgatggcaaaccgtacgaggaggggccatggggtttcggccatgctggcacggagtacaagattgatctgtgca

SEQ ID NO: 64332 - DNA, 324 bp, Zea mays
ctcctccccagcatggtacctggcctcgaggtcgcctacaggggcgactggatccgggtagaagctgttgcccggcgccttcgtcgtcaacttcggatgccagcttgaggttgtgacgaacgggatcttgaagagcatcgagcacggggtgatgaccaacctgggagtggcgcggacaacggtggccacgttcatcatgcccaccacggactgcctcatcggccccgccgccgagttcctcagcgacgacaacccgccgtgctaccgcaccctcaccttcggcgacttcaagcgataaggcggtttgtcaagctgggctcgtcg

SEQ ID NO: 64333 - DNA, 305 bp, Zea mays
agaaggagtccaccctccacctggtgctccgcctccgaggtggcgccaagaagcgcaagaagaagacgtacaccaagcccaagaagatcaagcacaagcacaagaaggtaaagctcgcaacgctgcagttctacaaggtggacgacgccaccggcaaggtgacccgcctccgcaaggagtgccccaacaccgagtgcggtgcgggtgtcttcatggccaaccacttcgaccgccactactgcggcaagtgcggcctcacctacgtctacaatcagaaggcgtaatcccatgcggcgctttgcttc

SEQ ID NO: 64334 - DNA, 323 bp, Zea mays
cgattctacggggcatgcacaaagcagagaaaatatgtcatcgtgacagagtatatgcctggaggcaatctgtatgattttcttcacacgctaaaaaatactttggatctcccaacggttctcaggattgctatcggcatctccaaggggatggattatttgcaccaaaataacatcatccatcgggacttgaagactgccaatttgcttatgggctctgattatgttgtgaagattgcagactttggagtctcaaggaatccatctcaaggtggagacatgactgctgaaactggtacctacagatggatggcacctgaggt

SEQ ID NO: 64335 - DNA, 306 bp, Zea mays
ggatgacaaatacggtacccaaggtatttcaaccgaggtggttgctgcaatgcgggagatggtcagcaaagatacccagaatcttgtgtcagattccttcttgttggatgatgacttaagtataccattctctaccgaggatctatcaatggcaatcccgtcaatagattatgctgacgtcgatcttccagaatctcttcagcactatacatcagtacagtttctactaaggcagcaggatccacagcctgcccaatagaatgaatgtggtcagcctgccctgaagatctgtctgtcccctggttg

SEQ ID NO: 64336 - DNA, 308 bp, Zea mays
acggcgcgtgcgcgtgaagcttgaggcaatccccgctccgtctagcgggcctgcgcgagtcagtcagggttccatggccaacagcaacctcccgcgccgaatcatcaaggagacgcagcggctcctcagcgaaccagcgccggggattagcgcgtcgccgtcggaagagaacatgcggtacttcaatgtcatgatccttggccccgcacagtcaccctatgaaggtggagttttcaagcttgagctattcttgcctgaggaatatccaatggctgccccgaaagttatgggtctcaccagaatttacc

SEQ ID NO: 64337 - DNA, 304 bp, Zea mays
cgggatggacttcgtgttgcaactggaccttatggtaatatatttcgtgttttcggtcgtcgtccgggaagcatagaggcaacaactttggaagcaagtaggaaccaatgaggcgtcagattgcaaatccagcaaggcccacacggacacttacttcttgtgcccgtggtgttcggaaaggtggagaaaatcaaggcgttgatgctaataggaattcactcgacttctcaacgaagctgctccacctcgcatggcacccgaccgagaattctattgcatgtgctgctgcaaatagcttgtatat

SEQ ID NO: 64338 - DNA, 310 bp, Zea mays
cgggaccacgggcccagcctacaacattgacaatctggtcaagtctctcaaatttgtcaccaacaaacgtacttacggaccgtacggcagggacgagggcaccccgttccgtgtcaaggtgatgaacaacggccacgtcgctggcttctttggccgctctggagattgcctggacgcgatcgggctctacgtgaaccccaactaataactaaaacgatggatcggatcatctgcatgcatgcatatgcagtatgctgcttgcctgcctgtaacgaatatgaatgcataaaataacgcccctgctgctccc

SEQ ID NO: 64339 - DNA, 307 bp, Zea mays
atttgggcccttgcttcttattgtgacggtcgaaaagattgaggaaagcttcgacttgatcaatgccaagcctaagccactagccgcctaccttttcaccaagaataggaagctgcaagaggagtttgtggcgagcgtccctgcaggagggatgcttgtaaacgacactgcgctacatctcaccaacccgtacatgcccttcggcggcgtcggcgacagcgggatgggctgttaccacggcaagttcggcttcgactgcttcagccacaagaagggagtcctgatccgcggctttggcggggaggcg

SEQ ID NO: 64340 - DNA, 306 bp, Zea mays
gagaagccgaagaaaattcgaagacgaggagcagctacactgcggacggacttcgggcatggagggccagttccaggttggcaaggaggaggtcatccaagcatggtacatggacgacagtgaagaggaccagaggcttcctcatcatcgcgagcccaaagaattcatccctctcgacaaactttccgaactaggaatattaagctggcgcctaaatgctgatgattgggagaatgatgagaacctcaagaaaattcgtgaagccaggggttactcttacatggacatttgtgatgtgtgcccaga

SEQ ID NO: 64341 - DNA, 307 bp, Zea mays
agcggaagaaagggaaactaccgaaggatgctcggacggtgttactagaaagggtggaacacgcactaccgctggccttatcctacggaggaagacaaggtgaggctcgcagcaatgaccggtctcgacccgaagcagatcaacaactggttcatcaaccagaggaagaggcattggaagccatcggaggacatgcggttcgcgctcatggagggtgttgccggtgggtcttctgggacgacactctacttcgatacaggcacaattggaccctgaatcatacaccacttgggatgacaactggcca

SEQ ID NO: 64342 - DNA, 310 bp, Zea mays
cgcagcgcatctgtggtactctacgaaggaggccgtcaaagcccttgaactattgctggatgcaggaagcacattttcagaaagtctcacgtataggtatgaccttgtcgacctaactaggcagtgcctatccaaactagcgaatgaagtgtaccttgatgcgatgagttcgtaccaaaagaaagattcgtatggcctgaatgctcacgtgaggaaatttcttgagatcatcgtggatatcgatacgctactagctgctgatgataactttctgctgggcccttggctggaaagtgcaagaagccttgct

SEQ ID NO: 64343 - DNA, 311 bp, Zea mays
gtattttgtgtaccggaataataagtatattgactgctaccggagtggtcatttgcggggatgttagtgaaggtaaggctgcggcaagctcctggggagttgcctactcttaatgattgggagaaccatctaacaacaatttttcctgaggttaggttaatgagataccttgagatgagaggtgctgatggtggcccatggaggagattgtgtgcgctgcctgcattttgggttgggctgctgtacgatgaggaatcattacgggagcatttgagacatgacttttgactggacacaggaggaaagagaga

SEQ ID NO: 64344 - DNA, 305 bp, Zea mays
cgagacctcgcgtcttcttcgacatgaccgtcggcggctcccggcgggcgcggatcgtgatggagctgtacgccaacgaggtgcccaagaccgcggagaacttccgcgcgctgtgcacgggcgagaagggcgtgggcaagtccgggaagccgctccactacaagggctccaccttccaccgcgtcatccccgagttcatgtgccagggcggcgacttcacccgcggcaacggcaccggcggcgagtccatctacggcgagagagttccccgacgagaagttcgtgcgcaacacaccgcccccggt

SEQ ID NO: 64345 - DNA, 299 bp, Zea mays
taaggcgtctgagactctgagacacagggtcaggaccctctctgcgccgccgccgacgttgcagtcgcggccacatcgtcgcctatccatccccaccgctcccactgccacgattcacaagaggtgtcgagatgtctcagaacaacccctcccagctcctcccctcagagctgatcgctcggtgcatcgggtccaagatctgggtgatcatgaagggggacaaggagctcgttggcaccctctgcggatttgatgactacgtcaatatggtgctggaggacgtcaccgagtatgactac

SEQ ID NO: 64346 - DNA, 298 bp, Zea mays
  unsure (1)..(298): unsure at all n locations
ggtatcctttgaacatgtttcgcatctgncatcgaagccattctgcttcacgcagagatatcaggatgtaaagaaagtccttgcagagacgttctttggtcctacggatgttggtgtgtatagtccatccgtacaaaatacgctatacctcatggccaaggaagtccttacaaggttcccagatatatcgtcagtccagcttagaatgccgaaccttcactttctgcctgtcaacttggggagcaaagaagctccgctggtgaagtttgctgatgatgtgtacctgccgacggatgaa

SEQ ID NO: 64347 - DNA, 285 bp, Zea mays
gaaaagtgtgtgtgattcattgggcattcgcatcatcgcatatagcccgcttggattaggaatgctcactgggaagtatggtgcttctaacctcccaaaaggaccaaggtcagtgctgttccgacaaatccttcctgggctggagcctctgctgactaccctgagaaggattgccgaaaagaaggggaagaccatgcctcaggtaagtgcttaccgagcgcagaacggcttgctgaaacgattctatgatcgcaccagcctaccagcacgtcgcaactacgatgc

SEQ ID NO: 64348 - DNA, 286 bp, Zea mays
ggtcttggaagcctcctttttattttgagcagctctctcggtgcttatctcctgctgctgtaccttgctttgatcactcctatcatccatgacttctacaactacgatatggagaaggcagaatttgcaggcctctttgcgaagttcacccaggatttggcgctgatcggagctctgctcttctttctgggcatgaagaactccatcccgaagcggcagggcggcaagaagaaggcccccaaggcgaagacggactagggctgcttagatagctgcacgcctcagg

SEQ ID NO: 64349 - DNA, 285 bp, Zea mays
caaaggatacctccaatgcaaacatcgcaaaacagaggcttaagatgatcctgttctccgacaggtgtgaagtcagtgatgaggcaaagaaaaagattgtggagaacatcattgaggcactgtctgagtttgttgagatagaatcaagggataacgtccaagtggatatctcaactgatgctggccttggcaccgtgtactctgtgtcagttcctgtgcgccgtgtgaagccagagtaccaggaatctgaagagcagtacagagggaaaattgttggtgtcgact

SEQ ID NO: 64350 - DNA, 283 bp, Zea mays
gtcatggccaccgtcaagaaggggaagcccgacctcaggaagaaggtgatgcccgccgtcatcgtccgccagcgcaaccgtggcgccgcaaggacggtgtctacatgtacttcgaagataatgctggagtgattgtgaatcccaagggtgagatgaaaggttccgctatcactggacctatcggcaaggagtgtgctgatctttggcctaggattgctagcgcacaaacgccattgtttgagagcttgttggaatatgttcagacttatatgatcatcttatt

SEQ ID NO: 64351 - DNA, 283 bp, Zea mays
atctacacacatacatagtttcttctactacacgacgacaaacatggggaagcctgcgaagatcggagagtggggtggatacgccggcgatcgtcgggatctgagggctactccggaccggctgatcgaggtgaaggtcacggcggacaacagcatctgcatccgctccatctccttcatctacatcggagccgatggcaaaccgtacgaggaggggccatggggtttcggccatgctggcacggagtacaagattgatctgtgcaggttcgacgagagcttg

SEQ ID NO: 64352 - DNA, 285 bp, Zea mays
gaagatgtcctgagaccccgcgttgattcaatcggtggacaaataaagaaggtcatactgtcaggaacacatctaactccatgtatacaggatgtcaaatggcaagttggttcagaatacactccagcagatgccattgcacaaggattgaaatcactggctcttagtgaaacaagagtcctctcaagaactattgctgattggtttacatccctttaaattttgagttattcaatacatccgttgaagtctggagttcttcttacaaaggaatgccttcatcag

SEQ ID NO: 64353 - DNA, 284 bp, Zea mays
ctcatgctactgcagttgcaatataccgcaataaataccaggcaactcaggaaggcaacgtcgggatacttcttgacttcaactggtatgaaccttttacaaactcaactgaagatcaaatagctccgcaaagggccagggacttccatattggttggtttcttgatccattaataaatgggcaatatccaaagataatgcaagacattgtgaaagaccggctaccaagtttcacacctgaacaggccaagctagtcaagggctcatcagactatgtcgggatc

SEQ ID NO: 64354 - DNA, 285 bp, Zea mays
ggcagaggtgaatgccatcaagcaagtcttcaaggacccatctgggattaaaataaatgcaaccaagtccatgataggacattgccttggcgcacaggcggtttggaagccattgctactattaccagcgataactactggatgggtgcatccaagcataaaccaatttaacccagaggaagcagttgaatttgacactgtacctaatgtaaaaaagcagcatgaagtgaatgttggtatctcaaattcctttggatttggaggtcacaattctgtcgtagtatt

SEQ ID NO: 64355 - DNA, 266 bp, Zea mays
ctttggtgaatccgatgatgaaaagcctgagaaactggaagcattgatcgctgctcttaacagcagtgatagcagtcacattgttcatgtccctcctggtgaaaatgctctctctgatttcctcctaagcactcctatattttctggtgaagaaggtggaagtggtttttctgcttccgcagcatctgctgtagctactggtgcatctggtttatttttttgtgtggacccatatgttgatccagatgtggcactcgctctgctgt

SEQ ID NO: 64356 - DNA, 279 bp, Zea mays
gtttcgacaagagtggtgtgagtgttgaagagctcctcaacatgatggatccggccttgcttgacgacgtcatacgccggctgctggaggtgaagaatctcaagcctgggaagaacgcgcagttgtcggagtcggagatcaagcagctctgcgctgccgacaaggagatcttcctgcaccagcccaacctgctggagctcgaggcgcccatcaaaatctgcggtgatgtccatggccagtactctgatctcctgaggctattcgattatggtggctatc

SEQ ID NO: 64357 - DNA, 280 bp, Zea mays
aacgacgataagagataacattatttacgcaaggcacatcgcaacagaggctgagataaaggaagctgcaaggatagcaaatgctcaccatttcatcagcagcttgccacatggatatgacacccatgtgggaatgagaggggtcgatctaacacctgggcaaaagcaacggattgccattgctagggtggttttgaagaatgcacctatactgttgttggatgaggccagctctgcaatcgagtctgaatcaagtagagtggtacaagaagctctcgac

SEQ ID NO: 64358 - DNA, 280 bp, Zea mays
gcacatcaccggtggcattatgggtggccatgccgtcaagttgattggatggggaaccagtgatgctggagaagattactggcttctggcaaatcagtggaatagaggctggggcgatgatggatacttcaagatcataaggggcaaaaatgaatgtggcatcgaggagggcgttgttgctggaatgccatccacaaagaatatggttccaaacttcggcggtgcgttggaagagctatagtttaatggttacgtttgcatggcctcaaatgctgttgga

SEQ ID NO: 64359 - DNA, 283 bp, Zea mays
ctcacttcattcgttcccggcctcaccccgagccagtcgtctcgctagggtttcgccgccgccgccatgcctcgccgcagctcaggaaggtctgccccacgcccagctccccgtgctgcttcactgaggaacccgccacagccagcacgccaggctcctcctccagctcctgttcgagatggtggtggctccatgtttggaggaattgggtccaccattgctcaaggtatggcgtttggcacgggtagtgccatggcacacagggctgttgactctgtattag

SEQ ID NO: 64360 - DNA, 276 bp, Zea mays
gtttgatactctttgtgatctttatgatacactcaccatcacacaagctgttattttctgcaatactaagagaaaggtggattggcttactgaaaaaatgcgcacaataacttcatagtatcggctatgcacggtgacatgccccaacaagaaagggatgccattatgggcgagttcaggtccggcgcaactcgtgtgctaataactacggatgtttgggctcgaggactggacgtccagcaggtttcacttgtcataaattatgatctcccaaat

SEQ ID NO: 64361 - DNA, 279 bp, Zea mays
cagcgactcagcgagcgagagcagcacacacgcagctagctaggagcagcagcagagcagcggcgatgtcggcctccatgatctcctcgtcagctctggcggtggcgcctcagggcctgccgcccctcggccgccgcgcctgctccttcgccgtcgtctgctccaagaagaagatcaagaccgacaagccctacgggattgggggtggcctgaccgtcgacgtcgacgccaacgggagaaagggcaagggcaagggcgtgtagcagttcgtcgacaagt

SEQ ID NO: 64362 - DNA, 277 bp, Zea mays
agcgcatgggcatcggcctcgtcgtctccatcttctccatggtggcggcgggcgtgctggacatcgtgcggctgcgcgctatcggcggcacggcctgtacggcgaggacgacatcgtgcccatctccatcttctggcagataccgcagtacttcatcatcgaccgcgcggaggtgttcaccttcgtggggcagctggagttcttctacgaccaggcgcccgacgccatgaggagcatgtgctccgcgctgtcgctcaccaccgtcgcgctcggcaat

SEQ ID NO: 64363 - DNA, 276 bp, Zea mays
atgggtgactcagcctacaaaagcactctcgattgttttgtgaagacgctaaagaatgatggccctttggcattttacaaaggcttcctgccaaactttgcaagacttggatcttggagtgtgattatgttcttgacattggagcaggttcaaaagctgtttgtgaggaaagcgacaagctgaagatagagtttttgcagtcaggtggcgtacaattgacgcacagggtgtttctgctatagacaaaaggggagaaatgacacctcccccctcgag

SEQ ID NO: 64364 - DNA, 320 bp, Zea mays
catgcacgcgtgctcgagatcgggatcgtggtcgaaagcgactggcgaagtatccgtatgtgactggtaattcagtcattgccttgaaatacaaggatggtgtgatcatggcatgtgacactggagcctcttatggatcaactttgagatacaagagtgtggaacgcattaaggcagttggcaagcatagcatcattggagcaagcggagagttcagtgacttccaggagattttgcgctatttggatgaactaactctgtctgatcatatgtgggatgatggaaactcgctgggccccaaagagatccacagctatttg

SEQ ID NO: 64365 - DNA, 276 bp, Zea mays
atccagtgcttcgactgggacacggtcggcggcgccgaggtcgatatggccgaagggggcggaatcacgctcccgagggctgtccctctggaggccatctgcaagccgcgccatgctatgcttggcgtcctcaagggactgtgagcgccatgctatgccttgatacataagtaagctttttttctttagtaaagcagtcatcttgcgtctcaagcagttgcttgctttattgcttgaaactcactttcttcctggagtgtagccgccgcagtgtaa

SEQ ID NO: 64366 - DNA, 276 bp, Zea mays
cactgactatgcacgaggttacaaaaccatgttttctgatggcttcccttatctgatagtctctcagggctcattggatgcattaaatgagatactcaaagagcctataccaattaaccgcttcagaccaaatattttagtggaggggtgccacccatatgcagaggatatgtggaaatcagtaaagataaacaagttaacatttcaaggtgtgaagttatgtggccgttgcaaggtgtactttgggcaaaatgcagtctgcaaggaatctctgtc

SEQ ID NO: 64367 - DNA, 274 bp, Zea mays
agggccactaatgagcttgtgatacgtgtgcaccggatgaagcaatttacctaaagattaacaacaagattcctggtctcggtatgcgactagataggagtaacttgaatctccattatgccgcaaggtactcaaaggagatacctgatgcttacgagagactcctgcttgatgccatcgaaggagagagcaggcttttcatccgctcagatgagttggatgctgcatggtcactcttcacacccctcctgaaggagctggaagagaagcggat

SEQ ID NO: 64368 - DNA, 277 bp, Zea mays
cggtgacgatggccgcttcctccctctgccacgggcacttgctcctgtttctcctcgtgtccgtcacatcggcctgcctcggtaccgcggcggcgcatcaagccgggtctggagagggctacacgatcgccggccgcgtcaagatcgatggcgtgagtgcgaagggctatggtcttccagccaagacatcaaacacaaaagtgatacttaatggcggacagagggttacatttgccaggccggatggctactttgcattccacaacatgccagctgg

SEQ ID NO: 64369 - DNA, 280 bp, Zea mays
ataaatttggaggtgctatggcaattgccaagagtgatatcggcgtgcaatatcacaagactggaaaacaagtgtacttcagaaccatcaaagtatgaacacttgtacagcatggttcatgaagaagttcaaaacaagaccgcaaaaggttcctcaagctgcacaaatgggcttctgtggctgacgagggccatggacttccttgttgagttgtttcgtaacctgcttgagcatccagactggaccatgggtcaatcgtgcactgattcatacaccaaga

SEQ ID NO: 64370 - DNA, 275 bp, Zea mays
attcctctgtgcttgcgaaccatggagatgggtagtgagctatccaatactgtggcaactttcatcgtccaaaagattcttctagatgatgttgggctgcgctacatttgtgccactgctgagcgtttctttgccgtaggcagtgttttagcaaacatggttgtttcacttgctgatcagccctccacaaggctgctgaagcacatcattcgttgttacctccggctgtcagataaccctagggcttgtgctgcattgcagagctgccttccaga

SEQ ID NO: 64371 - DNA, 274 bp, Zea mays
gttgaaatcatcaaggttctgggcacacccacacgtgaagaaattaagtgcatgaatccaaattataccgagtttaaattcccgcaaatcaaagctcacccgtggcataagatattccataaaaggatgcctgctgaagcagtagatctcgtgtccaggcttctgcagtactcaccaaaacttcgatcgactgctttggaagcattggtccatccgttctttgatgaacttcgggatccaaacacccgcttaccgaatggtcgttttcttccgc

SEQ ID NO: 64372 - DNA, 273 bp, Zea mays
ggaccttcggcgcccgttcaggatccacacattcccgagcgagttcttggtcgacctcttcctcttcggaccacctccaaggctcttggtgtagcttgccactctcaccaatcaagttttcatgtctgatctcgacattcagatcccaactgccttcgatcccttcgctgaggccaatgctggggactctggtgcggcagcagggtcaaaggactacgtacacgtgcgcatccagcagcgtaatggtcgcaagagcctgactaccgtccaggg

SEQ ID NO: 64373 - DNA, 273 bp, Zea mays
tggaactgctggcgcatttgatgataccactaaaggaatacttcatgcggcgctttaaagatcagagtattggcgcctgtccgatgaaaaagggaaaccccctggagtattgggttggtggccttcaagagcagtcacatttatagagaatcatgatactggttctactcagggccattggaggttcccctatggtatggaactgcaaggatacgcctacatcctgacacaccctggcactcccgcagtcttctatgaccacatatttccaca

SEQ ID NO: 64374 - DNA, 280 bp, Zea mays
attgtgagcccagtgaaaaaccagggccactgtggatcatgctggaccttcagcactactggtgcacttgaggctacatatacccaggcaactggcaagcccatctctctctctgagcaacagcttgttgactgtggttttgcattcaacaatttcggatgcaacggaggccttccatcccaggcctttgaatacatcaaatacaatggtggccttgacactgaggaatcttacccttaccaaggtgtcaatggaatctgcaagtttaagaatgagaatg

SEQ ID NO: 64375 - DNA, 275 bp, Zea mays
gcgcggacgcccaccagcagctgccccttgctgtcgccgcctctctccgcgcgaccgatctcccgccgccgccaccatgtcgctgatcgccggcgaggacttccaacatattctgcgtctgctgaacaccaacgtggatgggaagcagaagatcatgttcgccatgacctccataaagggtgttgggcgccgcttctccaacatcgtctgcaagaaggccgacatcgacatgaacaagagggccggtgagctgacgcctgaagagctggagcgcc

SEQ ID NO: 64376 - DNA, 274 bp, Zea mays
ggcgacggctgcatcactaccaaggagcttggaactgtgatgcgctcccttggccagaaccccactgaagcagagctgcaggacatgatcaacgaggttgatgctgatggcactgggaccattgacttcccagagttcctgaacctgatggcaaggaagatgaaggacaccgactccgaggaggagcttaaggaggcctttcgcgtcttcgacaaggaccagaatggtttcatctcggctgctgagctccgccatgtcatgaccaacctcggcg

SEQ ID NO: 64377 - DNA, 303 bp, Zea mays
catgcacgcgtgattgggattcggctcgatgtcgaactcggttcaaagttgagctattggacagctgtggtgtgcacggcagctctgtgacttgtcaggaggaatggaggaagaaagcggatccatggcgtcgaagcggatcctcaaggagctcaaggacctgcagaaggatcctcccacctctttgcagcgcaggccctgttgccgaagatatgttctactggcaggcgacgattatggggccatcagatagcccatacgctggtggcgtatttttggtcactattcactttccaccggact

SEQ ID NO: 64378 - DNA, 279 bp, Zea mays
ctggtgaggtgatccttgggaagcagccgctttccccaccagcccttagtggtgatctgggaactttcatggcctgggtggatgatgttagaaagctcaaggtcctggtctaacgccgatacccctgatgatgcattgactgcgcgaaacaatggggcacaaggaattggattatgccggacagagcacatgttctttgcttcagacgagaggattaaggctgtcaggcagatgattatggctcccacgcttgagctgaggcagcaggcgctcgaccgt

SEQ ID NO: 64379 - DNA, 271 bp, Zea mays
gtgcttgctgcatcgtatccttactttgcgaaaaggctactcactgatcccaatccatacctcagtgacgatatagttgagcttctattcaaggatggaagattcagatggaataggcttgaaaatcttcttgttcaagggcgctaagatagagagtttgcagccaaagatgcattacagcctgttctaaagcttctcctgggtcctgatggggaggaattgcgtgtgttggttgtgaaagaggcagttcgtgtaacagaagccatcacta

SEQ ID NO: 64380 - DNA, 269 bp, Zea mays
atttacgtatatgcccttgtcccggttccattccccatccccaactccattatttgcttgatccttgagaagagagaggaagacgagagctagaagcgaaggagaaaagcagttcttcagctaggcaggagggcacacgaaggaggagatggcgtcaaagaggattcagaaggagctcaaggatctgcagaaggaccctcccacctcgtgcagtgcaggtcctgttggtgaagacatgttccactggcaggcaacaataatgggtccat

SEQ ID NO: 64381 - DNA, 275 bp, Zea mays
tggttaagtacattgacagcaacttcgaaggtccatcgttgctccccgaggatcctgcaaagcagcagttcgctgaggagctgctcggatacaccgacgcattcaacaaagcattttactcatgtttagtcgacagggaagatgtgtctgaggaagccgttgctgccttggacaaaatagaagacgccctggggaaattcaacgacggcccgttcttccttggccagttcagtctggtggacgttgcgtatgtaccgttcatcgagaggtttcat

SEQ ID NO: 64382 - DNA, 272 bp, Zea mays
ggaacaaaatgagctcgtagaatcagctgcagagatgctttatggtctgatacatgcacgatacattctgaccagtaaaggactggctgcaatgctggagaagtataagaactatgactttgggcggtgcccgcgtgtttactgctgtggtcaaccatgcctgccagttggacaatcagacatccatcgatctagtaccgtgaagatatactgccccaagtgtgaagacatctactacccacggtccaagtaccaaggcaacatcgacggcg

SEQ ID NO: 64383 - DNA, 251 bp, Zea mays
tggggatcaaggaaacgtgtgctcctccttggtcacagcaagggtggtgttgatgcggctgcagcactctcactctactggccacaactcaaagacaaagtcgcaggtttagcattcagccaaagtccatatggaggaagccccgttgcttcagacatcctgcgagaggggcagcttggtgactatgtcaggctgcgtaagatcatggagatcttggtatccaaggtccttaagggtgatctgcaggctct

SEQ ID NO: 64384 - DNA, 270 bp, Zea mays
ggaacttgccgggacatggaggaaggtgatgccttacatggccatggtgtttcttcagttcggcttcgccggaatgttcctcatctccgtcgcgtccctgcggcagggaatgagccactatgtccttgttgtctaccggaacgtagtggcagccattgtcatggctccattcgcgctatggtttgagaggaaaacaaggcctaaaatgagcctaccggtgttcatcaagatccttgctttgggattactcgaacccgtgcttgaccaaaa

SEQ ID NO: 64385 - DNA, 134 bp, Zea mays
cctggattgtacagcaggaagctatcttgagaaccaaatggctgtagcccttggtggcagggttgctgaggaggtgatctttggccaagacaacgtgacaacaggagcttccaacgacttcatgcaagtgtcgc

SEQ ID NO: 64386 - DNA, 265 bp, Zea mays
gtgagggaatgaggaaagctggtccaaggcttctagagcctataatgaaagttgaagtgataactcctgaagagcatctgggtgatgttattggtgatttgaactctagaagaggacaggtcaacagcttcggggataagcctggtggactcaaggtggttgattcttttgtgccacttgctgagatgttccaatacgtcagcaccctccggggcatgaccaaggggcgagcgtcctacacgatgcagctcgccaagtttgacgt

SEQ ID NO: 64387 - DNA, 262 bp, Zea mays
gcgctcacaatggagccctccgagtatgtacagagaggcatccagacgctggcggatcccggttcctttgactccagcgccttcgcgcttctcctccgggcggctttccagagcctgctggacgcccaggcggacgaggccgcgctagatcacccagacttgaaacatatcgacccagtggttttaaagcattgtcatggggcagctgcaacttacatactggaggcaggaaagcaccgagttgacaagtctactctaagca

SEQ ID NO: 64388 - DNA, 269 bp, Zea mays
aatttgcggaactttgacacctggccatgatcctgtccaaaaggttaccttaatcccaaggggtcaagctcgtggtcttacatggtttatcccgatggatgacccaacactcatctccaggcagcaactttttgccagaattgttggcggccttggtggtagagctgctgaggaggtgatatttggagagcctgaggtgaccactggagctgctggtgacttgcagcaaattactggcttagccaagcagatggtggtaacgttcggta

SEQ ID NO: 64389 - DNA, 278 bp, Zea mays
tcgagatcatatcaaaagttctcaaggatggtggggtctggattaatttgggtcccttctgtatcactttgctgattcatatgggccagatgatgatatgtctattgaattaagtttggaagatgtgaaaaaggttgcttaccattatggatttacaatggaggtggagaaaatgatcgagactacttacactgcaaacatgaaagcaatgatgcagaatcggtaccgtgcagcattctggacaatgaggaaagatgcatctcggtcaaaagcgtgta

SEQ ID NO: 64390 - DNA, 275 bp, Zea mays
ccttcatctacatcggagccgatggcaaaccgtacgaggaggggccatggggtttcggccatgctggcacggagtacaagattgatctgtgcaggttcgacgagagcttgacggagatctccgggaccacgggcccagcctacaacattgacaatctggtcaagtctctcaaattcgtcaccaacaaacgcgcttacggaccgtacggcagggacgagggcaccccgttccgtgtcaaggtgatgaacaacggccacgtcgctggcttctttggc

SEQ ID NO: 64391 - DNA, 275 bp, Zea mays
cacatacatagtctcttctactacacgacgacaaccatggggaagcctgcgaagatcggagagtggggtggatacgccggcgatcgtcgggatctgagggctactccggaccggctgaccgaggtgaaggtcacggcggacaacagcagctgcatccgctccatctccttcatctacatcggagccgatggcaagccgtacgaggaggggccatggggtttcggccatgctggcacggagtacaagattgatctgtgcaggttcgacgagagctt

SEQ ID NO: 64392 - DNA, 309 bp, Zea mays
gcacgcgtagctcagcactcggctcgaggctcgtacgaagcagaccgcccgcaagtccaccggaggcaaggccccgcgcaagagctcgccaccaaggcggcgaggaagtctgcgccgacgaccggcggcgtgaagaagccccacaggtacaggcccgggacggtggctctgcgcgagatccgcaagtaccagaagagcacggagctgctgatccggaagttgcccttccagcgcctggtccgtgagatcgctcaggacttcaagacggatctgcggttccagagccacgccgtcctggccctccaggaa

SEQ ID NO: 64393 - DNA, 270 bp, Zea mays
gtggagaacgggaagaaggagatcgctctctggttccctgaaggtgtggcacagtggaagagcaaccttcatccctggatctacgaggcttgagcagttgagcttggatgccttgcctgctccatggaaaccagagttttgtttgagtattatctgttggctctggctgaagagtcataatttagcgctctgtgtgttacaccagagttaagtctgcctgaacttatgtggcatttgtttgagtttctgccttcgtgccctgttttctaa

SEQ ID NO: 64394 - DNA, 269 bp, Zea mays
ctctacactgtgacactatttgctaaggttgttgacaactttaaggtccgtgctcgcgagaagggttttcagatccgtgatttcgagtacagtcctgaagcacaggaaagccggatgcaggagatggagaagctactgcgagaccaagaagctatgaggaccactcttcttcagtggtgttatgccagctacagcgaggtattcagttcctggatgcccccaggtgctgtgcgtgtctttgtggagagcattctagatatggtctgccg

SEQ ID NO: 64395 - DNA, 273 bp, Zea mays
tctgagcttggcgatgggttatacagaacggaaactctgtttgtgaatagaaaatcatgaagggaaggagttgaccggacccctgcttgtacgtctccccgactgtgtaggtagattgtcagttggggttccgaagtactctactcatacgtgtgtatgacagtttatttatgaaacaaaatacgcattgatcgttatggtgcagcctgggatttcttattatagcataatgtatcgtatgtataaacggaccgtcctcagcacggccctaat

SEQ ID NO: 64396 - DNA, 273 bp, Zea mays
tgtgacattccgcatgtgaaccgtactgagtatcagctgattgatatttctgaggatggatttgtgagccttcttacttcagatggcaacactaaggatgctcttagactcccaactgatgagactcttgtggcccagattaaggaagggttcgaaagcgggaaggatcttgttgtgactgtccagtctgcgatgggggaggagcagatctgccgcctgaaggatgttggccccaagtaacttccttggctttggagacggaacctactgtat

SEQ ID NO: 64397 - DNA, 277 bp, Zea mays
cggggataaggggagcggcgaggaggagttctatgatgccgtcgtggtctgcaatggtcactacacggagccacgcctcgccgtcattcccggggtagatgcttggccagggaagcagatgcatagccacaattaccgtgtgccggagccattccttgatcaagtagtgatcataattggggcctcggcaagtgcagttgacatttcgagagacatcgcaagcatggcggaagaggtacatattgctgatagatcagcaccggcttccacctgtaaa

SEQ ID NO: 64398 - DNA, 269 bp, Zea mays
  unsure (1)..(269): unsure at all n locations
ctctagcatacattcatcagtagtccattctctatagaggtttttcggcagacattcttatgctcgacagatcaggacatctgcagctggtgcagttcaggtttgcaaagatgccggaaggtcaaaggacattgacaatatgtgggatcgatgactcacaaaacacaaagattgntcttggtaggggtcatggatttcctgctgactggtgggcacttggagttttgatctatttcatgcttcagtcagacatgccattcgggtcctgg

SEQ ID NO: 64399 - DNA, 268 bp, Zea mays
  unsure (1)..(268): unsure at all n locations
gcgagccctgngcactacaagtacaaccgcatcaagtcatacaagacaaatgtngatgggacactggacaggataggattagtcaagaggattggggctaggtttctacttacaagcagcagtgagatctatggtgatcacctccagtaacctcaggtggaaacctattggggcaatgtcaaccctataggtgtcaggagctgctatgatgagggcctacgtacagctgaaacattaaccatggactaccatcgtggtgccaacttga

SEQ ID NO: 64400 - DNA, 280 bp, Zea mays
ttcggctcgaggcacacccttacttggcatcacttcatgacataagtgatgagccagtctgctcaatgcccttcagcttcgacttcgagcagcatgcattatctgaagaacagatgaaggatcagatctaccaagaggctcttgcattcaacccagattaccagtagccaaagttcggttccagccggtgattgcgttcattgacatggagatttttatcccacctgatgtcactgcaaaaagtcgccaactccgattgctagctgtaaataattgcctt

SEQ ID NO: 64401 - DNA, 266 bp, Zea mays
ccgatcttttcgtgatgtctaatcccatgagagaagtcacactggagagaaaccctttgtgtgtacagaatgtgggaaagccttcagttattatagctctttccatagacacagaagaactcaccagacagtaaccttgaacacagagcttgagaagacttcataacacccataagattgcatatggagtaaaactgtaaaagttaagcgagtgaaacacctggttctactcatgggtacaggacctttaggccagacatggtgtg

SEQ ID NO: 64402 - DNA, 270 bp, Zea mays
ccgacatcgtcccttcgtccccacgagcaagcgaacatccgccggcgttgagatgttggtttatcaggatctcctatctggcgacgagctcctgtcggattcattcacctacaaggagctcgagaacggcgtcctgtgggaggtcgagggaaagtgggtcacccaaggtcctgttgatgtggacattggtgccaatccatccgccgagggtggtgaggacgaaagcgttgatgacacagctgtgaaggtggttgatattgttgacacatt

SEQ ID NO: 64403 - DNA, 269 bp, Zea mays
ggacctgggacctgatgtcacagattacttactagaggagaagtccgagtgaactattcatctgttagaggtgctaaggttgtcacggatccaaataccgggaagtcgaaaggatatggatttggaaagttcgcagatgaaaatgaaaagaaccgtgcaatgacagaaatgaatggtgtgtactgttcaacgagacctatgcggataagtgacgctatacctaagaaatcgactggctctcagcttcagtattcagctgctaaagcggt

SEQ ID NO: 64404 - DNA, 266 bp, Zea mays
gagcgcttctttggtgtcctgcttgaacactatgctggtgattttccactttggcttgccccaacccagacacgtattctacctgtgacagacaatgagttgcaatactgtaacgaggtggcctccgaactgaaatcaagagggctacgtgttgaagtctgtcatggagagcgcctaccaaagctaataaggaatgctgaaacacaaaaggtgccactcatggcagttgttggtcctaaagaagttcaagccaggaccctgactat

SEQ ID NO: 64405 - DNA, 265 bp, Zea mays
ggaaatagttcaggaaaggcttgagagggaatacaacttgaacttaatagctactgcaccaagcgtggtataccgtgtgaactgtgctgatggtgaaactgttgaatgttcaaatccatccttgcttccggagcctgggaagcggaggtctatagaagaaccatatgtgaagattgaaatgcttacaccaaaagattatattggttcaataatggagctgactcaagacagaagaggtgaattcaaggaaatgaacttcatcaca

SEQ ID NO: 64406 - DNA, 253 bp, Zea mays
tacagcaacgcactcattggtggaggcttctcttttcagaatccaaacgcaacaaaaacctgtgggtgcggcaaatctttcgcgactgggaaggaatccgaggctgcagcaaaagcttgcaacaactagagtagtgaaatattgatagcaaatcgtgatgcaacttgttatatagcttgctcctgatcaaatcacgtggctccaccacttatcattgtttcgtttcaaaatagttggctttgtttgttttttt

SEQ ID NO: 64407 - DNA, 268 bp, Zea mays
tccgtccgtccggggaaggagcatgagggaggcggagatgatcgaggtggtgctcaacgaccgcctggggaagaaggtgcgggtcaagtgcaacgaggacgacaccatcggcgacctcaagaagctggtggcggcgcagacggggacgcgccccgagaagatccgcatccagaagtggtacaacatctacaaggaccacatcaccctcaaggactacgaggtccacgacggcatgggcctcgagctctactacaactgagccgccgcc

SEQ ID NO: 64408 - DNA, 271 bp, Zea mays
tgatcccatgaccctgctcgaggaaataactcagaatgggatatctctaagatgtttgtgttaatgacctagagcctccagcttttgatgtgttgccctcacttaagaggttgaagaaacgaattattgcagctggccgggatgattatgtgctgtttttatgtcaggaagtggaagcacaattgttggtattggttcaccggatccccctgcattcgtgtatgacgatgaagactacaaggatgtttttgtgtcagaggcttgcttgctc

SEQ ID NO: 64409 - DNA, 212 bp, Zea mays
cacgcattctcctcgttcggctcgactgcattagctggctcactgaatctgctgagtaccataataggatgcttcaggaggagttggagaaactcaggaatcttcaccctgatgtaaccatcatttatgctgattattacggtgctgcattgaacatattccgtgcccactcaagtttggcttcacagtcccactgaatgcgtgctgcggaa

SEQ ID NO: 64410 - DNA, 269 bp, Zea mays
ggatacccatgtcacaacagctgttcgtggaagaattgggcacattgctcccgagtacctatctaccggcaagtcttctgagaagactgatgtttttggctatgggatcaggcttctggagcttattactggccagagggcatttgactagctcgtcttgcaaatgatgacgatgttatgcttcttgactgggtgaaaggactgttgaaggagaagaaggtggagatgctggtggacccagatctgcagaaagcctacgaggaggtcga

SEQ ID NO: 64411 - DNA, 269 bp, Zea mays
gagctagcgaaagataaggtcatgaacatgctatatcttgaattgagaacctggtccgcgcactgctccttccgtgtcgggccaattttggttgtcgacgaaccgttcacgattgacaatggtctgatgacacccaccatgaaaaaagaagggaccctgtgacagacaagtacaggagggagatcgaagccttgttcaagtgacacgcggaggcgtgcgcacccatcagagttcccttttccgagtacaagacggcaaccatacggcgt

SEQ ID NO: 64412 - DNA, 266 bp, Zea mays
cgatgacaacacgttcatagaagacaactcgttgccatcattctcaaaggctgttaatcagcgcgacgctgaccttgtctacttctggcagaagtaccggaaattggcagacagctcacatgagaaaaatgaagctcggagggattgcttgaagtgatggcccacaggtctcatgttgacagcagtgttgagctcattggaagccttctctttggctctgaggacggtccaagggttctgaaagccgtccgtgcagctggtgagcc

SEQ ID NO: 64413 - DNA, 264 bp, Zea mays
ccatttcttccctctcgccttcccctccgccgccaatcccacgtccaatcagccgccgctccagccttccatccatccatcccgtagctgctctctattccgccagcgatcgagagaccaagaggagcaggagcgatggcgagagctcgttcaagctggagcaccccttcgaaaggaggcaagctgaggctaaccgcatcagggagaagtaccccgatagaattcctgtcattgttgagaaggccgagaggagtgacatcccag

SEQ ID NO: 64414 - DNA, 261 bp, Zea mays
aaaaccccagccaaagctgagatctcacgtgtcatgaaccatatgaaagatatgggagtgttggttggtaagggtggtttctacgtgaacttttttaggataacaccaccgttgtgcttcaccaaagaggattccgacttttcattgaggtgatggacattgcgctctcgaagctgtgaggcaagcagggcgaagatgatgtgcaaaccctggtccgtcgccatgggatttttgcccatgaataatattaagattaatgag

SEQ ID NO: 64415 - DNA, 256 bp, Zea mays
gtccactgtccccgtgctcttccgccgtcgaggccgcgtcccagtgcgaagagactccgactcagatagccagccgctgggtccggcccgaggtgtacccgctgttcgcggcgacgggcgtggccgtcggcatctgcgggttcagctcttccggaacatcactggcaacccggaagtcagggtaaacaaggcagggagggcagctggtgtgcttgagaaccatgaggaggggagacgttacgccatgcatggccta

SEQ ID NO: 64416 - DNA, 258 bp, Zea mays
gtgacgctccctcagccgcgtcgcgtcgcatcctacgatccaaagctctctctagtcgcagccatggcgacgaactacccaaccgtgagcaccgagtacagcgaggctgtggagaaggccaggcgcaagctccgagccctatcgccgagaagagctgcgccccgctcatgctccgcctcatgtggcactccgcggggacgttcgacgtgtcgtcgaggaccggcggtccactcggcacgatgaagcatcagtcggaat

SEQ ID NO: 64417 - DNA, 261 bp, Zea mays
ggctttcaaatatggtccttcagtggcaagcatctttacaaggtgtcaaaggatcatttctatcagtttatatggcgcccgagaccgccctcactactgacggccgagaaggaagaagagatctcaaggaacctgaagagtatagcaagaagtacgaacaagaagaccaggatgcattcaatcagttgagcgagcaggaccgcaagaggcggacacagcttcaggaagaatgggactcatgggttgccaagtggaagcaga

SEQ ID NO: 64418 - DNA, 260 bp, Zea mays
gccacgggcgcaaatgtgtcacatgccaagacgtgtcttgaggagaggtacacggacgatattgaacttgatcttgccatccacactgcaatttgcactttgaaataaggatatgaggggcaaatttcctccagcaacttgaaatcggaatcactcgagctgactgtgagtctcaagttctaagcccattagagatcaaggatttcttggaagaggtggagtaagttgtctgttgatgatttactgtttcaaacaagaat

SEQ ID NO: 64419 - DNA, 299 bp, Zea mays
ctcccgcaagggatactggcagttcgacatgggggaccttctcatcgacggccactccaccggtttctgcgccaaggggtgcgctgccatcgtcgactccgggacttccttgctcgctggcccaacggccataattgcccaggtgaacgaagcgatcggggcagacgggatcatcagcacggagtcgaaggaagttgtgagccagtacggagagatgatcctcgacatgctcatcgcacagacggatccacagagggtgtgcagccaggttggtctgtgcgtgttcgatggcgctcgat

SEQ ID NO: 64420 - DNA, 288 bp, Zea mays
cttagcgagcgagagcagcacacacgcagctagctaggagcaacagcagagcagcggcgatggcggcctccatgctctcctcgtcagctctggcggtggcgcctcagggcctgccgcccctcggccgccgcgcctcctcctacgccgtcgtctgctcctagaagaagatcaagaccgacaagccctaccggattgggggtggcctgaccgtcgacgtcgacgccaacgggagatagggctagggcaagggcgtgtaccagttcgtcgacaagtacggcgcgaacgtcg

SEQ ID NO: 64421 - DNA, 288 bp, Zea mays
ggggacgacccctggaatgagttctgcagcatggtgcacaagatcctcgtgtacacgagggaggaggtcacagcgcatgaacccgggcgccctgaactcgaggccggaggacagcggcctcgccaattcgacggagaggggctccgcatctactgctgctgctagagaggcacccggctaccactccgcctcgtcgcttaactccgacaactgctgatgccttggcagctagctggtcgtcccaagtagtagagaacaaggcaaatgtatccatagatctccttgtag

SEQ ID NO: 64422 - DNA, 287 bp, Zea mays
cggagagtacagaatggagctaccagagtacaacacgattgaaccttatgcgaaaatgaacgagaactgtccgtccttgcccccaacgtacaaacgacccgcacgctgctgactacgagattgtctactatgtatctttctgcagctgctgcctttacacagtggcattagagtgttgttgctatgttctgtaaataaaagacactatatatataggtgcttggtagatggtagttcttaccagtaatgtagctgcgatgtattcaggttcacggttttcagtcgat

SEQ ID NO: 64423 - DNA, 284 bp, Zea mays
gaaaggagctatctcagaaaatgagctatgggacttggtaatccttgaccctccaaagttggcgccacgaaagaaggtgctacaaagtgcatccggtatgtatagaagcttgaacgcacttgcaatgcaagtggtgaagccaggggggttactcatgacatgctcttgttctggagctatgacccaaagtggcatgttcctcaaaatcattcagggtgccgcatcaatggctggccgtaaggttacggtcttacgtcaagctggggcagcatgtgatcacccta

SEQ ID NO: 64424 - DNA, 278 bp, Zea mays
gaaaagggttattactagatgtcctctacttggacgctgttcacaacaagtaccttgaagaagtttcttcatgcaatgtttttgttgtcaaggacaatgttatttctaccccagcaataaaaggaacaatattacctcgtatcacaatgaaaagtataattgacgttgctttgagtaaaggcttccaggttgaggagcggcttgtttcagtggatgaactgctttttctcgatgaggtattctgcacaggaactgctgttgtggatctcctgttggga

SEQ ID NO: 64425 - DNA, 288 bp, Zea mays
gtgaacttccagaaacagtagccagaactttggttccaaggatgagagttgtaaaaggaagtggaaaggcaatcaattacttaacaccaccaaggatcttgcttgctctggttactgcatgggttcggcggggtagatggtttgacgacgagggaagagcggtgtatgcagctgaagctgatagaattcgcaactgggctgaaagtcgagcacgcttctcgttcaccgacgccatggagatgtacacggaaaacacatgggtttccgtattctcgctctcggtggtct

SEQ ID NO: 64426 - DNA, 277 bp, Zea mays
tctcaatgacgtctgtcggatgtgctcctgatcctcctcgtcacacccggccgccgcgcgagcatgggttagtgtctcttctaagcggagacctgtgagaggagccatcatcatggccgctgttgagactgttgtcctcaaggttgctatgtcatgcgagggttgtcccggggcggtcagaagagtgctctccaagatggaaggagttgaaaccttcgacatagacctcaaggagcagaaggtgacagtcaaaggcaatgtcaagcctgaggacgtc

SEQ ID NO: 64427 - DNA, 298 bp, Zea mays
ctcccgcaaggatactggcagttcgacatgggggaccttctcatcgacggccactccaccggtttctgcgccaaggggtgcgctgccatcgtcgactccgggacttccttgctcgctggcccaacggccataattgcccaggtgaacgaagcgatcggggcagacgggatcatcagcacggagtcataggcagttgtgagccagtacggagagatgatcctcgacatgctcatcgcacagacggatccacagagggtgtgcagccacgttggtctgtgcgtgttcgatggcgctcgat

SEQ ID NO: 64428 - DNA, 282 bp, Zea mays
agaaaacattgaaagaaattaccaacgatctgtgccctgtccttagcatacaacagctatatcgaatcagtacaatgtactgggatgataagtacggtacccacactgtttcatcagatgtcatctcaagtatgagagtaatgatgacagacgattctaataacgcggtcagcagttcgttcctgttggatgatgattccagcattccgttttcggtggacgacatctcgaagtcgatgacagaaatcgaggtaacagatgtcgacatgccacctctgatcc

SEQ ID NO: 64429 - DNA, 284 bp, Zea mays
gaaatggagaatgctcattccattgccgctactgctggtgatacagaggccaaggacggtgtaattgaacattacatttgtttctcttgtgtcgatggagagctttatgagcttgatggggggacatcacagccaataccccatgggccttccactcctgataccttgttgcaggatgctgcagaagctataaaagcaagaatcgccatgtattcgcagtcaaacaacttcaatgtcatggctctttcaggcaaagcgatatagcattgtagcactttcagtca

SEQ ID NO: 64430 - DNA, 284 bp, Zea mays
gcaaaggaccgaatcatgatgggtagtgagcggaagtcggcagttatctctgacgaatgcaggaagctgacagcataccatgagggagggcatgcccttgttgcaatccacacagaaggagctagacctgtccacaaggctaccatcgtacctagggggatggccctaggaatggtggcccaactccccgacaaagaccagacaagtgtgtcaaggaaacagatgctagcaaaactggatgtctgcatgggaggccgtgtggcagaagagcttatctttgggga

SEQ ID NO: 64431 - DNA, 87 bp, Zea mays
cacaactcgcagctgcacgtgatgctggccatctgctacagcgggcgatgggatggtccaggcgtcccgggagctggcccgggaggc

SEQ ID NO: 64432 - DNA, 283 bp, Zea mays
aacaaagtgacgcgagcacgagcatccatcgtttccccttcttccccatcgcgtgccctcgccgcagccatcttccatggcggaccagctcacggacgagcagatcgcggagttcaaggaggccttcagcctcttcgataaggatggcgacggctgcatcactaccaaggagcttggaactgtgatgcgctcccttggctcgaaccccactgaagcagagctgcaggacatgatcaacgaggttgatgctgatggcaatgggaccattgacttcccagagttc

SEQ ID NO: 64433 - DNA, 280 bp, Zea mays
cctcaaggcccacttgagctctgaacctgatattagtcatgtaccaataaactcaagtatagagtttgtcatacttgatcatgatggattttggaaggtaatgaagaaccaggaagccgtcgatctcgtgaagtcaatcaaggatccacaggcagcagcgaaacgattgaccactgaagcgttggcaaggaagagcaaggatgatatctcttgcattgtcatccgtctccgctgctgagttaccctctctccacggcactgatatccagtcttcacctca

SEQ ID NO: 64434 - DNA, 291 bp, Zea mays
ggaattgctcttattgctatggctgaagaattaggagctgaaatggctgtacgttcacttgagcgtcttctgcagtatggcgagcagaatataagacgagcagttcctcttgctcttggtatactctgcatatctaatcccaaggtgaatgttatggacacactgagtagattgagtcatgatgccgatgccgatgtgtcaatggctgcaattatctcattgggtttgattggtgctggcacaaacaatgccagaatagctgccatgcttcgcaatctttcaagttattac

SEQ ID NO: 64435 - DNA, 289 bp, Zea mays
caccggaccaacagcgcctgatcttcgccggcaagcagctggaggatggtcgcactcttgcggattacaacatccagaaggagagcaccctccacctggtgctccgcctcaggggtggcatgcacatctttgtgaagacattgactggcaagatcatcaccttggcggtggagtcgtctgacacaatcgatcatgtcaaagccaagatccaggaccaggatggcattccaccggatcagcagcgtcttgatcttcgctcgcaagcagctggatgatcgccgcaccctag

SEQ ID NO: 64436 - DNA, 277 bp, Zea mays
cggatcgactcctctgaggctggccagctcgtgccattcaacagtgacgtgtttgatcaagtgattagagagtgcaatgagcacaactcacaatttcaatcgttgatcaggaaaatggtggagcaaaacttagatatcgagacaactagaaatgaagatcactatggtgcagctatccaccatctttccctgctccgtaacaaaagatgccttatggcttacatgtacaaccgagcagaagttatccagagttttagatggaaaattggccctgtgc

SEQ ID NO: 64437 - DNA, 214 bp, Zea mays
tgatggttcataccatataattaccgacacgggaagctaccctactgcttggcaaaagccaaactgaacgtaagatacaaattccaactacctctagctcgcttgtgtggtatctgtatcagtattcatgtgtttgtttgcttatgtgtttgtttgcttgtatttgctggtgcttgtatcgcgggatgcaatgagttgttgtttggttgttgtc

SEQ ID NO: 64438 - DNA, 228 bp, Zea mays
gccgctatctacctatatcgattttagtaggtactcactcctgtacataaaccctgcagaaaaaaagagggttcagttgtttatggaaccctggcaaatttgctatcgcgcacaatgtaaaactcagctaagctccccggcgtagtcgacacagctacgatctattattatttgatgtaatggggactgatattgcaacgaccagtaatattatgctacattcatttt

SEQ ID NO: 64439 - DNA, 267 bp, Zea mays
gccatcatcataaatctgctgtcaagacgtctggtagagggagaggaaaagggtgaattggggttcatccttgatggctttcctcgaaccataggacaagcggagatacttgaaggagtcacagacattgatttggtgatcaatctcaaactccgagaagaagctctgcttgcgaaatgccttggcaggaggatgtgcagccagtgtggagggaacttcaatgtggcctccattgatattgagggtgaagacggcgggcctcgaatg

SEQ ID NO: 64440 - DNA, 269 bp, Zea mays
ccgcggtcgacgaaattggagctgacaaggtcgggataaggctgtcaccattcgctagctactcggaggcgccggactcagacccggaagctctgggcatgtacatggcgaacgcgctgaacgagttcgggattctctactgccacatggtggagccgcggatggtgaaactcggtgaaaagttcgaaaccccctacagccttcgcccgataagggacgctttcaggggaacgttcatcgttgccggcggctacggcagggaggatggg

SEQ ID NO: 64441 - DNA, 274 bp, Zea mays
cagcgactcagcgagcgagagcagcacacacgcagctagctaggagcagcagcagagcagcggcgatggcggcctccatgatctcctcgtcagctctggcggtggcgcctcagggcctgccgcccctcggccgccgcgcctcctccttcgccgtcgtctgctccaagaagaagatcaagaccgacaagccctacgggattgggggtggcctgaccgtcgacgtcgacgccaacgggagaaagggcaagggcaagggcgtgtaccagttcgtcga

SEQ ID NO: 64442 - DNA, 280 bp, Zea mays
gccctagaaaaggcagccctgtcagacgaatattttatcaagaggaagctgtatccaaatgtggatttctactctgggctaatttatagggcaatgggattccctacagaattttttcctgtgctgtttgctattcctcgcatgggtggctggctagcgcattggaaagagtcactcgatgatcctgacactaagattataaggccccaacaggtatacaccggcttctggcttaggcactatacccccgtcagagaacgagtgctatcaagccagagtg

SEQ ID NO: 64443 - DNA, 289 bp, Zea mays
gtaaactgtgcccagaacataggccaagcagcaaaccaagaagaaggtttctatgagcggtcccctgagttgctagaggctgcagtagctcacatccagttggtcattgtaaccaagttcattgcgaaggtacagcaggacattcctggacctggagtgaatcagcagctacagaacctttgcaatgtctatgccctctacattctccacaagcacctgggcgacttcctggcaaccgggtgcatcacacccaagcagggagcgctggccaacgagcagctgggcaagc

SEQ ID NO: 64444 - DNA, 290 bp, Zea mays
  unsure (1)..(290): unsure at all n locations
cggagatgcagcagggcgacggcacggaggcgcaggtgacgtgggaggaccagcagaacatcaaccgcttcggtcgcctcaacaaccgcctccacgagctccaggaagagatcaagctcgcaaaggagacgaatgagaaccttgatgatgctgggaatgaactcatcttgtccgatgaagacgttgtacgcttccaaattggggaagtgtttgctcacatgccnaaggatgacgtcgagactaggctggagcagatgaaagaggatgcggctaagaagctggagaggtta

SEQ ID NO: 64445 - DNA, 287 bp, Zea mays
aaagtgttcgccaatgtgggcaagactatcgggtacaaagttggaataatgattgagatccccagggcagctctggtggctgatgagatagcggacaggctgaattcttctccttcggaacgaacgacctgacgcagatgacctttgggtacagcagggatgatgtggggaagttcattcgcgtctatcttgctcagggcatcctccaacatgaccccttcgaggtcctggaccagaggggagtgggcgagctggtgaagtttgctacagagagggggcgcaaagct

SEQ ID NO: 64446 - DNA, 290 bp, Zea mays
gctcaagggccgctacccatggatgagggggtcttcttatgacccgtgcaccgaaaggcactccaccgtgtactacaaccgcccggaggtgcagcgggctctccacgccaacgtcaccgccggcgccgggtccatgaactacacgtgggcgacctgcagtgacaccatcaacaacaactggggagattcacccaagtccgtgctccacatctacaaggaactcattgcagccggcctcagaatatgggtcatcagtggagatacggacgcggtagtccccttgacagcga

SEQ ID NO: 64447 - DNA, 291 bp, Zea mays
tgccatcggtatttgaaagaaagaaagcaatttggagctccactggcagcttttcagctcaatcaagaaaagcttgtccgcatgcttggcaacattcaggctatgcttctcgttggatggcgactgtgcaagctgtatgagtcaggcaaaatgacatcaggccggtctagtttaggcaaggcatggacgtccaagaaggccagggaggtggtttctcttgggcgagagctactgggtggcaatggcattttggttgattttcttgtcgccaaggcattttgtgacgtggag

SEQ ID NO: 64448 - DNA, 288 bp, Zea mays
gaacggaagtgtggatcaagcgagacgatttatcaggcatgcagttgagtggaaataaggtccgaaagctggagttcttgatggcagatgccgtagcaagaggcgcagactgcgttattactgttgggggtatacagagtaaccactgccgtgccacagccgtggctgctaagtatctcaatcttgattcctacctgatactacgtacctccaagcttcttgtggataaggaccctggtttggttggcaatcttcttgtcgagagactagttggggcacacgttgatc

SEQ ID NO: 64449 - DNA, 73 bp, Zea mays
tgccatcggtatttgaaagacagagagcgccttggagctccactggcagcttttcagctcaatcaacgaaaag

SEQ ID NO: 64450 - DNA, 290 bp, Zea mays
ggcttcggcaagaccgagaaggagatgaatgagctcaagctcaaggagatcaagaacggcaggctcgccatgctcgccatcctcggttacttcatccaggggctcgtcaccggcgtcggcccgttccagaacctgctcgaccacctcgccgaccccgtcaacaacaacgtgctcaccagcctcaagttccactagaacgtggtgcatcagcatacctgctgctgccgccgccgccgccagttgtttgctgtggaaagctagatgcatgcgtgttgtaaaggaacctgaag

SEQ ID NO: 64451 - DNA, 290 bp, Zea mays
cgcccagccgcacgaaaccctaacgccgccgccgcttcacaggtaagccgccgtcatggtctccggttccggcgtatgcgcgaagcgatcgtggtggacgcgcgccagcacatgctgggccgctcgtcgtcgattatcgccaaggaactgctcaatgggcagaaggtggtcgtcgtccgctgcgaggagatctgtatgtccgggtggactcgtacgccagaagatgaagtacctccgctttctccgcaaacggatgacacaggcgcattcccatgggcccatccacttcc

SEQ ID NO: 64452 - DNA, 282 bp, Zea mays
gagacctttgcaccggttgctcgactttaagccattcgtatcctacttgcatatgcatcttgctatgacataaagctttatcaaatgtatgtaaaaagtgcatttttaaatggcttcataaatgaacttgtatatgttgagcaaccactcgggtttgaagaccctagatatcctaatcatgcttacaggttgtccaaggcgctatatgggctaaagcaatctccaagggcttggtatgagcgtcttcgcgacttcctcatcaagaagggcttcaagattggg

SEQ ID NO: 64453 - DNA, 270 bp, Zea mays
tcaagctgcacaaatgggcttctgtggctgacgagggccatggacttccttgttgagttgtttcgtaacctgcttgagcatccagactggaccatgggtcaatcttgcactgattcatacaccaagactttgaagaaatttcatggatggcttgccagttctagttttacggtggcaatgaagcttgctcctaatagagagaaatttatggaggtcattagtggaaccggtgacatcaatgcagatattgagaaattttgcacgaccttc

SEQ ID NO: 64454 - DNA, 287 bp, Zea mays
acctgaccaacctgaatgtcagtggtatatgaagaccggagactgtaagtttggttctgtatgcaagtttcatcatcccagggagcgaataattcctactcccaattgtgcactaagtccattaggcctacctttgcgcccgggagaaccaatatgcagtttctataatcgctatggcatgtgcaagtttggtccaaattgcaaatttcatcatccgatgggaaaccctatgtatggccatgcttcatcaccgacaagtgaggcccaaacatctcggcgtatgctgg

SEQ ID NO: 64455 - DNA, 288 bp, Zea mays
gccatcttctacattatcatgcaatccctgggtgccatctgtggagctggagtggtgaagggcttccagcaggggctttacatgggcaacggcggtggcgccaatgttgtcgcccctggatacaccaagggggacggccttggcgcagagaccgtgcccaccttcatcctagtctacaccgtcttctcggccaccgatgccaagaggaacgccagggactcccatgtccccatccttgccccactgccaattagggttcgcggtgttcctggtccaccttgccaccat

SEQ ID NO: 64456 - DNA, 278 bp, Zea mays
  unsure (1)..(278): unsure at all n locations
atcatctataaaacctgaggtttgcagctacccattcacaacaagaggtaantctaatgtgtcacattgtatctaatcaggaacgttttcagcttacggacactacaggactcctgacaaggcatgatgatgacagaaataacatagagcgattgacataagctgtcctttcttatctacctatcgctgtcctgtatgtgcatgatctatccgaagactgtgggacctcagtggccgatcagtacatcacgtacaagcatattaaggacagattcggt

SEQ ID NO: 64457 - DNA, 285 bp, Zea mays
aaggaattgctccgacaatagagaacatagcagagtcgctcaatatatcggaaaagaaagtgcacaatgctacagaggctgtgaacaaggttctttcactggatcaacaggcgttcccctccttaaacggtctacctggggacacactccatagttacatagaggatcaaaacgtcgcaaatgatccatggcatggatttgaggaaatgtatctcaaggaggaagttaacaatcttataaattcaaacctcaacgagcgtgagagggacattattcgattatacc

SEQ ID NO: 64458 - DNA, 283 bp, Zea mays
  unsure (1)..(283): unsure at all n locations
agctccccccgcaaaaaccctagctttagctccacacaaccgcctgattggatnnancttggtcangnncnnnatnacnctgantcacgaaacggggaccatcgagcttaagaacggcaccgtcgtatccggaaccattaccggtgttgacatcagcatgaatactcatctgaagactgtgaagctgacactaaaagggaaaaatcctgttacccttgatcaccttagtgtgaggggaaacaacatccgctattatatccttcctgacagcctagacctggag

SEQ ID NO: 64459 - DNA, 296 bp, Zea mays
  unsure (1)..(296): unsure at all n locations
aaagcacccacacaattccgttttcctgggtctgttcacgttgtgcttgagcttcagcatcggcgtagcttgtgctaacacccnngggnanatcgttctgaaggctttagtgctgacggctggcgtggtggtttcgctgactgcgtatgctttctgacagtcaaagaagggcnaggaattccggtacctggggcctatcctgtcttccgcgcttactatcctcgtcctaactagctttcttcaggttttcttcccactgggacccgtgtcggtgggcttgttcggtgggctagggg

SEQ ID NO: 64460 - DNA, 152 bp, Zea mays
gcccagagggcatcaatgctgctcatgtcgaggctgaaagtgcggagaacggcatcggtgtcgtgaagttatgggccgcaacagtggttttatcgcgatgtacgcgactctagctagccgtgatgtggactgttgtttaatcccggagtcac

SEQ ID NO: 64461 - DNA, 300 bp, Zea mays
ctacctcatcggagttcccttgggtatcatactcggttggccgctggcactgggggtaagggggatctggtccgggatgattggagggaccgccgttcaaacgctcatactggcatacctcactgccaaatgtgattggcacgaagaggcgaagttagctagtatgagaatgaagaagtgggccgacgagtcgaaataaacccactccactgctgcgctttgtttgttagccaggcacacaggggaacggaacccctgaagctaagataacttctgatacagcgctatgcatattccggc

SEQ ID NO: 64462 - DNA, 291 bp, Zea mays
actgctttggctctagaatcagagtgataggcaacactggaagcgactcaagcagaagaatcggccaaggcaaaagaacagggatttgctgtgggcatgcatgcggctctccacatcaatccttactacgggaagacctcagctgaaggaatgatctctcatttcgaggctgtcctcgcgatgggtccgaccatcatctacaacgtggcatccaggagcgcccaggacatcccccctgaagttattctagcgatttctggctacacaaacatggcgggtgtcaaggaatgt

SEQ ID NO: 64463 - DNA, 294 bp, Zea mays
ttctgatgagattagtgacttatgggttactgcaaaggaagttggtgcacgtcttgagcagtaccacaaagcatcgtcacttacctttgctatccaggatggtcctcaagctggccaaacagttgcacatgtccacatccacctcatcccaaggcagaaaggggattttgagaaaaatgatgaaatatatgatgcgattgatgtgaaggagccagaattgaaggagaagcttgacctggacattgagaggaaagataggagcatggaagagatggctaatgaggccaatgagta

SEQ ID NO: 64464 - DNA, 152 bp, Zea mays
cctgcatgcagatggatgaagtgctagcagcagtagctgagaccataaagaactttgcggtcatctacccccttgacatcacagaggtccctgatttcaacaccatgtatgagcggtacgacccttcgacagtgatgttcttcttccggaac

SEQ ID NO: 64465 - DNA, 284 bp, Zea mays
gttgttagattgtttaatgacgctgctcagatgtcacctgaagatgcagatgttcatgtaagtcctgggagtctaatacaacctatcaagagagtatgataaagctataacttcatttaagacagcagtacagctcaaaccacaggactactcactctggaacaagcttggtgcaacccaagcaaacagcatccagagtgctgatgcaatattggcgtatcagcaggcactagacttgaaacccaactacgtgcgtgcatgggcgaacatgggaatcagctatg

SEQ ID NO: 64466 - DNA, 150 bp, Zea mays
gccctcgggaaattcaacgagggtccattctcccttggtcagttcagtctggtggacatgtcgtatgtaccattcatcgagaggagtcagatattctattccaacataaagaactatgatattacaaagggcagacccaaccttcagaag

SEQ ID NO: 64467 - DNA, 284 bp, Zea mays
atttggtccttggttgggtggaaaccaggccgggactcgggagcatttgctttttcctgggcgtggtagcttttgatacggtgaagtcactgactcgtggagtgatgttgctcaataatcattaatcagaaccttgtcctaatacagccgctgagacatcagctaaggcgaataagggaaggatgagtcatttgcaccatgtttgaccaccaattgttaggtggtccatatattttgtactaattgcgagactttgtgctatggatctcaactgtatacttgct

SEQ ID NO: 64468 - DNA, 155 bp, Zea mays
gtgactcttatccgccaagttgctgagaaagtgttcgccaatgtgggcaagactatcgaggtacaaagttggaacaatgattgagatccccagggcagctctcgtggctgatgagatagcggacaggctgaattcttctccttcggaacgaacga

SEQ ID NO: 64469 - DNA, 137 bp, Zea mays
gcggaatgtaagactggtgctgagaggaaggaatctgctgagagcacaatggtggcctataaggctgctcaggacattgctctggctgcactgtcacctacccatccgataaggctgggacttgctcttaatttttc

SEQ ID NO: 64470 - DNA, 275 bp, Zea mays
ggatcttctatctggaagtggaatgttcaccaaacaggagatcgatgagattgtggagatcggttatctcaatgggctctttgtgcttgcacgatcaattggcctgatcgggcataccttcgaccagaagaggctcaagcagccactctaccgtcacccatgggaggatgtactttacaccaagtgagaaagccattctttgcaaggcataataaagtattattatcgcctagagcttccagttgcctgtacacttcattaaatcgagcacttgc

SEQ ID NO: 64471 - DNA, 264 bp, Zea mays
attatgcactagatttcttgagaaccgatgtagatgtttccccgattgtgcctgctcctcaagaatttctttgatgatgcactaaatgcaacagtgagtgagttgaacttcaagacaatagttgatggcctaggtgctgttctctatcagtacccatttaatgtaccagcatactatgcattgatactgcgatttggtgccgtgctggaaggtttagcactctatgctgaccctgattttaaggctcttgctgcatcatatcct

SEQ ID NO: 64472 - DNA, 303 bp, Zea mays
gaatcgtctcgctcgtggctgccctactcgtgctgcttgccctcgccgccgtttcctccacgcgcacgcacaaaaggagtccgtggctgacaacgccgggatgttggcaggcggcatcaaggacgtgccggcgaacgagaacgacctccagctccaggagctcgcgcgcttcgccgtcaatgagcacaaccaaaaggccaatgctcttctggggttcgagaagcttgtgaaggccaagacacaagttgttgctggcacgatgtactatctcactattgaagtgaaggatggcgtagtcaagaa

SEQ ID NO: 64473 - DNA, 293 bp, Zea mays
cgcccgggaagaaagccgcgcccgccaagaagcccgctgctgcggccaagaaggccctgccaagaaggccgccccagccaagaaggctcccaccccgtcgcggaaggtgccgtccgcgtaaggcgaagaagtagagcggtggtcttggcaggaatctagggtttcatgctccttcgattttagatgtttactcgttttagctctagttgtgggtggtgtgcggggtgggttactaggttgtaaatttgatgccggaggctggggtacacatgggcattctgtaccagcggtgg

SEQ ID NO: 64474 - DNA, 113 bp, Zea mays
tgggatattggtgagaagcagtttagcaaagttgcatctggtgatacaaaaccgaattcttggacattacctggatattggtgatgttgtggtcaatatataccttcgacaca

SEQ ID NO: 64475 - DNA, 294 bp, Zea mays
aattactctctgcaaggcccgagagcgcgagcacttttgtcaaggtggactccatctttggcccgggaacaaaaatggtctacaagcatttggccacactatactatgtttttgtctttgatagctctgagaacgagcttgccatgctcgacctcgtacaagtgtttgttgaaacattggacagatgcttcaacaatgtatgcgagcttgacatcgtatttaacttcaacaagctgcacaccattttggatgagatgatatcggggggacaggtgatcgaaacaagttcagaac

SEQ ID NO: 64476 - DNA, 283 bp, Zea mays
ggaggggagaggggagcgcgctcagggtcagggaggcgaagatgatcgaggtggtgctgaacgaccgcctggggaagaaggtgcgggtgaagtgcaacgaggacgacaccatcggcgacctcaagaagctggtggcggcgcagacggggacgcgccccgagaagatccgcatccagaagtggtacaacatctacaaggaccacatcacgctcaaggactacgagatccacgacgggatggggctcgagctctactacaactaggcgccctgaccccaaccgtg

SEQ ID NO: 64477 - DNA, 84 bp, Zea mays
caaggtcatcctcgccagccacctgggtcgtccaaaaggtgtcaccccaaagtacagcttgagagctcttgttcaacacaacat
